United States Patent Application Publication US 2018/0305689 A1 - sequence listing, part 136

SEQ ID NO: 1887234 - DNA, 4001 bp, Homo sapiens
gaagaataatttgaagtaacagccaaggaagtgactcaaaactgaatgctatataacaactaatttgggagaacaggcagtcagtccaagagcactcactctcaccaccggcaggcatgtgcgcgttgggggagcgtaacggggcactatcacaccattttggtgcaggctggtggagatccaggatgactcattttaaggagacagtatctctgagggagcagtttctggtaagaggccagtaaacaactatcagaaagcactccctctggatagaaacatttcaagtcaaatcttatggtttacttgagttctgtagtcaagtccactcagcagacaataaccacttgataagctacccttttcactgttttacttgcaggctgtaaactactggggccagtttttaggctcattaaatctcacccagaatacagcttctttggtgtccagcaaaaacacaaccttaaatacaaagagtttgcacacacctcccctttcttttttttttttttttttttgagacggagtctcgctctgtcacccaggcaggactgcggactgcagtggcgcaatctcggctcactgcaagctccgcttcccgggttcacgccattctcctgcctcagcctcccgagtagctgggactacaggcgcccgccaccgcgcccggctaatttttttgtatttttagtagagacggggtttcaccttgttagccaggatggtctcgatctcctgacctcatgatccacccgcctcggcctcccaaagtgctgggattacaggcgtgagccaccgcgcccggcccacacctcccctttcaacagaaaagaaaggcaatctgtgtgcacttcaagcctggcattccagtgggaacaaagctgggcaccccactctccagcaccacttggtttctttcttgctcacatgccagtcgtgacattcagacaggatctaagctacaaacttaggagacctccctggcgtccttaacaaagcacatagaaaccaaacagccgtggtttcccctaaatgtcaggaccctggagcagaggcaaggtcagagtcattaagcattctcattgccacaagctggcatacatcctacattccaatctgtttctaagagcgcattcattttcttgaaatatgtaacaagcactttcattccacaataagggcataaatcaaatcctgggtacttgtgcattcctgccacctcatacagcctgtatcctcagagccataatcaaaggactagagaaagcaggacaatcactcatttgcttttcacgttttagaggaatgatgctctagactgggctctcagcaggatatgctgagggaaaaaaaaaggggaaaaaaaacaaaaacaaaaaaaaaaccatggagccaaacccttaagcctcagaatagattatttccctcagtccagattttcagacagggataactaaccatcataggcttgtgggacttcttacggatacgaaagatgtaaacaaatcttacaaacaggaaagcaatcatttcacttgtttccggcaaagcagttcagtttcgtctcttattgcagacacctagcaacaaaatgctactaaagtctccctgcccccattgctttaagtccagagcaggggaagcaaaaaagattaccactcccccaaaccaaaccaagcctgtttaccagttcgtctacttactcacattaaagacatggcactttgggtccgggtccaggtcctggttcagagcagctgccacaccgtggctactagaggatccttttccggctttggaaactgaggctgactgcacctgggaagagaaattaagaaaaaaaactacttaagaagatacacacagagtaactctcaagtaacttaaaatttctgtaaggcaaacttgggaaactgagtttcagatattcaaattccacacagaaaggcctttctttgccttcagacagggataacttgaaatcatcatggactcagctcccaccaacctgctggaccatagcactaacagccacagcacacgcaaactatttttttctcatcaaattgttcacttccctcacgcaaattctttgtggagcaagcatgtgactttctttttttgaaaagtagtttcactcttgttgcccaggctggagtgcaatgacgcgatctcggctcactgcaacctccacctcccgggttcaagtgattctcctgcctcagactcccaagtaagttgggattacaagcatgcgccaccacgccaggctaattttgtatttttagtagagacggagtttctccatgttggtcaggctggtctcgaactcccgacctcagatgatccacctgcctcggcctccccaagtgctgggattacaggtgtcagccaccgtgccctccaggctttcagttttttaagacagaggattagagatttgcccaagagctacttaaaaatagccagcactataatctcactataataaaatccttgcactaaaaacagatcagatcatctacttcaagcttgtctaacccacagcctgcatgtggctcaggacggctttgaatgcagcccaacacaaatttgtaaactttaggacggctttgaatgcagcccaacaaatttgtaaactttctcaaaatattatgagattttttttttttagctcatcagctatcattagtgttagtttattttatgtgtgacccaagacaattcttccaatgtggcacagggaagccaaaagattgacacccctgatctagttactacccacttgctcttggactggccacatgattcctggactccactccagagccattctcacccatgcctggaggtgaggcccaggaatgtgtatattttaacactttgtaggtggctctgatgtaataatcaagtttggaaatcactaaccctgtttcacaaatgaagaaacaagactctggtgagaaaataggctgagactagagctcagatctctagttagcctaacgtgtggtatacaggagtttctcaacctcagctctactgacatactgggtggatcaattattcctcatgcaggctgttgtatgcattgtaggatatttatttatttatttatttacagagtttcgctcttgtcgcctagactggagtacaatggtgccatctcagctcactgcaaacctctgcctcctgggttcaagagattctcctgccttagtctcccaagtagctaggattacaggtgcccgccaccacacccagctaatttttgtatttttagtagagacaaggtttcaccatgttggccaggctggtctcgaactcgaactcctgacctcaggtgatccatctgcttcggcctcccaaagtgctgggattacaggcatgagataaatatccaggcccagccagggtatttattaatagtagcattcaccagatgccaggaacaccatcgctccccagttcagaactgccagtctaactcagtaactgcttgtataactttgggcaaaagaactctttacgcctcacttttacttactcagcagcagagtggggaaaaaaatttacctcatatggggttgatattagaaatactatttatggccaggcaaggtggctcacgcctgtaatcccagcacagatcaccttaagtcgggagttcaagaccagcctgaccaacatggagaaaccccgtctctactaaaaacacaaaattagctaggcgtggtggtgcatgcctgtaatcccagctacttgggaggctgaggcaggagactagcttgaacccaggaggcagaggttgcgctgagccaagatcgcaccatcgcactccagcctgggcaacaagagcaaaactctgtctcaaaacaaacaaacaaaaaatgctctttatgagagtgcttggcaaggaccctatcaaaaggaattccatactacttccattatctgggcaatcgtaaccctggaagaccaacacatccccaaaacta

SEQ ID NO: 1887235 - DNA, 4001 bp, Homo sapiens
tcaggctggtctcgaactcccgacctcagatgatccacctgcctcggcctccccaagtgctgggattacaggtgtcagccaccgtgccctccaggctttcagttttttaagacagaggattagagatttgcccaagagctacttaaaaatagccagcactataatctcactataataaaatccttgcactaaaaacagatcagatcatctacttcaagcttgtctaacccacagcctgcatgtggctcaggacggctttgaatgcagcccaacacaaatttgtaaactttaggacggctttgaatgcagcccaacaaatttgtaaactttctcaaaatattatgagattttttttttttagctcatcagctatcattagtgttagtttattttatgtgtgacccaagacaattcttccaatgtggcacagggaagccaaaagattgacacccctgatctagttactacccacttgctcttggactggccacatgattcctggactccactccagagccattctcacccatgcctggaggtgaggcccaggaatgtgtatattttaacactttgtaggtggctctgatgtaataatcaagtttggaaatcactaaccctgtttcacaaatgaagaaacaagactctggtgagaaaataggctgagactagagctcagatctctagttagcctaacgtgtggtatacaggagtttctcaacctcagctctactgacatactgggtggatcaattattcctcatgcaggctgttgtatgcattgtaggatatttatttatttatttatttacagagtttcgctcttgtcgcctagactggagtacaatggtgccatctcagctcactgcaaacctctgcctcctgggttcaagagattctcctgccttagtctcccaagtagctaggattacaggtgcccgccaccacacccagctaatttttgtatttttagtagagacaaggtttcaccatgttggccaggctggtctcgaactcgaactcctgacctcaggtgatccatctgcttcggcctcccaaagtgctgggattacaggcatgagataaatatccaggcccagccagggtatttattaatagtagcattcaccagatgccaggaacaccatcgctccccagttcagaactgccagtctaactcagtaactgcttgtataactttgggcaaaagaactctttacgcctcacttttacttactcagcagcagagtggggaaaaaaatttacctcatatggggttgatattagaaatactatttatggccaggcaaggtggctcacgcctgtaatcccagcacagatcaccttaagtcgggagttcaagaccagcctgaccaacatggagaaaccccgtctctactaaaaacacaaaattagctaggcgtggtggtgcatgcctgtaatcccagctacttgggaggctgaggcaggagactagcttgaacccaggaggcagaggttgcgctgagccaagatcgcaccatcgcactccagcctgggcaacaagagcaaaactctgtctcaaaacaaacaaacaaaaaatgctctttatgagagtgcttggcaaggaccctatcaaaaggaattccatactacttccattatctgggcaatcgtaaccctggaagaccaacacatccccaaaactaacaaaccaatacttaaagaggaccataagcatattcaagtctatgaaagtactaaaaatctcaccatttacagaaatttcatcatgaagatccttacacttaacaccttaaggtgatgagttttcacatgactgttttcaaggccacagccaccacctttaatctaaaagagaaggataacaggcttcattctaacagaaaccaccttaaggtttattctccagatttgtattaaacagctgagcctcagcaagtcagacctcctcacaaaagataccatttcagacagggataactttaaatcatcctcagctcagccaataacaaagattcctaaatcctagcgatccaaaattcatttgccatgtctctttcatccctgcatgccctaacgaggatccacgctggttacaatgacacctagtggccccaaatcacacgggcaaagacgctactcatttttatcattaaaataattagcattctgaattttgagtaatttcttaccatagctggcttgtatgtcaacacgtattctcatacttgaacttcagaataaagcaggaggtgaatgtatgtgatggcaccaactgtgctttctcatttctagtgaccactcaggccctgcctgcacccactcttactcatgttaagggctccatctattactctgatccttcaacctggagctctgcttttcaccgtctctgcagatgccaaacaaagaaaggcctctgggggaggaaaaaaggctcgttgttaaaactacggctttccagaagtttacaatcctattgactcctatctgtaaagctaaatatgaactaccgattggggccgtcctcaagacactccaagcggaatcacgtcttcacacgttaacactcctgatgctgaattaagaaccaccatcgtcagagtctgcccgtgcgcgggcaccgaagacccctgggcatgacgctcagcacacgcgcggcggaggcgcacggggctgcccaggttgttaggcgctctcccccgcagaagccggccctatgacgccgaggacgggcttgagctctctcccttcacatagtaacattttctcaacgtttggaaagcattttctcatccagtacttttaaccctcctaaccaccctatgagggagaaaccgagattatcgtcaccacttcgtctctgaggaagggaagccaagtatgttagtgtcgtgtcaaggaagaccccgttttcccacccaggcagccttaccatcatcactaaaggcctgagactgctcgccgtgctcaacaccgactggagtggccatgtcttccagccacgcggccgacctcgaaaagaacgcgagaccgcccctgcgcgcaagtcttctcggcaatctctccggaactctcgcgatgttgagaaagggctggtgggaaatgtagttcaaaactacggcggctgggggctggccgcgtcctcagcgcgaccctggagctgggggtaagatggtggccgccaccaggggcagtggagggtccggagtgggaaaccaggcctgtgaagaaccacggctgtcagaaaacgaagctggaggttcacttctgccagaaagtcattgagcttcaacacagtttgtccctggtcgagactggggaagcacagaaagttcgagggggcagggacagatgaggaaaccggggcttggccgagtatctttgttaattgctctgcggattttatttgggggaggataggggcatttggggtggttcgctgggttagtgaagaggagagattccgagggaatcgttcaacctcctgctcaggtgtttttaagtttggggcgaggccggtgaagccgaggcgcgggcggcaaggagcgctggagagcgacggggctcggcctccgcggctgcccaggggcccggggcattccgagaagagaaaaaaaggcaagtgtcacgagctgaattacgaaaagaacggagaatgatgtaacacccactgctcttctgagtgttatttttcaggcaaacaccttggcttcatttttttttgtttctgggtttttttggtttgtttttgagataaggtttcaccctggcacgcaggctggagtgcagtggtgcaatcataacttattgtagcctggacctcccgggctcaagtgatcctcccgcctcagcctcctgagtggccgggacgacaggcgagcgccaccacgcccagctgattatttttattttgcagagatgaggtctcactatgttgcccgggttggtctcaaactcctggcctcaagcagtcctcctgttttggcctcccaaagtgc

SEQ ID NO: 1887236 - DNA, 4001 bp, Homo sapiens
atggctcaatgacagagactagctcgtaaactccggggcgtttctgggctgttcgctcctgcttggcatgtcgcgagaaaggttttcgcctcctgtttcagcggtgacggctcttgggttttctcggggtggctttttaattttagtcttggcgcgaggcgggggatgctgtgtggcacctcctattgtctctttttgcgttttctcccattctcgctccctcttttgtcgccgtttcccgcccgccactcccacccccagacggggtctccgggtctcttgttctgtctgccggccccggctggattgcagtggcgcgatctcggctcctagcaacatctgcctcccgggctcaagcgagtctcccgcctaagccctcccgagtagccggggcttaaaggcgcacacgccactccaggctttttttttttttttttttttttttttggcagaaacggggtgtcagcatgttagccaggctggtctccaacgcgtgatctcaggtgatccgccggcctcggcctcccgaagttctgggattacaggcgtgagccactgcacccggcccttctatttttttaaatagcgacggggtttcaccatgttggccaggctgctcctgaacacctgagttcaggtgatccgcccgcctcggcctcccgaagttctgcgattacaggcgtgccacccgcacccggccctaaaagtactttttatagagatggggtctcactctgttgcccagactggtctcaaactgcttatctcaagtgactgactgtctgcctcagctgcccaagtagcagggattacagacacaagccacagccgctggctctattcaggaacatcttagttccaagttttggcaattatggataaagctgctataaacaggtgtgcaggtttttgtgtggacattttcaactcatttgggtagacaccaagaggcacgagttctgatcataccgaaagtgtttagtttcagaagaagctgcttttcttgggctccataacaaaatacacagactttgtggcttaaataacacaaatttatttcttacagttctcagtcgggcgcggtggctcactcctgtaatcccagaacttcgggaggccgaggcgggcggatcacctgaactcaggtgttcaggagcagcctggccaacatggtgaaaccccgtcgctatttaaaaaaatagaagggccgggtgcagtggctcacgcctgtaatcccagaacttcgggaggccgaggcgggcggatcacctgagatcacgcgttggagaccagcctggctaacatgctgacaccccgtttctgccaaaaaaaaaaaaaaaaaaaaaaaaaaagcctggagtggcgtgtgcgcctttaagccccggctactcgggagggcttaggcgggagactcgcttgagcccgggaggcagatgttgctaggagccgagatcgcgccactgcaatccagccggggccggcagacagaacaagagacccggagaccccgtctgggggtgggagtggcgggcgggaaacggcgacaaaagagggagcgagaatgggagaaaacgcaaaaagagacaataggaggtgccacacagcatcccccgcctcgcgccaagactaaaattaaaaagccaccccgagaaaacccaagagccgtcaccgctgaaacaggaggcgaaaacctttctcgcgacatgccaagcaggagcgaacagcccagaaacgccccggagtttacgagctagtctctgtcattgagccatcaagaaggaaaaaccactcagaccgcgttctctccctctcactccccaatacggagagaagaacgatcatcaatggctgacggcagttgcagccaagcaacgccagaaagccggcttcacgctcaggagaaaacgctacctctcttcctcgtggttttcggtgctctacacgttcagagaaacttctctagtaacacactatagaaatgatccctgaaagtatagtcttaacggcctccttgcacacctctgctaggtctacatctgccgcaaacttttaactgatggcgagaaactttcgctagttccgatgccattaggaaacaaataggaaaatagtttggcaataacagcttgtcgaatattatcacttgacaaattttaacgttttaggtggaaaggtaattttaaaagttgttttaagaggtttaaaaccgggcatgcttaattagcataatactgaatgacagccaatcacaaactgaatttttaaaaccggaagtgtttgctcctggtgtggtgcgcccgcctgtaatccgggaatcccagcgttttgcgagcccacgcccaggcccaggagggaggatcctttgttctatgagttcgacaccagcccaggcaatatagcggaatcccgtctctaccaagggggcgggaatcaacaatgagctgggcgtgatggcaccgtctgtagtcccagctactcgggaggctgaagcgggatgatcgtttgagtcagggaagctggctgagttcaaagctgcagtgagctctgatcagttaccccactgcaccccagcctgggagacagagtgagatcttgactcttaaaaacaattttttttttaggggggatggtattaaatagatacaaaatttaccattttaaccatttttcacatatacaattcagtggcattaagtacattcgtgtagccattggcatgtaaccatcaccattatttatctccagaactttttcgacatcccaaactgaaactctacccgtaaaacaaacttccctttcctccctccgcccagacccctttaaccactattctactttccgtctctatgaatttgattcttgtaggtatctctataagtggaaacatgcaatattgtccttttgtatctggcttatttcacttagaatgacgttttcaaggttcattcacgttgtaacatgttgcagaatttcactcctttttcaggctggagtgcaatgatgcatgatgtgacagctcactgcagccttgacccccagggctcgggtgatcctcccacgtcagcctcctgagtagctgggatcgtaggcacatgccatcacgctccgctaattttttgtattttttgtagggagggggtttcaccacattgcccaggatggtcttgaactcctgggatcaagggatccacccgcctcggccgctcaaagtgctgggactacaggcgtgagccaccacgcccagcggttttcttaattacatttttgaattgttccttgccagtgcataaaaacacaactggaccgggcacggtggctcacgcctgtcatcctagcactttgggaggccgaggcgggtggatcaccaggtcaggagatcaagaccatcctggccaacgtggtgaaacctcgtctctactaaaaatacaaaaactggccgggcgtggtggcctgcgcctgtaatcccagctactggggaggctgaggcaggagaattgcttgaacccgggaggcagaggctgcagtgagccaagatcacgccattgcactccggcctgggcgataagagcataactcctcaaaaaaacaaacaggaaaccacacaactggtttttgtgagttgatcttgtgtcctgaaactttgctgcatttgcttattagctctagtaattattgtgcgtgtattctttgggattttccctatttaaagcgatggttttatttcttatttctcaatttggtgccttttcttacctaaaggctctggctacaacttctagcaaaatgttgactaggccaggcgcggtggctcacatctgtaattccagcattttgggaggccgaggcaggcagataacaaggtcaggagctcaagagcatcctggccaacatggtgaaaccctgtctctactaagaatacaaaaattagccaggcgtggcagtgcgcacctgtagtcccagctactggggaggctgaggcaggagaattgcttgaaccccgg

SEQ ID NO: 1887237 - DNA, 4001 bp, Homo sapiens
tcttgatggctcaatgacagagactagctcgtaaactccggggcgtttctgggctgttcgctcctgcttggcagtgtagcgagaaaggttttcgcctcctgtttcagcggtgacggctcttgggttttctcggggtggctttttaattttagtcttggcgcgaggcgggggatgctgtgtggcacctcctattgtctctttttgcgttttctcccattctcgctccctcttttgtcgccgtttcccgcccgccactcccacccccagacggggtctccgggtctcttgttctgtctgccgccccggctggagtgcagtggcgcgatctcggctcctagcaacatctgcctcccgggctcaagcgagtctcccgcctaagccctcccgagtagccggggcttaaaggcgcacacgccactccaggctttttttttttttttttttggcagaaacggggtgtcagcatgttagccaggctggtctccaacgcgtgatctcaggtgatccgccggcctcggcctcccgaagttctgggattacaggcgtgagccactgcacccggcccttctatttttttaaatagcgacggggtttcaccatgttggccaggctgctcctgaacacctgagttcaggtgatccgcccgcctcggcctcccgaagttctgcgattacaggcgtgccacccgcacccggccctaaaagtactttttatagagatggggtctcactctgttgcccagactggtctcaaactgcttatctcaagtgactgactgtctgcctcagctgcccaagtagcagggattacagacacaagccacagccgctggctctattcaggaacatcttagttccaagttttggcaattatggataaagctgctataaacaggtgtgcaggtttttgtgtggacattttcaactcatttgggtagacaccaagaggcacgagttctgatcataccgaaagtgtttagtttcagaagaagctgcttttcttgggctccataacaaaatacacagactttgtggcttaaataacacaaatttatttcttacagttctcagtcgggcgcggtggctcactcctgtaatcccagaacttcgggaggccgaggcgggcggatcacctgaactcaggtgttcaggagcagcctggccaacatggtgaaaccccgtcgctatttaaaaaaatagaagggccgggtgcagtggctcacgcctgtaatcccagaacttcgggaggccgaggcgggcggatcacctgagatcacgcgttggagaccagcctggctaacatgctgacaccccgtttctgccaaaaaaaaaaaaaaaaaaaaaaaaaaaagcctggagtggcgtgtgcgcctttaagccccggctactcgggagggcttaggcgggagactcgcttgagcccgggaggcagatgttgctaggagccgagatcgcgccactgcactccagccggggccggcagacagaacaagagacccggagaccccgtctgggggtgggagtggcgggcgggaaacggcgacaaaagagggagcgagaatgggagaaaacgcaaaaagagacaataggaggtgccacacagcatcccccgcctcgcgccaagactaaaattaaaaagccaccccgaggaaaacccaaaagccgtcaccgctgaaacaggaggcgaaaacctttctcgcgacattgccaagcaggagcgaacagcccggaaacggcccggagtttacgagctagtctctgtcattgagccatcaagaaggaaaaaccactcagaccgcgttctctccctctcactccccaatacggagagaagaacgatcatcaatggctgacggcagttgcagccaagcaacgccagaaagccggcttcacgctcaggagaaaacgctacctctcttcctcggggttttcggtgctctacacgttcagagaaacttctctagtaacacactatagaaatgatccctgaaagtatagtcttaatggcctcctcgcacacctctgctaggtctacatctgccgcaaacttttaactgatggcgagaaactttcgctagttccgatgccattaggaaacaaataggaaaatagtttggcaataacagcttgtcgaatattatcacttgacaaattttaacgttttaggtggaaaggtaattttaaaaattgttttaagaggtttaaaaccgggcatgcttaattagcataatactgaatgacagccaatcacaaactgaatttttaaaaccggaagtgtttgctcctggtgtggtgcgcccgcctgtaatccgggaatcccagcgttttgcgagcccacgcccaggcccaggagggaggatcctttgttctatgagttcgacaccagcccaggcaatatagcggaatcccgtctctaccaagggggcgggaatcaacaatgagctgggcgtgatggcaccgtctgtagtcccagctactcgggaggctgaagcgggatgatcgtttgagtcagggaagctggctgagttcaaagctgcagtgagctctgatcagttaccccactgcaccccagcctgggagacagagtgagatcttgactcttaaaaacaattttttttttaggggggatggtattaaatagatacaaaatttaccattttaaccatttttcacatatacaattcagtggcattaagtacattcgtgtagccattggcatgtaaccatcaccattatttatctccagaactttttcgacatcccaaactgaaactctacccgtaaaacaaacttccctttcctccctccgcccagacccctttaaccactattctactttccgtctctatgaatttgattcttgtaggtatctctataagtggaaacatgcaatattgtccttttgtatctggcttatttcacttagaatgacgttttcaaggttcattcacgttgtaacatgttgcagaatttcactcctttttcaggctggagtgcaatgatgcatgatgtgacagctcactgcagccttgacccccagggctcgggtgatcctcccacgtcagcctcctgagtagctgggatcgtaggcacatgccatcacgctccgctaattttttgtattttttgtagggagggggtttcaccacattgcccaggatggtcttgaactcctgggatcaagggatccacccgcctcggccgctcaaagtgctgggactacaggcgtgagccaccatgcccagcggttttcttaattacatttttgaattgttccttgccagtgcataaaaacacaactggaccgggcacggtggctcacgcctgtcatcctagcactttgggaggccgaggcgggtggatcaccaggtcaggagatcaagaccatcctggccaacgtggtgaaacctcgtctctactaaaaatacaaaaactggccgggcgtggtggcctgcgcctgtaatcccagctactggggaggctgaggcaggagaattgcttgaacccgggaggcagaggctgcagtgagccaagatcacgccattgcactccggcctgggcgataagagcataactcctcaaaaaaacaaacaggaaaccacacaactggtttttgtgagttgatcttgtgtcctgaaactttgctgcatttgcttattagctctagtaattattgtgcgtgtattctttgggattttccctatttaaagcgatggttttatttcttatttctcaatttggtgccttttcttacctaaaggctctggctacaacttctagcaaaatgttgactaggccaggcgcggtggctcacatctgtaattccagcattttgggaggccgaggcaggcagataacaaggtcaggagctcaagagcatcctggccaacatggtgaaaccctgtctctactaagaatacaaaaattagccaggcgtggcagtgcgcacctgtagtcccagctactggggaggctgaggcaggagaattgcttgaaccccgg

SEQ ID NO: 1887238 - DNA, 4001 bp, Homo sapiens
cttgatggctcaatgacagagactagctcgtaaactccgggccgtttccgggctgttcgctcctgcttggcaatgtcgcgagaaaggttttcgcctcctgtttcagcggtgacggcttttgggttttcctcggggtggctttttaattttagtcttggcgcgaggcgggggatgctgtgtggcacctcctattgtctctttttgcgttttctcccattctcgctccctcttttgtcgccgtttcccgcccgccactcccacccccagacggggtctccgggtctcttgttctgtctgccggccccggctggagtgcagtggcgcgatctcggctcctagcaacatctgcctcccgggctcaagcgagtctcccgcctaagccctcccgagtagccggggcttaaaggcgcacacgccactccaggcttttttttttttttttttttttttttttggcagaaacggggtgtcagcatgttagccaggctggtctccaacgcgtgatctcaggtgatccgcccgcctcggcctcccgaagttctgggattacaggcgtgagccactgcacccggcccttctatttttttaaatagcgacggggtttcaccatgttggccaggctgctcctgaacacctgagttcaggtgatccgcccgcctcggcctcccgaagttctgggattacaggagtgagccaccgcgcccgactgagaactgtaagaaataaatttgtgttatttaagccacaaagtctgtgtattttgttatggagcccaagaaaagcagcttcttctgaaactaaacactttcggtatgatcagaactcgtgcctcttggtgtctacccaaatgagttgaaaatgtccacacaaaaacctgcacacctgtttatagcagctttatccataattgccaaaacttggaactaagatgttcctgaatagagccagcggctgtggcttgtgtctgtaatccctgctacttgggcagctgaggcagacagtcagtcacttgagataagcagtttgagaccagtctgggcaacagagtgagaccccatctctataaaaagtacttttagggccgggtgcgggtggcacgcctgtaatcgcagaacttcgggaggccgaggcgggcggatcacctgaactcaggtgttcaggagcagcctggccaacatggtgaaaccccgtcgctatttaaaaaaatagaagggccgggtgcagtggctcacgcctgtaatcccagaacttcgggaggccgaggccggcggatcacctgagatcacgcgttggagaccagcctggctaacatgctgacaccccgtttctgccaaaaaaaaaaaaaaaaaaagcctggagtggcgtgtgcgcctttaagccccggctactcgggagggcttaggcgggagactcgcttgagcccgggaggcagatgttgctaggagccgagatcgcgccactgcactccagccggggcggcagacagaacaagagacccggagaccccgtctgggggtgggagtggcgggcgggaaacggcgacaaaagagggagcgagaatgggagaaaacgcaaaaagagacaataggaggtgccacacagcatcccccgcctcgcgccaagactaaaattaaaaagccaccccgagaaaacccaagagccgtcaccgctgaaacaggaggcgaaaacctttctcgctacactgccaagcaggagcgaacagcccagaaacgccccggagtttacgagctagtctctgtcattgagccatcaagaaggaaaaaccactcagaccgcgttctctccctctcactccccaatacggagagaagaacgatcatcaatggctgacggcagttgcagccaagcaacgccagaaagccggcttcacgctcaggagaaaacgctacctctcttcctcggggttttcggtgctctacacgttcagagaaacttctctagtaacacactatagaaatgatccctgaaagtatagtcttaatggcctcctcgcacacctctgctaggtctacatctgccgcaaacttttaactgatggcgagaaactttcgctagttccgatgccattaggaaacaaataggaaaatagtttggcaataacagcttgtcgaatattatcacttgacaaattttaacgttttaggtggaaaggtaattttaaaaattgttttaagaggtttaaaaccgggcatgcttaattagcataatactgaatgacagccaatcacaaactgaatttttaaaaccggaagtgtttgctcctggtgtggtgcgcccgcctgtaatccgggaatcccagcgttttgcgagcccacgcccaggcccaggagggaggatcctttgttctatgagttcgacaccagcccaggcaatatagcggaatcccgtctctaccaagggggggggggcgggggggcgggaatcaacaatgagttgggcgtgatggcaccgtctgtagtcccagctactcgggaggctgaagcgggatgatcgtttgagtcagggaagctggctgagttcaaagctgcagtgagctctgatcagttaccccactgcaccccagcctgggagacagagtgagatcttgactcttaaaaacaattttttttttaggggggatggtattaaatagatacaaaatttaccattttaaccatttttcacatatacaattcagtggcattaagtacattcgtgtagccattggcatgtaaccatcaccattatttatctccagaactttttcgacatcccaaactgaaactctacccgtaaaacaaacttccctttcctccctccgcccagacccctttaaccactattctactttccgtctctatgaatttgattcttgtaggtatctctataagtggaaacatgcaatattgtccttttgtatctggcttatttcacttagaatgacgttttcaaggttcattcacgttgtaacatgttgcagaatttcactcctttttcaggctggagtgcaatgatgcatgatgtgacagctcactgcagccttgacccccagggctcgggtgatcctcccacgtcagcctcctgagtagctgggatcgtaggcacatgccatcacgctccgctaattttttgtattttttgtagggagggggtttcaccacattgcccaggatggtcttgaactcctgggatcaagggatccacccgcctcggccgctcaaagtgctgggactacaggcgtgagccaccacgcccagcggttttcttaattacatttttgaattgttccttgccagtgcataaaaacacaactggaccgggcacggtggctcacgcctgtcatcctagcactttgggaggccgaggcgggtggatcaccaggtcaggagatcaagaccatcctggccaacgtggtgaaacctcgtctctactaaaaatacaaaaactggccgggcgtggtggcctgcgcctgtaatcccagctactggggaggctgaggcaggagaattgcttgaacccgggaggcagaggctgcagtgagccaagatcacgccattgcactccggcctgggcgataagagcataactcctcaaaaaaacaaacaggaaaccacacaactggtttttgtgagttgatcttgtgtcctgaaactttgctgcatttgcttattagctctagtaattattgtgcgtgtattctttgggattttccctatttaaagcgatggttttatttcttatttctcaatttggtgccttttcttacctaaaggctctggctacaacttctagcaaaatgttgactaggccaggcgcggtggctcacatctgtaattccagcattttgggaggccgaggcaggcagataacaaggtcaggagctcaagagcatcctggccaacatggtgaaaccctgtctctactaagaatacaaaaattagccaggcgtggcagtgcgcacctgtagtcccagctactggggaggctgaggcaggagaatt

SEQ ID NO: 1887239 - DNA, 4001 bp, Homo sapiens; identical to SEQ ID NO: 1887237

SEQ ID NO: 1887240 - DNA, 4001 bp, Homo sapiens; identical to SEQ ID NO: 1887238

SEQ ID NO: 1887241 - DNA, 4001 bp, Homo sapiens
tggctcaatgacagagactagctcgtaaactccggggcgtttctgggctgttcgctcctgcttggcatgtcgcgagaaaggttttcgcctcctgtttcagcggtgacggctcttgggttttctcggggtggctttttaattttagtcttggcgcgaggcgggggatgctgtgtggcacctcctattgtctctttttgcgttttctcccattctcgctccctcttttgtcgccgtttcccgcccgccactcccacccccagacggggtctccgggtctcttgttctgtctgccggccccggctggattgcagtggcgcgatctcggctcctagcaacatctgcctcccgggctcaagcgagtctcccgcctaagccctcccgagtagccggggcttaaaggcgcacacgccactccaggctttttttttttttttttttttttttttggcagaaacggggtgtcagcatgttagccaggctggtctccaacgcgtgatctcaggtgatccgcccgcctcggcctcccgaagttctgggattacaggcgtgagccactgcacccggcccttctatttttttaaatagcgacggggtttcaccatgttggccaggctgctcctgaacacctgagttcaggtgatccgcccgcctcggcctcccgaagttctgggattacaggagtgagccaccgcgcccgactgagaactgtaagaaataaatttgtgttatttaagccacaaagtctgtgtattttgttatggagcccaagaaaagcagcttcttctgaaactaaacactttcggtatgatcagaactcgtgcctcttggtgtctacccaaatgagttgaaaatgtccacacaaaaacctgcacacctgtttatagcagctttatccataattgccaaaacttggaactaagatgttcctgaatagagccagcggctgtggcttgtgtctgtaatccctgctacttgggcagctgaggcagacagtcagtcacttgagataagcagtttgagaccagtctgggcaacagagtgagaccccatctctataaaaagtacttttagggccgggtgcgggtggcacgcctgtaatcgcagaacttcgggaggccgaggcgggcggatcacctgaactcaggtgttcaggagcagcctggccaacatggtgaaaccccgtcgctatttaaaaaaatagaagggccgggtgcagtggctcacgcctgtaatcccagaacttcgggaggccgaggccggcggatcacctgagatcacgcgttggagaccagcctggctaacatgctgacaccccgtttctgccaaaaaaaaaaaaaaaaaaaaaaaaaaagcctggagtggcgtgtgcgcctttaagccccggctactcgggagggcttaggcgggagactcgcttgagcccgggaggcagatgttgctaggagccgagatcgcgccactgcaatccagccggggccggcagacagaacaagagacccggagaccccgtctgggggtgggagtggcgggcgggaaacggcgacaaaagagggagcgagaatgggagaaaacgcaaaaagagacaataggaggtgccacacagcatcccccgcctcgcgccaagactaaaattaaaaagccaccccgagaaaacccaagagccgtcaccgctgaaacaggaggcgaaaacctttctcgcgacatgccaagcaggagcgaacagcccagaaacgccccggagtttacgagctagtctctgtcattgagccatcaagaaggaaaaaccactcagaccgcgttctctccctctcactccccaatacggagagaagaacgatcatcaatggctgacggcagttgcagccaagcaacgccagaaagccggcttcacgttcaggagaaaacgctacctctcttcctcgtggttttcggtgctctacacgttcagagaaacttctctagtaacacactatagaaatgatccctgaaagtatagtcttaacggcctccttgcacacctctgctaggtctacatctgccgcaaacttttaactgatggcgagaaactttcgctagttccgatgccattaggaaacaaataggaaaatagtttggcaataacagcttgtcgaatattatcacttgacaaattttaacgttttaggtggaaaggtaattttaaaagttgttttaagaggtttaaaaccgggcatgcttaattagcataatactgaatgacagccaatcacaaactgaatttttaaaaccggaagtgtttgctcctggtgtggtgcgcccgcctgtaatccgggaatcccagcgttttgcgagcccacgcccaggcccaggagggaggatcctttgttctatgagttcgacaccagcccaggcaatatagcggaatcccgtctctaccaagggggcgggaatcaacaatgagctgggcgtgatggcaccgtctgtagtcccagctactcgggaggctgaagcgggatgatcgtttgagtcagggaagctggctgagttcaaagctgcagtgagctctgatcagttaccccactgcaccccagcctgggagacagagtgagatcttgactcttaaaaacaattttttttttaggggggatggtattaaatagatacaaaatttaccattttaaccatttttcacatatacaattcagtggcattaagtacattcgtgtagccattggcatgtaaccatcaccattatttatctccagaactttttcgacatcccaaactgaaactctacccgtaaaacaaacttccctttcctccctccgcccagacccctttaaccactattctactttccgtctctatgaatttgattcttgtaggtatctctataagtggaaacatgcaatattgtccttttgtatctggcttatttcacttagaatgacgttttcaaggttcattcacgttgtaacatgttgcagaatttcactcctttttcaggctggagtgcaatgatgcatgatgtgacagctcactgcagccttgacccccagggctcgggtgatcctcccacgtcagcctcctgagtagctgggatcgtaggcacatgccatcacgctccgctaattttttgtattttttgtagggagggggtttcaccacattgcccaggatggtcttgaactcctgggatcaagggatccacccgcctcggccgctcaaagtgctgggactacaggcgtgagccaccacgcccagcggttttcttaattacatttttgaattgttccttgccagtgcataaaaacacaactggaccgggcacggtggctcacgcctgtcatcctagcactttgggaggccgaggcgggtggatcaccaggtcaggagatcaagaccatcctggccaacgtggtgaaacctcgtctctactaaaaatacaaaaactggccgggcgtggtggcctgcgcctgtaatcccagctactggggaggctgaggcaggagaattgcttgaacccgggaggcagaggctgcagtgagccaagatcacgccattgcactccggcctgggcgataagagcataactcctcaaaaaaacaaacaggaaaccacacaactggtttttgtgagttgatcttgtgtcctgaaactttgctgcatttgcttattagctctagtaattattgtgcgtgtattctttgggattttccctatttaaagcgatggttttatttcttatttctcaatttggtgccttttcttacctaaaggctctggctacaacttctagcaaaatgttgactaggccaggcgcggtggctcacatctgtaattccagcattttgggaggccgaggcaggcagataacaaggtcaggagctcaagagcatcctggccaacatggtgaaaccctgtctctactaagaatacaaaaattagccaggcgtggcagtgcgcacctgtagtcccagctactggggaggctgaggcaggagaattgcttgaaccccggg

SEQ ID NO: 1887242 - DNA, 4001 bp, Homo sapiens
agagacttctccgtttttgagtatattttattgacgtgaaatacacgcacggaaaagcgcacaaatccaaagtgtacttccgcgcatcttcataaagtgaacacacttgtagcctaagaacccaaccctaccagcgcccggcaggccctggcccccttccagtctctcctactgaacaaggtttttgagtgaaaccggcaggccggagcgtgagtttctgcttgacggggcggggtctgcgcgtgctgcccggccgtgagtgtgggggggccgtgagtgtgtacggggtggagtggcctgaaggggattagagtgcgcgcgttcgggtattaatttgccagggtttgtgtggcgctcgggattgggggttttttgggggctcgggcgtcgactgtggggcgctgcggaagggtgggtcgtccgcgtggggtcctggagcgcaggaggcggaggggaagccgcgcaggggccactagggaggggctctggcggggtcgcaggggcgcggtctgcgggcgtgggggcgggacctcgggggcggggcctgagggcgcgcgcacgcctccggcgcgccccctcccggccgccatgttggctggtgtgtgggtgtcaaactgagccagacgcggcggtggcggcggctccgcgggctacggtcgctcccgcctctcgagcgctgccggtggccgcagcggcgcacccgcacccggccctaaaagtactttttatagagatggggtctcactctgttgcccagactggtctcaaactgcttatctcaagtgactgactgtctgcctcagctgcccaagtagcagggattacagacacaagccacagccgctggctctattcaggaacatcttagttccaagttttgggaattatggataaagctgctatataaacaggtgtgcaggtttttgtgtggacattttcaactcatttgggtagacaccaagaggcacgagttctgatcataccgaaagtgtttagtttcagaagaagctgcttttcttgggctccataacaaaatacacagactttgtggcttaaataacacaaatttatttcttacagttctcagtcgggcgcggtggctcactcctgtaatcccagaacttcgggaggccgaggcgggcggatcacctgaactcaggtgttcaggagcagcctggccaacatggtgaaaccccgtcgctatttaaaaaaatagaagggccgggtgcagtggctcacgcctgtaatcccagaacttcgggaggccgaggcgggcggatcacctgagatcacgcgttggagaccagcctggctaacatgctgacaccccgtttctgccaaaaaaaaaaagcctggagtggcgtgtgcgcctttaagccccggctactcgggagggcttaggcgggagactcgcttgagcccgggaggcagttgttgctaggagccgagatcgcgccactgcactccagccggggccggcagacagaacaagagacccggagaccccgtctgggggtgggagtggcgggcgggaaacggcgacaaaagagggagcgagaatgggagaaaacgcaaaaagagacaataggaggtgccacacagcatcccccgcctcgcgccaagactaaaattaaaaagccaccccgagaaaacccaagagccgtcaccgctgaaacaggaggcgaaaacctttctcgcgacattgccaagcaggagcgaacagcccggaaacggcccggagtttacgagctagtctctgtcattgagccatcaagaaggaaaaaccactcagaccgcgttctctccctctcactccccaatacggagagaagaacgatcatcaatggctgacggcagttgcagccaagcaacgccagaaagccggcttcacgctcaggagaaaacgctacctctcttcctcggggttttcggtgctctacacgttcaaagaaacttctctagtaacacactatagaaatgatccctgaaagtatagccttaacggcctcctcgcacacctctgctaggtctacatctgccgcaaacttttaactgatggcgagaaactttcgctagttccgatgccattaggaaacaaataggaaaatagtttggcaataacagcttgtcgaatattatcacttgacaaattttaacgttttaggtggaaaggtaattttaaaagttgttttaagaggtttaaaaccgggcatgcttaattagcataatactgaatgacagccaatcacaaactgaatttttaaaaccggaagtgtttgctcctggtgtggtgcgcccgcctgtaatccgggaatcccagcgttttgcgagcccacgcccaggcccaggagggaggatcctttgttctatgagttcgacaccagcccaggcaatatagcggaatcccgtctctaccaagggggcgggaatcaacaatgagctgggcgtgatggcaccgtctgtagtcccagctactcgggaggctgaagcgggatgatcgtttgagtcagggaagctggctgagttcaaagctgcagtgagctctgatcagttaccccactgcaccccagcctgggagacagagtgagatcttgactcttaaaaacaattttttttttaggggggatggtattaaatagatacaaaatttaccattttaaccatttttcacatatacaattcagtggcattaagtacattcgtgtagccattggcatgtaaccatcaccattatttatctccagaactttttcgacatcccaaactgaaactctacccgtaaaacaaacttccctttcctccctccgcccagacccctttaaccactattctactttccgtctctatgaatttgattcttgtaggtatctctataagtggaaacatgcaatattgtccttttgtatctggcttatttcacttagaatgacgttttcaaggttcattcacgttgtaacatgttgcagaatttcactcctttttcaggctggagtgcaatgatgcatgatgtgacagctcactgcagccttgacccccagggctcgggtgatcctcccacgtcagcctcctgagtagctgggatcgtaggcacatgccatcacgctccgctaattttttgtattttttgtagggagggggtttcaccacattgcccaggatggtcttgaactcctgggatcaagggatccacccgcctcggccgctcaaagtgctgggactacaggcgtgagccaccacgcccagcggttttcttaattacatttttgaattgttccttgccagtgcataaaaacacaactggaccgggcacggtggctcacgcctgtcatcctagcactttgggaggccgaggcgggtggatcaccaggtcaggagatcaagaccatcctggccaacgtggtgaaacctcgtctctactaaaaatacaaaaactggccgggcgtggtggcctgcgcctgtaatcccagctactggggaggctgaggcaggagaattgcttgaacccgggaggcagaggctgcagtgagccaagatcacgccattgcactccggcctgggcgataagagcataactcctcaaaaaaacaaacaggaaaccacacaactggtttttgtgagttgatcttgtgtcctgaaactttgctgcatttgcttattagctctagtaattattgtgcgtgtattctttgggattttccctatttaaagcgatggttttatttcttatttctcaatttggtgccttttcttacctaaaggctctggctacaacttctagcaaaatgttgactaggccaggcgcggtggctcacatctgtaattccagcattttgggaggccgaggcaggcagataacaaggtcaggagctcaagagcatcctggccaacatggtgaaaccctgtctctactaagaatacaaaaattagccaggcgtggcagtgcgcacctgtagtcccagctactggggaggctgaggcaggagaattgcttgaaccccggg

SEQ ID NO: 1887243 - DNA, 4001 bp, Homo sapiens
ctgcttgttcagttcatgatctcttgccccatccctccactagggtatttcatccacgatacggtggacatcgtggctagcggacagacgcgagcctcttgggaataccttgtccatcacgtcatggtaagagagaagcagactatgtggtataggcctggtgtcagtaatctagtctcagctccgtctttctgaatctgggagaaggccgtgttttcttaccacccacccccgacctgtgtgctacttcttatgctaggatgctggaggttggcagtctgtacttgttcactgaggccagcaacccatggtttcactgcctctttagactgaacatcacccacagccagctgtgagcagcaatcaaaatctagtaatgttgaactaacaaaacaaagcatcttacccactataaactattattccagggggaaatttgggattttccagccctcaatctgatagccacaccccccaaacttccaggaaagcgtctgcatctgggttccctaactcctattctttcttccctctaggccatgggtgccttcttctccggcatcttttggagcagctttgtcggtgggggtgtcttaacactactggtggaagtcagcaacatcttcctcaccattcgcatgatgatgaaaatcagtaatgcccaggatcatctcctctaccgggttaacaagtatgtgaacctggtcatgtactttctcttccgcctggcccctcaggcctacctcacccatttcttcttgcgttatgtgaaccagaggaccctgggcaccttcctgctgggtatcctgctcatgctggacgtgatgatcataatctacttttcccgcctcctccgctctgacttctgccctgagcatgtccccaagaagcaacacaaagacaagttcttgactgagtgaggggcacagagcctgggacaacaaaaacggacaaggccagaaacagcttcatatggacactgggacttagccccaagcctgggtgtcctctgaggccagcctctccaccttctgagcctgcgcccacactattgaaaacactaatgaaagtactcctctgaagtccttgtcctttattgggcaaggggtgagggaagcagacagaccggttggacatagtagatgggtgtgtgaggacaaaatgctaccagagagccagccaatccacactcccctgaaatggatgctaacacccttcaaaccctgggcattggtttcatacacagcctcttccagggataaaaggggttcttgtacagcttgttactcaaccatggaggcaagttctgagttctggttttcctaggacactaactctagtcacaaagatctctggaatgatcatacatggtggagtggcagggtgaggtatttcaaaaggataagtagaacaggagtcttgcccaagccctgtcatgtcagtgtgtgtgtgtggcctcccagcccaaccagaaattgacagacaggcatgtatatggtgaaaagatatatatatatatatattcagaattaggcagctggactcagtttagatgatcccaatctgaaaaacaaaagggagcctcgttactggagttgaaatatgaagattaagctggaatgttatttttagaaagcaaaatgaggaatgtgaggataaggtttgtcaaggataggggtgcagtcagttaattatgactaatcagcaaagatcaggctttggtcgctaacatatgcatcatttgcacccaaggggtgagcattaaggggtttgtaggaaggaaacttactttgttggcaacatccaaagcatcgtaatcaggagccagtcgaacatatgccttcttctctccatcaggcctagggtagagaaggaagccttagtccctgccaccctcactgcccccacaccctcccccttcctcctccagtcctccggcacttcagtggttcctttgttcatgtcattcttttccaataatgatttttccatcattagcccagaggacaccatgaagccacaaagccaattctcttatgggaaacaccacaggccacattaagacttaaaccaaggtaatctgccacgtgtcgcactctagttgcctttcccaatagaagtagggacccagaaaatgaggaccaacccccaatcaagtcctagaaagcctcaggtccacacaaaggtctgtaactaaagcagcctgtaattcctgcctcaaggctcacacacactgctaaacctacaccaagtttaagtcaaggaacctttttcccctgctgaaaggtccaggggattttttttttttttttttttaaaaagggccttgcttggttgctcaggctggagtacaatggggcaatcatgggtgattcctggcctcaagagatcctcctgcatagctcggactacacgtgtagtcctgcattaccaggactacctaaacatcaaaaagcttcatggaatgcaggtttttttggctccagactgctggtccagcctgctccccatcccttgaggcccaactcaccgaatcagggtgttgaccttggccacatcaatgtcatacagcttcttcacagcctgtttaatctggtgcttgttggctttaacatccacaatgaacacaagtgtgttgttgtcttctatcttcttcatggcagactcagtggtcagcggaaacttgatgatagcatagtggtcaagcctgggagaggcaaaatggggtcacctggcctgggcccattcttttggagcccagagccaggagagcctaggtgcatcagacaacgaggtaccaatcactttgttcagactttggtcgctttacagtgtcatcatctgcaccctgaaatctaagggcctgaagccccaatcccaggggcagaacgttgtgcattttctttctcttgaagggctcttacaacctcaagtgattaaagaatcatctctgggccaggtgtgctggctcatggctgtattcccagcactttgggaggctgaggcaggctgatcacgaggtcaagagatcgtgaccatcctggccaacatggtgaaactccctctcaactaaaaatacaaaaattagctggtcatggtggtgcacgcctgtagtccgagctactcaagaggctgaggcaggagaatcgggccaggggcaaattccttttttttttttttttttgagacagagtctcgcttcgcccaggctggagtgcagtgacaggatctcggctcgctgcaagctccgcctcctgggttcacaccattctcctgcttcagcctgggactcagtagtgggactagcggcgcctgccaccacgcccggctaattttttttgtatttttagtagagacggggtttcaccgtgttagccacgatggtctcaatctcctgacctcgtgatccgcccgcctcagcctcccaaagtgctgggattacaggctcgagccaccgcgcccggccagccacgagcaaattcttatgcataggtgaggttaagccacagcagtggcttaagcacaactgtaacacagctttccccatttaaagtcacacttgattctaggtccagcttggtggcgggaggggcaggaagacagtctgtgaactgctttcctatatgaacacaatccactttttctgttaagaaagagtagaagcagcaaaaacccattggtactaactactaccatggctctactcaaatctgtgctccctaaaaagtcagttattaccgatagctcaaatactcaagtgcccaaccttctgcccattcccccccaactgttccttgagcagtatgaaaattcgggaaaatgaatggaaagaagcttctatacaccgcagcaggccataactgccaaatacagataatggaatccccactatcaatcaagaatcaatccacgttctcaccctcaaggattgttcccgatagcagtaggagctatgagcaaggaatctctgtattctactttatactccccccaaaataagt

SEQ ID NO: 1887244 - DNA, 4001 bp, Homo sapiens
aggggcagaacgttgtgcattttctttctcttgaagggctcttacaacctcaagtgattaaagaatcatctctgggccaggtgtgctggctcatggctgtattcccagcactttgggaggctgaggcaggctgatcacgaggtcaagagatcgtgaccatcctggccaacatggtgaaactccctctcaactaaaaatacaaaaattagctggtcatggtggtgcacgcctgtagtccgagctactcaagaggctgaggcaggagaatcgggccaggggcaaattccttttttttttttttttttgagacagagtctcgcttcgcccaggctggagtgcagtgacaggatctcggctcgctgcaagctccgcctcctgggttcacaccattctcctgcttcagcctgggactcagtagtgggactagcggcgcctgccaccacgcccggctaattttttttgtatttttagtagagacggggtttcaccgtgttagccacgatggtctcaatctcctgacctcgtgatccgcccgcctcagcctcccaaagtgctgggattacaggctcgagccaccgcgcccggccagccacgagcaaattcttatgcataggtgaggttaagccacagcagtggcttaagcacaactgtaacacagctttccccatttaaagtcacacttgattctaggtccagcttggtggcgggaggggcaggaagacagtctgtgaactgctttcctatatgaacacaatccactttttctgttaagaaagagtagaagcagcaaaaacccattggtactaactactaccatggctctactcaaatctgtgctccctaaaaagtcagttattaccgatagctcaaatactcaagtgcccaaccttctgcccattcccccccaactgttccttgagcagtatgaaaattcgggaaaatgaatggaaagaagcttctatacaccgcagcaggccataactgccaaatacagataatggaatccccactatcaatcaagaatcaatccacgttctcaccctcaaggattgttcccgatagcagtaggagctatgagcaaggaatctctgtattctactttatactccccccaaaataagttttcaaaccgtgaccacatgtgaagcaataattaacctaacaaattttgagagactcagggtttttttttttttgagacagagtttcactcttattgcccaggctggaatgcaatggtacgatctccgctcaccgcaacctccacctcccgggttcaagcgattctcctgcctcagcctcccgcgagtagctgggattacagacatgcgccaccatgcccggcgaattttctatttttaatagacgcggggtttctccatgtcactcaggctggtctcgaacccctgacctcaagtgatccgccccccctcggcctcccaaagtgctgggattacagacgtgagccaccgcgcccggcctctgggctgatcctgccagttttgtaaatgcagcagaaacaatctcctcatacttccaattagagaagcacactggacacaatttgcgtttgagaaaccatcacgcagagtgagtgaatttccaaattaccaatggagaatacccaaatcttttcatgggtacagggggcagtactgacttgtttctcctgggagcgctcttccgaggatatttgggctgtctccggagtcgcagtgtcttcggccgccggaaggtgggtgacgtgcggatcttcttctttttgtggctgtggacacctttcaacactgccttcttggcctttaaagccttcgctttggcttcagctttaggaggggcaggagctgggagaaaaggaaagaaaacgtgggtgcgggatttagaaatcggtcacttccggccccaagaactgcagtgggccaccctggccacaggtgcatcagtggttcctttgaagacatcacaagtgtcaggagattaaaacttttccatcatatgcacgataccagaggcgaaagcgaccaactctaagtaactccagggatacgactatgaaacaaagtagcactgaatgaacgcttgatactttccagaaaatgtcctacgaattttacacataccccatcgcaaaaccacgctgcggagagaggggcgggtaatgtagcccggttgaacatgaaccagaaggaaaatggttaaagctgagggcactaattccttacaggcccggggacatggagctccaaccagtggatgcatgtagcttcccagaaccgaatgtctggccctccctggcggatgatgcctgccgcgttgcccccccccaactccctctaccggaactcagcccacgaggctgggcccacgcggcccacgtatactgcagcgtgtccgaaacgcagggagcagccccggagcagagccctcagggcttagcccagcagccgtgttcccaattcgttcgctctgcggcgcggcaatccccggtaaaccagctgcggccccatcaccaacacacaccttccttcttcgctttcggcgccatcttgtgaaaagggtctccaatgctcgttcccacgggcttatagcgccaaagagcactaaagactcgcgatgctttgtacttagagctgattgggtaatttgcagagcggcgccctctgggaacggtagttaggtttaatttctttttcgtgcgtgaacaaacatgcgccactcctcccctcaaaggcactaaagcttcatgggggttgtagttttttgttttttgttttttgttttttttttgagcgctctgtcgcccaggctggagtgcagtggcgcgatctcggctcactgtaagctccgcctcccgggtttacgccattctcctgcctcagccaccagagtagctgggactacaggcgcgtgccaccatggggattgtagttttttgaagacacgcgtttatttgctcaggccagcggacggcgtagccggctggcgctcgggtctggtcccgggagcttcctatcttgagcaactgccagtctcagggaagaggattgccatgccaggaggcaggaacgctgccaagaggaaagaacacatttggattgactcgggagttagatacagctaagttctagagtgctggagcaggatttgctcggtcgaactgaggtccagagaggaatgtggtttatcaataacacagtgatttggtggcagaaaaaaatcaagtcagggccgggcgcggtgactcacgcctgtaatcccagcactttgtgaggccgaggtggacgaattgcttcgagcccaggagttcgagaccaccctgggcaacacggcgaaaccctgtctctacaaaagaatacaaaaattagccgggcgtggtggtgcgtgcctgtagtcccagttccttgggaggctgaggtgggaggatcgcttcagccctggaggtcgaggctgcaatgagccattccagcctgggtggcagagtgagaccctgtctcaaaataaataaataaataaataaataaataatcgagtcacgagggggaagtgtcagaggaagtacaaggcggccacacctgcccctctttacctgcgacactgatactgtcaagttttactgcgtttcctgataatgcatttgaagttctatgaaaattccacacatttctccaagattcgctagtttttccggttagtaacttcactcacaatcccctgccctaaactagtcttcccttccgtgtcctggtcatctttacatcctcaaattcagctccagacacagagaaaggtttcttaacactcaggttcgcttctcctaaggtgtgtgcctaacccatccccacttgatcctttcttcttccctctcccttcataaaaccagacatgtcccctttgacggtgaaattgattgtgcactgccccctcttctatcctgcaggactttgcacaaaggagttgtccctgggggatagattccaatggggccagaacaatgaacaccc

SEQ ID NO: 1887245 - DNA, 4001 bp, Homo sapiens
aatacacattttcaagaattgacacccaagaccatcctttattgtagtattagttcatggtaactgcatgaaaaaacatttcaggaggaatttacaatttccagcttaaagaactttgcccaccaacataaccaatttatgaaagtcaattcattaaaaggtatagaacctcttgttgggcatgatggcaagggacaaagctacaacttggcctgtgcctttggaagctgaggcaggaggaccatctgagcccaggagcctgagaccagcctgggcaacatagagaatccgtctcaacaaaaaaaaaattttagccaggtgtgctgtgagctgtagtcccagctacaaggtgggaggattgcttaggcctgggtgattgaggatgcaatgagctgtgattgtgccaccacactccagcctgggcaatacagcaagactgtctcaaaaaaaaaaaaaaaaacccaaaaaaactcaagaatgtaatgaatgatacccaatgtgccttttctagaaaaagttgccaaatatatctcttggatctgctgagcatgtcctctgatacataaggcaagcatgtttctacacccagtgttgatgccagttagttttcagaatccaaactgatggcagctactggtccttgggactgacatcctctgggaatataacctgcaaagaaactacatttcaatctcactttctgcaccaactgacagtcaatcacagggtaagagatatcttcagaaaaccataggttcaccactacacaatctgccggtaattccagctattttgggtgatttcatcatttgatatcttttttttttgaagcgagttttaacaagatcagctgtttattcattccactatggggttgaagggatcattggccagctcaaggcttaccttctcttgggctgagatgctgctgccagctctaaaacagcactctgttctcaaaacctgggggaatggagaaggcgcatacaccttagagactgcagatgcagagcaggacaggcatttctgatgacagtcaattaatgactttacaaatttaagtccatcctaacaaaagccccttaagacctaattagaggtaatttttctaagtttttgtaaattattgaggactacaaatcttaattagcttctcagtaggttgtaattttttttttttttttgagatggagtctcgctgttgcccaggctggagtgcagtggcacgatttcgactcactacaacctccgcctcccgggttcaagcgattctcctggctcagcccccaaagtagctgggattacaagtacacgccaccacacccggctaatttttgtatttttggtagagatggggtttcaccatgtcggccagccaggctggtcttgaactcctgacctcaggtgatccacccaccttagcctcccaaagtgctgggattacaggccactgtgcccagcctcaggggagttgtaatctccatttcagtcatatcaatttaaacttcacaaagctaagattacttttccttttcacatctgaggaaaactacatctcagcagacaggtaatttgcccgagactaaacagccaagaggtaaatagagtagcccctctttctaggtaatccaccctggctccactgccaccggaaactaaaatcagtatctctgggataggctacactgttacaaggtattaggttaaccaaatccaattgccaatattcgacctgacagctaggcgtggtcagccactagcctccccatagagcaaggcttacctcatggcaggctcctggctccaatactcagctgccaaacatgatgctgattcttcacgaatttgcaacctaggtgaatatagcaattaggtcaccgttcaaacaagtttactcctgggaaccagcaagtggtgaagacttgactgcaatcagacaggagtagtcttcgtcagttatcgcttctgacggcacttcctattagtgatttcatcagagcagtcaagcacctcacaaccctccagtactgttccaaccgcagatctagaccctacctgaaacttaagctaaccctgctactggagacatttcttaacgaaggagtttgtttctgcattatcagtttgctttaaatgcagttctaggttaggactgtggctgaagcagccatctccagtttctatttaagttccaccctatgcaatgacatgataacgttaccctaaagtgtataaaacacctaaacgtagaaaactgtcaaaacgccaatttccgtgcattcaagtgacaaaactacgttccatgttaaaccctacaccagagagcctctcacctcgtggctaccccgtcttcagcactctgcagtgggtacgcaatcttaaagagggagtaaggacaggaattcagggcagggctctggcagttacggtcaactaagttgtagaggtttcagcgactgcggtcagatagacattagacgtcgtcagttatcgcttctgacggcacttcctattacaagtatcatcaggacagtcgaataagtcttccagtaatactgttacaatcttaccgacgtacaccgccctcggggtaccccaaactgcaagccgaccccaacttacccagttctctcgggtttgcacacccccactgtgggccggggaaccgggtcccggccttcgcagactccaggctctggcagatgtggccctaccacaaaagagtgatccatgagcctcagccacggcagccggattcggccccgcgctgccctgccaggctgtccaataccgggccgcagcgcccgccgcgaaagccacgcgggcgcaggagccggggagccacgccatctcaacagctgccctccgccctctagacaggcttcccgggaacatctccccagagaccacagaagctcgagctctttatttgctcttgccccccagctactactcccagattcctagagagcctacctccataacaacgggaatgaaaaggtcacaccttatgtgcgccaggcccttaaggagtcggaatatcccaatcctcacaaaaggagggggacgctggcaaagactcatgggaactttccgccaagtaacgatttagaccggcgcgctacccaggactccccctcctgttgagtctatggtctcttccacagccccgggaattctgggtcacaacacgcgcggggagttccagggcgcctgcgcgagggctggatcgcgcgtttgggccccacctccgccactccttagctgggtggtcttgggccaattactcattctctttaagcttccgattggtcctctagtaaacggagacaccagcgccccagaagatcacgtgagatgacacacgtgaaagcctgtagagctgtggcacaaggcagccattcatcctagtagctcctcctgaatctattgagcgttgccaaatactctccccacagctatttcaccacatccacggggcttctcaaacccctgcgcactggtcaccctcattactcctttagcacgacctttagggaacgagctgacgtcttatctagatccacgtccatcctctgctcgcctctggggtaaagctctgcccacctcctttcctctcctcattccttggggcctcctccacctatgcccctgcctcaccttccatggaaaactctctctactgtggctttcctttcagcctatgaacatgctcagctctctccttgaaaaagaatccatgcaaccacgttttgcacacacacgttataccaagggaaagaaattcattttgactgcaaaaaactgggaagacaatcataagaccttttgagctggcctcagaaataagtgtagggtttttgttgttgttgttgttgttgctcgtttttgtgtttttttgagacggaatttcgctcctgttgcccaggctggactgcaatggcgcgatctccgctcaccgcaacctctgcctcccgggttcaagcgattcttctgcctca

SEQ ID NO: 1887246 - DNA, 4001 bp, Homo sapiens
tatctcttggatctgctgagcatgtcctctgatacataaggcaagcatgtttctacacccagtgttgatgccagttagttttcagaatccaaactgatggcagctactggtccttgggactgacatcctctgggaatataacctgcaaagaaactacatttcaatctcactttctgcaccaactgacagtcaatcacagggtaagagatatcttcagaaaaccataggttcaccactacacaatctgccggtaattccagctattttgggtgatttcatcatttgatatcttttttttttgaagcgagttttaacaagatcagctgtttattcattccactatggggttgaagggatcattggccagctcaaggcttaccttctcttgggctgagatgctgctgccagctctaaaacagcactctgttctcaaaacctgggggaatggagaaggcgcatacaccttagagactgcagatgcagagcaggacaggcatttctgatgacagtcaattaatgactttacaaatttaagtccatcctaacaaaagccccttaagacctaattagaggtaatttttctaagtttttgtaaattattgaggactacaaatcttaattagcttctcagtaggttgtaattttttttttttttttgagatggagtctcgctgttgcccaggctggagtgcagtggcacgatttcgactcactacaacctccgcctcccgggttcaagcgattctcctggctcagcccccaaagtagctgggattacaagtacacgccaccacacccggctaatttttgtatttttggtagagatggggtttcaccatgtcggccagccaggctggtcttgaactcctgacctcaggtgatccacccaccttagcctcccaaagtgctgggattacaggccactgtgcccagcctcaggggagttgtaatctccatttcagtcatatcaatttaaacttcacaaagctaagattacttttccttttcacatctgaggaaaactacatctcagcagacaggtaatttgcccgagactaaacagccaagaggtaaatagagtagcccctctttctaggtaatccaccctggctccactgccaccggaaactaaaatcagtatctctgggataggctacactgttacaaggtattaggttaaccaaatccaattgccaatattcgacctgacagctaggcgtggtcagccactagcctccccatagagcaaggcttacctcatggcaggctcctggctccaatactcagctgccaaacatgatgctgattcttcacgaatttgcaacctaggtgaatatagcaattaggtcaccgttcaaacaagtttactcctgggaaccagcaagtggtgaagacttgactgcaatcagacaggagtagtcttcgtcagttatcgcttctgacggcacttcctattagtgatttcatcagagcagtcaagcacctcacaaccctccagtactgttccaaccgcagatctagaccctacctgaaacttaagctaaccctgctactggagacatttcttaacgaaggagtttgtttctgcattatcagtttgctttaaatgcagttctaggttaggactgtggctgaagcagccatctccagtttctatttaagttccaccctatgcaatgacatgataacgttaccctaaagtgtataaaacacctaaacgtagaaaactgtcaaaacgccaatttccgtgcattcaagtgacaaaactacgttccatgttaaaccctacaccagagagcctctcacctcgtggctaccccgtcttcagcactctgcagtgggtacgcaatcttaaagagggagtaaggacaggaattcagggcagggctctggcagttacggtcaactaagttgtagaggtttcagcgactgcggtcagatagacattagacgtcgtcagttatcgcttctgacggcacttcctattacaagtatcatcaggacagtcgaataagtcttccagtaatactgttacaatcttaccgacgtacaccgccctcggggtaccccaaactgcaagccgaccccaacttacccagttctctcgggtttgcacacccccactgtgggccggggaaccgggtcccggccttcgcagactccaggctctggcagatgtggccctaccacaaaagagtgatccatgagcctcagccacggcagccggattcggccccgcgctgccctgccaggctgtccaataccgggccgcagcgcccgccgcgaaagccacgcgggcgcaggagccggggagccacgccatctcaacagctgccctccgccctctagacaggcttcccgggaacatctccccagagaccacagaagctcgagctctttatttgctcttgccccccagctactactcccagattcctagagagcctacctccataacaacgggaatgaaaaggtcacaccttatgtgcgccaggcccttaaggagtcggaatatcccaatcctcacaaaaggagggggacgctggcaaagactcatgggaactttccgccaagtaacgatttagaccggcgcgctacccaggactccccctcctgttgagtctatggtctcttccacagccccgggaattctgggtcacaacacgcgcggggagttccagggcgcctgcgcgagggctggatcgcgcgtttgggccccacctccgccactccttagctgggtggtcttgggccaattactcattctctttaagcttccgattggtcctctagtaaacggagacaccagcgccccagaagatcacgtgagatgacacacgtgaaagcctgtagagctgtggcacaaggcagccattcatcctagtagctcctcctgaatctattgagcgttgccaaatactctccccacagctatttcaccacatccacggggcttctcaaacccctgcgcactggtcaccctcattactcctttagcacgacctttagggaacgagctgacgtcttatctagatccacgtccatcctctgctcgcctctggggtaaagctctgcccacctcctttcctctcctcattccttggggcctcctccacctatgcccctgcctcaccttccatggaaaactctctctactgtggctttcctttcagcctatgaacatgctcagctctctccttgaaaaagaatccatgcaaccacgttttgcacacacacgttataccaagggaaagaaattcattttgactgcaaaaaactgggaagacaatcataagaccttttgagctggcctcagaaataagtgtagggtttttgttgttgttgttgttgttgctcgtttttgtgtttttttgagacggaatttcgctcctgttgcccaggctggactgcaatggcgcgatctccgctcaccgcaacctctgcctcccgggttcaagcgattcttctgcctcagcctcccgagtagctgggattacaggcatgcgccaccacgcccggctaattttgtatttttagtagagacggggtttctccatgttggtcaggctggtttcgaactcctgaactcaggtgatccgcccgcctgggcctcccagagtgctgggattacaggcgcccggcaagtgtagggttttattttattattatactttaagttctagggtacatgtgcacaacgtgcaggtttgttacatatgtatacatgtgccatgttggtatgctgcacccattaactcatcatttacattaggtatatctcctaatgctatccctccccccacccccaagtgtagggttttaatggaggaggggggcttccagcaagagccaggtcaagggatcaagcacgaggtctctcggcctgcatgaatttggggagagtgctaaggagggaggggcaacagaggtggaggggaggaggtgtctggaactgcttgggcaaaaccgtgggggtctcgggatgtcagctagggcattct

SEQ ID NO: 1887247 - DNA, 4001 bp, Homo sapiens
cctcctccgctctgacttctgccctgagcatgtccccaagaagcaacacaaagacaagttcttgactgagtgaggggcacagagcctgggacaacaaaaacggacaaggccagaaacagcttcatatggacactgggacttagccccaagcctgggtgtcctctgaggccagcctctccaccttctgagcctgcgcccacactattgaaaacactaatgaaagtactcctctgaagtccttgtcctttattgggcaaggggtgagggaagcagacagaccggttggacatagtagatgggtgtgtgaggacaaaatgctaccagagagccagccaatccacactcccctgaaatggatgctaacacccttcaaaccctgggcattggtttcatacacagcctcttccagggataaaaggggttcttgtacagcttgttactcaaccatggaggcaagttctgagttctggttttcctaggacactaactctagtcacaaagatctctggaatgatcatacatggtggagtggcagggtgaggtatttcaaaaggataagtagaacaggagtcttgcccaagccctgtcatgtcagtgtgtgtgtgtggcctcccagcccaaccagaaattgacagacaggcatgtatatggtgaaaagatatatatatatatatattcagaattaggcagctggactcagtttagatgatcccaatctgaaaaacaaaagggagcctcgttactggagttgaaatatgaagattaagctggaatgttatttttagaaagcaaaatgaggaatgtgaggataaggtttgtcaaggataggggtgcagtcagttaattatgactaatcagcaaagatcaggctttggtcgctaacatatgcatcatttgcacccaaggggtgagcattaaggggtttgtaggaaggaaacttactttgttggcaacatccaaagcatcgtaatcaggagccagtcgaacatatgccttcttctctccatcaggcctagggtagagaaggaagccttagtccctgccaccctcactgcccccacaccctcccccttcctcctccagtcctccggcacttcagtggttcctttgttcatgtcattcttttccaataatgatttttccatcattagcccagaggacaccatgaagccacaaagccaattctcttatgggaaacaccacaggccacattaagacttaaaccaaggtaatctgccacgtgtcgcactctagttgcctttcccaatagaagtagggacccagaaaatgaggaccaacccccaatcaagtcctagaaagcctcaggtccacacaaaggtctgtaactaaagcagcctgtaattcctgcctcaaggctcacacacactgctaaacctacaccaagtttaagtcaaggaacctttttcccctgctgaaaggtccaggggattttttttttttttttttttaaaaagggccttgcttggttgctcaggctggagtacaatggggcaatcatgggtgattcctggcctcaagagatcctcctgcatagctcggactacacgtgtagtcctgcattaccaggactacctaaacatcaaaaagcttcatggaatgcaggtttttttggctccagactgctggtccagcctgctccccatcccttgaggcccaactcaccgaatcagggtgttgaccttggccacatcaatgtcatacagcttcttcacagcctgtttaatctggtgcttgttggctttaacatccacaatgaacacaagtgtgttgttgtcttctatcttcttcatggcagactcagtggtcagcggaaacttgatgatagcatagtggtcaagcctgggagaggcaaaatggggtcacctggcctgggcccattcttttggagcccagagccaggagagcctaggtgcatcagacaacgaggtaccaatcactttgttcagactttggtcgctttacagtgtcatcatctgcaccctgaaatctaagggcctgaagccccaatcccaggggcagaacgttgtgcattttctttctcttgaagggctcttacaacctcaagtgattaaagaatcatctctgggccaggtgtgctggctcatggctgtattcccagcactttgggaggctgaggcaggctgatcacgaggtcaagagatcgtgaccatcctggccaacatggtgaaactccctctcaactaaaaatacaaaaattagctggtcatggtggtgcacgcctgtagtccgagctactcaagaggctgaggcaggagaatcgggccaggggcaaattccttttttttttttttttttgagacagagtctcgcttcgcccaggctggagtgcagtgacaggatctcggctcgctgcaagctccgcctcctgggttcacaccattctcctgcttcagcctgggactcagtagtgggactagcggcgcctgccaccacgcccggctaattttttttgtatttttagtagagacggggtttcaccgtgttagccacgatggtctcaatctcctgacctcgtgatccgcccgcctcagcctcccaaagtgctgggattacaggctcgagccaccgcgcccggccagccacgagcaaattcttatgcataggtgaggttaagccacagcagtggcttaagcacaactgtaacacagctttccccatttaaagtcacacttgattctaggtccagcttggtggcgggaggggcaggaagacagtctgtgaactgctttcctatatgaacacaatccactttttctgttaagaaagagtagaagcagcaaaaacccattggtactaactactaccatggctctactcaaatctgtgctccctaaaaagtcagttattaccgatagctcaaatactcaagtgcccaaccttctgcccattcccccccaactgttccttgagcagtatgaaaattcgggaaaatgaatggaaagaagcttctatacaccgcagcaggccataactgccaaatacagataatggaatccccactatcaatcaagaatcaatccacgttctcaccctcaaggattgttcccgatagcagtaggagctatgagcaaggaatctctgtattctactttatactccccccaaaataagttttcaaaccgtgaccacatgtgaagcaataattaacctaacaaattttgagagactcagggtttttttttttttgagacagagtttcactcttattgcccaggctggaatgcaatggtacgatctccgctcaccgcaacctccacctcccgggttcaagcgattctcctgcctcagcctcccgcgagtagctgggattacagacatgcgccaccatgcccggcgaattttctatttttaatagacgcggggtttctccatgtcactcaggctggtctcgaacccctgacctcaagtgatccgccccccctcggcctcccaaagtgctgggattacagacgtgagccaccgcgcccggcctctgggctgatcctgccagttttgtaaatgcagcagaaacaatctcctcatacttccaattagagaagcacactggacacaatttgcgtttgagaaaccatcacgcagagtgagtgaatttccaaattaccaatggagaatacccaaatcttttcatgggtacagggggcagtactgacttgtttctcctgggagcgctcttccgaggatatttgggctgtctccggagtcgcagtgtcttcggccgccggaaggtgggtgacgtgcggatcttcttctttttgtggctgtggacacctttcaacactgccttcttggcctttaaagccttcgctttggcttcagctttaggaggggcaggagctgggagaaaaggaaagaaaacgtgggtgcgggatttagaaatcggtcacttccggccccaagaactgcagtgggccaccctggccacaggtgcatcagtggttcctttgaagacatcacaagtg

SEQ ID NO: 1887248 - DNA, 4001 bp, Homo sapiens
gcttcccagtcagccactagcgcgagcccaggatcccccggggctgcgaagggtaaccgagaagttgatggtccttgagggtgccgaaatgcagagcctcctcttccctcctttccagtgtatggcagactcctgacatgttagtggagattgagacggcgtggtcactttctggctatttgctcgtttgcttctctgcgggtaggtcttgcccaggaagcgggaggcaaattggggacagggagaaggaagctgcttgttcagttcatgatctcttgccccatccctccactagggtatttcatccacgatacggtggacatcgtggctagcggacagacgcgagcctcttgggaataccttgtccatcacgtcatggtaagagagaagcagactatgtggtataggcctggtgtcagtaatctagtctcagctccgtctttctgaatctgggagaaggccgtgttttcttaccacccacccccgacctgtgtgctacttcttatgctaggatgctggaggttggcagtctgtacttgttcactgaggccagcaacccatggtttcactgcctctttagactgaacatcacccacagccagctgtgagcagcaatcaaaatctagtaatgttgaactaacaaaacaaagcatcttacccactataaactattattccagggggaaatttgggattttccagccctcaatctgatagccacaccccccaaacttccaggaaagcgtctgcatctgggttccctaactcctattctttcttccctctaggccatgggtgccttcttctccggcatcttttggagcagctttgtcggtgggggtgtcttaacactactggtggaagtcagcaacatcttcctcaccattcgcatgatgatgaaaatcagtaatgcccaggatcatctcctctaccgggttaacaagtatgtgaacctggtcatgtactttctcttccgcctggcccctcaggcctacctcacccatttcttcttgcgttatgtgaaccagaggaccctgggcaccttcctgctgggtatcctgctcatgctggacgtgatgatcataatctacttttcccgcctcctccgctctgacttctgccctgagcatgtccccaagaagcaacacaaagacaagttcttgactgagtgaggggcacagagcctgggacaacaaaaacggacaaggccagaaacagcttcatatggacactgggacttagccccaagcctgggtgtcctctgaggccagcctctccaccttctgagcctgcgcccacactattgaaaacactaatgaaagtactcctctgaagtccttgtcctttattgggcaaggggtgagggaagcagacagaccggttggacatagtagatgggtgtgtgaggacaaaatgctaccagagagccagccaatccacactcccctgaaatggatgctaacacccttcaaaccctgggcattggtttcatacacagcctcttccagggataaaaggggttcttgtacagcttgttactcaaccatggaggcaagttctgagttctggttttcctaggacactaactctagtcacaaagatctctggaatgatcatacatggtggagtggcagggtgaggtatttcaaaaggataagtagaacaggagtcttgcccaagccctgtcatgtcagtgtgtgtgtgtggcctcccagcccaaccagaaattgacagacaggcatgtatatggtgaaaagatatatatatatatatattcagaattaggcagctggactcagtttagatgatcccaatctgaaaaacaaaagggagcctcgttactggagttgaaatatgaagattaagctggaatgttatttttagaaagcaaaatgaggaatgtgaggataaggtttgtcaaggataggggtgcagtcagttaattatgactaatcagcaaagatcaggctttggtcgctaacatatgcatcatttgcacccaaggggtgagcattaaggggtttgtaggaaggaaacttactttgttggcaacatccaaagcatcgtaatcaggagccagtcgaacatatgccttcttctctccatcaggcctagggtagagaaggaagccttagtccctgccaccctcactgcccccacaccctcccccttcctcctccagtcctccggcacttcagtggttcctttgttcatgtcattcttttccaataatgatttttccatcattagcccagaggacaccatgaagccacaaagccaattctcttatgggaaacaccacaggccacattaagacttaaaccaaggtaatctgccacgtgtcgcactctagttgcctttcccaatagaagtagggacccagaaaatgaggaccaacccccaatcaagtcctagaaagcctcaggtccacacaaaggtctgtaactaaagcagcctgtaattcctgcctcaaggctcacacacactgctaaacctacaccaagtttaagtcaaggaacctttttcccctgctgaaaggtccaggggattttttttttttttttttttaaaaagggccttgcttggttgctcaggctggagtacaatggggcaatcatgggtgattcctggcctcaagagatcctcctgcatagctcggactacacgtgtagtcctgcattaccaggactacctaaacatcaaaaagcttcatggaatgcaggtttttttggctccagactgctggtccagcctgctccccatcccttgaggcccaactcaccgaatcagggtgttgaccttggccacatcaatgtcatacagcttcttcacagcctgtttaatctggtgcttgttggctttaacatccacaatgaacacaagtgtgttgttgtcttctatcttcttcatggcagactcagtggtcagcggaaacttgatgatagcatagtggtcaagcctgggagaggcaaaatggggtcacctggcctgggcccattcttttggagcccagagccaggagagcctaggtgcatcagacaacgaggtaccaatcactttgttcagactttggtcgctttacagtgtcatcatctgcaccctgaaatctaagggcctgaagccccaatcccaggggcagaacgttgtgcattttctttctcttgaagggctcttacaacctcaagtgattaaagaatcatctctgggccaggtgtgctggctcatggctgtattcccagcactttgggaggctgaggcaggctgatcacgaggtcaagagatcgtgaccatcctggccaacatggtgaaactccctctcaactaaaaatacaaaaattagctggtcatggtggtgcacgcctgtagtccgagctactcaagaggctgaggcaggagaatcgggccaggggcaaattccttttttttttttttttttgagacagagtctcgcttcgcccaggctggagtgcagtgacaggatctcggctcgctgcaagctccgcctcctgggttcacaccattctcctgcttcagcctgggactcagtagtgggactagcggcgcctgccaccacgcccggctaattttttttgtatttttagtagagacggggtttcaccgtgttagccacgatggtctcaatctcctgacctcgtgatccgcccgcctcagcctcccaaagtgctgggattacaggctcgagccaccgcgcccggccagccacgagcaaattcttatgcataggtgaggttaagccacagcagtggcttaagcacaactgtaacacagctttccccatttaaagtcacacttgattctaggtccagcttggtggcgggaggggcaggaagacagtctgtgaactgctttcctatatgaacacaatccactttttctgttaagaaagagtagaagcagcaaaaacccattggtactaactactaccatggctctactcaaatctgtgctccctaaaaagtcagttattaccgatagctcaa

SEQ ID NO: 1887249 - DNA, 4001 bp, Homo sapiens
aaagaatacagtagggcccctacatgtactgcattacatttttcatttaggggaacaagctccaaccagaggaatgtgtccccactcaaggaaggtgggaatctttagcaaaattcctgtaactcctggttgcccgagaccccagttccatctatgctaggggtggactgaacgtggcctacctccttatggagacccagccctatttctgaggcccaccttgattctaggcatctgcccataggaccagctatcgctatatcctttgacagagcagcctacgatgccatgtggtagtgctcaggacagacatggtgcccatgcatacaggcataaagtcctgttcagaaatcccctatccaccttccctacccactgctggctgaaaaactaccagacttctatgtgggctctgatgtccttagcatgcagggtaagtgacaaacctggcttccttcttgtcacttgccagtatgacttcactgacctagacaggccgtaagaactctttccccataactcttaagtaatccaccaacacattccagaaaaccgactgcagaaggtgggctttaaaaccttaaaaacctaggacaatgaaggagtccaatcccttggcagatccaacaagatggctggggagagggagaaacaaactggaggctcccaaaggaacctaacttagcaaaggttctcatcttataccctccccttacccaaatactgtcctactgaaagggccctaccagttaagggatctcttctaaataacaggcaacccctagatccaagtagttcagtccaggaagactgggagccaatcactcttgaaccttgtgggcaaacagtatgggggaggaccctcttgacaggccttggtaggcaagattccaacacaggaagacagcaagatggggcctagagtatggggccctacatgctgttaaggttgtggttaggaatggtgcaatgctgcaggagctggaacaaagctacaccaaggaacagagcacagagcagcaggggccgaaattgaggaggccttaaatgctttgagcttttgccttcagtctaaagctgtagaatagggggttaagagcttaggctgaccacagggaagtttacaagctagagcgaatatctggactgctaatatctgacaacagtaggcgaaatttactttttcttcaaatacacattttcaagaattgacacccaagaccatcctttattgtagtattagttcatggtaactgcatgaaaaaacatttcaggaggaatttacaatttccagcttaaagaactttgcccaccaacataaccaatttatgaaagtcaattcattaaaaggtatagaacctcttgttgggcatgatggcaagggacaaagctacaacttggcctgtgcctttggaagctgaggcaggaggaccatctgagcccaggagcctgagaccagcctgggcaacatagagaatccgtctcaacaaaaaaaaaattttagccaggtgtgctgtgagctgtagtcccagctacaaggtgggaggattgcttaggcctgggtgattgaggatgcaatgagctgtgattgtgccaccacactccagcctgggcaatacagcaagactgtctcaaaaaaaaaaaaaaaaacccaaaaaaactcaagaatgtaatgaatgatacccaatgtgccttttctagaaaaagttgccaaatatatctcttggatctgctgagcatgtcctctgatacataaggcaagcatgtttctacacccagtgttgatgccagttagttttcagaatccaaactgatggcagctactggtccttgggactgacatcctctgggaatataacctgcaaagaaactacatttcaatctcactttctgcaccaactgacagtcaatcacagggtaagagatatcttcagaaaaccataggttcaccactacacaatctgccggtaattccagctattttgggtgatttcatcatttgatatcttttttttttgaagcgagttttaacaagatcagctgtttattcattccactatggggttgaagggatcattggccagctcaaggcttaccttctcttgggctgagatgctgctgccagctctaaaacagcactctgttctcaaaacctgggggaatggagaaggcgcatacaccttagagactgcagatgcagagcaggacaggcatttctgatgacagtcaattaatgactttacaaatttaagtccatcctaacaaaagccccttaagacctaattagaggtaatttttctaagtttttgtaaattattgaggactacaaatcttaattagcttctcagtaggttgtaattttttttttttttttgagatggagtctcgctgttgcccaggctggagtgcagtggcacgatttcgactcactacaacctccgcctcccgggttcaagcgattctcctggctcagcccccaaagtagctgggattacaagtacacgccaccacacccggctaatttttgtatttttggtagagatggggtttcaccatgtcggccagccaggctggtcttgaactcctgacctcaggtgatccacccaccttagcctcccaaagtgctgggattacaggccactgtgcccagcctcaggggagttgtaatctccatttcagtcatatcaatttaaacttcacaaagctaagattacttttccttttcacatctgaggaaaactacatctcagcagacaggtaatttgcccgagactaaacagccaagaggtaaatagagtagcccctctttctaggtaatccaccctggctccactgccaccggaaactaaaatcagtatctctgggataggctacactgttacaaggtattaggttaaccaaatccaattgccaatattcgacctgacagctaggcgtggtcagccactagcctccccatagagcaaggcttacctcatggcaggctcctggctccaatactcagctgccaaacatgatgctgattcttcacgaatttgcaacctaggtgaatatagcaattaggtcaccgttcaaacaagtttactcctgggaaccagcaagtggtgaagacttgactgcaatcagacaggagtagtcttcgtcagttatcgcttctgacggcacttcctattagtgatttcatcagagcagtcaagcacctcacaaccctccagtactgttccaaccgcagatctagaccctacctgaaacttaagctaaccctgctactggagacatttcttaacgaaggagtttgtttctgcattatcagtttgctttaaatgcagttctaggttaggactgtggctgaagcagccatctccagtttctatttaagttccaccctatgcaatgacatgataacgttaccctaaagtgtataaaacacctaaacgtagaaaactgtcaaaacgccaatttccgtgcattcaagtgacaaaactacgttccatgttaaaccctacaccagagagcctctcacctcgtggctaccccgtcttcagcactctgcagtgggtacgcaatcttaaagagggagtaaggacaggaattcagggcagggctctggcagttacggtcaactaagttgtagaggtttcagcgactgcggtcagatagacattagacgtcgtcagttatcgcttctgacggcacttcctattacaagtatcatcaggacagtcgaataagtcttccagtaatactgttacaatcttaccgacgtacaccgccctcggggtaccccaaactgcaagccgaccccaacttacccagttctctcgggtttgcacacccccactgtgggccggggaaccgggtcccggccttcgcagactccaggctctggcagatgtggccctaccacaaaagagtgatccatgagcctcagccacggcagccggattcggccccgcgctgccctgccaggctgtccaataccgggccgcagcgcccgccgc

SEQ ID NO: 1887250 - DNA, 4001 bp, Homo sapiens
tatatggatttctttaaaaggatatgcccatttgatcctaaccttttagcctgctctctagaaccctacttacagttgaccaagctgcttaaagtagaaggatcaggactggcaggggatatgagggccagtgtagagattaaacagaataatgagtacacaagtttttgcctatccctttccttaaaatataagaaataaaggagctcttacgaaaaacccaggttagaccgcataaaaaataaagtgaacagtgaggtggtagcaagacttctttttagaaaagaaagcatttacctgcctgtctgtaaggtggaaatttcatcagtttgcaaacgataagaaatgcagacttgctcttgatagaaatgcttagaaacactctgggggggaaaaaagctccttccatatactgtgagacatttgttaagtgacatctattgtttatcagcttttaaggataaaaaaggtattttaaaagttggatatttaggatatttgaggatattcctttatgagctctccatatccttcttgagaaactggttaaaaaaggaataggggttgagtgttacagagagtagtctgaagattcctgtgtaaaagcaaagctaacaagcaatgaagacatgaagcaaaatactaatctaattgtgtaaagaaaggatattttaataagttctttctgcttgctgctaagagtttgctaaagtgtcatgaattattctggttattactaaagtttctatgaaacacttaagtagattttaagaataaatgtttctggaaaagaactatgttatgattttgtagaaatgtaaagattacttgaggtgtttaaaataaatttttcattcagactacctttgactttttgaggtgtttttatatttaacattttgccaattcagtagttggaacaaaaatcctctgctccgacaacaagaattcagcctcatgcaaaataccttgcatcaacttaagaaacacttaagttgcctatgtaggagcatttatgccattggattggtagactggtgaaaacatgggttaaaaaaaaatcatcactagaagaggaaggatgaaaatgatttttaagagcctctgctgacataagtgttttccaatactttaactcattttaccagttcaaagcacattctctgatagcacaaaggtgataaagctaaaattttaaatagaatatcccatggattttaacattaagacatttatgatgttagttgagacaataaaaaaaattaaaacttttatatgccataagaaaagtataatgaattttaaaattctcattaaacctcaaaggttttaccaaagcaaatatcatggttaattaaacatttttatttatttattttttttttactgagacagagtctcactctgatgccaaggcttgagtgcagtggtgtgatctcggctcactgcaacctccacctcctgggttcaaacaattctgccacctcagcctcctaagtagctgtgattacaggtgcgtgccaccacgcctggctaatttttgtatttttagtagaggcggggttttgccatgttggccaggctggtgtcgaactcctgacctcaagtgatccgcctgccttggcctcccaaagtgctgggattacaggcgtgaaccactgtgcctggccaattaaacgtttttaatacagtaataagtgaataatagaattgagccagattcaggattgaaatgatgtagtcctccatgaagaattcaaagcaagagttttcatctcaacctaaggaggaaaacatgagaatatcagtaattcaaaagaaaataaaagaaacatcttaaacataataaaaccagtgtccaaacaggatacaacacacctgtgtggaaaaaccacaatcagaatcagctcagagagaagattaagagatcataccctggtcaaagccaacagtgaagcaatggcaataccaggtcaggctctacttcactcatcatcgcatcgctgcatttcatctccttgtattacctaagagcaacccagtgccctagtttcacatccaagaaaacataggcttacctatgaaaaaaaataaagccttctattcaggtaagtttcaaccatgggtttctaattaatatttctttctttctttttttttttaagacagggtcttactctgtcacccaggctggagtgcaatggcctgatcatggctcactgcagtctcaacctccccaggctcagacgatcatcccacctcagcctcccaagtagctgggactacagtcacaggccaccatatctggctaatttttgtactttttgtagagacagggttttaccatgttgtccaggctgttctcaaactcctggactcaagcaatccaccttctccagcctcccaaagtgcgcggattacaggcgtgagccaccatgcctggcctgttttcaattaatatatatatatatttttattttgagacaaggtttcactcttgtcaaccaggctggagtgcagtggtgtgatcatggctcactgtagcctcaaactcctgggctcaggtgatccaaccaggtagctaggactacaggtgcatgtccaccatccctggctaattctttttaaatttttgtagagacaagagtctcggtatgtttcccaggctggtctcaaactcctggcttcaagtgatcctcctgccttggcctcccaaaaccctgggatcacaggcttgagcccataagcctgcccttagcctagttcaaaagcaaaagctttagaaaatatattttctttttaaaaatttctttattttttctggagacagggtcttgccctgtcacctagcctggagtgcagtggcacgatcatggctcactgtggcctcaaactgctgggctcaagcaatcctcccaccccagccttctgagtagctgacatctcaggtgagcaccaccacgcccagagtcttgccatgttgcccagggtggtctcaaactgctgggctcaagtgatcttccctctttggccttccaaagtgctggattacaggtgtgagctactgtacctggcctagaaaatatttttttttttgaaatggagtctcactgtgtcgcccaggctggagtgcagtggcgcaatctcggctcactgcagcctcagcctcccaaatagctgggactacaggcatgtgccaccacgcccagctaatttttgtatttttagtagagatggggtttcaccatgttggccaggctggtcttgaactcctgacctcaagtgatctgccagccttggcctcccaaagtgctgggattacaggcgtgagccaccacaccgggcctagaaaagattttctactaaatttctttataaactccagttcatttaatatgcaatttgatttataattcttctgccaacaaagattaaaattatagtcataaaagtttttaaactagaatcttttatctgaagagtccaagaacccagagaggctatgatttgccgaagatccataggaaattaactgcagagctggaaagagaacttgaggtatgattaccagatttatattttttcagtagcaactaaataaaaggttcaatttcatttttctctagggtactacctttagatttactaatgaggaaggacatggaagataaagcagggcaaagcatgggtaattcacaatctgaaaaatcaatttgtgaatgagaaacctgacctccactccactccactccctcactctgtcacccaggctagagtgcggtggcacaatctcggctcactgcaacctctacctcccgggttcaagtgattctcctgcctcagcctcccgagtagctgagactacaggcgtgcaccaccacacccagctaatttttgcactttttagtagagatgggctttcaccatattggccaggctggtcttgaactcttgaccttgtgatccacccacctcaacctcccaaagtgctgggattatgg

SEQ ID NO: 1887251 - DNA, 4001 bp, Homo sapiens
gtgaaaccccatctctactaaaccccaacatggtgaaaccccatctctactaaaaatacaaaaattagctgggcatggtcgtgcatgcctgtagtcccaactactctactcgggaggctgaggcaggagaattgcttgaacccgggaggcggaggttgcagtgagccgagatcacgctattgcactccagcctgggcaacggagtaagactccgtctccaaaaaaacaaacaaacaaacaaacaaaaaaaaacaaaaaaaacaagagggggcgcggtggctcacacctgtaatcccagcactttgggaggctgaggcgggcggctcacgaggtcaggagatagagaccatcctggctaacacggtgaaaccccgtctctactaaaaatacaaaaaattagctgggcatggtggcgggcgcctgtagtcccagctacttgggaggctgaggcaggaaaatggtgtaagtaaacctgagaggcggagcttgcagtgagcctagatcgcgccactgcactccagcctgggcgacagagtgagactccgtctcaaaaaaaaaaaaaaaaaaaaaaaaaaaacagaaacaaaaacaagattaaatcttaccttttttggtcttcaattccccgttctaatgccacaagtgttgggattacaggtgtgaaccactgcaccactgcacccaccctaataccctttttataaagctgccaacttctattcaaaacctgctatggaacaaatactcatggcaaaaaagcctcagtatcacacagaagttgcatcactgggatgcttcagacaggttcagacattttgaataaaaacatcattggctcttaagccagagtactgaaaatacctctaacccagagatgtaagattttgaaaccatatattttggcacccctccaccacaagtcactttcccaaaagacaagatggacaagaacccagcttccccattgctaacctgcagtgtgctgagagaataaaggtgaggctcggaagcgcctgaatccacagtgaaatatgagctcttccttggctttcacaggttcagtgttgccagggtcacgcctcaccaccatattcaatactgacatctggggaccaagtaagaaaaacaaaaatcttcatagtctaggaatacaattgcctaaactgaaagaaggcaaaccaaactagcagattcagactcattctaagaactgacaatgctaattaatggtggagtgtagatgctgaaacacgggttcatcctttacctccaccaatgactggcatttaagccaaacacaggctgatcagagctttcatgcacccttcaatgctaacctaccttcctgcacctaacagaaaagagctcaacatctgccacacaaaaatcagtggccttcaaggcattcactcaccacaatctcaaaaccacactcattcaagccccttcttcttgagcccttaccaaaaccgatcaaagaactatcacataccccacaacatacacaactactggccaccaagagaaaagagatctgcactttggcataaactttttttttttttgacataagagtttcgctcttgttgcccaggctggagtgcaatggtgcaatcttggctcaccacaacctccgcctactgggttcaagcaattcttctgcctcagcctcccaagtagctgggattacaggcatgtgccaccacgcctggctaattttgtatttttggtagagacagggttcctccatgttggtcaggctggtctcgaactcccgacctcaggtgatccacccaccttggcctcccaaaaagtgctgggattacaggcgtgagccgccgcgcccagccaaacctttatttttaaggctgccaacccttattcaaaatctggtctgaaaaacatacttggagaagtctcagaaccacacagagattgcatcactgagatgcttcagacaggttcagacgatatgaataaaaccatcattgacttctctattattctccaattcctaatcataaaggcagactttttgcatcccaatgagcaaaattttagtcacacataaacagaattttagactgtcagaagcagctggaaagtttcacaaccccccattttcccacaagacagcaatttaccttctgttcatgaggtagtaaagaaaatgcaatcaagggtgttccttgcctgaagcactcgaccactgagacggggacttcagagacatgaagtgtgacataccagccaacctgccacaagaaagcagaaagcaatcatggagttacctttcaaagtcccaatagcgaggaagctttctccaaatatgttgagtctctcagataaaatttttaaagccaaccctcatccttcaagatgcttcatttacccagatcacactttttcatttaacatagctgatacctctttgttcccagtatcattctaatcaatgactcaggggctcccctaatccccaaatgcagcatattttcatgccaagagaaggaataaagtagggagcatgttgacaaatgaaagcaacatacaagatgaacaaggaggatagatacctcagctccttcaacctctttttcttcaacctctttaaagatgcttttcctagtgttagtaaagttctgaaactgaaatattcgagcataatcttgaggaaggttttccttaggatcccatggagatgtccggaagctcttaaggcctctgtatttctgaaatctagaatattgaagatttttaaagacattaagtcagatttatatggtgctatatagactcaagtcactgctaaaatggctaaggagctagctgaaaagaactccaatcatcctctctccaaacaacccaacagcttaaaccaagacgacactccgaacagcttataacaagttctatcggaaccaaacccaagcttctcactgacaaaaaagatgcttggtaatggcctgatacagttcagatgtgtctccctgccccaatctcatactgaaatacaatccccagtgttggaggtggagcctggtgggaggtgactgcattaggggagaggttttctcatgagtgggttagcaccaccctccttgttgagtgagttctcatgagatctagttgtttaaagtgtgtagcacctcctgccttgctctcgttactgcgctggccgtgtgacatgacttgctccccctccaccttctgccatgattgtaagtttcttgaggacacccccagaagctgagcagatgccaacaccatgcttcctgtacagtctgcaggaccatgacccaattaaatctcttttctttataaattatgcagtctctggtacttctttatagccatgcgagaatggcctaatacatagccttacctcctaatatccaaaattaattcactggctttagtcactcacctccagaacagatataatcatctacttcttcactcttctacttctgctattctacccaaaccccctaaaatttccaaacattatatacttcaattgagtactggctcctttgggaagaagtatttgctaattaaccttagtatttccccttcattcaagtcctgtaacgtgagtctgcaccacagtctagaacttaattacatatgaccatttcccgtatgtatgtcctgccttcccatattaaatgttagctcttcaggagcagaaaaaatgtgtttttcttcttttgcatcacagtgacacagctctgagccaagtttttaaaaacgtattgactgaatttagatttgttgatagacttgttgactaaccgaattcgagcagccacatcacggggcgtgtccacttcatctggaaacatctcttccagtctttcttgtttatatttctccaacatttttgcctcagcttcttcatctactttcttatcatacagatcatcatgcacagactccccaatagtcatagtttcatattcttcctcttcttcactactctcatcctgtagaatagg

SEQ ID NO: 1887252 - DNA, 4001 bp, Homo sapiens
gtttgagaacagactggccaacttggtgaaaccccatctctactaaaaatacaaaaagtagctgggcgtggtggcagacacctatggtccgagctacttgggaggctgaggcgccagaatcacttgaacctgggacggggaggctgcaatgagctgagatcatgttactgcactccagccttggtgacagagttggactctatatcaaaaaaaaaaaaaaaaaaattgtagagaccggagtctcacactcctgacctcaagcgatcctcctgcctcagtctctgcaactgagacttttatttagttccagttctaaggatctgcctttacaaaataagcaaagaagtaaataaagttttatgcatacagatctagtttagagcaaaacattagaaatagcctaagtgctcacccgtagaagctcaaataagtatcagtacatcacatacactggaatatatccaaatgacaataaagcattaaaagtctcattaactaattaatcttatggaaaattgatcaaaatcaattaagtgataaatgcaatgtttaacaccatatttacaattacaatccaaattgtgtaaagaaaaaaaatgagatctggatgaaaatgtataaaataaaaatgaattttctctaatataaggtaattttacttttacattattccttattttcccaactgtataaaatatgaaaatagttcatcctaaaaaaaaaaatcaaaaccattttgaaacaataaaagaatgactggccaggcgcagtggctcacgcctgtaatcccagcactttggaaggccaaggcaggaggatcgcctaaggtcgagaccagcctggccagcatggtgaaaccccgtctctactaaaaatacaaaaattagctaggcgtggtggcgggtgcctgtaatctcagctactcgggaagctgaggcaggaaaactgattgaacctggaaggcagaggttgcagtgagcctggattgcaccattgcactccagttgagcatcagagtgagactcggtctcaaaaaaaaaaaaaaaaaaaaagaggccaggcacattggctcatgtctgtaatcccagcactttgggagaccgaggtgggcggatcacctgagaccaggagttcaaaaccagcctgaactcctggtcttggtgaaaccccatctctactaaaccccaacatggtgaaaccccatctctactaaaaatacaaaaattagctgggcatggtcgtgcatgcctgtagtcccaactactctactcgggaggctgaggcaggagaattgcttgaacccgggaggcggaggttgcagtgagccgagatcacgctattgcactccagcctgggcaacggagtaagactccgtctccaaaaaaacaaacaaacaaacaaacaaaaaaaaacaaaaaaaacaagagggggcgcggtggctcacacctgtaatcccagcactttgggaggctgaggcgggcggctcacgaggtcaggagatagagaccatcctggctaacacggtgaaaccccgtctctactaaaaatacaaaaaattagctgggcatggtggcgggcgcctgtagtcccagctacttgggaggctgaggcaggaaaatggtgtaagtaaacctgagaggcggagcttgcagtgagcctagatcgcgccactgcactccagcctgggcgacagagtgagactccgtctcaaaaaaaaaaaaaaaaaaaaaaaaaaaacagaaacaaaaacaagattaaatcttaccttttttggtcttcaattccccgttctaatgccacaagtgttgggattacaggtgtgaaccactgcaccactgcacccaccctaataccctttttataaagctgccaacttctattcaaaacctgctatggaacaaatactcatggcaaaaaagcctcagtatcacacagaagttgcatcactgggatgcttcagacaggttcagacattttgaataaaaacatcattggctcttaagccagagtactgaaaatacctctaacccagagatgtaagattttgaaaccatatattttggcacccctccaccacaagtcactttcccaaaagacaagatggacaagaacccagcttccccattgctaacctgcagtgtgctgagagaataaaggtgaggctcggaagcgcctgaatccacagtgaaatatgagctcttccttggctttcacaggttcagtgttgccagggtcacgcctcaccaccatattcaatactgacatctggggaccaagtaagaaaaacaaaaatcttcatagtctaggaatacaattgcctaaactgaaagaaggcaaaccaaactagcagattcagactcattctaagaactgacaatgctaattaatggtggagtgtagatgctgaaacacgggttcatcctttacctccaccaatgactggcatttaagccaaacacaggctgatcagagctttcatgcacccttcaatgctaacctaccttcctgcacctaacagaaaagagctcaacatctgccacacaaaaatcagtggccttcaaggcattcactcaccacaatctcaaaaccacactcattcaagccccttcttcttgagcccttaccaaaaccgatcaaagaactatcacataccccacaacatacacaactactggccaccaagagaaaagagatctgcactttggcataaactttttttttttttgacataagagtttcgctcttgttgcccaggctggagtgcaatggtgcaatcttggctcaccacaacctccgcctactgggttcaagcaattcttctgcctcagcctcccaagtagctgggattacaggcatgtgccaccacgcctggctaattttgtatttttggtagagacagggttcctccatgttggtcaggctggtctcgaactcccgacctcaggtgatccacccaccttggcctcccaaaaagtgctgggattacaggcgtgagccgccgcgcccagccaaacctttatttttaaggctgccaacccttattcaaaatctggtctgaaaaacatacttggagaagtctcagaaccacacagagattgcatcactgagatgcttcagacaggttcagacgatatgaataaaaccatcattgacttctctattattctccaattcctaatcataaaggcagactttttgcatcccaatgagcaaaattttagtcacacataaacagaattttagactgtcagaagcagctggaaagtttcacaaccccccattttcccacaagacagcaatttaccttctgttcatgaggtagtaaagaaaatgcaatcaagggtgttccttgcctgaagcactcgaccactgagacggggacttcagagacatgaagtgtgacataccagccaacctgccacaagaaagcagaaagcaatcatggagttacctttcaaagtcccaatagcgaggaagctttctccaaatatgttgagtctctcagataaaatttttaaagccaaccctcatccttcaagatgcttcatttacccagatcacactttttcatttaacatagctgatacctctttgttcccagtatcattctaatcaatgactcaggggctcccctaatccccaaatgcagcatattttcatgccaagagaaggaataaagtagggagcatgttgacaaatgaaagcaacatacaagatgaacaaggaggatagatacctcagctccttcaacctctttttcttcaacctctttaaagatgcttttcctagtgttagtaaagttctgaaactgaaatattcgagcataatcttgaggaaggttttccttaggatcccatggagatgtccggaagctcttaaggcctctgtatttctgaaatctagaatattgaagatttttaaagacattaagtcagatttatatggtgctatatagactcaagtcactgctaaaatggctaaggagctagctgaaaagaact

SEQ ID NO: 1887253 - DNA, 4001 bp, Homo sapiens
caaagagagagtgaagcgtaccacacactacaaggcatttctgggcttggaccaagaaggggcgagggcggagaaagaagatggcccagtcaaagggcaacacagcatcagcagggctcctggggccaagaggaaagagatgggactgagtctgccaccaagccaggagcttggggtgccactccttacctgcgctttacctgcctccaaagcaccttgatggagccgcaaggatgggaggcagctttctgtgacctgtgagtcgtctcagggaaatagaaggggaatccatgaaagaggcagcaagagtctcagaacattatgagcccagaggacagagcagagttcacgtggacagaggctggattctgcgggaaaccagacctggagacaacagcagagatgaaatcttgtctccttcagaagtttaggcacattgtcagccctcaggcaatattcactgaattgatttattcaaaaatcagaatgatttgacgttgggctaaatgggagagacatgacaagtgacagggaaagacaggatggaaaggacatggtgtctccaccacgttgtacttcctctacccagaactctactctgtcatctggagtcctagaaagatttagatgtagccaccccattccccccatccctgcccagcctcgtgttcgtccatactttgcaaatttgcaagcacccgcaacagcctgctttgccgcccatgatacagcatatatttaatatagttggggttcaaactaatgctctactgggagctccctaggaaaactctagagccaggtccctggggagaagtggaccctggaggcgtggggatggggtgaacgcctgggtggaatatctgagcaaacctactctgcctttctgtccaatcatacggtagaaagcataccttccaggtacagtatcaacccctccgtcagggttagacaccaccttttctcctggctgctgaggaaaacatctcaacctatgagatgtctccactgctccaagaaaatgagtatttaggggaaagattaaatgcccatatacttgaatctatagtgaccctacccctaaattatactagtaactgtttatctgtctctgctttgcctgtggatattaaggcagatgagacaaaaagtcttcttttgccaaccaaagctaacagtttgcgagctttagggggaccccaaaggggaccagtttctgtaatacagttgatgccttctgtctgtgttctgtcaggattccctcacattttagccaacctggaaactagggaagaaaaagtaacaggttccagtcctagaactctgtggaagaaatcaacctgccctttctcgtgggggtaaacacatgtgatccaaaagatagtgacaggaacactgttatattttccgggtcttaatgatttggaaggggaatactgtcccctctcctaggccagtccaaatttcacaacccatccggaaaacaaaaggctgaagacagaaaaagaagacatttactattccacttcttccttttacatcagtgagagaaagggccttgggagaaagatggcacagagagaaacaaaagaaagaaagaaagaaaaccaaaaatctctgctttctcaaaaatccctggtctgcctatctaggctgggagagaccccgagggcagcctgtctctcctgcagcctttgcagtcagcgacaggcatcatgaaattaatttgaaataaacaatgacaaagcaggaagctcaacgggtccctgagttgctttgggcccccactcctccccgaagcccctgggctgtttaacaaagccgtgggtccgcctaccccaagcactttttgtgacgtcacagctccgaggaccatccgggggctttactctcgcggaagcccaaaagttggggtttgacctcatgaccttggccttcccggggggcgggaggccctcgggacaggacgcgctgtccccggagtccggagctcaggccagtggcagtcgacccagcccccgagactccctcacgccgctccaaaaccaaaacggagcccaacacgaagctgggtgaagccgtagcttgcaggagccagggagatgcgctctgcccgggacttcccgggtcctgttgagacggaaaggatcgcagggaagacaggataattggtctttaactctgaccgttaccttcgaaattgcaccttacaagcatgtcctctatttccgtggcttgatggggacactttctctgattaagatccggaataatcacccacccaatgggatctcttagagggaagcgctggttagaatccctccaggctgagatgcaatcatcgccattgagcctgccctcccctagggaaaccccacaaaaccatcctgagaatctcagccctctttggtcggtacctgagactgcatagacctaaactgaaaggtgatcgaaggggaggagcagttgctcgtgcggaggaagctcttggggccgaagtggccccggccgagtatgtcgcaaaggaggcaccactgcgttgagcgcttactgtatctttacttttaaatcaccaaggcaaaatcaccttcagctaaaaatgcctgaaagactttttaaaatagtgggagtgggcgttagggggaagagatggcctaggaaattttccgcagggcgttctagggatgagttgagggaagccgcatgacgcgcggctccccggtgccacagctaaggacagatattttcgcaaaacccagaatgaaaaaagagcacgctccctttgggagcgctgtccctttgggactggggccttccactcccacccctcctttttccctgatcggctccgcagctccacgacaagccagctggtctggtctctgacttgggctccggtccgtacccccggggcgccctgctgtgttacagccgcccgacgcccccagacccggccaggtcaccagggcagattggaggttcgcgccccctcacccgacacctcccgtccacctcatctttctttttttcgaaaacaggaaagggaagaaaactgaaacgggcctcttggtctgcagttttagcggagtcgggattccacagccctgagtggcacatgccggtcaacttcccaaagtcgggctcccgtgtggggagaaatacacacgcaggaatgcacaagcatcgcgtgttcgcaactgtcgctgggaggtctggcggctgtgatgggacatgcactcactcgggcaacacgtccacaggtgacatctattcgatcagtcaacagatatttattgcgcacctacgacgctatctggtactttccttttccccttagctgttgctgtccagcccagcgccagtccagagacgggcttaccggccgctcccttccacaagaaactcgtgtccggcgtgaagagcggacgataaacactctccaagcccagcgaaatgtactaattacaggagcggctgggagcccgcgacacggggacctgtccctccagggataggagtcttctacctgcaagggacccggcctggggaactggaatagacaaggggtaaccccttctcccatcacctctaatgagaacattgtccggggctgagatatttgggggacgccgctgctcaccccaccaaactttccctagggacagaaaagcgtccctaccgaaaacggatttaaacaccgtccccacttttgctaaggaagtttggatagggaggttgtggtccttaattcgccaggtaaaaggaaccccatcagctcgcatccctcacccccatcctgagcactgagtgtttgcgagaaactcgccctgcgccagcaactctgggctccggtctcagctcccgcgtagacgcggaggagagattggcggcccccgctggggaaattgagcccggcgccggtccgggacgtgcaagagggggaaagggggagatcccagacctcggtttcccgagggcttccctggggagccactcgcacc

SEQ ID NO: 1887254 - DNA, 4001 bp, Homo sapiens
agatgaaaactgcagtccatttttaagtcgcctgttcataagttttcaggaagatgtaaaattcaaaaatgcttgcatcaaatcaacgggaaatgtataaatccccgtcgtttatgatgtaaaactctacatattagtatcttattgcataattgcattaaaagtatatttatacatatacgtatatatcttgacatatatttagtgaaatattccaaaatatcttaaagtcatagccctcttcactgactttattccagcaaacatggtaattacaatatcatacaactaagtacagacgacctggctaaaatgtctgcccgatggtctccgagtctcctgaatcaggtgtctgagaattacacagttatactgtacacacaatgcccttctacccgggacacagaaataggtccacactacgcggacttttttctcctaggaaaggacgatgctgttcttacactttctgaaagtaatcacagagccctggatacgaagctattgtatgcaaatctcttaaatttgtaaacgagctatagggcaccagaaacatcccatttgaagaagttacattcgttaaaaaaaaaatgctgttgaacaaggctgtaacttactaccttatgaagagttccatttcctataagaaatgtcgggcttcttccgaagacaacgagagaaaacaagattttaagaaattctcccggaaggacattgatttggatcttgtgatagtgtcctcacttcgcaaattagaaagggaaaaaaaaactagtttttattatgatgtgggccgattcaccacaacaataatttaattgaggcgaatttttgcaagagcccaaaagggtggggggggggggggagtttaaaattaagagtttcccaatgctgtgcgtttatttgggattctgaaagcacagaacccgcaagcgaccaagacttttcttctatcccagagcagatagctccgcacttacccaacctggctctaagcatttcgtgtaaacacaaaggttgtgctcaaatcacacttgaaatacatgagagacaccaccaatgcctcccccagaactcccaactacatgcaggtctgaaccgaccggactagagtcagaagcaccggcgcttcaccccttcaggtgtttcgtaaatgccagcaaaagcaggcaagcagcatgactccgccagagtggagcgttttgtctgcggtggtgcccatttgtttggtcttttacaaaccaagtgaccggcctgggcctcgcggcccgggacagccgcattggcaaacttctatctctcaaagccagagcagttagcaaactctcccccagacagggcgactcggctgacgtttttgacccggccaggaggcaaagaccaaaacgtcagagcagtagccctgttactgaggagcgtcggcagggtcgcgggtagagggggctggagaatgacttgtcagagctcaaggtcgatgtggcgcggggcggcctcgagagcgccgggctcctgcgtggccacggccgccgctgccaaccttcgcggggacttagctttgctttccattgactccctttgcaaaagcgcagcagaatcctgaccagccgcaccagccccggcgaacccgagcatgttaatctatttatatggattattacggaggaacagcgggcgttgagtcaccaaaacatttgcttcaaaagactatttctaagcacttttgcaggcaggcaggctcgctccaggcgcgtaaactcggctacgcattaagaagcggctgcttttcgaatactgcaaactccagctaagtccccggtgccgcggagagagcagtgaaaagaaatgtcggaggtgggggtagatcctagtctagacacacacacttgcgcgcacacacacacacacacacacaagattcgcgcggagaaggcactaaaattctggcattccgagagtacgacaaacttacacacttggaagtcccgggtcccccgccttccccgcagcaccccccgcccccccaccctaccgtccgccctttggctgcgatcccctcccctctcctcccctcccgcctcgtcacccagcccagtgccacaatcctcctccctccccaaaatcgggtccaatcagctgcctgccaaccctgggactgctgtgctgtgattggcgggtggctctaaggtgaggcggagtatttattaaagagaccctgggctgggagttggagagccgaaagcggagctcgaaactgactggaaacttcagtggcgcggagactcgccagtttcaaccccggaaacttttctttgcaggaggagaagagaaggggtgcaagcgcccccacttttgctctttttcctcccctcctcctcctctccaattcgcctccccccacttggagcgggcagctgtgaactggccaccccgcgccttcctaagtgctcgccgcggtagccggccgacgcgccagcttccccgggagccgcttgctccgcatccgggcagccgaggggagaggagcccgcgcctcgagtccccgagccgccgcggcttctcgcctttcccggccaccagccccctgccccgggcccgcgtatgaatctcctggaccccttcatgaagatgaccgacgagcaggagaagggcctgtccggcgcccccagccccaccatgtccgaggactccgcgggctcgccctgcccgtcgggctccggctcggacaccgagaacacgcggccccaggagaacacgttccccaagggcgagcccgatctgaagaaggagagcgaggaggacaagttccccgtgtgcatccgcgaggcggtcagccaggtgctcaaaggctacgactggacgctggtgcccatgccggtgcgcgtcaacggctccagcaagaacaagccgcacgtcaagcggcccatgaacgccttcatggtgtgggcgcaggcggcgcgcaggaagctcgcggaccagtacccgcacttgcacaacgccgagctcagcaagacgctgggcaagctctggaggtaggacccggcgggggcggcgcggcagggtgggcatcgcggcggctgggggcgctggtcagggctgatttgccccgccccgcctcccatcgcccgggagttgccgttccgggagccggcgggatggggttgggagtgggaatggggtgtaactgtggctcagagtttgacaaagttcttgggctgctcgcggggacgcggaggaggggggtggtaagtggaagaggtgagggaggtagctggaggatggacgaagactggtgggagacggaaggagggggctgccagcctgctctccagtcgcctggaagctcaatcggggcggggaagtgaaacttgcctccctcctacccggcctcttaaaactgcactctctcgtgcagccccactgtccacggagatggggcaagggagaaaccgaggttggaggagacccttggcaggaactgggaggcgggaggagggaggctactggaaataggtgggagtgtatggtggggggtgagaattggggaccttcttgcagcttaagtaatttgggggaaagttttcaaagggggttggggttgggggcggtaagtcgagcagcaaaggcgtttagggggcagcaccgggagtcgttttcatctccagcgtttccaaaatagaaatagaaggggaggggagggagggggcggggagtgaccgctcaggtcagactgcaataacttatttatttatttatttttaagaaaagttatgagctgtggttgcaggcaggagggaagatggagttgtgtgcagaggaagccgagtggtctgggtcgccgcctcctccccgccgacctgacagtttggcggatttcactgacccctctccctctttttctctgtgccccccgccccgccccgagcagacttctgaacgagagcgagaagcggcccttcgtggaggaggcggagcggctgcgcgtgcagcacaagaaggaccac

SEQ ID NO: 1887255 - DNA, 4001 bp, Homo sapiens
ggagactctgtctcaaaaaaaaaaaaaaaaaaaacccatgaaccaaacccatctgagttgaagtgcactcactactgcttacacaggttcaactgcaggggcttaggagggcaggagtacagcaatgttcttatacagaaagacaacttcggccaggtgcggtggctcacgcttgtaatgccagcatttgggaggctgaggcaggcggatcacaaggtcaggagatcgagaccatcctggttaacgtggtgaaaccccatctctactaaaaatacaaaaaattagctgggcgtggtggcgggcgcctgtagtcctagccacttgggaggctgaggcaggagaatggcgtgaacccgggaggcagagctttcagtgagacgagattgcgccactgcactccagcctgggcgacagagcaagactccatctcaaaaaaaaaaaaaaaaaaaaaaaaaaagaaagacaacttcaacaggaaagtaaatctactcaactttctctcaattatgctgatggaggaaaatgatggcagcacaaaaaaatccaaccagtggagaatccatagaccaatatcattaagccttgagacatgtattatttctttgcagcaaaattgtcttccagattctatctggctcaagctatgtacacataaaggatgacaggtatctaatgtagggcttcatgaagctcagctgtaatgcagacacctggccaggccaggaagttccccttacctggcacagtcctgggtgcctgcctagatggctcttgcagttccccttcctgatgctggtggaaagcagggctacagagaggtctcgacccaaggccgccccagccagctcagaattggactgggcatgagtgggtttcccatttttcagccttgcatccacagcctggaaaggctatgcacagccacctgctcagtgtactctcagttggcaattgcttgcattgacctaggggctagactcctactacctagcatgggcaaaatgtggaaaaagggaagcttgacaaagattggggagaccctggagaaatgggacattggcagccttgctatctaccaggacactggctcctatgaactccagtgcaccatggcaggggaaaccatgagcaaagggagtaaaatgctctgacccttgcttaaataaatgaggctggagggaaggggtttaaaactagaagaggtggcgggcgcggtggctcacgcctataatcccggcactttgggaggccaaggcgggtagatcacttgagatcaggagtttgagactagcctggccaacatggtgaaacaccgtctctactaaaaatacaaaacttagccgggcgtggtggcgggcgcctgtaatcccagctacccgggaggctgaggcagagaattgcttgaacccgggaggtggaggttgcagtgagccgagatcgcgccactgcactccaacctgagcgacagagctagtctccgtctcaaacaaaacaaaacaaaaccaaaactagaagaggaaaaccactctggtctgggataccttggtcccaaatttccttcttcccccttcccattcagccatcttccttctcacctcaccgtctcttcctcaccccactgcacctccccactcggggcatggtccacaagtcatttcaacctctcccactctcatgccctaatttctccccacaaccagattacccttttctctatgtgtccccatcaccttgcctcagagtctggcccctaattccattttccatttttcttttcccattccactagtctcccttcccagggggtacttcctgccctaagctcacctacaggcacctactatgggccagccacttaatactgactactcccctcaagcccccgggacacatcctccgccccgcctgagctgcaagagatcctcctatacctttaaccaacctccacgtgcgtgttaaccgcggtgacagcatttccttgtctctctgctcccgcccccaaaggcgctacccattggccgctgggttcctctgttctcgctctaattggcctcgttaccgaaaagctccaaccaatgacctctccgtgtctgtctccctcctccgatcctggaaactcattggctccgaggacttaggacctgttagcttggttgggcgactggcaaatccttccttccccggggtagaagtccagggtgagaaattggttccgaactcaaaggaacccagtgccgggccacagccgggtcacgtggccggcggccccccatgacgtgctggctgcggggcgtcacggcgacgttcgggcgacctgccgagtggccaggctacctcagtcacctgtgtggtcgcagtgctgccatggacctgggacccatgcgcaagagttaccgcggggaccgagaggtgccgccgctagggccaggcctcctgcaggggcgggggaaaaggggtccccggagtcatctacagcggggaggggagtagtaggagcccctcggggcttctggggccacccggtggggcaaggaggtttgaggatcaccccccgtgggaaaagggggcttcaaagacatcccaccaggggaggagttccggggaaacgcaaatgaagatgggttcaaaaggcagcctttcgtaatgggtaagagctcgaactttggagcctgcctgggttggaatgtttaatgtatctgggcctcagtttcctcatctgggaagtgatagtatctgcctcacggggatgttatggtctaagatgtttgtaaagtgcttagaaccctgctactcgacaggtagcaaggtcaaataacttgctcagtcccacagctagtgatgaatgaatcggggtttcatgtgatggatgtcaggactgtgctgggcctccctcaagggcgggggaagaggggtcctcggagtcatctactggggggaggggagtaggaggaaacagcccctcagggcttctggggccaccccctggggcaaggagatttgggggtcacccaaacctccttgtgccaggtgggcatggtcatgggcccctctttaggtgggtacagtgacaaacagcttacaaactgtttgacaaaaaagtaagtggaatatgggggaaggggactagctcggggaggaggggaggagaaagctcttagcttactgccttcagtactttctgctgaccactgggaagttcttttccttttcgctcctcaggaggggaaccaagagaaccttttaggaattggggtccagggccctggttgccaaatctggttgcatgtgggcatttctagaaacgcttgtttaaaatgcagtttttccagcctgggcaacatagtgagaccctgtctctacaaaaaattaaaattagtcgagcatgttggagcgtgcctgtaattccagctacttgggaggatgaggttggaggattgcttgagctcaggaagttgagactgcagtaagccgagatcacaccaccgcactccagcctaggtgacagagtgagaccctgtctaaaataaataaataaataaataaaaatgcagtttttgatgaagcctcagacctgctgaatgagaaattttgggggtggagcccagaaagttttttttatgctccccaggtgattctgatgcacagacagttttgacacccatgacatgtaaccctgatttatccatcactagctgtgggacagcaagttgtctgagtttttatgcctgtttcctcacctgtaaaatggggcacagaatcttcttactgcatactatttcttattttaaggtcattgtcatgaggactaaatgagttgatttttgaaaagtgactagaacagtgccaggtccatagtaagcactatatatgtttattaaatgaaataaatctcctttcctaggcatttgaggagactcatctgacctcccttgacccagtgaaacagtttgctgcctggtttgaggaggctgttcagtgtcctgacataggggaagccaatg

SEQ ID NO: 1887256 - DNA, 4001 bp, Homo sapiens
agtttaaaaaggctgggtggggtcgttcatgactgtactcccaacactttgggaggctgagatgggaggatcgcttgagcctaggaattcaataccagcctgggcaatatggcaagagactgtctttataaaaaattagccaggcgtggtggcacatgccggtagtcccagctactcaggaggctgaggcaggaggattgcttgaacctaggagttcaaggctgcagtgagccatgattgcaccactgcactcctgcctgggtgataaagcaagaccctgtctcaaaagaaaattaattttaatgtattttatttaacccaatattcctaaaatatttcaatatgtaaacagtattaaaaaaaaaaaatatatatatatatatttttttttttttttgagacaaggtcttgctttgtcgcccaggctagagtgcagtgggatgatcatagctcacagcagccttgaactaggttcaagcgatcctcccaagctgggattataggtgtgtgcccccaaccctgccacccctggcttaacttttttttttttttgagacggagtctagctctgtcacccaggctggagtgtagtggtgccatctcagctcactgcaacctccgcctcccaggttcaagagattcttcctgcctcagcctcccaagtagctgggattacaggcgtgtgccaccacacctggctaatttttgtatttttagtagaaacggggtttcgccgtgttgggcaggctggtctcgaactcctgacctcaggtgatccgcctgcctcggcctcccgaagtgcgggattataggcgtgagccaccgtgcccggcccaaattttttttttgtagacataggtctcactatattgccgaggcaggtctcgaactcctgggcttaaaggatcctcctgcctctgtctcctccgtgctgggattacaggcatgagccaccgcacctggcgatattttgcattctttttttcatacgacgtgtttgaaatccagtttgtacagtgttttacatttatagcacattcccactgggactagtcacatctgaagtgctcaaaagccactatggctagggctaacgtactggacaacacaatgctagaggagcccgtccctgaggacgctgcagtttataacatcatagttcctcctctttggactgctgctttccccctatgtattaagacttgcagagtgtaaacagggcgccgtgagtgtgcaaagcacacacaccttcgcaaacggctcactctgaatactgacctttcggctgtcctaccttcaacaggtttcccgtgcataggagatccaagacagcagaaggcaggagctggcgggacagggaggaagagcggctctgccgtttactatctgtgtgacgctgagcaaattacacacggtctctctgactcagctccttcctgtcacaaatggggatatttatagtatttctcactacgtaggtccttatgcgcattaaatgagctactacacggcattcggcatagcgccaggcacacactcaatgttcaatacatgtaggcggttagcccagtaaactggtagccggcctgagtaagtcccaggaaaagcccagaaactctggagacattacagcccaggtcgagaaccacggcccgggccgtcccggacgcgggcccaccaagcctagggaagccgctcggcaccgcttcggcttctagactccctggccggctctttcccgtcaaggctgcggctggagaggactgagggagacctagggagaggattcctcttctccatccacggagacaacttggatatgaacaccatggatgtgaggaggtccgctggaagcaggagggatggactcctggactctccagctacctgcgtggtcctccccggtgtgaggacagaagaccggtcctgggccgggcccgcatccagccctaccgccggtgtctgaggtgagggctccgtcagcggaaaacgctcgacaacggaggggcaggcagggccgggggcgtggtcaacgcgggccccgccccccgggctctacccccgagcgtacgcgcgcgcctgaagcagccaaccaggaagcgcagagcaggttcaaacacagacggcgggtgaacatggcgtcctcgacttggtctgagacgtgataggcctgccttctggttgaagatgtggcgagtgaaaaaactgagcctcagcctgtcgccttcgccccagacggtaagcgggagatctctggcggagagaactgggccgggctgctgtcgcgggggcaccggccgtgtctactgtcctggaaagttgggtcgagcccggggttgggggcttgtggagtctttgttcgccttgctgctcctgcgcgactagggtgcgagcgtactcttctaatcgcattttgggcttcttagggagggaggaggggcgggctggcagaacccaggcttcctcacactcgccctctttcttggtttctttctcagggaaaaccatctatgagaactcctctccgtgaacttaccctgcagcccggtgccctcaccaactctggaaaaagatcccccgcttgctcctcgctgaccccatcactgtgcaagctggggctgcaggtgagattcgcctggacagcttctcgactgggctgtttgcccagggtgagagctcaggggaacagagggccagggctacaataattaataacgataatgaagtcttctacgtcggtgacatccatttacagctattcaggccaacagagaggtgccctagggtggttaaaggaaatccagtgagaacttgaatctctgtttagctgttagtttttattacctcctcctcctcccttcgacctttatcaaactattgagaaatcctaccaccctgattagtgctcttcctccaacatggggtcacttacggaaaggtcagtcacctgcaagattgaggcaatatccatttactctaggaggtagttagaactctcctgggatcaagttacaccactggaaggtagggtacttgaatcaccttagtttaaactagctccttgcagaattgccctcactgatttgtacttttgttaaacgttttgagagacgtagccatgtagaaactgcatttcagttgctgtcaaaacttgtcaaggaagcagcttgactcctgtataagattcctccaagaaaggctttaggactaactgcctggaaaaattgtcttcctgaagaaattgctatccttttctttctgataatgagaactatgtagtttaccatattttccctcttgctctgccttctagaaagctcaaggccaaactggatcatcacatacagctactgttatagctgtataggaagttttgcttcctcttttttgaccatgactttgttatttcattaatcgtatctattcattttcatgcatatgaattatttttggaaggagatgggatatcaataaaataggtatgaggaggaaagaagagtgtatagacagatgacatcctgagtaacagaagtatgatgatagcatagcagtctttcttgaaagagttgcaaaatacctactgtccaatagaactttctgggatgagggaaatatttgataatctgtgctgtccagcatggtaactactagtcacatggttattgagcacttaaaacgtggctgaggtgactgaagaattgaatttttttgtttttgagacggagtcttgctctgtcacccaggctggagtgcagtggcgtgatcttggctcactgcaatctccgcctccagggctcaagcgattctcctgcctcaggctcctgagtaactgggattacaggtgcacaccaccacgcctggctaattttttgtatttttagtagagacagggtttcacaatgttggccaggctggtctcaaactcctgacctcaagtggtccgcccgcctcggcctcccaaagtgctgggattacaggtgtgagccactgtgcctggcctg

SEQ ID NO: 1887257 - DNA, 4001 bp, Homo sapiens; identical to SEQ ID NO: 1244787

SEQ ID NO: 1887258 - DNA, 4001 bp, Homo sapiens; identical to SEQ ID NO: 1244790

SEQ ID NO: 1887259 - DNA, 4001 bp, Homo sapiens; identical to SEQ ID NO: 1244791

SEQ ID NO: 1887260 - DNA, 4001 bp, Homo sapiens; identical to SEQ ID NO: 1244796

SEQ ID NO: 1887261 - DNA, 4001 bp, Homo sapiens; identical to SEQ ID NO: 1244809

SEQ ID NO: 1887262 - DNA, 4001 bp, Homo sapiens; identical to SEQ ID NO: 1244812

SEQ ID NO: 1887263 - DNA, 4001 bp, Homo sapiens
aatcacggataattttctcgatatgataatgaagattgtaaaccttctcttattctccctgttttcatcctacttttaagtaataaatttggcattaatggaaggggagcagggaggaaggagaagtcacctgccccccaaagctggggcctgacaggggcccacgcagaatcaatcccctgcccccgggccgtggggcagaccggagaagagaatgaggggtgtggaccctccgcggggttgatcaattcagggggccaggccctggagagcaggtggagggcagggagctttcaggctgtgagccagggtgaaggagtggggtctggggtcaggttaggcacatggcagcccttggggtgttggagagagaagcagaaaccaatggtctgtccccaaacagcatggaggtcaacggccgggaatatacattcaccctcaggtgtgccccactgggtccaacctcctctaagcagtgactccctaccaggataagggagccgggcaagcagagaggggaagagagagagagagatatagagaaagacagagagcgagagagagacagcgagagagagagcgcgagacagcgagacagccatcttggcagccattttgaacccctccccctcctgcccccaggcacacatgttgggatgtgggatgtgggaagacagaccccagctctgagtctagtggaagccaggcggaagaggggggccctgcctggaactgggatacagaaacccccacgcagctgccatggctgggggtggatgggggttggaacaggaagaaagggtccaggcaggtacagtgaggtgctggccagggatggggcagtgtgaggacctggactggaagtgtagggacaggggtgtgtgtagccagcggctgtcttcagatgggggccgggggtgcactggagagatacctgggagggcattttctggacacggctggagcaaacacagcacccccccaccccaccacttcaggcctggactcgggtcccaggaccgtcagatgggaggatgacaactgaaccctcgtagctcaatccaatgcgcacctggggtgggggtggggagctgtcctcaaagcacgaataatccgggtggatcaaacctgccggcctcccgtgctttaacccggcaccacggagagaaggtgctgcctggctgcaccccctcttcctgacagcggcgccccccggactgcggccggcttgacacccagacggacccctccccatcccccgcgccactgcctcccagagaaaaacaaccccctcgcccagcatcctgtggtgccaatccccgacacggatcctctggggcccggggccggcgcgcggcgcgcacacgcacacgcaccccctccgctcacacccagacacctacacaaacagggcgccaaggacccgcgcgcacacgcaccggggacacgcaggcaccgcggcgccgcttccccacaaaggctggcgcgcgcgcgggcacactcgctgtcccctccccccgccaggcaccctgcggtcgcccgtccgcacccccgcgccccgggagctccgtgggggccgcccctcccgggcccctcgccagtgggggtgaggtgcgggctgcccccgacgcccctcccgctcaggtgcggtgccccgcgcggctccagcgtcccctccgccctcgcggccaggacaggccccggcctcccatccttcccgcctcccctcttccgcgcgccccgcacacctggcccaggtgcggcttcgcccctcgccctgggcccgcagacactcacctgtccagcgccgctctggggtcggcccagcgtgtctctcctgcggctcggcgaacccgggccccccgcccggcacatctcccggagccggggctggggggaagctggtaggaggtggcggggcgagggcggcctccgtgtcccttccttcccctggcccagcaccgccgccaccaaccaaaaattagaaaaaaaaaaaaaaaaaaaaaaagaaaatagaaaaaaagaggcggattacacggatccaaaggcggccccctcgcggcggcggaggctcgggactgggggcgatcgggtctgcgcccctcccggggagggaggctgtggggcgggggcggcgtcagagcgccgggggctggggcgaggcggagcgccccgaggcggcgccggcagcggcccgcatctcccccgcagctccgcggccccaacggaggcggcacgtgtgtgcccaggcgacttcccagccccctccgacggcggcggtggacgaggggttaacggggcagcgggggcgcccctgcaggcccccgccgctcggcggcgccgctccggggcccgcgcggccccctcagccggggcctcctcggcagacggcggggcgggggcaccgcagcgccgacagctcccgcgccgacggctcgggctccccgcagtggccgcggggagctcgggttgggggcgggcggcgcggagctggcggagaggggcggcgcggccggaggggggggcgccaggccgggcccgtgggcaccgcaggacgcgcggaccgagccggagccgggaaccagcaatgacaagccgccagctctcccctctccccggcgcacccgctccgggaggggggcggtgggcgcgcgcaaaatccggcccggagtcgccgcccgggactggccgccgcaacccgcttgagcgccccaggagccggcccgaaaacccgtgctggagtttccttcctttcgcctcctctcgcctcctccctggaaaagcagagagagggaaagcgacgtgctggacccccgcgttggagcggggagtcggggaagggagacaggcgtaaggaagacccggagcggattttccagtgaagtaaaaggaaaggcgccgagcccggggaaggagggcgcaaatggggagatctggaagggttgtgcaaaacccgagttggattagataaagatgggagaaacggtgttggagcggggggttggggggtagatgcgacatggccaaacgcacccggggcacgcaaatttcgggccggattctttcttgggagacggagtaatgcgtcaggcctaacgcagtgaaaacaagcaagacccagcccggaactcccgggacctgggttcgcatggggggagttctggaagggggatgcttagtggctgaggcgacttgggctgccctcatcttcctggcagcgacgtgcaagggggaggggcaaaaggagggctggactcgggtacgacgggattcggcgtgctggctgcaccggagcggacaggtaaaagcggtttctggatccaggggcgctgcgaagggaatgcgatgaggccgctaccctgggagaccagacctacaataaaaggcgagggaggcacgccaagccaggactggagcgcgggacggaatgagacccttagcagaagatcctgggccaccgggacaggggcttggagctgaccgggtagcaggggcggagggaagcgttaggggaaggtttgtatctataaacgcctcaaagtcttgcttttggggagggggtgcgaggagaaaaattgaattttatgttctctgaaagagtaaaaacccggcatggattttcaacacctaacaactccattgcagctggtggactctaagaagtagggcaagaagcaggcttgggttcccaggcatcagaccaagtaaggcgaggggcaggtttcgggttgaggctgcagagggagcccccgcaccccctctctggggtggggaaggctgttggacccggcttggctgtctggagagcgaaagttgtgactgccaagacctatagctggggctataaaactgggccccaagccaaaaataggcacttcggcagaacaggcaactttgtgcagggtgggggctggagggaaatggaagtcgggggaagaatcctggcgtagagggaacagggggaggggggagtccctgaagcggggctgctggctccattt

SEQ ID NO: 1887264 - DNA, 4001 bp, Homo sapiens
tccctagatgggccccacacctctggcctaacaacaacctcgggctggacctgcaggggagtcagggaggagttctgtccctggaaaggaggttgacccgacctggtgagacatgtcctgcatcagaaaggcctttctaaaagcaaacccatccctgagctgagacaggtgctttaggggtgaggggagtgcagaggactcactgtacaatccccaaatgatcgacgttgttgttgtagcttccaaaagacttaggccccttgtcctctggcagcccagctcggtgtccctgtagcccagagggagccttggtgaggggtccaaggtaaagggtgcaagggcctgggggcattggccacccgtccctgccctgtgctcctagggagcccaggaccctttgaccagggcacactggaagaggcctccctccaagaagcagaccgacttgtaccttttcgtatttcataatgatgtcctctcgctcttgtgcccaccaactacccgcgacctctaccacgtccatcctgtgagacaaaattgtctaaaggttacactgtacgcggcggcttcggagaacacctgaaccgctctcgccgggctcccagatgctggctggctgcgtaacccccattccaccgccgcccccagggaaaaaggggccagacccagtggcccacagctgctcgagtctctggagtctcaagtcccaagcaggggtgggcatcttcccaaggacttgagtacagtgggacctagacagagaatcctgttgtcccccagtgccatgaaatggggacacaccggccccagcaggttgaatggtttccacctgccaagggtgaagggcccatgatgggctattccagggatgtggaggcagactggggtcagcgaccagaggtctctgtacaatcggcctcctgggatgctcagggcctcagagatgcccagtttcctacagggaacaagatctctcctgactgctcggttctactccgctcatcactttggctaccgtggctcttcagtctgaacagtgaagccacttcaggaataacgcctgttgagcaggagggtgttcggtttgggggatgagaaagatctattgtacgcatggaaaccacgtctcttgcggagggactgtggagtccaccattctgagccgtcccaacaggaggaggcttcattttcctgggtcactgaggaagaacagtgggtccttggtcctggagaacacctggatggaccgtccctcctgggaatactcgaggcaaaaggagggcgaggcctcaagaggaccacacagagcaagaaatgcctggggagaaccctagtgcccggacccctttgaacagaagggaagatagtctcccctcagccagccctccagggctccttcattttccacagctgcccaagggcagcaggctcccccggacaagggaccatgtgtgttcagtggggcccacagcgaccatcgggacccagcttagggcacagaggtgttctgaggaccgtcagtggatctataccagtggatctgtaccagtggatctgtaccagtggctctgccaggaccaggctctgccccatcgggatcggaaacctgggcagatttgggatctagggcagggaggtcacagggttcaggcctgaattccagcacagcacacggcagggctgagagcaaaactcagggtcatgtccggattcccaggccggttactgcctctctgaccccagacgtctcatctgtcgaatggttacatttgggaacagcacccactctacgaagccaccatggagacgaaagagccaatcgtctacacgggcagtgtagaacgggcgcctggtgagtgctcagggatgaccctcctcggtagctgccccacagaggccaacaccgcccgcaccgtagccactgtctccaagtccgcctggagggaagagagcaggtcacgctcacctgactctgatgaatcagctggcctgggtcatgcctctcagggagaaaacctttgagtccacagagctgctcacagataccactgcctgtgtgtaactgccgtagaacactgaggcaggccagagagcggataggtgctaagcaccagtgacattctgaggtcatggcacgcatcacaatggggccttgcccgggtcagcagcgcccagagtcagggtcctccgctgcctgaggcgtcaacatgcctgcctgcaatgtgtttgtgcacgtgcgtgcacacgtgtatgtggctaaacatgtctgtgcacatgtgtgttgcttctctggccaggcccggctgccccactcatgtgtgcacccagttcctcatcactgtcacccccgaggcccagggccagcatcagagcgcccagggccagcatcagagcatccatggctgctccctaacctcagccctccctgcccagggtggtcctgggatacacataggggtggagggaagtgactgctgctgctgctggatctcagaatacaaaagctaatactattacctaatggtctttttagtgtctctaatggtatcgctttttcatttctgatattttaactgggtatttctctccatgacccttggatattctagctagaggatcctgtgaggaaagtgccgggcacacagtaggggctcactcttctagacatgttatctaaaacctgattcatctgtccttccacgcagggcctaggggatgccaaattccagggtccagaaagagcttgggataaaatgaaacttcaaggggacggctttgacctgggctgagtctgcctgtgccgagtctgcctgtgccatccaactggagtctcaagtcctgaggcaggacgtccagatgccccagtgcagggtcctcctgatcaacacctgtccccctgtactcattagcaacctcacccaccctactctcaaagcacacttggctctcatatccaggagctctgcatctgtagattcagcaacagcagatggaaaatattcagaaaataaattggatggttatatttctattgaacatgtgcagactttgttcttgtcattattccctaaagaatacagtatcatgaccatttatgtagcatctgcattgtattacacatcctgaataatctagagatggtctaatgtctacaggaggatgtgcatagctgatatgtaaatactaggccatgttatgtcagagacttgaggatccatggattttgtcatccccggggaccctagaactaatccatggataccaagggatgactgtagaaactcactcaggaaggcttctcattggaggaagggcccagttcaggacacacagggacatctccctggactactgtccattcatccatccattcatccattgtctccccccacccccccatctcggactgtcccaatgacagccctagcaagaagagacaagcaacaagataagttcacgttgtccagttttgaggtattggaagaagttgcaccggtatgagaatagtgggtcagttttctacaggatccagaaagcatatcgggcagcctcggggtgcggaaaggagcctggcctctccagcagccacacaggcctgcagtaggatggggctggggctggccatgtggatcacttgggcctcatgaggggaaaggaaataccagggggcagaagaggagcatgggggcagctggttgcctaaggggaaggcacctcagggaaggggactgtattcatttgttttcacactgatgtaaagaaatacctgagattgggtaatttataaaggaaacaggcttaattgacttgcagttccggaaacttacaatcatggcagaaggggaaggggaagcaggcaccttcttcacaagacggcaggagggagtgagtggagaaccagtaagtgccacactttgaaactatcagctctcctgagaactacctcactatccggggagcagcacgggggaaactgtccccaaatccaatctcctcccacc

SEQ ID NO: 1887265 - DNA, 4001 bp, Homo sapiens
agggaggagttctgtccctggaaaggaggttgacccgacctggtgagacatgtcctgcatcagaaaggcctttctaaaagcaaacccatccctgagctgagacaggtgctttaggggtgaggggagtgcagaggactcactgctgcatcccaaagtgatcgatgttgttgttgtagcttccaaaaggcttaggccccttgtcctctggcagcccagctcggtgtccctgtagcccagagggagccttggtgaggggtccaaggtaaagggtgcaagggcctgggggcattggtcacccgtccctgccctgtgctcctagcgagcccaggaccctttgaccagggcacactggaagaggcctccctccaagaagcagaccgacttgtaccttttcgtatttcataatgatgtcctctcgctcttgtgcccaccaactacccgcgacctctaccacgtccatcctatgagacaaaattgtctaaaggttacactgtacgcggcggctttggagaacacctgaaccgctctcgccgggctcccagatgctggctggctgcgtaacccccattccaccgccgcccccagggaaaaaggggccagacccagtggcccacagctgctcgagtctctggagtctcaagtcccaagcaggggtgggcatcttcccaaggacttgagtacagtgggacctagacagagaatcctgttgtcccccagtgccatgaaatggggacacaccggccccagcaggttgaatggtttccacctgccaagggtgaagggcccatgatgggctattccagggatgtggaggcagactggggtcagcgaccagaggtctctgtacaatcggcctcctgggatgctcagggcctcagagatgcccagtttcctacagggaacaagatctctcctgactgctcggttctactccgctgatcactttggctaccgtggctcttcagtctgaacagtgaagccactttaggaataacgcctgttgagcaggagggtgttcggtttgggggatgagaaagatctattgtacgcatggaaaccatgtctctcgcggagggactgtggagtccaccattctgagccgtcccaacaggaggaggcttcattttcttgggtcactgaggaagaacagtgggtccttggtcctggagaacacctggatggactgtccctcctgggaatactcgaggcaaaaggagggcgaggcctcaagaggaccacacagagcaagaaatgcctggggagaaccctagtgcccggacccctttgaacagaagggaagatagtctcccctcagccagccctccagggctccttcattttccacggctgcccaagggcagcaggctcccccggacaagggaccatgtgtgttcagtggggcccacagcgaccatcgggacccagcttagggcacagaggtgttctgaggaccgtcagtggatctataccagtggatctataccagtggctctgccaggaccaggctctgccccatcgggatcggaaacctgggcagatttgggatctagggcagggaggtcacagggttcaggcctgaattccagcacagcacacagcagggctgagagcaaaactcagggtcatgtccggattcccaggccggttactgcctctctgaccccagatgtctcatctgtcgaatggggacatttgggaacagcacccactctacgaagccaccatggagacgaaagagccaatcgtctacacgggcagtgtagaacgggcgcctggtgagtgctcagggatgaccctcctcagtagctgccccacagaggccaacaccgcccgcaccgtggccactgtccccaggtccgcctggagggaagagagcaggtcacgctcacctgattctgatgaatcagctggcctgggtcatgcctctcagggagaaaacctttgagtccacagagctgctcacagataccactgcctgtgtgtaactgctgtagaacactgaggcaggccagagagcggataggtgctaagcaccagtgacattctgaggtcatggcacgcatcacaatggggccttgcccgggtcagcagtgcccagagtcagggtcctccgctgcctgaggcgtcaacatgcctgcctgcaatgtgtttgtgcatgtgcgtgcacatgtgtatgtgggtaaacacatctgtgcacgtgtgtgttgcttctctggccaggcccggctgccccactcatgtgtgcacccagttcctcatcactgtcacccccgaggcccagggccagcatcagagcatccatggctgctccctaacctcagccctccctgcccagggtggtcctgggatacacataggggtggagggaagtgactgctgctgctggatctcagaatacaaaagctaatactattacctaatggtctttttagtgtctctaatggtatcgctttttcatttctgatattttaactgggtatttctctccatgacccttggatattctagctagaggatcttgtgaggaaagtgccgggcacacagtaggggctcactcttctagacatgttatctaaaacctggttcatctgtccttccacgcagggcctaggggatgccaaattccagggtccagaaagagcttgggataaaatgaaacttcaaggggacggctttgacctgggctgagtctgcctgtgccgagtctgcctgtgccatccaactggagtctcaagtcctgaggcagtacgtccagatgccccagtgcagggtcctcctgatcaacacctgctcccctgtactcattagcaacctcacccaccctactctcaaagcacacttggctctcatatccaggagctctgcatctgtggattcagcaacagcagatggaaaatattcagaaaataaattggacggttatgtttctattgaattgctcttgtcattattccctaaagaatacagtatcacgaccatttatgtagcatctgcattgtattacacatcctgaataatctagagatggtctaatgtctacaggaggatgtgcatagctgatatgtaaatactaggccatgttatgtcagagacttgaggatccatggattttggcatccccggggaccctagaactaatccatggataccaagggatgactgtagaaactcactcaggaaggcttctcattggaggaagggcccagttcaggacacacagggacatctccctggactactgtccattcatccatccattcatccattgtctccccccactcccccatctcggactgtcccaatgacagccctagcaagaagagacaagaaacaagataagttcacattgtccatttttgaggtattagaagaagttgcaccggtatgagaatagtgggtcagttttctacaggatccagaaagcatatcgggcagcctcggggtgcggaaaggagcctggcctctccagcagccacacaggcctgcagtaggatggggctggtgctggccatgtggatcacttgggcctcatgaggggaaaggaaataccagggggcagaagaggagcatgggggcagctggttgcctaaggggaaggcacctcagggaaggggactgtattcatttgttttcacactgatgtaaagaaatacctgagattgggtaatttataaaggaaacaggcttaattgacttgcagttctggaaacttacaatcatggcagaaggggaaggggaagcaggcaccttcttcacaagacggcaggagggagtgagtggagaaccagtaagtgccacactttgaaactatcagctctcctgagaactacctcactatccggggagcagcacgggggaaactgtccccaaatccaatcccctcccaccagattcctcccttgacacaggaggattacaatcccagatgagttttgggtggggacacagagccaaacatgtgagggtctcagtctatgttgcagctcccctggggctgaggc

SEQ ID NO: 1887266 - DNA, 4001 bp, Homo sapiens
gcaggggagccagggaggagttctgatcctggaaaggaggttggcccgacctgggcagacatgttctgcttcagaaagtcccttctaaaagtaaacccatccctaagctgaaataagtgctttaggggctgaggggagcacagaggactcactgcagaatcccaaagcgatcagtgctgctgtagattccaacaggctttaggccccgtgtctgctggcagcccagctcggtgtccctgtaatccagagggagccttgatgaggggtccaaggtaacgggtgcaagggtctgggggtagtggccacccgtccctgccctgtgctcctagggagcccaggatcctttgagcagggcacactggaagaggcctccctccagggagcagacggacctgtacgttctcatacttcataatgatgtcctctcactcctgcaaagtatccacatcctctaccatgtccatcctgtgagacaaaatcatctaaatgttacactgtacctgagaccttcggagaatacctaaaccgctcccacctggctcccagattctgcctggcggtgtaaccccccttccaccactgccctcaggtgaaaaggggccagacccagtggcccacacctgcatgggtctctggagtctcaagccccaagcaggggtgggcatcttcccaaggacttgagaatactgggacctggacagagaatcctgttgtccccaaatgccatgaaacgggtacacacctgccccagcatgttgaatggtgtccacctgccaaggttgaagggcccatgatgggctattccagggatgtggaggcagactggggtcagggaccagaggtctctgtacagtcggcctcctgggatgctcagggaccacagagatgcccagtttcctacgggaacaagacctctcctgactgctcggttctactccactcatcacttgggctactgtggcccttcagtctcaccagtgaagccactttaggaacaacgccagttaagcaggagggtgtttggtttgggggatgaaaataatctactgtctccaaagcagcccctatgctcgtggaaaccacatctctcggggagggacggtggactccaccattctgagctatccatacaggagggggcttcattttcctgggtcactgaggaagaacagtgggtccttggttctggagaacacctagatggaccatccctcctgggaacactcagggcaaaaggagggtgaggcctcgagaggatcagacagagaaagaaatacttgcggagaaccccagtacctggaccccttttaacaggagggaagacagtctccctccagccagctcaccagggatccttcattttccacgactgcccaaaggcagaaggctccccatcccactctcggacaaaggaccatgtgtgttcagtgggtcccacagggaccatcaagacccagcttagggcacagatgtgttctgaggaccctcccctccacctcacccacaatggatccatctcagtggctctgccatggcgaggctctgccccatcccagtggggatcagaaaccctggacagatttgggatctggggcaaggaggccgcagggttcaggcctgaagtccaacatggcacagggcagggccaagagcaaaacccagggtcctgttgggattcccaggccagttaccgcctctctgaccccagacatctcacctgtcaaatgggtacatgcgggagccaccatgaggatgaaagagacaactgtccacacgggcagcgtagaacgggcacccggtgagtgttcagggatgaccctcctcagcacgtgcccagaggccagcaccacccacaccattagccactgtccccaagtcagcatggagggaagagagcaggtcacactcacctgattctgatgaatcagctggcctgggttacgcctctcagggagaaaacctttgagtccacagagctgctcacagataccactgtctgtgtgtagctgctgtagaacacagaggcagggcagagagcggacgggtgctaagcaccagtgacattctgagataaaggcaagcatcacaaaggcgccttgcctgggtcagcagggcccaaagtcagcatcctgcattgcctaaggcatcatcatgcttgcgtgccatgtgtttgcacatgtgtgtgcacacatgtatgtaggtaaacacatctgtgcacatgtctgttgcttctctggccaggcctggctgcctcacccatgtgtgcacccagttccttgtcactgtcaccccctgggctcagagccagcatcacagcatccatgggtgctccctaacctcagccctccccgcccagggtggtcctgggatacacataggggtggagggaagtgattgctgctgttggatctcagaataaaaatgcgaatactattacctaatgatctttttagtatctctaatggtatgtctttttttatttctgatattttaactgggtatttctctccatgacccttggttattccagctagagaatcctgtggggaaagtgcccggcacacagtaggggctcactcttctagacatgttatctaaaatctggcttattcgtcattccacccaaggcatcctaggggatgccaaattccaggggccagaaagagcttgggataaaaagaacattcaaggggagggctttgactttggctgagcctgcctgtgccatccaaacctggagcctcaagtcctgagatagggcatccagatgccccagtgcagggccctcctgactgacacttactcccttgtactcattagccacctcaccatcctactctcaaagcacacttggccctcgtatctgggagctctgcatctgtggattcagccaacagcggatggaaaatattcggaaaagagattagatgactctactgaacatgtgcagactttgttcttgtcatcattccctaaataatacagtatcacaaccatttacatagcatctgcattgtattgtatatcataagtaatctagagaaggtctaatgtatatgggaggatgtgcacaggttatatataaatactaggctgtgttaggccaggtgcggtggcttacacctgtaatcccagcaatttgggaggtcgaggcgggcagatcacctgaggtcaggagttagagaccagcctgaccaatagggagaaaccccatctctactaaaaatacaaaattagccagacatggtggcacatacctgtaatcccagctactcaggaagctgaggcaggagaattgcttgaaccccggaggtggaggtcacagtgagccaagattgcgccatcgcactccagcctgggcaacaagagtgaaactccatctcaaaaaataaaaaataaaaaatacttggccatgttatatcagagacttgagcatccatggattttggcatccctggggaccctggaactaatcctccatggataccaagggttgactgtataaactcactcaggaaggcttctcattggaggaagggcccagttcaggacagacagggacatcctccctggactactgtccattcatccatccattcatccattgcccctccaccccatcccgccccaggactgtcccagtgacagccctagcaagtggagacaagaaaaaagactggctcacgttgtccaactttgaggtcttggaagaagttgcaccagtataaggatagggggtaagtttcctccaggatccagagagcatatcaggcagcctcggggtgaggaaaggagcccggcctctccagcagccacacaggcctgcagtaggatggggctgggcctggccatgtggatcacttgggcctaattagggggaaggaaagaccagggggcagaggaggagcatcagggcagctggtggcctaaggagaaggcatttcagggaaggggtctgtattaatttgttttcacactgctataaagaaatacctgagact

SEQ ID NO: 1887267 - DNA, 4001 bp, Homo sapiens
cgagtggtgggatcctggcccggacagagccccggaaagccagagggaaggtcggtgccactgtaggtggggtcgccgtccccagatgcagccgctgcactgtcgccgccaggtttctcggtcaaataacccaggcctgagtgtttcaaactcttcaggcctcggacccctggaccagctatggatggactaatgaaatggactaatgtctaaaacgcacacatttagatgtacacatactcttacaaggacaaaagtatgtgtctacacacacacacacacacacacacacacacacgcgcgcgcgcgcgcgcgcgactttgcgaatgtattcacggattcctaggccggtacctgggttcccggctaaggaaagctgccctggttattatctggtcacctcaccggctgcgcaaacgtgtccacaacgggtccctccccgagaggccacatctcgcctaaggtggagccagcaggtatttgcctgtggaaaactgcagtggatcctgccccgtctgcgtagactgcgcagctcggagtcaaagattcgttctggccagagaggaggtactaagagaggtgcgacctagccaagaacgaggtcgtggagaaaaccctgtgggggcggcgctcacatatgcggtgatgaggagttgtgagggccctggggtcggccccgaaaagtagggataacggtcgcagaggccatactgcttccgccggtcccgaatccgcactgccaggagagatccggccttcaaacgctgctcccaacgttcaacaacgaagtgccctgcgaccggtgtgcgcagtgggcgggcgcctgcatgggtcaatgttggatgtacgcgcccaccacgcggttgtacgggtgggaatgtcacccgtggctagtgcatgctctgtcttttccttcagaaaacgaccttcaggaatcagcctgagtgttcgcgcccgagcccgattggaagcaggtgcgtggtcgcttcactctccccgtgcacaccttgagttatagctctcgctgcgcacagagggcaccacacggggcccgacacacacacacacacacacacacacacacacacacacacacacaccatcacttcatgggggggaaactgaggctgccggaagacagaaaacgaagactgatcacagaagagggggcttcaatcacaggtgctcgcagacaccccaactccctcacgcgttactcagcactccttaacttaggagacgtgcgcttccgagagatgagaagaaactaaaaaagtggttggcagggcgaagagaggaagccggtatttcggaagaaggagactttcgtctccggtaccggatagggcgaaaattcgttgggtcgcgggtggagaatccggggtccgcccgcgcggtgccgccctgtgctcagcgaaaggtgcgctcaccttcctggccccgaggatccgctcctcccggccgctggaaagctcagggcggggcccgggcctgcggagaactccaggttccttccgagtcttccggtgaaggcgggcgcgggtagggggtccccgcgtttccccagcgcaaggccgcgtcccgctcccgcccgcgccggccccagcagggctcggccatggctccactcaccagctcccgccacctgggatccgctcccggacctcggccgcccgagcctcccgactcgcccgcccaccggcctcgctttccagtgcctgctgtctctttccggggcgcagggacccccaggcggcgccacgacccggagctgggtcggaggccaggctggggctcgggccagagcggccgggcctctgggcgcgggagaaggagggcgccccctctccgctcggggtcgtgtcaatgctttgcacttggggccggcgtgcggctgcgggtccttccccaaggccccgggacccgggctcccctcgcctcaggccctttcggcgggtcaggtcggccctccgcgctctccagtccggcgcaggcagccgcaggcgcgggcgggcggtgggggccggggcaggaggaggggtctcggggcccggcggcccgtcattggttaatattttattctgttgacatgttttcttactgctgaggcttccgacaccttctcccaggccccccctcccggccggagcttggcctgagctgtcaaaaccccgcccccggagacccacaattggtccaaaaagcgtaaaatcagcaatcaaggggggcctggctcgttagcgcaggggatccgagctgggcaggacatgtgagatagtcacagttttccagagatcacgacaagatctaaccagtcgcgcgtggtccccggcgccggagcgggccagctcagcccggcccagcccggccccgcgcagagcccccgccgcccccgcgcacagagccgggtgccccttgcggtgcgccggacgggaagccccgaggagcagctgctgcgcccgccacccgggtcgtccgtccaccgcgcgcgccgccgcccgggccgggggtccgagccgcgcgcccccggccccggccccggcccccgggcgcctgggccggatgtcccgatgagagagccggcgctggcggccagcgccatggcttaccacccgttccacgcgccacggcccgccgacttccccatgtccgcctttctggcggcggcgcagccctccttcttcccggcactcgcgctgccgcccggcgcgctggccaagccgctgcccgacccgggcctggcgggggcggcggccgcggcggcggcggcggcagcagcggccgaggcggggctgcacgtctcggcactgggcccgcacccgcccgccgcgcatctgcgctccctcaagagcctggagcccgaggacgaggtggaggacgaccccaaggtgacgctggaggccaaggagctgtgggaccagttccacaagctaggcacggagatggtcatcaccaagtccgggaggtagggctgccggccggctggaaggcgcgcgggcgggcgggcgggctggggcacgggactgcacggatcagagcagagctggggactcccggctcccggctcccggctccaggttctggccctgacgccacgcttcgctcccacggacaaccaagttgacttttctcgtttggcaccggagcgatttttttttaaaacaaaaacgctaaaatcctccgaatgaaataaaacgaaaacatactgctaaagaatagccccaaccgttctgagtcccagcgcagaggaggccccgcggcttggccctggcggtctcctccgccccgcgctctcgctcttctgcgtccgggtccgtctccgagctcgggggaaattcagcctctctcagactctgctccgaccccgaagcccctagtgggacctgggcccagctaaccccacgctggttgctcggttcctggcagcgagccccgggtcagccgagccctccgcctcaccgggctgggagccctttctccaccgcgggcatccgagccctggacgcatccgccgccccaggccttaaagcctgaagaaagccacagccccggcccctccacccttcgactcagccaccgagaatccaggcctcgggttcaccctcttcccccgaactgcacggccaggatgtcttatcaggctctgtagcccagttcccaatacaaacaccctccagatttatttctgggagcttccgtcccaagtgggtatttcccctgaacgaatttcggggagattaaggagaagcgagaatatttctagagggcctagacttctctcctgggcatcagctttcatctcagatcagggagaaagagggtccccagatctgagcacaaggcctaaaggaggctgtttaggagagggtctgacaggcagaaatgggatctcctgggagcaacaaccacaggtggggtcgtccgggcagtgatgagagggcagagcagccgaccacaggggaaacagccaggcggcagcggtgtgcgcaacgaggagggat

SEQ ID NO: 1887268 - DNA, 4001 bp, Homo sapiens
ctcttaccagaggggcttcagaggcaagagcagcttccgggggctccttagcatcacataaaatctatactgtagcaggccaggtgcagtggctcacgcctgtaatcccagtactttgggaggccaaggcaagcggatcacttgaggtcaggagttccagaccagccaggccaagatggtgaaacccagtctctactaaaaatacaaaaattagccaggtgcggtggcaggtgcctgtaatcccagctgctcgggaggctgaggcagagaattgcttgaacccgggaggcagaggttgcagtgagccaagattgtgctactgcactccagcctgggcaacagagcaagactccatctcaaaacaaacaaacaaacaaaccaaactatagctaaccaagttctgaccccatagagaccacatttgctttcgtgccatatctttgtccatgttatttgcccacctgaaaggccttcctcacctgtccccttcaattcaaaccctaactatcctgggggagggcagtgcaggagcctcctctaccatggagccttctcaggctgccccagctcacaaaaacccttctctctccaatctctgtttattccaagagcttgtagcaaacaattcagcattaatttcatactttttttttttaagagacaggatcccactctgttgcccaggctggagtgcagtggtgtgatcatagatcactgcaggcttgaacttctaggctccggggatcctcccaccttagcctcccaagtagctgggaccacaggtgcacgccactatgcctggctaattttaaaaacttcttttgtagaaacagaggtctcactgtgtttctcaagctggtctgaaactcctggcctcaagtgatcctcctgccttggcctcccaaagtgctgggattaaagcatgaaccactgtggccaggctaatcttatactttttggtaatttaaccataaacattattagcatatgtttcctgtattgaagatattttcaagcacagataatctggatgctctctatggtctgctcctaatttaaaactcagaagaaagcctacatcaaagggaagtagaagtgggcccggctcacttctacttgctggacttgaggtggctcacacctgtaatcccagcactttgggaggctgaggcagatagatcacttcaggtcaggagttcaagaccagcctggccaacatggtgaaacccctgtctctactaaaaaaaatacaaaaattagccaggcatggtggtggctgcctgtagtcccagctactggggaggctgaggcaggagaattgcttgaacccaggtggaggctgcagttagctgagatcacaccactgcactctagcctgagcaatagagcaagattccatctcaaaaaaaaaaaaataaatgaaaaaggtgattggatctagaatccctacagtatgccagaaatctttattaagggccttaattatctcccctaattagaaacatttgtcccatccttccctaaataagacatgttcatgtttccccattcctcctttccatccccctgcccccagccctcagccctactcacaatacacagtgatgccaaggcttgtgtccttttgaatccctgcacaagagaagaagcactgcaggatggaattctctgtgacatcctccagaagaaactctttccactgaggccctttgcccacctgagttttctttaagaaggtctcaattccactgggtcctgggtctgggcaagtagtgctgcagttgaccactagggactgtccaaactccaccagggcctgacttggccaaatagaaacctcaaacaactcttccgggacccctgaaatatgaaccacatcggccaggcgcggtggctcacgcctgtaatcccagcactttgggaggccgaggcgggcggatcacaaggtcaagagatcaagaccatcctggccaacatgatgaaaccccgtctctattaaaagtactaaaataagctgggtgtagtggcgcacgcctgtaatcccagctactcgggaggctgaggcaggagaatcgcttgaacccaggaggcagaggttgcagtgagccgggattgtgccactgcactccagcctggcaacagagcaggactccatctcaaaaaaaaaaaaaaaaaaaaatgaaccacatatgccaatgactctggtgaggaccacgagacccaaataaatacagaacctattctatctagttccaggttagagaacaggaaacctgccctgaaaaaaaaggttcagacaaccagacaggacaaaagacctgtaattggccgggcggggtggttcacgcctgtaatcctccccactttgggaggccaaggtgggcggatcacccgaggttggaagttagagaccagcctgaccaatatggagaaaccccgtctctactaaaaatacaaaattagccaggcatggtgatgcgtgcctgtaatcccagctactcaggaggctgaggcagagaatcacttgaacccaggaggcagaggttgcagtgagttgagattgtgccattgcactccatcctgggcaacaagagtgaaactccgtctcaaacaaacaaacaaaaaaaaactgtagttaacaagttagctctgatttcaccactattccctccacctatcatctttcttgagaacttgaattctctattagtatcaccatggaaattatggagttgctaaaaaaaattatgcccaggaaaccaatatcttcctaaactttcagaattcttgaaagctccccataataggctgctgtggaccctcacaggattcgaacttcattacttatccctgaaagcagtgtctctctcaaattatggctaaggattccctttgccagaatcatcctaaatgcttgtaaactgcagactccaactccacctcagagcgcatggtttcaaacctgtgaaggtgggacctgaaaatatgctaaggaataaaacaagcctcccggggacccttatgcacaccaaattctcagatccattggcctgcaggtaactcccagggtcactcattttccatgcctcttctttatgcctcttctcagagtgagaccattccattttgatttggcgctaagggaatggatgttttggatgcttacaaatttcgtctgttctggaaatcttctctgatgcaatgggagatgtcagatggatttttattttattttactttattttattttatttttgagacagagtttcactctttttgcccaggctggagtgcaatggcacgatctcggctcactgcaacctccgcctcccatgttcaagtgattctcctgcctcagcctcccaagtagctgggattacaggtgcatgccaccacgcccggctaattttagtagagacggggtttcaccatgttggtcaggctggtctcgaactcgtgactttgggtgatccgcctgcctcagcctcccaaagtgctgggattataggcatgagccactgtgcctggccaagccaccacgcctggcctcggatggattttagatgcctgatgtaggtaaagggcacggagacttcaggaagtcctgaaggcttctctacaggtcctctttagctagtccatatctaccatctacttcacctcccaataccagtcccctctgggaatacacagctcttgtagcaatgttacctgctaaggcccctgttcctttcccgtcatcaggagaactcactttctgtacctgagctatgtatgggtcctgtcctaccaagagcctattatagttcatcatgacacaaacggtggcaacaaagaagtaaaaacattctcaagaggagaaacacagggcagtcctggggcagaagggaaccaagcggagaaggcatgtttcctagggagagtcctctctgatagtctattaactagtgttatcccaaatacaagccagagaccgtaacgattctgtgtcctagtgatcc

SEQ ID NO: 1887269 - DNA, 4001 bp, Homo sapiens; identical to SEQ ID NO: 1244865

SEQ ID NO: 1887270 - DNA, 4001 bp, Homo sapiens; identical to SEQ ID NO: 1244893

SEQ ID NO: 1887271 - DNA, 4001 bp, Homo sapiens
tcacagttctggaggctggaagtccaaattcaggatgttggtagggttggtttctcatgaggcctctccccttggcttgcagacggccgtcttctccctgtgtgcccatgtggtcttccctctgtaactgtcccctcttcgtatcaggacactagtcatattggattagggtccaccctataacctcattttaacttaatcatctctgtcaagtccctgtctgcaaatgcagtcccattttgaggcactgggggttagggcttcagcatatgaattgggggtgcagggggaatgcaagtcagcccctagcactctcgctctcatttttttcttttatgtaaggaaaagcacagtgagaatagtcttcgcttgtttccaatcccagggctgatttagctgtggaactccacccagtgctggtccccgctgtccccaccccacctctgcaaacacgggtgcccacccccgccagccgccaggctccctgcctagtcccggcacgggaccttcacggtcccagcaccaggcacagagcagacaacgttcttgaaataagtgtttcgtgaaaagaatgaaactgagagggaaagaaaaaaaaaactagacagttttaggagatttagctcaaaggaaaagaggacaggcacagaagctcctgatttgaagcgataaagactctttagaacagcagaaatgaggcctatggatgtgtaaatgagcccggggaggaactaagcagaagggcgaattacaaaacagaaaaagaccagacagactaggggagaacagtgaatatttcagtgtcttcggttcataagaaattcatgagcaattttggaaattttgttggttttggtggtgggagagaattgtaaatatgtataatatgtaaatatcttttataataaaagcccatgaagataaatgagcctgtctgccgaaaagctgtgagccgtataagatgttaatataactgtcgtcactctagaaattaccataatgcttacagggatttgaaagttcctgagctttggaaggaaatgcataaatactaaacagaacacacacacacacacacacacacacacacacacacacacacacatctctttttctttctctttcttatttttgtaaaaacaatttttatccttttttttttgaggagtctcgctttgttgcccaggctggagtgcagtggcacaatctgggctcactgcaacctccgccgcccgggttcaagcaattctcctgcctcagcctcctgagtagctgggattacaggctcccgccaccacgcccgactaattttttcgtatttttagtagagatacggggtttcaccatgttggccaggctgctttcgaactcctgacctcaggtgatccgcccacctcggcctcccacagtgctgggattacaggcgtgagccactgcgcccagccctttctttccttctttctttttctttctttctctttcttcctctctcccctcccgcctgccttccttccttttttccttcttttttttctttcttctttttttttttttttgtgaggaaggtagctttagtgaaaacagggtttggagttgaacctatacgggttcaaattcgacttccgtccaccaccgagacctgcgctccctgagggactcgctttcccatccgcgaaaccaggacggcgccgcctacaccccgcggcgttcggggcgggctgaatgggtcgctgagtgggggctacacccacgcccttcgctccccgcccccgggcggagcgacggccacggcagtgtccccaaggcaccgaaaccgaggcgggggtctcggtccctccgcgcaaggaggaaggcggaccgtacgtggcaggactcaccgccccgcacgtggcaggactcaccgccccgcgccgtgttctccgagccatggcgccagcgctgtggcgggcctgcaacggactcatggccgccttcttcgcgctggcggccttggtgcaggtcaggcggccgcggtgggagggggacccgcccggctcccagctccgccccctggcctagcgggccgtgtaactgactagcgggcagagtcgcaggggcgcacagttagtggggaggacgggacttgggctttctgcttggggagcccccactttctcccccgtctaagagacgcggatgtgttcatggaagcgagtcccataccagggctcacaccctggaaggggctggttccgcgcgtggaacttcccaggggacctcagaagaagcggccctggctcctgcgttaacgtccggcccgcggacgacactgaacatatctcagggcctaggagacgaagccgaccaaaaccctttatagcatcattaaactttttagtcggcttggggacccccttcataatcatttccctcatttcttgagactggtgggggtggagggcccttaaaatacccgttctgggttggcgagtcctctccagagctcccgtgaaggcttttcaaaaatgtgtggctgcctgttaaaaacatctgttgtgtcagccagaaaccccttcacccgtcctcatctggactatatcctgttcagattttgtaccctcgatgcctattgcagtgtctggcacttaacaaattaataaaaaatgtgcttaaatgaatttaaaaggaatggaacagcacaggatgtctgctaacaccttggtattctggcgttccaggtaaatgacccagatgcagaggtgtgggtggtgagtatgagccgcttccaggctttcctccgtttggaagaattggggaacggcacaaaacacacggttttatgtctttacccctcctccctgcttaattttctgagaaacttaaaaatcaaacccttgggaagcgctttttcctaaaatattaataggcaggatcagagttctaatgtaatgtgtgtgtgaatttcgaactttctggaaacaggtctttctgcagtattccctttggttagatggcccaactgaggactttcttgaggacctagagtaggcctctcaagatcagttgaacaattccttatgagtttctagccagacactcaatgcaaacctttgaccggaaaataacaggcttaagttctgaggttctgctaattcagtgacttatatttctagaaagtattaactcctggctgggcaaggtggctcacgcctgcaatctcagcactctgggaggccaaggcgggtggatcacttgaggtcaggagttctagatcagcctgagcaacatggtgaaaccccgtctccaccaaaaaatacaaaaattagccaggcgtggtggcatgcgcctgtagtccccagctactagggaagctgaagcaggagactcgctggaacccaggaggcagaagttgcagtgtgctgagatcgtgccactgcactccagtctgggcgacagagtgagactccatctcaaaaaaaaaaaagcaaagaaaaaaaagaaaaaaaaaaagcaaagaaaagtattaaatcctgtaaaacctacagtcttcatataagcaaggctctgatttgaaccatttggaggagggggccattgttccatacatcttctaaatatctttttttttttttctttttgagacggagttttgctcttgttgcccaggctggagtgcaatggcgcaatctaggctcaccgcaacctctacctcccaggtttgagtgattcttctgcctcagtgtcccaagtaactgggattacaggcatgcgccaccacacccagctaattttgtatttttagtagagacagggtttctccatgttggtcaagctggtcttgaactctcgacctcaggtgatccacctgcctcagcctcccaaagtgctgggattacagacatgagtcaccgcgcccggctctaaatatcttttatcttccaaaatatctgaattttgcccagtttctctcaatatagatacacaagactgtacagtacaccaaggagatgactcttaagctt

SEQ ID NO: 1887272 - DNA, 4001 bp, Homo sapiens; identical to SEQ ID NO: 1244898

SEQ ID NO: 1887273 - DNA, 4001 bp, Homo sapiens
gagcagaaatttattatctctcagttctggaggccagaagtctgaaatccaagcatggctaaggttgcccttgcctatcttctggcggctgtggcccttagcttatggctgccctccagactctgcctctacagcacagagcattccctccctccctcccttccttccttcattccttacttccttccttccttcccctccctcccttccctttcttcctctctccctttctctctctcttttcttttttcttcctttctttctttttttctttctttgtctttctttctctttgtttctttttctttccttccttccttctttcttttttcagagacagggtctcgctctgtcacccaggctggagtacagtggggtgattatagctcactgcagcctggaactcctgggcttgagcaatcctcctgcctcagcctcccgaagcactgggattacaggtgcaagccatcatgcctagcctatcattttcttctgtgtctatgcgtgtcccccttttctgtctctgataagaacactcttcgttggatttggacttcaccctaaactagaatgatctcatctcaagatccttatcttaattacacttgaaaagacccttatttcaaataaggtcacactcgtaggttttggctgaagatacataatttaacccacgagggaggatatatttctaggcatttaatctgggtgggatccctgaggcaggaggacctcagaggtcacctgaaaaagcatatctctaagcatattccctgaaaaactagttccaagtgattttttttctagaggatttttttaagggtggggggagcattctgtgttcagataaatttggaaaatgctgcgtatacctcccacactagaagattcacagttcaccttagtgtattaaagggctgagaattcacggtaaagaagcattatgtatttatggaaagcatcatttccctagtttatttcaccataaaaccccattttctttctcataatctccgtagcattttcagatcatatcagcctgtggaaattcaagaggaatgttgatgtgagccaaccttgtcttactttagctgagaagatcaacatccagaaaaggacaaatgacttatccaaggtcacactgctgagagggtcggaagttgatttaaaactcagcctcctcaaaatgatagcgatggagacacattagttgttgatggggagagagtgggtatggctacacagaggtctcaccagagagatctgtttggtgggggagcagttctgcattttacttgaagaggtagtagttacacaaatttgcatgtgataaaacaacacagaattaggcacacacattatacccacgtcagtttcctggctttgatactttacataagatgtaacccttggagggcctggcacggtggcttacccctgtaatcccagcactttcggaggctgaggtgggcagatcacctgaggtcaggagtttgagaccagcctggccaacatagtgagaccccgtctctactaaacatacaaaaattagccaggagtggtggcacgcacctgtgccagctactccagagggtgaagcaagagaattgctgaaacccaggaggcggagtttgcagtgagctgagatcacaccactgcattctagcctcggggacaagaatgaaactccatctcaaaaaaaaaaaaaaaaaaaagagatgtaaccctgtaacccttggaggtcaggtgcctcctgcctgtaatcccagtgctttcggaggctgaagcaggagggttgcttgagcccaggagttcaagacaagtctgcgcaatatagtgaaaccccgtctctataaaaaattagccaggcatggtggcacatacctgtagtcccagctcaggggctgggactatgggactacttgggaggctgaggtgggaggatcgctgaagctcaggagtttgaggttgcagtgaactatggtcatgccactgcacagcagcctgggcaacagagcaaggacctgtctggaaaaaaaaattgagagaaatttggcaaagaaaattgggaccactttgtactatctttgcaacttcctgtgaatctataataatttcaaaataaaaagtatgaaaaactggtttcctgtctccaggttccagagcttttaacactgtcaaaggtcattagatcaaatttaggtttatgctctgctattcatatgcttctagtacccaataaaaagcactgtttatgggctgggtgcagtggctcatgcctgtaatcccagcgctttgggaggttgaggcaggcagattacctaaggccaggattttgagaccggcctggccaacatggtgaaaccccatctgtactaaaaatagaaaaattagctaggcatggtggcacacacctgtagccccagctacttgggaggctgaggcagaaggatcacttgagcctgggaggtcgagactgcagtgagctgcgatcactttggaggctcaagaagacaattttgtgttttgacacagcaatagcagaactttcatcaacaattagattcagaacaggttatactgcacacatttttgccacatgcccagccatctggcttctcttggaattgtctccatctgcccccacccccaccctcattcacataatgactgtggaactgggggcagccatttgatcctacttctctggctacggttgactggttcaggggtgggcactgatccaatctgggccaatcagagcccttccctgagaattttctatttggagctcagggaatctgtccgatcctagattgctcaggtagtaaaagtgtgagatggagatggggccactggtggccatgttagccccttatgtgaaaaaacctggttgagtgagaaggaatgaagccaacattcaaaggaaagtaaagacaggagacagagagaaagtcctgttaaccttgcgatgcctgtttctgtttgtttctgaaatccagctgccttactatggcctagctactcctcccttccttggcaaccaaaaagctaacacatctctcatttgggctggggggtgttgttttgttttgttttgtcttagttttcattgtttcagacaaggtctttctctgtcacccaggctggagtgcagtggtgtgaacacagctcactgcagcctcgacctcccaggctcaagtgaacctcctgcctcagcctcagcctccccagtagctgggatgacagacacatgccatcaagcctggctaatttttaaaattttttgtagagatgaggtctcactacgttgctgactggcctagaactcctgggctcaagcaatcctccttcctcaccttcccaaagtgctgggattacaggtgtgagccacagcacccagtgacatctcttattttgctcaagctagtttgagttggtttatcatcacttgcaatccaaagagcctaaagtagcctatagaccaactccctcattttacagatgaagaaatggatcctgagaaagtccatgacatccctaaggctgaggtcagtgagtagctaggctagaattaaattgcaaacatcttgatgggaacactcatttgtttttgcacagccgctcctcctgccacgccatgtgacatttccaaagcctgccaagatttccaaagtcctcagttggagggaaatgcacctaaacctcctcttatccacaaaacaaaggggaaaggataaaaatagaagacccctgaaatataactggagatctgggacctgggggattggcgcaggaagctgagaatggagagaacaaagtcagagttgttagaggtgaaaactgaaaggaccctacactctatttgtggctgagctctcacacaaggaagacaggatcaaaggaggtcttcatctctttgcaaaactctcatgcaggattcagattaaactgagccaacaaatatcctcctaaccgaggctaaaaagagatcagagacc

SEQ ID NO: 1887274 - DNA, 4001 bp, Homo sapiens; identical to SEQ ID NO: 1244913

SEQ ID NO: 1887275 - DNA, 4001 bp, Homo sapiens; identical to SEQ ID NO: 1244915

SEQ ID NO: 1887276 - DNA, 4001 bp, Homo sapiens
ctcatgcctgtaatcccagcactttgggagtccgaggcgggcggatcacctgaggtcaggagttcaagaccagcctgagcaacatggagaaaccctgtctctactaaaaatacaaaattagctgggcatggtagcacatgcctgtaatcccagctacttgggaagctgaggcaggagaatggcttgaacccagtaggcggaggttgcggtgagccaagatcgtcccgttgcactccagcctggggaacaagagtgaaactccattccaagaaaaaaaaaaaaaattcacatccaaaattttaaagataattcaaatccaaatcaactcaatcagaatctctcggggtgggcctcaggcaccagtgtttttttgtttgttgggacagggtcttgccattgcccgtgctggattcaaaacacctgggctcggcaggtgttgtggttcatgtctgtaatcccagcactttgggaggccgaggcgggcagatcacttgaggtcaggagatcttgaccagcctgaccatcatggtgaaaccccatctctactaaaaatacgaagatcagccaggcctggttgtatgcacctgtaatcccagctacttgggaggctgaggcagtgagccgagatcatggaactgcactccagcctgggcaagagcaagactctgaaaaagcaaataaaccgaaactcttgggctcaagcaatcctccgcctcagcctctggagcagctgcaattacagacaggcgccaccacctccagcaagtaccagtgtttttaaaacctccctggtagattccgttgtgcagcccaggccgagaagcatcgcggagtcttgtcattcagcctgaaaatagcatcaagttcccatccactcgaacaacagtttgtagatcttaggctgctctcatcgagcaaacatggcctccttgcaacacctcaaatgggtgccaggcatggtacgcagcacacaaactgtgtcacttgatacagcggccccatgaggcgaggagctgggaggtcacagaacatgccccagggcacccagggacacactgaagcccaggcctccagcacgcaagggctgctctgaagaaatacgggaggtcctcactggagggtctggggccacacggtgggtccggagacagaaacgaggagaggacgggctcacccagccgtggggccgcgggctggacatccagtgggagtgggaagccgccgtctcaaggcagaattccctctctgggacacctcgggttttgctcttaaagctttcagctgataggatgaggcccacccacattctcaaggatgatctttaggtgaaatcgactgtaggtgttcaccacattccagcagcacacgatcacagcaacacctcggcccctctcgatgagatcactgggccccacagcctggcctggttgacacgaaagactgactagcacacacggtaattctccagaaatatccaggccaagttcttccactttcctgtcataagcagctagtactgtcctttgtgaggctggcaagatgggctcaacaggtcacaaccaatgatcatgctggcaagccagcagtggcaggcgcacgtccccagccagagagggaccgtgatggtttggaggacagcatctgcacagataggggctggaaaccctacgtcggtccctgtggactgtcacgtcactttctggactgcccacgcagcttcacccagcagcactcgcacctgaagatgctgccacagttggctgcccagaatcagcaccagctacttgctgaggcccagaagcaccacttggctcagatccacccagatgccaactctgtcgggcccctgtggcagcacccagatgtctgcagagcacaggagcatccccatgggattgggtgggctagacccagcgtgggggtctgctagcagccagtggcatctccatctgggtctgacccttttctgggcccatcgctctttgaccatttccccacctgggttcattcccccaatcccaagcgcagctcctgcaggcctggagccctgggctgtgacaggctggtccccacaagcctggaaccctgcgccgtgacgggctggtccccacagacctggagcactggggtcatgacgggctggtccccgcaggcctggagcactggggtcatgacgggctggttcccgcaggcctggagcacaggctgacgggctggtccccacagacctggagcactggggtcatgacgggctggtccccgcaggcctggagcacaggctgacgggctggtccccgcaggcctggagcactgaggctgacgggctggttcctgcaggcctggagcacaggctgacgggctggtccccacagacctggagcactggggtcatgacgggctggtccccgcaggcctggagaactgaggctgacgggctggtccccgcaggcctggagccctgggctgtgatgggctggtccccgcagacctggagccctgggctgtcatgggctggtccctgcagacctggagcacggggtcatgacgggctggtccccgaatccctgtgcccaccccccacagcctacggttttcggtatcccacgggctcctcaaactcagcccagtcagacccaggatcaccaccccccagccagctgctggcagccagaagcagggggccagccccacctcaccaagccctgttcgcctccaagcacaggtgctggttacctatgcctgggaggcaactgtccccacaactcatttgcaactgatatgtctcccctccaagtccctctctaaatttgtctcctgctccagtagatgctacagcatcacccaatggttgacgcatcgctctggtcacaatccgtgcctgctcggctcacttgtgcaggtgtaagcccctcctgggcgcgagttcaggctggtcaaaggcagcaagcgaatcaagccctggcgcggtccagcccctgccatctggggcttggccagcagagggcgcccccactccagctgaggttcccaggacccagacctgcgcctggaggtggccccagggcagcgggaagcaggccccgggtgtggtcacagacacagagccccaagggacaagcccatttgcaaaacccctttaatcagaataaatagagtcccaggcagggcagagttcattggggatgcccaagccggattcacccacccttccagctccagcctaggcgcagctgcggctttcgagaggcgaaactgtcttccttgtcctggtgtcccagcagggtcactgggaggcaacagtgtggtctcagggtgctgggcgggcccgtgaggcccatcgccgtccccctaggcatcctgttcatctgtgagcagggcagggggtgccgcagcctcctcggttgtcccaaccctgccagaaagagacatcactgaggggaccccataaacatcaacatccctgcaacctggctgggcgcagccaaggcccggcgagggacaggccagacgccccacagcctttctcctgagatgtattttaggtccctgtcaaaatggccaggctccggaggccagagaaggctctagagagagtgaaggtgggcgccgggggggagatttttgtaggtcaaaagcggtcaagtgtcagcaatgtcgtggtgtagccccagtggcagccctactgtccagccctggcccctctcccctccaggctcagagtgtccccaatccctccacggaccctcacctgctcctctcctccctctccttcctctcgtagatggagtgaagcttgttgattaagaagattttgtcctcaccctcctagaaaggccagaacacaaaggggaggagaaatcatccatcagcccatccagagccatcctgttccaaactgcatttgagggaaaactcacgaggtgtattcaacatcgcaagcagcaaaaacataaaagaaaaggtgaaagggccaccaaacaaggacaaggaaaaaccaagag

SEQ ID NO: 1887277 - DNA, 4001 bp, Homo sapiens
gagaacttgtcccttctctttagagaattattgaaaagtacagataagtttgacaaaattacaattcatctatctttagacattttagtctcagccatgcctaatatgcccccccaatataaaattactaatcaagacacatggtcccgcagttctagatgtttggtacagtaccattatttgcctaatggtaaaagaagttgtgcttctagaacacgtgaaaaatgaagtgtttcttttggtaaggcattccaaggatatcctgtctagtttcttgaaatttctgtgcttaattagaaaactaaaaataactcacttttattacagatggacttgtcattacagaaaaccaaaaacaaacaaataaaaaaagaaaactgaacaaatcatttatatttgacgctttgatgacatttcaatgcagaggaagggacattttaatttaaatgctttcacagttttgccatactttcacatttcaattccactcctgtttgcaactaaaaaacccaaacactcaaaaaaaaaaaaaaatcacattaatcagaatttaaggagtcacttagtaaaactatgttttaggaatctgtacaataaacatgaaatcagtcacctgaccactccccaccctcagcccattccacaaacccatcttcccaccccttctcctacgcattgagccttcagaaataccctttctcagtgcggttccttctaaaaaggagaggcgggagagtcagggtggagaaggcggctccaaccagattttgcgtccacaaagccaaaagcttctaggcctggcatgtacggcgggtttgtgcccgaggagcacagctggtctacacgggcccgccccgtagacaccctactcctcggtgagctgcggtttaacttccttatagcaggttgagagtgcaggccccaacgtttggaggggaaggcggcgccccaactggtgtttttccaggaagtgctccaagaatggagaggagaggggaaaggggaaaggggaaggccaggcgatgggcgtttcattcattgcttctttctccccgtcccctccttcgctccccccagactttccccttttcccagtccgagtttgacgtcggtctcctggataccaggcagccaatcgcctcgttgcgaagggaccagcgcagccaatcaggcgtcgttgctacctgtgagtaatatttttagctgagagggacgctcgattccactcccgatgtaatttcgtgtatttctctggggcaggttgtgaaaaaggcacttacccgccccccaccacgagtccctctcttaccccactccctaggtacccgcacatatttcagccaagaatgatcttaaacgcgctttacaagcaggcaccgcgtttattctgtgcacctgcgatccagcaagccctagaaatgcacgcatgcgtgtgtgtgtagacatggacacagatacatacgcagtttggcctcgtgtcgccacactctgggcacggcgtgggctgggacatttggaataaacggatccgagtcgcagccggggtcgcaccgggaggcctgaggctgcggaagcagttaaactgccggcggggcgggagctgtggcggcctcccttccccacccccagcccggctccacgtctttgggttctgcagctgccactctctgggtggcggttggcctaggccttggggtgattaatattcaattaatcgggtgcacaagtcccggtcacagtttgccctttctctaccccgcccctggggtgggctggaggccgatttggtagctattccacgagcaggatcctccttggccgcagacccccgcggagagggcactttctgggtactcttgccgctcctccagccccggttctcctgagccgcttcgccaccagcttcgtccccctccccctctgcccggcgctctccgcctaaaccgggcgtcagccgccctaccccacccctttctctctcattggcacgtctgcccccacagtccctttccagacgttctcttcattccgtccccagtgctccgatcgtcggttcattggccctcctggagcccggagggtgcggcttccccacccctgcgtccgccgcgcgtccggacaggggcaggcgggacttggccaatggcgtcggggggcagggcaggggcggagccggccggcgggggaccggggtgccgggcggggagcgcggggaatggctgcgccgccggagctgtgtgacgcggagcgggcgcgcgcaccccgacggaggggatgggggcggggaggaggccataaaacgagaggcggggcgcgcgccgcggcagaaggagcgaagctctggcccggcgtgtagcgggcgcactacggggacgctgggccgggcaccgggctgtgtggagaagtgagcgcgctcgtctgacccccgtgcccgccaccccgagccactaacggcgatctcccaaggcctgcccgaggcctctgtcctctgtcctcagccccgcagcggcaacgtcttgcactcggcgagctcgccgctcccgaccctcccgcgcccccgccctgccgcgctgctccccgcccagccgcgggtctgtggtccaagccgccccgaagcagcccgtaagtatctcggggcgccgggcggggtcggcgaggagacgggagccccgggcccaggcggcggaggaggggctgcagcggcgtcgagccctgggccctcgggagctcggggacggcggggtcgcggccctgggcgccgagggggcagcgccaggacccgaggggagcggctccgaggggccgccggcgcgtcgggctcgtcctgggcagttggccggggacgggcggcccggggcgagctgacgggaattggggggttggggtgcccggaggagcgacgagctcgcggtggaacgctggggttcgaggggccggtggccgcgaggctgaaaatggtgccgaggaaccggtgctcccccaggctctggccggctcccaggagcccggggcgggggccacggggcggggagcagcgggtcgggttacggcgggggaggggagcggctgacccggcgccccgacctgctcggtgctgggtgcccagccgggagaggttgctcttccatttcccgggccttcctcctccttctccgaggaggctcgtactctcttcctcctccacctccacctcctcttgctgttgctgctgctgtagcgcttgggctccgagggctgtgagcagaaatctaatgagatctaactggctgtttatgtaattcttcacactcctgcctgtcttaaggcgttgctttgtaactaccttccaccgagcctgaatttcgctcggctgcaccttcaagcaattgggcttaatcagctgcctctgccggcactcaggcttttgacttggaaagtgtttgtagtttgggggcagccagagattctttttccctttgtcaccacgaatatggaaaatagaacagacgaattaagaccaacttgatttttaaacgtacttttaaatcaacttcagtgtgcaaatagatccctttcgcaaatatcttctgtttgcccttgatcttttcttatccccacccagtgctgatccagcaaacgtttaaaggtcgaccttaccatacttgcctctccggctgttaccgtgagagggagggagggagagagggacagacggaggttttttaaaatcagactaaaactcagaaaccctggccttaaacagaataatcaatagttttaatttgtgtctttgcttttgttatacttgctgccgaataggtattttcagatttagaaaaatacacattgaaaacaaaaggcccagagaagctggattttattatattgtatgctcttagtatacttaaggccgaaactatatagaataatttggttcataattatttactaggatgaagttcatttagtactcagtgtctttaattttagcatcatgtactatggaaattaaaatgatcttc

SEQ ID NO: 1887278 - DNA, 4001 bp, Homo sapiens; identical to SEQ ID NO: 1244930

SEQ ID NO: 1887279 - DNA, 4001 bp, Homo sapiens; identical to SEQ ID NO: 1244929

SEQ ID NO: 1887280 - DNA, 4001 bp, Homo sapiens; identical to SEQ ID NO: 1244945

SEQ ID NO: 1887281 - DNA, 4001 bp, Homo sapiens; identical to SEQ ID NO: 1244948

SEQ ID NO: 1887282 - DNA, 4001 bp, Homo sapiens; identical to SEQ ID NO: 1244958

SEQ ID NO: 1887283 - DNA, 4001 bp, Homo sapiens
gcggcggcggctgtggctgctgcctgctgctcctcgcggcgaaaagcacaaagcacagcgccctccgcctgcaggcagcccgcccgccgccggccccggcctcagctcgcacaccccccgccgccgccgcagcctcagccgccggagcggggaggaggagggagaagggaggaggaggagcgggagggggggcgggagaagcggggcagcgagcgcgtccttccccgtagagcgcacaccgacccccggggagcgagcgccagcccgcccgcctcgccggctccgctccctcccacagcctgcccgggcgggctccgcggggggcagctgggaggaggggcgggagctggggggacccgggcggccgaggcggagggaaggaaggaggggaggggggtggtggtggtggtgctggcggcggcggcggctgctgctgctgctgctgccgccgccggggaagggggggggggccggggcagggagacacgcagccgcccggatggcggcggggctcggagcctaggcgggcgggcgggcgccgagagcgacctcgccagacccgcgggggaactagcaggcttcgccggcgagggagggccgaggtgcggccgcggagagggtgcccggaggtgcccccggcgtccggggaggctcggggggcgcccacagccctgctccggagctctcccccaagttctcccagctcagactagggcttccaggccagctctctcccgcctcccggagcgagcggtccgcgcccaccctcatcccccggagcgtggccgctggtttggggcgcacgcacgccgatcgcggcgtccagcttcggtgcctacctcgcggtcctctccttgccgaacggcacatacgaaacttaaaaaaaaacccgaaaactaaaacctctgcattaaaaaaaaaaaatccccgttgctctttacaccccggaaacggcaagggaacgacgggctccggcggaggggccgctgtgggagccggttcaatccagcccggcatggttctccaggcctgcccgggcgcatgaagatcggcgccgccgccactcgtagcaacccctctcccccgaaatccgcggctcccgggctcacttaccgagcgtgtggatgggagcgcaggccgggggcacctgggagcacggcgggccgaacagtcgagccgcagctccgctgcagccgacgccggggcagcgagtcgccagacaaagcccgagatggcgaagcggagcgacggctaatggcgagccccacgcgccgcgctccgcccgccccgctccgcccgcccgcccgcccgcctcggcgcagcgcagcgccgctccgagcgcttgcccgtcagagccgcctcggcgccgccgcctcccgggccaccccggcctcgcctggcccctccgcctcctccgggcggctcagcctcaccccttccctcccactgctctaggggttgcacaaaaaaaattttttttttttaaagaaaaatggttttcgtcttttttttttctttttgcagggcgggcatgttgagacttttggatatttctgcccccagctcgcactcacctgcggagccgccgggagggctaggggtgggggcgcgcggggctggagccggcgagcgcgggttgaaagccagccaagctctgcagcgcccgacccgggcgtgtacgccgccgccagtccccgcagagaaatcgtcctcctaccccgcctccatcgctctgcgtttctcttccaatcagccggtcgcttggtggctcctccattctccggccaagcccagctgcctagagcgagctccactcctccatctgttcgccggggtcctcgctcccctgccggggccggcgagacggcgtgaggccggagggggatttgcaaggaaacctgcctgcttcccgctcccattgctccatccccgctgcctcctgcctcctgcttctctcctgcgtctttccaactctcccctgtcgccactggtgtgtgtctgagtgtgtgcgcggttttttttttttaattgctctttgcttttgcaaccctgaagcaaaagggggggggggtagttacagggaaaaaaaaagcgagaaagaagctcttagatttgcaacacatcggaaaaccgggggagcaccccgccttatccgatctccatgctccgcaagggccttccgggttttaggacaagcttctcaatgtcccgtttcgctgggtttaggatccgaggagtccgagcaaaaagttctccccctgggtcgtagtgacgggtgtcggggtgggagttgcggggatttttcaagaagcagcagctaccccggcgtcggtcactgggccggggtaggggaaagagcaaaatcccagtgggtttgcgcgagggatcttctagggtcgaggcgggtgtggggggagttggaaccgggagacaccgcttggcgcatctctccctcggtctctacctcctgtcctatgccagctccccctttaatttttttcctctcctttaatctaatttcttccaactccacctttgttgttaccggcgtcacacccggaccagccaatccccgccacgcaatcagcttgtcaaaaagcctcggccatccctaggaaagcaggccgcaggcgctgccccccggcggcggcgggcagccgcgaggggagcccagcacccggttctcgctgccccgggtggcagcggggcagcctccgacaagacgtcccttggttcactgtcctgcaggccggggatgaaaggcctggacagggtccaccacccactctcccactgccacggccgtggttgactgtctttgcctccccttttcagaggaaaggttatcaggacaggacgcagggagccagaagaccatctgaaggaagcctgcttccaacgggcccagcctccagccaccgctcctggggcagcgccattgctcctggctctcaggctgccagtctcccacaccgacgctctactgcccgcatctcggccagctgggtcacccagcccctttcgactctcccctggcacgcagccttctccttcactcggcctgcctcgctgctgctgtaattcctcttgtctcctgggagaaatgagattgctttcccaggacttccacatcccacttctatcaggtttcaccaacagggaggaagccctgtcaagatctggtgtgtcctgttttttttttttttttttcccagagggcactggcatgtaggagaagcggatttaccactagtagatgttaatgaaatttcagcttctaggcccctaacttgcaggacctgcccaaggccctgaacttaattttgttttcatcatttggtatttttttgttaaaagagccaccgaccacctccccgctaccccagaactgcacgtgtttctggccctacaaacccagatcgtcccttggaatatacacagggcaatttgtgtaggatcacactgcgctaaaagtgaggcatggtgggctaggcgcactggctcacacctgtaatcccagcactttgggagaccaagacaggaggtcttaagtgattaagcccaggagttcgagatcagcttagacaacatagcaagatgctgcctctacaaacacacacaccccctattataatatgtcaaaaaaaaaaaaaaaaaaaggaaaagtgaggcatagaactgactttattgttttgactaggaaagagcaaagggtttggaatcaaaagtcccaacttccccaccttcttaatagtgtgtgaatctgagtgccttattaaccttccctggtcccagtttcgtatctgtaaagttagaatagcaatcctgtttaatttgcttctctcaccagggatcagaaggccaaatgagatgatgtatgtaaaattgtaaagtcctccacagatggcacttgccacattacagagaacttgagacccccccccaccaataacgttccaaatcttccacatgcagatctggagtccaggtgtcctggctcc

SEQ ID NO: 1887284 - DNA, 4001 bp, Homo sapiens; identical to SEQ ID NO: 1244977

SEQ ID NO: 1887285 - DNA, 4001 bp, Homo sapiens
gagctgtgaaggcctttgaaggtcaggccagttgtaataaaactatttcacattgtcaggtatcttgcgatggttgccaaacatttttctatggtttgcataaatacatatctattttatttatgtatttatttattttatgtatttattttatttatttatttatttattttttgagacggaggttcgctcttgttgcccaggctggagtgcaatggagcaatcccagctcactacaacctccgcctctcaggttcaagcaattctcctgcctcagcctcctgagtagctgggattacaggcatgagccaccacgcccagctaattttgtatttttagtagagatggggtttttctccatgttggtcaggctggtcttgaactcccagcctcaggtgatccacccatctcggcctcccaaagtgctgggattacaggcgtgagtcactgcacccagcctattttagttttctttgagacggagtttcactcttgtcgcccaggctgcagtgaagtggcactatctcggctcactgaaacctccacctcccggattcaagtgattctcctgcctcagcctgccaagtagttgggattacagggtcccttgaagcccaggccaaatggccctgctgtggccttgccccaactcacccccccacttcctctgggtcagccccaactcgtagtccagtcctcccagttcctctgcttctctgagtacaacttgagctgatgtgtggtgcattccacctacctgacttacatcaagctgtcaatggcaatcaagtgtaatgagagcatggccaaaggtctgcagagggctctgctgcagcagcagccagaggatgacagcaagtgcttccccccggccccaggacctgatccggctttatgacatcatcttacagctgacccttgaggaccgggaaggcaagggcctgtcgttttcctttgcctgtgtcagacataaaatgacttaactttgtatcatggaggggctgtgacaagcaggacctgttagtagctgggaaaagacaaaggtcttacaccagttccacagtctgtgagcccctacctctcagacatgctgatctgcagagaatagtgaccccagatcatcactgagcacttcacctgtgtaagatgctcccaggtgccatagagcatctgagacctgaatccatgccatctcggcccccagggagtttgtcagtcagtaggactgtgagacacacacagtcaaggcatctgagtagatgctaagcaaaataaaagctcagcgctggaacagatcccttccagctaagatgggccaagaagtctctgaaggcgggtgagctatgagttgagttgtaaagggcaaatctgtttccaagatgagaggggaatggaggtgacagcaggtgtggctgctgccaggtcacttcacaggcttttccccattgtattgacctcgggcttttttttcctcaccattgtctgttcttacaaggtcttctgtgaaaaattcaacctaagatctattcttcatgaattttcttgttgcatctgttgtacagaatctggtggaattgctccagcttcctggtttagaggaagacaaagccttccagaaagagataggcctcaagattctggtgttcaaagcttacaggtaacgtcccatgggatgggcagagttttcctctgcctcccaggttctgtaagcattgggagcatgacccagcccacagcagatgggatcattggccttgagtgtatggttaccttgcctgtgatcagaggaaggtcagcccagcacgttcaaggggagtttctaaaggctgtggtcagtagtggccagtgatgatgactgccctttggccaggttggaggagtggagcacacacgttaaacttggcttcctcgctgggtgtggtagctcacgcttgtaatcccagcactttgggaggcaaaggcaggattaaaaacttaaatctaaaatgaaaacatattaaaaccttggacgataacctaggaaataccattgcggacgtaggacctggaaatgatcttcatgacaaagatgccaaaagtaattgcaagaaaaacaaaaattggcaaatgggacctaattaaactaaagagcttctttacggcaaaagaaactatcaacagagtgaacagctcacagaaagggagaaaatatttgcaacctagccatctgacaaaggtctaatatccagcatctgccaggaacttaaatttacaagaaaaaaaacaaacaaccccatcaaaagtgggcaaaggacatgaacagatacttttcaaaagaagacataacatgtggccaagaaggctacgaaaaaaatgctcaaactcactaatcattagagaaatgcaaatcaaaaccacagtgagacaccatctcacaccagtcagaatgactattattaaaaggtcaaaaactaacagaagctggcaaggttgtggagaaaaggggacgtttatgcacttctggtgggaatttaaacttgtttagtcattgtggaaagcagtttggcgatttctcaaagaacttagaattgccatttgatccagcagtcccattgctttccccattgctttttttaagtggagttgttgaaggttggatggttgtaggtgtgctgcattatttcttagctctctattctgttccattggtatatgtgtctgctgttgtaacagtaccatgctatttctgttactgcaggtttgtagtatagtttgaagtcagctaccaaaccaccaatgacattcttcacagaattaggataaactattttaaaatttatatcgaaccccaaaacagctggaatagctaaggcaattctagcttacttttataagaatatagtgtataatacatagaatatacagcatatatattaatcaactttgttatgggtaaggtttctggtcaacaatagttaatcaggtcagtcagcagttacattacagggaagtcaaaatttaggcaaattttcggctgtgtggggttcagcccctctaacttccacattgttcaaaggtcaagagtactgaaagggaaaaaaaaactaaaatgagccatgtgtgattcaactggaattagaatcaccaggaagaactcatggttttcagtatattctaatatagaaatatggatgaatataagcatgtatgtttgtatatttatccatctagctgtatttttctgctctgttcactgaggaagcctatgagcaatgacaactccaatagccatacgtatctaccacaattactgcccagatattggtttctaattactgtcccctaaagaaagtcagggcttctggaaaaaaatgaaaatggctgattcaagggctagggcagagaaaatacgaagtatggttgaaacagcttatgccagaaagtaaggaagtattcaaagaacaataaggacagttcaaaaagacatgaactcagcttgaaatggctaccactggtcaaagcggagggaacctgaacagcaaaacaataaattttcccttctcccctatttgttggttggttttgttttgttttacttatccacttagaaggaatgaaagatgaagacaatcatgatttggcaaccaccataataataactgacccaacaaaaataatcaatgaaatgctaaatctagtgggtgagatgtttagagtaaccagatatttacagagcctcaaactatgttcacgtaagacattggtgaaaaacaaagggtagatagtcactttatcatggacagacctggtagattctcaaacaaagccaacactggccagtaatggagccaagtaacagcatatgcctccagatatgctgcattgggaagaactcagcctcacttgtgtgaccttcctgcctgaatggtataacctgaactgaatcatgaagaaatatcctatgaacccaaactgagagaaaatccacaaaaaactgacccatactcttcaaacacataaat

SEQ ID NO: 1887286 - DNA, 4001 bp, Homo sapiens
catgattgatctcttcttctaggttgtaagttcgttaggaaaaggaactaccaaatatttgtagaaagattcatctctgtattcaacataaaaaccttgtacagaaagtgttttaaacactgctgcaggaaaagtcttattctcaaaaataacaaaacctcctgtttgttcatgtcttctttcttttatgctagattcctgctctctcagaggcaggactgtaacataccaggaagggtggaagcctccagagatccagcttctttgttgctaaagcagtgggtcttacacttggaacagtagtatatctcatcttcccctagctcttcctcactggtgaaagcacggagacagctgtccaggttgatgggctcgacttgcactcgccaactctgctccacactctcatgctcatctacaacctgtaggtggagggaacaggaggaaaggggtgtgtgggaaggcatttaaactggtgatctagctatgcatcaacctctcggtcactcacccttattttactctatataaggaaaaagaaaatataacttgctgggtatggtggctcaggcctgtaatcccagcactttaggaggctgaggtggggggaattgcttgagtccaggagttcgaaaccagcctggccaacagagtgagaccctgtctatgtgaaagaaaaacctaaaaattagctgggcgttgtggcgcatgtctctagtcccagctactcaggaggattgcttgagcctgggagtagaggttgcagtgagctgtgattataccactgcactgcagcccagatgacagagagagaccctgtctcaaaaaaaaaaagggaaaagaaaacacaacccaaactagagtctgagcaaatacagcacctacacatttattcacaaatgctacactgtaacattctggataaaatttctatttatatgatcatagcttttcttgaaaaatttttgaatgcttcaaaatgacaaaaagaactgcatttatttaacaactttggaatcctataagggattacatgtgagctggccctcaagccaggggtgatgatagtaagccatttatctttaatcagaaagccagagcattattagtatgctgcagagtttacagaggctaggagaaataacatgaaacacagaaaccagagctggatgaaataagggcacagaaaagctcaccatgagaagacaacacagcagagcatgaaacaccacagggtacaactcatttacatctgatcccatgtaacacagagttatcagaataccaagtctatacttatctgtctcctccctcatggggcctttttatctgagatggcaacaaaaggaagaacaagctcaagagtgtgctgcttttgttgagaaggcccctaatacccacccaaacctttggggtcctgttaatcagcatgttaggctgtggagcaagaaggagttaagtgtaagaaaggagagagagcaaagaatgggcggggtgcagggatatgtgttgggggtggtgtagaatgaagaaggaggagagaaggaaggatctagagtgcagcagaaaagaaagaatttttccctctccatgcctggctgctacctgacaaacaatcaagaaccatagagctgggatccttctgtttgtccctctaatgtatgggaaggtgggtgaagcatcagggttatgaatgctaccataagacttcacacagtttatatttgtgtcccaaagcagagcccggaccacaaggcccatactgactgcctctctgtggcaaacgtcacatatgtccatcacccaccctatttattgctcctcacccttccagaggtgaacttcctccatgaatttcccttcctgaaactcacgatgggaaccttaggctgcctggaatacaaattggcacagctcaagacacgcagcttagcatgggttttcaggcgagactttttccctatgtgagagtcacgaggctgtcaaatgctgttataaacaagcaaggttgggtttgatcatgcagttacggttctagcactgcataattacccaggctaaagagctcatttaaaaaggggaacttagaggaaaattctttttttagaaaaggacttgggttatagacttcttttttgagtacaaattctgtagtaacaagatattaactgtcatcatcttttgaactggtcactcaaggaaaaaacacgtgcttcaaaaggaaacgtgctgtatcatcgttgttggaatgagtagaaaaaggggtgtatcatatacgatagtgtttcctttctcatggccagttaaatattatctctattatctctaccaggaatactttatggccaaccacaaattagagtaagctagtaaagaatgttgaattttattgactatattttctgtggaacacaggctacagtgctagatgaagacagggaggaaagatggctgataaacaacatatttgtggactgtactgacagtaatttctatttatcagtaaaagttcccaaagtgataaagattccctttacctcttgggatctatgcttagatcctctactattgtttaaacagtctatgaattacttataggcaccctcttctttttcagagttgctttaaagctcatcttaacacaaaacacaggaaatgaagtaatagtcttcatataagactattaaaaaaaaaaagagagaggcctaagaatttgtctagtttaattttctttttttctttttttttcttttttttgttttgagacagggtcttgctttgttacccaggctggagtgcagtggcgagatcacagctcactgccgccttgatctcttgggctcaagcaatcctccaacctcagcctcccaagcagctgggactataggtgcacaacaccacacctggctaatttgtgcattttttgtaaagacagggtgacatcatattgcccaggctggcatctagtttaattttctactgaggaatctgaggtccaaacaggagagaaatgtaaaggataagagtgagtgtccctgtatttttttctgattactatgtataatattcatgtggaaaatttggaaagcagagaaaaatgtaaaaaggcatggaatccttttatattcttaatacaaaggcaaccactgtcaaaattttggcagattttcttctgtcctttttcctaaatagtatttttttcaatattgaaggtattatttccagtatatgcaactttatgtcttgtttttaaaaaaatgttcacatatcataagcatgttcccataaatgttagcaaaaactcctggtaatcattttcaacaactgcattatagtttatccaatgaatacaccatgctttatttaaccattcctctaatgtgagacaaatataagttgttaataactttttactctcctaaaaaatgctatgatgatatttgcctgcaaattatggagtaattacagagtattctcccctcagataaattcctaaaagggaaatcactggaataaaaaatataaagcatatggacaataatcccaatttaaaaagatgttaatgtatataaatagagtgtaaataaaatagtgttgatgtactgaaatatgaactgtataaaaagtattggtaattgtatatggggtgtacctgtttatctgtaactgttatccaaacaaattaaatactgtggatgcctctatgtgctgtttttcctcatacaagtaaacacagaaagtcaaattcttcagcctccctctctgtgatcctgttttaattctcctacttgaataatttctttctgacttacagaggggatgcttcatctctgaggttggaaactctgtagagcaggattccccaactcctgggctacagaccagcactgtccatggcctgttaggaaccgggctgcacagcagcaggtgagcggtgagctgtatttatagccgctcccccttgctcccattaccgcctgagctctgcctcctgttagatc

SEQ ID NO: 1887287 - DNA, 4001 bp, Homo sapiens
ctgaagaattaaagagtctcagctaggcatggttgctaatgcctgtaatcccagcactttgggaggctgaagtgggaggatcacttgagcacagaagtttgagaccagcctgggtgatacagtgagacccagtctctacaattttttttttttttaattagccaggcttagtgtcacatgcctgttgtcccagctacttgggggactgagataggaggatcacttgagaccaggagattgaggctgcagtaagccatgatcatgccactgcactctggtctgggcaacaaagcaagatcctgccaaaaaaaaaaaaaaaaggctcagagaatatgacattacttccaattagattaatcagaaaaggtgagttttgaagtgcaggaatctttttaaggcagaactgaggggcatgggtggagtgttgtgagaagaaagaagaattactagcaacagttcacaaggggaaatgcaaaagggctgggatgagggtgaggcaagtgaggtgccttgcacaatgctggcggtgagcacccatttcatgtttgcaccctgggtgcctcatccacttcactcctcaccgtgaaacacaaggaacacaggaggagtggcagatggagggctgggtaagtgttagggaacagctggaaatgaagcaggaaaagtaagcaggggataaagttacgggggttggggggcagatctcgagggcctcaggagtttggatttcatttgatagatcaagagagagatgtgattgctgtttaattaggaagattattctggtgtgagagcctagaatggaacagaattcaacaagcaagcaaactgctgcagaaagacaggggcagggagagctattaggaagctccttggatggcccagacatgaggtcatcggggctggaaatactgcgtgacaatgggagatggcagggtaaggaaagaacatatgcaagagacactctcagagaatggacagtatttggcaaccagtttaatgtcaggggaaggagagcaaagaagagaggaaagtaataactgaatccaataatgtttagagagaagaataaaataccatgaaggataatacaggagaaaagaaagtttgagaactgaggaggtggcgagcagtgtcggacactacagaggttaaagacttggtgactgaggagtcatgagatttgtccacaggatctgggagagaagtttcaggagagtgatggggcagggatggaggctgtaggccatcttcaaggggtcaaggaataacttatgggggaataagggcagagaattaagattactcctttgagaatgttggtaaaaggaaaagaagagattgagatgattaatatttaacatgattcagaaaatattttctctaggtgatccaatttacttgtagcaagagaggaagaagcttatggagagggagagggcaggagtcagagggtggctgatgagggggtaagaggggaggtacagagattccaaatggagcggtgacccagggaaaggagtgcgggaaggtggaggtagaagaaaagagattctgctctggggagctgagtagcggcagttggagggtccctgcagtggccttttaagaccttttcttctttcctttcttcccctctcctccccacacacactggtccctgatgtcctactttctggccccctcattcaaggaaaaatgaacagggctaccttctgcctggactcacccaaaagccggtctcctgcagcctgaagctcttgtacctctaggctgaagatgatgaggatcacaggaggaggaaggctgccaacttcatgttgctgttggaaggctttggaaaaacacagcagggctgagagcagctgaaatttataccttccacccgctgagctggaatgcaaggccaggggtgggactagggactgcagacacctaagccctgcccagaaactgacatttctggagaatagccacccaccctgtgtaccctgggtccttctacattacctaagcaaggctctgagccaagggaacgccctcctctgacagaaaaataagactcctacaccaggccagttgcagtggctcacatctgtaatcccagcactttgggaggccaaggcaggaggatcatttgagcccaggagttcaagaccagcctgggtaacaagagcaagaccctgtctctacaaaattaaaaaaaaaaaaagttaaataatgaaaaagactcctaaatcaaaaaagctgtgagtgactgagaaaaaggggctggcgtggggagggtggagggatgagtattaacttttattatgtatattcattcactcattcattttcaacataagtattgaatgtctgctctgggccaggcgtgggctaggcatgagagaatcccagagaaattacagtctgggagctaggtgccaggtagcaagggtgcagtctgctctttcccttcttcccccgacccaccacacccgcccacctccacccccaacttccaggcctagcacctctggaaatgagggcagggaaaagcagtacagaacaggcaggggtgctcccttatcacctgctggtggtagagaggtggcctcagtctcccactgccttggtctgattctgttgctggatacctaggcagatgtgatggtctttgcctataggagctatgtaattttcttgagataaagctctgcttcatctcatccaacttcatttctgagaacccaaactcaagttatgcatattaaactcttctaggatatctctcgtcctgcagctctggggtgggagtgggggcgggaccatagtaaccaaccagctggggagtgaggtttcatttccccctccttgtagcactcctaatctagatgaatgattttcttaaacacacactcccgttgtttttttttttgcaggggagtggggatgttgtcaggggtagggagaaatataccctcttccctctccaatggcaaggatgcagggagacatgtataacttttggccatgtgtcgtgtgtcccacaagataccttatataatgtgagataaggaggatacctgggctagttgagggtagtgagacaagtttgcaaccttgtgataggccccctgggccactttctaaagtgaagtcaactttagacttcacttgtaagtctaaagtacatgatgtttcacttctggttcctaactctgaggttacagggagagacccactctgttctacttcatgtatcacagttcctgaaatgccattggttagaagtcctttgggcaaacaactgaccttttctgcaaatccttcttatctaacaaggcccagcctaaatgtcacctccaaaaccttcctcaacttccacccctaggagagtaacattctctttagtacttattttgtcataggacttgtcagactctattgtaattaattattatgatcattttacatttctctcctgtatcttgctggctagcatggggtcttactgatctttcatcctcagctctcaataatgggcatttattatcctcaataatgtgtgttttgggatgatgaggagcattcagagagccattgtaattaggaagacacttcacgtggtttccaatacagacaggcattattattgccacgttacagttgagaagattaagccacagaaagtttaactagccccaagtaatagttaaatggcagaaccacagtcaaactccaaagacagtggtctatactagtacacattactgtcaggctacatccaaattcttagaaaataatttggactcatctctgggtacagataaatgagcttttgaggtcacagaattctgcttcatctagtgtggcacccgtaatcacaatttcattagcacaaaataactgctttgagctaagcaactcactctagaggcttctgagtactcaatcagattaaaagtaggtgccatccacccaaaactgttacttcggttttaagtgagttgaggagc

SEQ ID NO: 1887288 - DNA, 4001 bp, Homo sapiens; identical to SEQ ID NO: 1245011

SEQ ID NO: 1887289 - DNA, 4001 bp, Homo sapiens; identical to SEQ ID NO: 1245012

SEQ ID NO: 1887290 - DNA, 4001 bp, Homo sapiens; identical to SEQ ID NO: 1245015

SEQ ID NO: 1887291 - DNA, 4001 bp, Homo sapiens
gctacatgtacaaaaatacgagttctctaacaaagataactaaaagtagagaagaaaatgagtaatgcacaagggtccataggaaagcataccaaaatgtgatacagaagtcagcatttctttttttcttttcttttttttttttttgagacagggtctcactctcacccatctcagggactgaagtacagtggtgtgaccatggctcaatgcagcctccacctcccacgctcaagccatcctcctgctcagcttcccaagtagctggaactacaggcacgtgccaccatgtggaactaagtctttttatttttattttttatatttacttttgcagagaccaaggtctccctatgttgcccaggctggtctcaggctcctacgctccagtgagcctcctaccttggcctctcaaagagctgggattacaggtgtcaggcacccagcctaaaagtcaacatttctttatattccagccacaaagatcctcagagttaaatgaaattaacattcactagaaacatcatctgtctagagatatacaaaacagaaaaaaagaatctaaaacaacagattttaggtctaacaacaacaacaacaaaatgtggctcatttttcaaaaaaaattcctaacacaagaaactatatccatttaacaaaatacactttcttttttttgagacagtctccttctgtcatggaggctaatggtcaatggtgcaatctcagctcactggaacctctgccccccaagttcaagtttttctcctgcctcggcctcccaagtagctgggactacaggcatgcatcaccacgcccagctaatttttctatttttagtagaaaccaggtttcactatgttggccaggctgctctcgaactcctgacctcaggtgatccaccaccctcggcctcccaaagtgctgggattacaggtgtgagctacctcgcccagccaaaaaaataagaattttaattagaagtatgtatttaataaatcattctgcataaagtagccaatgcttaagtttgtccacaaagtagaaaaattgtgggtcaatacataataatgattcataaattatagccactactgttaaaaatgagtagaaaacactgtttaatttgatgaaataaaataaactaccagatatttgaaaatactccaccgccccagttttcaataaaaattttttcaagaaatctctgcacttacccccattatctgttctttttaaagctccatccttatggggacaaagttcacatctctataaacaagaaaagaaacacgtaatgaagaaatatttcagattatcaaaaatgtaatatcttccctgcaacttcaaaactactgaaaatgtgagagcagcatttgtactagttgccccccaagaatatttaggaacattcttcacaaacagttgttcttgacgacatgtgatcttcttcagcgaacaagtaatttttttaaagtacattttaacttttaaactcctgccacgggccaggcacggtggctcatgcctgtaatcccaggactttgggaggccgaggcgggcagattacctgaggtcgggagttcgagaccagcctgactaacatggagaaaccccgtctctactaaaaataaaaaattagccaggcgtggcggcgcatgcctgtaatcccagctactggggaggctgaggcaggagaattgattgaacccgggaggcagaggttgcggtgagccaagatcgcgccgttgcactccagtctggacaacaagagtgaaactccatctaaaagaaacaaaacaaaacaaatcctgccacaagtttttaaatcttacattaataaaaacacaaagatgctgggattatttacctggggagcgggagaaaaaaacaaaaaagtcctctcaacacaggaatggggcaaggtttttaacatctgcctgttacctgtttacttcctgttttatggtcagctaggatgaccgcagtcaagtgggtctggtttctcttaaagagccaaactcaagaatttagaatttgaatttaagtggcaagaaatgatctcatgcatgctgatttcccttctgaaaggaattaggctaatcagctattattattcaaacacagtggtactcaaaatttattgtggattcctctccctcccatcctcagaatttaaaagcagaaataaatgtagagccagtactactacttcttatgaaacacagtaagtttcaatggcattgtcttactatgaagaatatgttcctgaaagtcgcacttgagtattatttatatcccactttgtttccaaaagaagttttccagcatacagtatcgtaatataggccgggcacagtggatcacacctgtaatcccagcactttgggaggctgaggtaggcagatcgcttgagcccaggggttccagggcagcccgggcaacatggcaaaattccacctctacaaaaaaaaaaaaaaaaaaaaaaatagttgggtgtggtggtggtgcacctgtagtcccagctactcggcaggctgaggcgggctgatcaattgagcccagaaggtcaaggctgcagtgagccatgattgcaccactgcattccagcctgggtgacagagtggaccctacctcgaaaaaacaaaaacaaacaaacaaaaaaatgtgtgtgtatacatatatgtgtgtgtgtgtgttgattatatatgtatatatacacacacacattttatatatacacacactatatatacacacaccatatatacacaccctacatataaatatatatacacttacatacatatataaattacaacaaaaattagagtagaaaattaagttgaaatagttttaaaagtacagaaggcataagccataaaagcctactgaggctgggtgcagtgcctcacacatataatcgcagcactttgggaggccaaaatggaaggaccacttgaggtgaggagttcgagaccagcctaagcaacaaagtgagacctcatctctacaaaaataatttaaaaaaaaaatagagcctatttgccaggtgcggtggctcacgcctgtaatcccagcactttgggaagccgaggtgggcggatcacgaggtcaagagatcgagaccaccctggccaacatggtgaaaccccatctctattaaaaatacaaaaaattagctgggcatggtggcacgtgcctgtagtcccagctacttgggaggctgaggcaggagaatcacttgaaaccggaaggcagaggttgcagtgagtcgagatcacgccactgcactccagcctgggcaacaagagcgaaactgtgtctcaaaaaaaaaaaaaaaaaattacagaggctattgataaagtttggatatttgtgcctccaaatctcatgtaaaaatataatcccgatgttgaaggtggagcccagcaaaaggtgtttgggtaatgggggcagaaccctcatgaatgtcttggtgttttccttgtggtaatgagtgagtttcttgctgttgttagttcacgtgagatctgattggtaaaaagagcctgccatctagctccctcccctcaccatgtgacactcctggtccctatgcccactcccccataagtaaaagcttcctcagcccaaagatggtggtagtatgcttgtactgcctacagaactgtgaaccaaataaacctcttttctttatattaataatctacccagtttcaggtattcctttatagcaacacaaaacagactaatactgctgtatttcttgcctttcagtatttcactctcctgattttccctctttggtggcacctttctgatcaccctatcaaacctttaaatggtgaagttcctcagggttctggcctaagatgtcatctctctttttttttttttttgagacagagtcttattctgtcgcccaggtttgagtgcagtggcgtgatctcggctcactgcaagctccacctcctgggttcaggacattctcctgcctc

SEQ ID NO: 1887292 - DNA, 4001 bp, Homo sapiens; identical to SEQ ID NO: 1245034

SEQ ID NO: 1887293 - DNA, 4001 bp, Homo sapiens
ataacagattatatctgtaataatatatatggtatatgtatcagcaatatatatatatcatatgatatataataaacaatataggctgggcatggtagctcatgtctgtaatccaagcactttgggaggccgaggcaggcagatcacttgagctcaggagttcaagatcagcctggccaacatggtgaaacccctcgctactaaaaatagaaaaattagccaggcatgctggcacctgcctgtaaccccagctacttgggaggctgagcgaggagaattgcttgaacccgggaggcagaggttgcagtgagccaagactgtgccattggacaccagcctgggcaaagaagtgagactctcactcaaaaaaaaaaaaaaaaaaagaaaaagaatataatgaattccctctaaaatgaaaacacacttttcatctgaatatatatatatataatatagttaatatttttcaagtaagctctcttttgttatttttttttctgaaacacaggcagttttaatttttagtttgctaaatcaaccttcagaatgtcttcttatgaggtcattcttaggaaggcttttgtgaacataaagtgtacctgtaaaataagcgtttgtgttttcttccggtactttactcattttcatatgtaaaaatttcaatctgtattccatcaggaactcatgtttgtgacataaaatttcattagttttcttcaaacagcagacattttttcattaataattcatcctttcctactcattaatccttacgtatatcttacataatttcagtgtttctgggttgcctattctgttctatgcgtttgtcttttcagctgttagtaaacaattaattgtagaaattaatagcacattttgatatctagagcagcaagtgttttttcactccattatgaaatttttttaaatgtcatcacaatagtgaaagacagcaggtgtcatacaaaaatgttaaaaccttgatattttcattctgtctatgtaaaattgataaacacagaaagagctcacattctgaggaaaatgtgtcttcccattcaagaacacagaacccacctcccacttccaagtttctctctaagaaccttcagtaaagaacctacctacacagggggatacggatgtaaaacggacagttttatctgagaacttttcgcctactgaaaataactcacggcatttttgataggggaatgagttctctcattaggcacctcctataatgtatataaaccatgttttaaacgtgtacgttaaaattatcaacaccgtatatgcttaactttgtgagttaaatcactcaaattctccaccaactgctccagccagggaattatgagggatggaaaacagctgagggtccgtttggctccgccgctcagagggtgcccggcgacctccaaggcccccgtcccaggggctgccagaaagccggacctggggaccccctgccaccccgggctgagccctcgctacctgtgctgcttgtccagggcgtcaaggtctccgctcctgcgcgccagacagcgctccatctccgcagcgtcgcccttgacagctgccttgtggatcttctgcagttccgagtaccggattcggtacccggaacccgtgtagaggtggtctatggagcccaggaccgtctggcccctgcggctcctgaagccgaacaacttcatggtggtgacttctcagactcccaactaccggctcttgagagggggcagctccctgttaccttttcacctccccccacgcccccgccgacccagccccaaatcccctatccaaccccaaatccccgatccaaccccaaatccgcgatccaacccccaatccgcgatcccaaatctattatctaatccaaaatccgcgatccagcccagtccaccacagccttcagcagcgacactcgcagcctccgacctctcagaccgagtgagcctcgcaaagccgttgggcgcgcgcctgcaccgcggtggccgcccgggtcccggaagtcgctcggaggtggcacgcgctggcaggtggggctgcagctgcgagagggggcgggcctgggaaccaccgcgggtatgggggccttgccattctcaggattcctgcggaaacgctgtgcgctcgctgcgctccaggagcaggagcaggaggaggtcgccctctagagtctggagtctggggagaggaggaaggctccttctttgtaggccactggtgttgctgaaacctctgccgccacctgcagggcaccccctgatagcgcccctaacccgccgccagctgttggacccgggatagcgcccctaacaccctcccctcacagctgcagtgtagaaacccaatagcgcccccaacccgtccccgcctcagacgttgcagcaccagataactcccccaacctgccccctgccgtgggccatgcagccacggattggacccccaaccaacccccccgccgcgggcagtgacgccccagaaagcactgcaacctgatccccgccgtgtgaatagtgcagccaaggatccttaaggcccccaacccgctccccacgatgggcagtgccgtcccagatagcggatagcacccccaaccatcccccagccgcggggtatgatgccctggatagcgcacccaacccgcagtcccccgtggacagcttagcccccgacagctcccctaacccgtatgccactaccgagaatatggtcccgatagcgcaccaaacctgacccccgccacaggcagtgcagcagctgatagctcccctaactcgctcccactgaccacagtacagccccctaatgatgtccacaacccaccacacctccccacctgccaccggtggggtatcgcccccaaactgccccttgccgctggcagtgtagcccccaatagagcacccaacgcccccctctatcatgagcagtccggcccgcgatagcgcccgaaaccaccccgtccaatcacctccctgtactccccctttcccgccccccccacctgcagtgtaccaccggaggcccctaacctatcccctgcggggggcattgcagccccagatagcgcccccaacaagtcccccgccgcgggcggtgcagcccccaaaccaccccccaccccagtcagcaccccgaccaatccccccaccccggcgccgccggcagtgtaaccacagtagcggccctaacccgtcccctgtggcgggcagtgtagcacacaatagggcccccaaccagccctactgctgctggcaatacagcccaggatagtgcccccaacccgcccccaccgctgctgcgggcagcgcagcccggcatagcacacctaaagtagtgacgcccggaataacacccctaccggcccccggcctcgggcagtatagccccggatagcgcacctacccaatcgcctttctacgctctggccggctgcagtgtccgctgctgccacccaccgcagcgaggcgagccagcgaggccagccgcagtcccacagactctagcctccagcctgtggtaggtgcctcctctttcccttcctgtatccaggcaagaagcagctctcgctgccagccgcctgtctccatcgccgccacacactatgcagagccaagccctggtgccacaggatccagcctccagcgtccagcgtgtggcgggggactccgctttcgccttctttaaggtgcgaacggaggggttgggaacgctgaggcacaacagcctgcaatggcgcaattcccccttagcatgttttatatactgaggttatgcaagccaggttcctggacttcatgttctgattggatgagagaaaaccgctaggcctgctagttgggggcactatcccagactgtattgccggcagcagtgaggtgggttaagggtgctatccagggctgcactgctcgggggtgcgggtgggggggtttcgggttgagggcgctatggggtgctgcaatgcccacggtgcgggg

SEQ ID NO: 1887294 - DNA, 4001 bp, Homo sapiens
cttttaaaaatctcattctaaaatccaaatggtaaacagctttaagaatcaatatgaaatgttttaagtgttctctgtggcttcatataaattctccctgcccctctcatcagaatttattctgactttcagggagcatattaaaggtagaaaccactgatgtacaataataagtgtgcaaccatattcttaagaatctaaattcaatcttggttagctgagaatgcttgaaacagtaataaagtgctcctctgaaagtcacactcaaattttgaattcctctttctaatgagagctcttcacccattcccatgtctcaagtacgcaaatgaaaacaaaacaaaaaaactgtaactgggatttaaaagtataacagtctttcttctctcatgtatttctttcttgtcatacttcattctggaaaaaaataatccaatctgaaatataaagtgggaaaagggaggcatccgtaggtaatgtgagttattatcattgttctagatgttgggttgagtggtgggttcatagatgttcattacattatttaaaagccattataattaactattagaaaataagagggccatacatgcacgagtgatgacagagtgtcataaatcaggaattctgattattccaatcccatgcacctaagatctgtttaaagaaaaaataataatgagatggtgatgcaggtagctaatggttagacccttctagagttcaccaaactccttcggcagggacgtcttcataagcatgcagcctgcgcagctgcacaaggtcctgcctttaggagcacccagcctttatttatgctctgctgtcgcaatcttgaaatttaaatagtgttttaccaaggtgtcctgcattcattttgcactgggaccagtaaattataaaatcagtcctgtccctaagtttccagaggttaaatttacctacagttccccataatttcgtccccatccaactttgatattttttaagtttgctacttcttatccccagattattaatgtaacagtcaggtgagcaccctagagcagtcttttttcctgtatttcctatgtttccttatttttattgtccaaatcagtgctgcctgtgctataaatggagctgcagttatatattgttcttataatgcttcttctcagatcaaaaacttcaaacagaattcattggctaaaaactaaatgcactgaagtctctatctaaattcatgttaactgctggattatacaaattcattttctaataattgcccaatttcaactacaacatataaccaaacaagacaaattctgaacaattcttcatggtagaaagaattcaaataaagatttaaggaaatcctcattttcaaaaattactgtctcaaaaaaaaaaaaattaagtaaatgtttttgcattcctgaaatgccctgtgtctacagtgatcaggtacagaaaagctacttcaagttcaaatataacttagcgattgccacatggtgcagaatctttccacccctaacactccaaaaacccaatcagacaagtggccgtaatctgactcccagcacacagggagctgcggggcaggcaatgagagctgcactctggctggggaaggcatgagtgacagacccacagcaaggcggtgggggtaagtccttctttgccttaagggaacaacgcttagggccaaaagatgaaactgtctcttttattatagatgtttgtgccttcttaggcagaatctggaaggcagctatagggcaggtgggtggttcttttagatctgagtactgggcattttcagaagagaggcatagagaaggtagaagaaaagggatgctttttagccaaatcctccatatgtttcagatctgcaaaagcccaggaaaattaccctatggaggtgaatctagctatagtacatttcttcggaaaaattactcacccagacgctcagctgtcctggagtggatgaagctgagtgttcagctagaaagtaatgtgtccgattcagtacatcaacaaacccgctttgttctggggcaaaagaagcaaatctaattgtgttgatcatttccagtgactgtgaacatataagggaacactgacaataaaagcagggtgctatgggtgacgctagggtgagccctcataaggccagagatatgtatatgctgccagcaaacttcacggttcacagccaagtgaggctggtccatctgccttggaagaagatcagatttttgtggatttaaaaaaaaaaaaaagctaaaaacattcttaaagagcatgtttatgttttgtgttggtgttttgcactgttttaaatttctctggttgatgaatatttgaagctgaaagagcaactacctctggagaggtaaacaggtgcatgacaggccaagcagggagagaactccggaaatggcagaagtgagaggtgaagggggtgagcagcggggctggccttttctgggtcccacctcttctggtgtctcctgcggggctgaaaaggacgtttcctgcccacctagcttccttagcctactgttttgtcctcctccttctcccctaaccctgaccacaaacgacagcacctatgatcgcattttgccccctttgccatcccggctacagccctgggctgccggtgagttcagaagtgactctcctaacttcttcaatatgtgacttttctgagtttaccgtctttgggaatatttttagtgtctcctccagggtgccctccctgccccattgcaaccatcgtttttgtctctttacattcttttcctctagagagtatgatgtcgttgtcatcccacctggggtttttcatacttctgagattcgcttcactggggcaggggatgcgtgggatgtggctggccacccccctgtggagccagctcttcctttatcctgccacccgggcctgggcaagaaagggtttttctctctccacctctaaagcaaagccccatagcaaactaagggctaggctgagctggaaattcccctcaccctttttggcactgcatttcctcactacccacgcagaaagcaggttcccgggaacattcagtgacatggggaaatgagggccccgcaatttgtcaaagggaaagccacaataatactaatctcttaaagtacttggctttcttgcctaaccccttacgtggtcctctgcaattagattctctggtaaatactctccatacttcttggctctcatgactatcacaggcaaaggacaagggcaaaagtcttagatgatagggtaactggggtaattgccccccccccccaaaaggggaatcctagccatttcctgccagaatgagcagttggcatcaatatcgtcaaaccaccccttctctgctccaaagatctaatgacagcaagagggatatagacgggaggagaaggcgtcctccctctcccagactccctgcccaccaccctccccagagaagctccacaaggtgagacacactgtcctataggcccatgtaacagaaagccatcaaaaagaccgtagagaaaagccgttttccatagagccttctgctcaggggcccacagtttccctaaccacacccgcttttcctgacttcccgagctctgcaccatgaaggcaggaaaggtaccggggcattgctggcacaccccagcctccaggctccctttggcaggtttatctgcattgtacggtcagggtcaaggggtgagagagggtcgggcacgaggagaggctgtccttcctcccctaaaagcatcccccactcccatctctccccacctccagcggccaggatgcaccgggccggcgggcaggcgggcgagctcgcggggccgcttctgcgtgtgcacctggccgccgcccgggagcctgccacgggccgggaatggccgctgctccgccctctgagaggtgctccaggctccctggggacggaggtttacacgtccccgtgccgcgctcccagatctgg

SEQ ID NO: 1887295 - DNA, 4001 bp, Homo sapiens; identical to SEQ ID NO: 1245066

SEQ ID NO: 1887296 - DNA, 4001 bp, Homo sapiens
tgatgagttcatgtcctttgtagggacatggatgaaatgggaaatcatcattctcagtaaactatcacaagaacaaaaaaccaaacaccgcatattctcactcataggtgggaattgaacaatgagatcacatggacacatgaaggggaatatcacactctggggactgtggtggggtggggggagcggggagggatagcattgggagatatacctaaggctagatgacgagttagtgggtgcagcgcaccagcatggcacatgtatacatatgtaactaacctgcacagtgtgcacatgtaccctaaaacttaaagtataattaaaaaaaaaaagaaaaaaaaaaaaagaccaaaccaaactttacacatatttcctttttctttttgattctatgccccctccctcagcctcccaagcagcaggaataccctgaagggccctgggaacccttgcccactgagtcccacctggaaagcagttccctagctggagagtcctcctcatcagttatgctctccagcacccacactggagaaacacaaacaacaggagaagtcatttgagagaggctacccactcctactcccgctgaagccccactgcctcacacaggattccctggtctttcctctgggttcacagatattcctgcagcctctctggccatagctttctactggaaagtcatttgctctcaccaggcccgtaatgctccttcccaaaggaacccagaatcaggtttccgtacactagatccagcaagtttgttcctcaggaagtgagccatttcagggtaaatactcccctctgaggttgatggcatctgcaattatagaacacattaggaggattagatgatgccacgcatgtcacacatatctgttattctcttggcaactttagaaaattgtaagtatagtggtagagtcaaaggtcaaagtcccccaaaactagcacaaagtacacctacagaaaagacaagaacttttccaacagaatttacctttaaggtttatttagatgggcagtttcacaactcttttttatttttatttttattttttgaaggagtctcgctgtccaggctggagcgcagtggcttgatctcggctcactgaaacctccacctccctggttcaagcgattctccttcttcagcctcccaagtatctggattacaggcgcatgccaccaagcccagctaacttttgtatttttagtagagacggggcttcatcatgtttgtcaggctagttttgaactcctgacctcaggtgatccgcctgtcttggcctcccaaagtgctgggaatacaggtgtgagccaccggacccagccacttccacaactcttaatccatggggaaaactgctgctgagggaaaggcctctgcattgcagtagatagggaatgctgccatctacaaggccccagtatgccaggtgtgggttggtgagaggctgccaaccagtaccacccagcaagggaactgtggacatcatagataatgcaccctgtcagattcccatgtgtatatttgactggaaaggaaagcagccaggaaagtaacatttctgtttaagaccaagaaaagtgtcttacattgccagcatcttcttttttgcagatgtctcctacagcaccctcaggaggagctaggagaacacagagtaagggtcagtgccctggtggtggcaactgtgtcacccagagagctttgcttggtgtggtgcatggaggtagctgatcacagcatgcgccaacctgatgctgggccatgctccaggtggaaggaggagggcaacagagagagcaggagggaactgagacaaggaggcctaggccttgtccttgtcctaaggcatcatgaagcagcacaaaggagtaaacccaaaatggacctaaaatgcacaccaaggttcaacagaagggtcccttcatcactcacatgatttgaaactcttctacacaaacaagactttcttaacgtattcaagattatctcagtgtactactagaatcaaactatgttggtactgcatctattatctattttacaggatttatcacttgattaaaagccaattttattggtgaaatagattcaattttaggcaaattattttatttattgcaaattctttttcatacagataaccaaaacattaaaaatactgaaatactacagattagaaatagtcatactttcccctttttaagtcttcttcttgagccatggtgcacgcacggcactcttgggctgctgtgatcaggagatccaggatcctttgtgccaccctctctggagacattacctagaggtctcgctccaggcaaagaggccaagctcagagcctgctggatctgctctgctgaagctaagggacatgactcagacacgctctacagtgggaagcggtttccaggttcagatatgcatcatctactgaaatgaggaagtagaaaaaatagaaattgacaagttcatgagaaactgcccatgagtgcaggagtaattatttttgtcaactgccttacattcagtatgtattcagacatatataaggtatttttataaaagttgcaatttttaatttttgtcagttatgttaaatctaacttatcagctctcaatataaagactctacctcattttctttgtggtttccagaaaatctagcacatggtaagtagaacaccaaaatatttattaaatgaaaacacagagcagggattggggacaggcaggcacgcaggcaggcagttatatttgcttacctggatgatagtaaactacacaaaaccttagttagattaatactgaaattgccttctgctttggctgtttgccgttttggaagaaggacaacaatgaagatgaacaggaaagaaatgagaaacagagacctttgcttactagctaaaggctacctactgtaacacgaaattgtctacaaatggttttcaactctgcgtgctgtaattcagtgacagagttccctaattcctcctgtctggcttcaagtccagctacatcgccgctgtcttctttacaacttgcaagatgctgctgctactgcacttatctgctgtatgagatttacacttgttttaaagcaaaactttatttcacgtaggctaatggccaggcaggctacactagtcagttaacagtgagacggttcctcatggaggaaaggttaggttgaggctgaggatccttaatccagatgtataacagagttgccacgaggcaacggaaaccacactgagtggagcagtgttcttatctgtctctcttcaccatttttagctggcaggttttgaggattttagggcttgtgaacattactaaatctactgaaatatatcactgatccttataagctttggccagctgctgagcaaaataacttcagaactgttctatatggtcccccacatcttagaacctgtgagctgacccaaaacatccggggatctttgtgcttttgacactgaggactatgctggtctgtaggaagatgtgcctataactgctctgggttatgtgaccatggaggtcactttatggtgatgggcagagtctgggatctctcaggctcagtgctttagggcttgtacatgaatgctggactcctgcatggtgatgaacaccctgtgactgatgcataagtgcatgtcagcaggtgactgtcagcattgggccacacacctgagctcatgttttgactttttcattcaggagctcaaaagctggggccactcccattggcccttcagattctccacctgagcagtgaggggaatgaaaggtggctctggcacgggtgaatgagtcatgtatggagagagtagaacaggggtggattttactttttagaagtggagactggcaattgtgctgtgtaaatggaaaatctctcctgagaaaacacacagcctcccctatacgaaaacacacacaatcatatcacacgatgcagactcataagaca

SEQ ID NO: 1887297 - DNA, 4001 bp, Homo sapiens; identical to SEQ ID NO: 1245071

SEQ ID NO: 1887298 - DNA, 4001 bp, Homo sapiens; identical to SEQ ID NO: 1245073

SEQ ID NO: 1887299 - DNA, 4001 bp, Homo sapiens
tttatattgcattaggtattataagtaatctaggatgtatgtaggttatatgcaaatacttcgctcttttatatgagggacttgagcagccttggattttcctatccatgggggtcccggtccagaaaccaatttcccaaggataccaaaggacgactgtagttttactggaggccatttttaattgcagacatgaagagctattgttcaccatctcgttcaccatctctgagctgcacctggtctgggtctgtggcatctcaaatcctgcctgactcaaacttgagctacatgcaaggaagaagggaatggggaacttcttcaggggccactaagttttggggaagttcgttatgtagcaataaataactgatacaaggccacttaaatattttactctgtagtaagatagctaattaacaaaaactaagagtcaattgaagagaactcattaaggaagtgggtcatttcaaacgcttttatttacttgtgatgacaattaaataaagaacaaactcgtcatctttctttgatgaaaaaattgtttgatattctgagaacaaaagtgatgccatactgccattaagaaactgattcagactcgatctctcaacaaggtaagacatcaatgttcccatcaagagctgcccataatactgcagtacacttctctggcaccattaaaaaaaaaatctcttagagatgatcctgaaatctcttctaaagacatgaaagaggtgtgcttgtataatctggtattacaaagaaatgagaaattgccctgatgacgaatctccagctctaatctcaatttgctgaagtagagaggcaattcatcttacccattaactaagaattagaaaaacaatttgtgtttttctttgagtcatttaactcaaataccactatataaaggaatagaatgagacattcgcatgaatttgaaaggtaaataaaacatcagacttcaaagaaattccattagaatcgggggttacttttttgttttcttttcctccacctccaccttaaggaacatgaacggcatttggccacagtttatgtctttccaattttatcttccaccatctaccgctcagttctcctcacttccagccaaacaatgtatgttccccaaacacgccttcacaatttcgttctagttggtgtctacctctagtatatgtgtagtcaatttatacacacattccccacgatcttgaaacgtcttgacatccacaagcaaatctaggtttctaacataacactaactttgtaagtctgtccatataaggttttagcaaacctagtaaaacagaaaacgcactattatccaggcttatattctgagatttgaaaaacccctctatctgctacctttgggtttctgaatttacataccactctcaagtatacagtattcacgatttctaagaactggagagtaaacctagtcctctaacaatggcattttatttgttgagttagggcactacctgcccacgatgaggatagttaatgaaacgctgcccggtaacgacgattaaaggctttgattgaaaacgtattaggccttaagaattttgcgaacatctaatttaaccctagtaactgtggcgtgggttctttcagaatttacacgcacgtgggagaccgcgaagcgcaggcagcgttaaaactagggcgctggagtcacccccgtaccccgaatgccgtcggcgctccagggcccccagagggtgcggggggcggggacgctgtgacgtcacagagcgcccttctgacgttctcacggacccgctttgcctcgggggcccacgctggagcccacccagtactactaagaaatgaggaggaaaaaggggcgccggctctcgtagcgcctattttctcggcagagggacccacgtgctcgctttggtggactctgcgcccggcgagtaccgccggcctgaagcttcccgccgccgcgtccacgcgacccagccagagagggctcagtcagccggcgcggcacctacaagctcagtcgggatcctggagaggcgggaaggcagcggggccctttccacagagagaacacagctcttcgggagattcccccgctgcccccgagccctgctctcccgcctcggcctctgaggactacccgcagggcgcaggcagccgcgaaagactcagcctccttccaacttcgcgagggccgagggggcgggccccgggcgcgcgcgcggcgaagccccgcccctgcccgcgcggcctgctggattcgccccgcccctcgctgtcgcccgccgcccgccacccgccaccgctcttcctcctgcgccacagtcccggcggcggcgctggtcgcgggtcgcaccgtgaggctcgcgtgggcggcgataggcgctgggcccgggcccggtgaggagcgcgccgcgcgtccccttctcctcaggagtggcgggccgcggaagtgacgtggtgcacgggcaggagcgcgtttgaatcggttcccgggtgatcctcgcgcctgccgctgctcggccgccgccgctgacgaggagctgcagcgcgccgggccgaggcctcgagccgccccgggagctggagctgaaggcgccgcgcggagcgcgcacctcagccctgagcccggcggcggcaggcgtcgctgtcttttctccttttccccaatatggcagcggcggacggcggcgggcctggtggggcctctgtggggactgaggaggatggcggaggcgtcggccacaggacggtgtacttgtttgatcggcgcgaaaaggagtccgagctcggggaccggcctctgcaggtcggggagcgctcggactacgcgggatttcgcgcgtgtgtgtgtcaggtacgcgaaggggcgaggaagggatgcgcgtgtagacttgggggcgggagggtgatgagaaactcaacttgctcactgagggcaataaacctgtcacccggtcccggtcctgcggccttggcttccctctcccgtgtgcccgccatgtccgtgacctggtggccggacgcctcgggcgggccctggcccgggcctcgaagtgcagggccggctcccccgtggccctccctctgcctccgctccttttacgggaggccttgccggcccgggtggagagctcagcgtttgttggccctgggcgagcttagcccggttgcggccctgcagtctagggaaagccgttggtggtgtctgtttttactttgtaacttttttaaaacgagagaagggagttaacgcccaggggctctgttgtgagtgttgcgacggtgggaagttgtgaaatgcccggagtcatctcccccaagttcattagatgatgcggggtgtccccgggttgccctgtcgaggttgcaggtccttctggggcggggcggcgggggggatccttccgcacggagacacttgtccaggtcagctctgcaggtagagctggccttctgcctgtctgagccctaacccttgggaatttccaaaccaagtcaaaggttggtatgggtggctgtggagcaccagaaaacgtacctaccccgtgtattggttcgctttgaaaatgaacgtggagggaaatccgctttaaactgtgatgtactttatagatatgaggtggtggcattgcctgagctttgaagaaggaatattgtcatgctctgaattaaccatatgaggtccctttttaagctgttaagaacacttagcgtccaagggaaaaaaagaactttgaagccgtgttttgtcgtgaggctgataggtttagaaatgttctagaccatataactgtatggttgctgaaataattgaaatcgtgatccgtagaatgaaaacgattggagaagtaaggactttcttttgttcacagctgtagtcccagcgtctagaactgtgcctgcgacattgtaaatgcccagattagaatggataaatgaatgaagacaaaaacctatcccctcaagttaattctgtgcctgaacgtagt

SEQ ID NO: 1887300 - DNA, 4001 bp, Homo sapiens; identical to SEQ ID NO: 1245086

SEQ ID NO: 1887301 - DNA, 4001 bp, Homo sapiens; identical to SEQ ID NO: 1245093

SEQ ID NO: 1887302 - DNA, 4001 bp, Homo sapiens
tcggttctttccttggtaaaatgtagttactaataaagacagaattatgacatcctggacctggtttaaattaaggaaccctgagaggaagccgaagtccagcaagagcacaattagcaaatatgttaggacctggcctctggctcttttgcccggacagggttttagagaggggcagggaagaaaaggtgttttcccttcaacaagaattacagattgttttcttccagtttagtttggtaacaggtagatttcacagaatgacagtagtccagcctgggagcaggtagatttcacagaatgacagtagttcagcctgggagcaggtagatttcacagaatgacagtagttcagcctggaagcaggtagatttcaaagaactgcagcaacagcttgtccataacaggtagagtcattcactcctgggatgagccaagctggaaggaatgtgtcctaggagactcaaggtttcccaatgtttcatttgtcaacagctcataagcaagtcacttccacttcacacgacctcacagagaccccacacagatgcattttggattttggtgagctgttataatagtcagaggcagggacaggctcagcctgaatcctgctcagaggccaaccaggattggttagtgcgagtcagcccacacctccttcccccatgctccggaggaacagtgggtgtgttgtgaattcactggaaaagtggttggaaggacgcattccaaactgctaagacctcccctcctggaagtgggactgtggtgtggatggttctggaagaacgcaaaagatacagggccctgacctttaggcctaagcgtgttaatgaccatacacgaagcaggtgtttctcagcgtccccctgccaccgccccgacttgtactgtgggcttatttttaaagagaaagatgcttctaacctgcagtgtctacaacagctcccatttaagaacccgggattggaagctcatagattgcgtttcgtagccggaccgctccctttcacacatgtagtctctctgcccgccacacgtagcacacacagtgggacccggcgccgctgaacgcctgcaccttcaagcccgcaaatggttctctatccttttccaggtacttgatcttcagagaaacacgatctccctcttagaccttactttacagttgctgccacgcaatgacttaggattttaccaagaattggcttgggtctgttgggatatgaatattaacccaagcaggaaaatagccaatgctgcctgttcgaccacgagcgggtgcgaagcgcagggaagactcctcagggtccacccgccccttgtcccccctgctccccaggcagcgtctccgcccttggacccggaggcaaggaggagcgcttctcccagcaccaccaacctggagggctccgccggacggttggggcctcccctcggagaccagagcccgcgcttccaggaggggccaagcctgggcccctcccgcgcccagctcccgttgtgatttccaggacccccagaagcccggtcccctcgcatcgcggaagctttgctcggggttcctgggaccggaccctcttctgcgcccgcgactgcagcagcggccagagatgcatgcagccactcgccagctgtcacctggtttgcagacgcccgcgcacctcgcaagagccacacctggtacctgtgcccagctgcaagagggtgaggaggcgcgggacgggattgggctctgcccgcgggcgcggctggacggcttgggcaccagtggggcggatgggtgtgtgcgcggggtcgcggagcgcaagagaatgcggggagcagggggctgaagggagcggggtacggtactagaggcgcacaggggaatatgaggccaccgaacgcaaggcgattggaagcgcacggcaatcagggggacgcggggcactcgcctgatgagggctcctgcatagtcccgggcggcctccatggcgcggatcccctagcgggcctggaggtctgtctgcctgcacagcctcttaaagtgcggcggccccgcccccgcccgcctgccagccccgcgaaggcctgactggcgcaggggaggacgttttggcacgagctctccaccgccgaggatcgcgacttcgcgctctgggagcccccggtcgtcctggctcccgcagcctggagccgcgcgtccttcgctgccttgggccgtaccgaggaccttggaagcccagatgctccccgggtctcttttggtcacttgccagcctgttcgttttgcacttctgggggtcggggcagttggggtcataaccaatcctggcagcatcactttggccgcggaaagacgggtatgtggattttaaacccaggccacgggtggggcaggtgaggagacggatgtgagcgccacttgcctccagctctggagtcccccagagcccagccccaggctcagcgagccgctggttccctgcagggatgcggaagctgccgcagacaccgggacctgcagcccttcaggttctccgaggcgcctgggcttcctgcccgctgcgctgctctcaaggccatgtcatgagcatttggggacagtgagaagggcatgcagaacgggaggggaaaggagcctttggactgcatgaattgccttttagctgtagtaagggaccctcgcagagtgaggaggcaaagagtgaaccccgctggggctgggggacttccgtccacaccctgctctcatggttgttcccatcggaagacgcaattagggcctctgagacctccgaggaaggcgggcagttacaaggggttcccagaacccctcactacaggactgaagaggtgggctcagtgttgaggggtgggactcgggcagtaagaggtgtaactttctgggatggaggcttgctaggatatcctctcgtgcccaactgctgactgccgcctggaaacagcgtttcgggagctgcagcgggaccctcgccggctcctcctgagcccacctggtttgagcagactgacctgatctcttaagacctgaccctatgcccgccctcttcctccgctggctctcagaaagggtcaccgtggtcaacaagccttgtgacttgcaggactgttgaagccaaaggcaattgccttccagagtcaaggactccgcctgctgggaacacccagctccaggctcacagggggcagcttcccccagaggcactgagcggacacagctttaggaggtcattcactgcccctcccactcacagccccaatgtgatggatgagaaaatgggtccaatcaattcaggtcaacttacctctaacctttttattgtgaaaaagttcaaatatagagatacatagaaagaacagggctgagggtactggcttacatctgtaatcccagtactttgggaggccaaaacaggaggatggcttgaagccaggaatttgagaccagcctgggtaacactgtgagactactatctctacacaaaaataacgataattagccaagcatgacggcgagcacctgtagtgctagctactcaggaggctgaggagggaggatcacctgagcccaggagtttgaggttgcagtgagctgtgatcatgtcactgcactccaatatgggcaacagagtgagactttctctctaaagaaagaaaaaaatctgtttgtgtgtatatatctatctatctatatataagatagatagatagatagatagatagatagatagatagatagataagagagaacagtacaatgagcacacttacacccagcccctggattcaaccactgttaacattttgacatatttctttgttctttatatttgaatttgaacccttccaaattaaatcctttagcttgcatctctggagaaacaaggacatgatctcatacataaccatagtgacattatcacttctaacaaaataaaaataaagacctgggcactgagtgtggacatgggggtggggtggggactagcaaa

SEQ ID NO: 1887303 - DNA, 4001 bp, Homo sapiens
gagatgaagaattacatcagcaagctgattagcagactggtcatcagagttaaagaaagaagcagtaaattttatactaggtcaatacaaatcatttgaatggtagcacaaagggaggaaagagaaaaaccaaataaaccaataaaccaagcaaataaaatactccagtgaatccaagaattctctggtaatatgaaattaactaaaatacaattaattggaattacagaaggagagtaaaaacagaatgtgagagaagaaaaatttgaaaaagatgactaaggagaccaaataacctcaaaatatccaagaaagattaatacaaaatttaaagaacgctagaataatcacactagtcaaactgctgaaaaccaatgattagcataaatcttgaattcagtcacagaaaaaataggaacactgtgtagagagataaacagaaacaaacattataatgaactgcttgtcagtaactctacaagtcagaaaccaatgatacagaattcttaaataactgaagaaaagtcaacccccaatcttatatccattaactgtaatacagcaaaaatatcaattaaatgacatttgcagattaacactggaagagtcccttgctaacaggtatgcactaaaataaatgtcaaaatcatttcttgaggcaaaaggaatatggaagcaggtgaaagttgaaactacacaaagaaataaataatgccagagaagatataaagatatataacccaattattttacattgctctaaagataattgtctaattttttaaaaaaagagtaactttatattatggaattcataatatttgagactataatgcatgacataaatagtataaaggagagaggaaacagaaatatacattttaaggtttttataccatagttggtatagtacaaattataggttactgtaataagctaggataggtattgaaatctctagaaaaaccatgaacattttttaaaaatggtatgtgcattgttttcatagaacttccagcttttgtttttattcatttacttttatttattttttttgagatggagtctcgccctgttgcccaggctgcagtgcaatggtgtgatctcagctcactgcaaccacctccgcctcccagggttccaatgattctcctgcctcagcctcctgagtagctgggattacaggtgcccaccaccatgcccagctaatttttgtatttttagtagagacggggtttcaccatgttggccaggcttgtctcaaactcctggcctcatgatcggcccacctcggcttcccaaagtgctgggattacagacttgagacaccataccaggccccagcttttagtttttaaggtagttgttgtgttattacatgtgaagtaaggttattcttaaatatccatgttttgagaattaatgataatgacaaattaatttatctcaatctaaatgacattttaatattaaatatttaaatatttttattatttttcctttttaacagaagtcattctaactggtgtgagatggtatttcactgatgttttgttttgcatttctctgatgattagtgatggtatgcatgtgttaatatgtttgttggccacatatgtgttcttctgaaaactgtctgttcacgttctttgcccattttttaatggggttatttattttttgctcgttgatttgcctaagtctcttatggcttctggataataggcctttgctgtatgcatagtgtgtgaatattttcttccattctgtagctgtctgttcaatcccttgagagtttctcatgctgtgtagaagaagctctttagtttaattaaatcatacttgtcaattttcatttttctggcaattgcttttgaggacttacccataaattcattgccaagtgcaatgtccagatgaatatttcctaggttttcttccaggatttttataggcagaggatgtaatctcatgtcaatgggtcttaataatcaaatgactccacactgagaatcattactgtgaaaaatcgattttgttataatgatggaaatttaaacatataaaagtaaaaacagatgccacctctttgccagaactccacaaggcaaattactataagagaggcagaggaaacatgatatatatatatatatatatatatatatacaatctccaaaatataatttgcagtgaaataaatgaaagcacattataaataaacttacctgattttgcaaactaacctgtaaagggatttgtactaatttttccattgcctgcattgccctttcttctagatccaatttatatttttgtacttcaccaatgtgtcttcaccaatgtgtactttccatacgttttttaagatttaatattacttcttccaacatctttttagcctcaagttttttacattcctgttgtattttttcatacataataactcctgttgaataccttgattgttttgagtcaaacagacatattttgaagatacagcttccagctctgctgtaagatcatcaaactacattaataaaataatatagcttgaaaatgaagtaggctgagaataatctcatacaaaaccaataacaaattttgaaatacatttacttgcaataaaatgttatctataatgtagattctttaaatgttaacccttaaattactcagaaattcaagaacaaagtaaaagccaccataagtcacatatattctttactatcatcatcttcgccacagaacttttgcacttgatctttcttttatttttctgataatttgtgtctgttcctccttaaatggctctacgttaactcttattagaaagtttcaaacccttttctctcatcatcatgccccaaaatttgtcaaaaaaagtttcagagatataatattgagttatttaggccaaagtcaataaatggctcttagaataagactttgaaaataatgtaatactctatgctaggcatggtggctcatgcctgtaatcccagcactataggaggctgtggcagaaagattacttgaggccaggaatttgaaaccagccagagcaacatagtgataacataatctcgacaaaaaaaattttttttttaaattagccaggcatggtgacttatgcttgtagatccaactagttgggagactaaggcacaaggatggcttggactcagagttcagggctgcagtgaattatgaccaagccactccacttctgcctggatgacagacagagaccatatctcaaaaaaacacaaaataatcctataaataaggattctaatgccataagcctttccctaggctgtaaatgttttatgctaatttgaattgcatttttaaaagtaatgactcttcgggtagaggccatagaatacagcacccagatataaatccacatatttgccttacaagaaataaatccacattcttgccttacaagagctcctgaaggaagcactaaacatggaaagggacaaacagtatgagccactgcaaaaacataccaaattgtaatgaccatcgacactataaagaaactgcattaactaatgggaaaaataaacagctaacaacatcatgacaggataaatttcacatgtaacaatattaaccttaaatgtaactgggctaaatgccccagtaaaaagacacagactggcacgttggaaaaagactcaagacccattggtgtgctgtattcaggagacccatctcacatgcaaagacacacacaggctcaaaataaagggacggaggaatatttaccaagcaaatgaaaagcaaaaaaaaaaaaaaaaaaaaaagcaggggttgcaatcctagtctctgataaaacaaactttaaatggaaaagatcaaaagagacaaagaagggcattacaaagcagtgccatctgcttttcctcaggactctgctccatcagccatcaggtggcagccattcaggctgttggaacatggccatccatgcttctctgagtggc

SEQ ID NO: 1887304 - DNA, 4001 bp, Homo sapiens
catacatgcatacatgacggttacccactttgatcctggtgactccatgggatatacagtaaggcagaaatcagagggaagagcagaattaaggggagtgaaaatcttaagaacaaaatgcaaatttaggcagaaaatcaagggggaagaggagtggtctggacaccaaatgccggctggatggcacctgctctacacacactgtcactaactatccaagaagcctcgtggggtagaagaaattcctctcaatttacagatgacagaaatgtagttcagaaaactgactttactaatgtctcagcaagctagtgcgtgatagatatggactcccagatctttccgtccacagagcctataaattctcccttgttaggcaggctgcataccaggccctgcttctgggctctgctccttttcctgctaggcaatcatggcagaattgacagaaatgttatcccccttcaccacctggagcagagccaatgagaggagctgtggaacaggccatgaggccctgcacccaccattcaatgtcttcaggattgcggtccctcagaactcttgcaccacgtgatggcatcactcctgggtgtcttctgaggttgcataggattcagtagagcccagtggctgtgctttcatatcctaagaggcagccaagcaggcttggatctcttggctgattcagcaccagaggttggacaccgcccatgcactgaggcccttgggagaatgggaggagggaaaggaagggcagaatggagtgatgtagtgtccatccaccatgtccctggatggagagacccacaccgggaccaccgctggtactcatgaagatgccagcctccatttatatgtcctcttctgacaactccttcccattttcatcctggagacaagacctctgaacacattagctctgagggcacctgagtgtaacctgagacagtccctgaagacttttcatccaagcaggatccctcccttgccatctccagacctgccccacaagctccctcctgggtctcctggctcttgttcactccttccaggcagccttctacagtcatctctaagacatatctgactgtccctcctttatccagcaccttccatggcaaattaagataccggagaagccaccttgcccagcacaagtgcatcactgaagtcccaagtcttgaacgtggccttggccttgaggaagtcatgaacaccctggctagtgagggtgcagtgctgctccaggatgatggtgtctaaagttgtgcaccaggtcataggccctgcagaagcatcacccctcaggaatgggtagtacaggaagtccatgcacaggcagatctgctggtgccattacactatgagggcactgagctcaaatagggtggcaatatattcactgggattcctgcaaggtgaggctggggagaggaagcagctccataacacatatgaaaccctggaaacccttctcagccaaaatctcaggaccacattacacccagaaatgggtgccctctgagcacacttgtctctctgtctcccactctgagctccctcatggccccacatgccccagcctggcccagagcttgaagcccagtaagtgttcagtccatggtgttgactgctccctgggacaggagagcacttggtggctctgggacttctcctgtggaacccctgcatctgccttgggacctcccaattcccatgggtagcccccatggctctgggttgccccacctgccctcggattctccagccccataggccttacttgatgccttagccctcccagaacgtgacatgtttctcagaatgtggctgatgtccagggccatctgtggatgtttgctggggacttcttgctgatttcctttacggtctgtagggcagggccaagaggagaaaccagcccaacctcagaaagaacaaaaggctcactgtcccaatggcaaccaccaaactgtcagcagtgcttctgaaaggaaaggaggtttcattctgcagaaagctccttgtttggcttctttctgacgccagggaggggtaccaatccctgcctacctgtggtgcctacgttaccatctctgcctaggatgtgcaatgggcccctgctcccactgcagggttgatgttccctccagctggagacctgggctcctgacaccgcctggcctctttgtcctgctctggatgagggtggaaaggctgtaactggtatttccctaggtccttggtttccaccttctaaacatccagcaggagtgatcatgcccagcaccacacctgaagtgggactcccttgtggagcagccaagaaatctacagatggaagaatgctctggtgagataggccacaggggtccctggggaggatcgggggccggaggattctggaggtttccagccttgggctctgtgggaactatgatctggagctattttttcattaggtcaccaagagacaacccctaacccctgagcaaggcatggtccaagctctggcatgagattctcttccagcaatgcaatgcttgcagagacaggtacaaaagctggtgaccagacctgctgtccccgaggtaaggacagtgtgctacccaccctctgagaggtggtgccagaccacagcactgggtgcctgtacccctggctctgcagacaccggtcatggaggtcccatggaggtcctcccctctccacattaccttcttgctgctcctagatttcttctagtcattaagcatgttgagccatttttctgtgcatccgatctgacatttttgctctcagatgaaacatgacaaagtaagctgagccaccaggattcctggagggaaccttggatgcttggtcttgggctccaaggcactgatgggaaggagccagggaaggacaaacactggggctgagcccctatgacccaatggcaacttgtggcctgtccttatggccccaagacaccctgtcctcaggccacagacaccacgggctttggtcaggtcccagcctcccagtagtgtccgggcactagtgggtgctgacccctgagccacaaccacatttctgggtttcgggtttggtaaaaccaccccagggacagagttctggggccgggtttgggaggaaccaagtcgcctcccagggatggtgtgtcactcctacctgccatgaaatgtgcacacaggctgtcctcctgcccatcccatcctgctggacaggatggaggaagtgagggaacaggcaacgtggacagcttggttgcagggagaggcaggtgcatgctgggaggtcaggccctgtgagggctgtgggggcatcaggtggagtgggttccaggtgcaccctcagtgtaatgggcaggtctcaggccaggcttcctggaccccggctgggtgatgtggtcactccctgggggactactgtcagaccctggccacccaccctgggcagcactgtcccatcccaggactggattttctgagtcctcagacaggacagcactgcccaggcctgacagactgggaagacctcttaagtcctccatccctagaccagcctcccaacagcagggacagtctgctacctttaccttcagggcactgactgatccatctcagtctaaggcaaccgtggcagagctgaggacctgtgccaggctggaagccagtcccttccctaaataggccttagggaagccttatccctgtcccggtgcactgcaagtttcagcccaggagacacatagggaagggaggatggggcctccccactggctgtccctggaaaagcgggacctgggagaaaagggagtgcagggctggcaggggatgctccagacccatggagagctcaggctgcaccatggggctgcccctcctgggctggaggctgtgccctctgcaggatctgaggaagtgcagtcctgagatggacagtgctacccaggttgggtggccagtgcctgacaatagtcccccagcaaatga

SEQ ID NO: 1887305 - DNA, 4001 bp, Homo sapiens
tgggcatgctatctctcaacaagacccagtctgccccaaccagaggtgttgctagaccagctgcccaaacaggaaaccttatataattctgtaaccctgaccttgggcctgaatcttccccttctgtaaacagtccattcaacccaggaagacctgcagacctggttgggacacattttgaaaaacacacacattgttaaaaatgttgaaaaaagtccctaggtctaagaggaagtgttctgtctgactcagcagtagaaatcacttcatataaagtaatggaacaaatggaaatttaatcctaacagatgtaacagggcagtcacttgtgtacacggatgacttgattgcacctgttggaaaggctgggaaaatgagccgtgaaatcctgatcacattccctactggaagcagcactcctgccttgcaaattagtaagcctgatgttctcaacatcctgacttcaacatgtgtgccctagttctgtgcaggccatgactcactttagctactggtcaaatgattcttactcagagccctaggtttctaatctttagtgttaagtggtccaggcacatactagccaaatgtctgtctacttccttttttttttctcatgcctgtttcccagtctgtgtcctttcaagatactcccttgaaatgactgatttcaggcaacaactggatttacatatggtagccttcaacttcctgtttaacttactgccaaacttcaatagaagtccagattagaagttttagacctcagcctctggccctgggccttctgaaatgaccttcctccaaacaccatttaatttccgctaacttagttaatgaatggaactttctgaagacagcagttactttgatctgaacccctttcctagtttccagttaacatagccagagggagacagaaggggtgcccgcctctcaatgggtgccctctcctcctgcgtggctggagcagctcccagctgtagctattcctctaacgcagagagagctgcagaaagcagttcccaaaaggaagaaggcaagttacaaataccgccgttggcattttcgtgggtgtttcccgccacatagagataaaagctttgaggtggggctttgaggcacactctctgggtagctgggcctgcagtctggaaatcctaagtaatccttgcaaataggctaactggaagccagcaatacaaatgagcagtgcttctggcctgagagaaaggtgtctgcattcaaagtacaacttcagataaaaatggaaaatgccagtcccaccctgcaggaatcctgtttctgggctgtttatcctcactgccatccaccctacccttggctgtgactaggatgtgaagaaagagattgggtggaaaaggctaccgcagctcttgctccgtttaactcaccaccttaaaaaacatggccttggctgctgctttaaaacaacaacaacgaaaatccccagccccaacccagaggtttaaccctgcagctaaggtgaagtttttgttaaggtgataaggtaaaaaaggacgccattctgagccttgacttccactcttcatacttttcggaagacaagtccagcaaagacctccaccccttccaaagagcgacttacctcgtagctgatccacagattgcaacgtacagatgtgatgttccaggcttggccacaaggggacactagagagtaggactgcccgcgtcaatgttttgttttttacagacttttggttgggagggagggagggagggaggggggtgtgggagtggtgggggagatgctggctttaaaaaaaagtccatttgttccctgagattgtgccacttgcccttttataagtcaaaggttgccacgttacctgttgccaggttcctgagagtgcttggggaaaatgtgggcgagagaggcacagcacagtcctccggcttggtaggtttcaagctcttttgactgggctggcgctgacatttgcaggggcagctgctgtggattgcctgcgcattgtttggctgtagttctaacagaggagtggctgcgtctgacatcatttccaggcatcaagtgcctggggcttttttttttttttttctttaatgacgaactctctgacccctccctgcctggatttttgtacagtacatgcactgtgcaaaacagcctccactcaggaagcccaagttttgtagcagcttgttgaaacaacttgggtgccttttaaaaaaaataaagttgtgactctgaaacaaacctttccattcttcctccttgctgagaacaatgttgcgtttgattagcagcgcagccagtgctttctgaaagatctgctctccccagaagaggcggctgctatcagttgaatagatctctaggccagacatgccgaggcttggggcatttgtctggcgttaggaagtgtctggaatactagcaactaccaactggcgtgtcttatgactacaggaattattacactaccctccatttcattcacatcccctctcctccccttacacacacacacaagcatatttttttctactttagaaaaagttgagcgagtcatcttgtggtttccgtggaggatgtaactgggagagaagactgtgggataccttgtatctcccagaggggggccgggaatcatggtgtatgacccaccccaacagcctctgatctctgccttctcaccactgaccgccacgctttgggtggccttaaatgtgaagctgtaaatattttgaaataaggtagtgatttttccatgtgcattttgttttgtggcatttctctccttctgcaatattttaaaagttgcaactgtgcaccccttgttgaccactccaaattcattcattcactgaaacttaagagttcctgcagagtgaggatggctgtgcacgaaggagtccctcgtggaaaccacggtgctttagtggacaaggtgtttactagagagtgtttactggcggggggcgggggagataaacaaaggtggtttgagttaatggtcagatgggagttggagccctgagtactctaactctgtcactgaatctctagatgagttagggatgtccgttgcctgctctgagccttaatattttcatcagttaaatggggatagtgggatctttcacatatgtgagatcatgtctattttcttctttttcttttcttttctttcttttttttctttttctttttctttttctttttctttctttctttttcttttttttttttttttttttttttgaggcagggtcttgctctgtcacctaggctggagtgcagtggcacagtcatggctcattgcggcctccacctcccaagctcaagtgatcctcccacctcagcctaccgagtagctgagacttcaggcgtgcaccaccatgaccagctagttgttgttgtttgggtttttttgagacgaggtctcactctgttgcccaggctggtctccaacacctgggctaaagcgatccttatgcttcagcctcccaaagtgctgggattacaggtgtgagccaccacacccagcccccatgtctattaagttcttagcacagtgtccagtacacagagtaaggatttgctctctggtgattaggaagatctaatggcatgtcacgggtctggactgaatctcatctcatcatctttgttgttgccagggtttgcgcatttttgccggtggaggactccagccagaccgctgatttgtctggcatttgttggaaagtccggccagcataacacatcaccgcaaggagcaggagccctatgatgcactgttaagtgcacaactatggggtctgcttggctggaagcagcagcagcaaacttgtctattagttattttgtcctcatcagtgccagctgctttcccaagatggcagaacattcatcattgctaccagacagcctcgttggagctctttctctggcctccttttttggcttctttcttcagctcttcagcatc

SEQ ID NO: 1887306 - DNA, 4001 bp, Homo sapiens
tggagaggattttagagatcagagttctgcccttcctgtttacagatctgacattcagagaggccagaagtcacaacagctttcttgaagttttattattttgatttttaaggaaaggagtccaatgaatttgcaaattaacgaagcagtgtttgaaaagaaaatatgcaagagatacttaagtgttaaaggaaactaaagctttgagaactagagataagatactttaaagtaactatccaaattggtttgtaggcagcaaacgttaactgtgtaaaatgtggagcatttgatgcaccaagaaatatttactgactgcccacttggaacttaaaagttcagttgggaaccaagaagataattataatgtaataagtgctctgcctgattaaaaactgctgtgttctcatgagaactaggaaaggcattcagaaggacattcctgacgtcttcttggaagaggtcgaacgtaagctcgtatctgaaggaaaaaccagaggaaagaatatccctaacgaggaatcgattgcacatgcaaacccagggaacttgatgggttgaataactaaaggaaaagtggtcaggaggaggcagaattctgagacctgaaaagggtgaataggaactcttatcctgaggggagatttgtaaactgcagactgacaggacctgctggagggtttccactcttcctctaagtgtacacaatagtttggaaacagaaaagacagacccagtgagactaagtagaaacgtatttctccaaatattttgacctacaaaatgcattttccctgttgcccagtatgtacacagatccggggacacgcacacacaaactgaaagaggtttcacaacaagacttactttttctacacaggatgtacgctgacattttctacctaacattttgcattttctaaatggtgaaactgcatgactcatcttatttcactacccactaagtgacaactcagagttggagaaaccttgagttaaggaagttgctgtgatactccagaagataacattaaaactgtaggatctagggaagcagaaagatgcacagaaggatgtggaatgactccacagggatttaagagactggagagaaggacccaaaggagtgcttacagataatgctgagttttggcttgaactcggggcagataaagggatcgtgtactgagatggggaaccttaagtgaaaaataaggagggtaaaggtatcaccacttgagaaatgcccgattcttttgtgtgtatgtgtgtgtgtgtgtgcgtgtgcgtgtgtttgtaaacataaatatgctccttaatttgaagtacatcccaagaaaaacatgtaactccagaaaatgtccaagttttattaaaagaagaagggaaatggcagaaatggaaagaagggaatcagtggggaggaaggagtgggctctagcacttaggcacaagactccacttggaaaggacaggcaagattcaaatccccgagggaacagacagcccatatcagactcacctgatgcttcactgcagctgccatggggcttttataagctgggaatgggttaagcatagtcccagctgttcattcagccacgatgttggcaggagttagcttctttacacataaagttggcatcaaatttggaattcacaatcactagttcacgaacgtcacaggcatttcttaggcgcttcttatataaatggaaataccattaactttcttcttcatgcacgctctctgacagcatcgggtcaaaggaacttttttcctgcctcttttcatagcttccaccgccccatccttcttctaaatctttaattttgcaaagccatagggagtggtggtagcctgtggcgagttgaagattttgaacaataggtgtttctgagctggatttattgaaagggtcttgtctgtgtcctgggggagattgtaaatgagatgtcaacaggagctcttttgtgtggatggcattcatcctgaaagacaggaattcccttactgtgctagtatttaaagtacatttgttgctgcttttgctaaaacttttcatccaactgccggagctaacagcaatgaatgagtcacttggtgtgattgtaacttccttccctccttagcaaagcaatgactcagtcatttacatttagaaaggaaggctcctaagaagatttcttggattttcatcagcttgagcctcttttcttgaccatcacgtgggcctgatctgtcggcaatcctgttaacccagggtgaggggagtctagccgggctgcttttctcactccctggaaaactttttgctgttttgctcgtttcttttttaaatccaaggagaaagacaaacacaatttcctgccttaagcccttttcctttctctctccctccgcctttttttttgtaaaggacaggcaatttcagtttactataattaccctgggctgaggtttgactcactccacctttagatgataaggcaaccgttttattacttcgcagccaggtgcctgagggtgacaagacttgcctttatctggtgacctgacaaggttatcagcaactgcaaatgggctgaacctcggagcagggaccatcaaaacgcttccctctccttgatccatttcccaaccctttattggtaattcatttcaatccgaagactagctctagtttctgcaagttcttccgcattcctacaccttagctctgtcctcttgtgttctctttggaacacaggcagcggcaacagcaatcttaattatgagcagtcagctgcccccatgagcccagagcacgaccatgaagtctcaaccacagtccagcacacaacacgcaggatatatttgcgtcctctggcttagtcgatttgcagtatttatagttgctttttcagagtcgatacttaataacgtctttgacctatgatgctagaaatccctccaaaataaaatcgtattgcttgtatcttctatggttccttttgaaaactggaatataatccgcaccaggaggcagtgctgtgctggagataataaacatatctagtgctcgatctatttatatctgcagttcatgaatttatttgtctaccaacacaagtttctttgtttttttttttttttttttttttggacggagtctcgctctgtcgcccaggctggagtgcggtggcgcgatctcggctccctgcaagctccgcctcccgggttcacgccattctcctgcctcagcctcccgagtagctgggactacaggcgcccgccaccacgcccggctaattttttgtatttttagcagagacggggtttcactgtcttagccaggatggtctcgatctcctgacctcgtgatccgcccgcctcggcctcccaaattgctgggatgacaggcgtgagccaccgcgcccggccaaaacaagattattctttaattcaaactgtgttacgtgcactgtctcggttatctggtgggtgggaaatgtggtataaaagcatgcattttgggaaatggtttccaaaaagtgtgtactaggcaaagcttgaatgaatgaagggtgagagtacttgcagacacacttttaggtcagtgtcctgggcagcatcaaagctgcgcggcacccggcttgtacatagcacggagctgccaccctgtagtgcaaaattatagtgggccaaggtaaatcatatgttttatttatttatttattcattcatttgagaaggagtctcgcactgtagcccaggctggagtgcagtggcccgatctccactcactgcaatctccgcttcccgggttcaagcgattcgcctgcctcagcctcctgagtagctgggattacaggtactcgccaccacgcccagctaatttttttttttttccgagatggagtctcgctctgtcacccaggctggagtgcagtggcgtgatctgggcttgctgcaacctccgcttccttggttcaagcgattctcctgcctcagcctccca

SEQ ID NO: 1887307 - DNA, 4001 bp, Homo sapiens
agaaatgttaacgactttgcccttttcttcattcccccagatccctgcccaagacgggtctggagcctgacttccgggtgtccatgaccctggcggctgcttccggtccgccatgaaagggctatcaggcagccgcagccatcaccacggggtcacctgcgactcggcctgtgactcgctgtcgcaccactccgaccgcaagccctacctgctgagcccagtggagcaccaccccgcagaccacccatactacacccagcggaactccttccaggctgagtgcgtgggccccttcagcgacccgctggccagcagcaccttcccccgcaggcactacacctcgcagcaagagctgaaggacgagtgtgccctggtgccccgcaccctggccaccaaggcgaaccgcatccccgccaacctgctggaccagttcgagcggcagctgccactcagccgcgatggctatcacaccctgcagtacaagcgcacggccgtggagcaccgcagcgacagccccggccgcatccgccacctggtgcactcggtccagaagctcttcaccaagtcgcactccctggaggggccgtccaagggcagcgtcaacgggggcaaggccagccctgacgaggcgcaggcggcgcgctatggcaaacgcagcaagagcaaggagcggcgcgcggagcccaaggcccggcccagcacctccccgggctggtggagctcggacgacaacctggatggtgacatgtgcatctaccacgccccctcgggcgtgatgaccatgggcaggtgccccgaccgctcggcctcacagtacttcctggaggcctacaacaccatcagcgagcaggcggtgaaggcctcccggagcaacaacgacgtcaagtgctccacctgcgccaacctgccggtcagcctggacaccccgctgctgaagaagagcgcctggtcctccacgctcaccgtgagccgggcccgggaggtttaccagaaggcctcggtgaacatggaccaggccatggtgaagtccgagtcgtgtcagcaagaacgctcctgccagtacctgcaggtaccatttctgtcaatgatggaggcttagaagtagtacctggcatgcttgtgtgggcatttctcctggttctagtcttggcactactctgaattgtctattaagataggaacctgtgcaaattattcggcatctctgtgccgaattgctcctgtagggaaaatgaaaagaaacaaatgctaccgacctcaccgggttatcttaagacactagatatccaagtgctttgaaaagcacgcctatggaaaggcaaccagttattatgggcttcctcttttgtctgagggatcataggatgggaaagagaggaaagggaagtctacagagaattttaaaagaagtccacctttctttaattcaaaaatacgtgacgatcgtttgaattttggaaagagtttcattagatctattcagggttttgtggggtggttttcattgtgaaatcctgcctgaagctatgttagaatactgcgatggtcatcatcataaccatcagtaactacaccccgacctgagcttccacatcgagggcacagcaaatcaggaagacgccctgtgccctgaggaggtggggagctagccagtttggggacctgacaagcacagctgcagacacccaggacaacagagaggaggaggaaaaggaggaaggattagagaagtaaaatacaattagtgtcagcatgtaaatcccacacacttacagagccacggtaggctgctcttcccctgccactgtctccttgtgttttcctccagttcactgaaaccagatgttacctggataaaaatataggagagagatgtttttcttccctacctccttgctgtagtattgtaatttttcccaaggcacatttttccataagaactctcatcttttcctttttcagagtgtcttttcttctctgttctctcctggtagcctcatcttaaaaaaaaaaaaaaattactgagctataaaagtataacatacccactcccattttacactcccaccttaagaagaaatgcaaagaaaaattcttcctttgaggagttcatcttttttgctccctttgaactcctcctgacaagtctggctcccttgggaatgcctccatcaatccctgagaagaccccaagctggcaatccctggacaagggcagtgccagagcctgttcttggagttcagaagaagccaccagcacatggacagttttcatacacgacacacaattatgtggtcagtacttcccactgaagctggtgttgcctaatttcctgtaaggttgctacatgttaataagttatcaagaactataacaatttcagagctcaaagaatcatttaatccacttagcatatgaaaaagtagacacaaagaaaggtaaatacttagtgggttaaaccgttagcatgtggcagaggtgggactagaacccagtctcttaacttagagaaatggccattaatgaaagttgcaaccgaaagctctagaaactctttaagaacataaagcttcacccaccactgaaagtaaagtatttcgataaggatatctgtcttacaaaaagtaaggagtaaagagataaaagccctagagtaccacacattttgtctgcgaaggttctatgaccagtggcaaaaacaaaacaaactgaaaggaaacaaaaacaaaaacaaaaacacctgtacttaagtaagtaatgatgagattagatgagaagtatcagagtaaaggatgctgtgtatggatctagcataagcctttgttagtaatgaaatgttttcgttatatctgcctatatgcctacattcttccttccttaggttcatttttctttcttttttatacctttttggagttgcgatctcaggtagtggtgaaaagtggaaagataaggaaagtgatattaattgaaaatctactatataccagatgctatagcaaatgtgttcccatttcttatttcatttaatctttgtgataatcccaagattactgaatgtaataatattctatttttataagagaagaaactgacacttagaaatatcaagtcatttaaagccccacaatctggaggttgtacaactgagatttaggctcaagtatgtttgatgccaaaaccaagctctttctaatatgccctagcacagacctgaaatcaagggcatcaaaaatggtgagcaagaagaaaataaaaatctttaaaataagcatattattattaaagtttttcagtaaaatgagaatgaaatcttaaaggcttaagtatgggatttagtagtagcattattggatctcctactataaagatttggaaattctattttcaaactatttgccttctttaagtcatttttgtaatgaaacgtttgaggcttacagaaaggtataaagaaaaaaaataaaacacccatgtatacatcacccgtcatacagaactaaaacattcattacaatggatcacagacacactcatattaatccctttacttcccttcttccccagagtaatagctcatctgtctttgacaccaaagcacctttgttttcaattctgaaattattgaaaggttgaaaacagtttaacatattctgtcctacattgggaaataattaaccaagctagttcaaccttttaaactaaactccaagttaatccttattaatagatattgaatgtattaagcttctatttatgcaagactttcaaactaggggaaaaaatctatatttcaatgttgggaggtagtatgttagtaagagaattaaatgtaaaacagtgtagacctcccaacccctgtgctgaggctgaagagatgctgtaaagaaagggaagaaagagccatatattcatatggggtcagaggagaatagaaaatacctcctgagaactgggcttctggctcccttcttgcttctaggaaatgaaaagaggatct

SEQ ID NO: 1887308 - DNA, 4001 bp, Homo sapiens
acaggacaactattggcccattttcccaaggtggaaacattgaattttttcctgggcctttttctgcctttccactaatgataaatagatccctaaatcacataaattctgccaaagaaatttacctctggtgttcttcctgtctgcactgccccttttttaaagagtgtaaattatcttacacttttgtgttttatgctgagatttgagaataaatagggagtgtgtatacatatccagctcatcatcttaacccactcctcctaattttatcttaggaatgacgcctcctgcagtgtagaacaatagaaatataacccaagccacgtatacgattttaaattttccagtagcaacattatagaaataaaaagaaagaaatgaaatgaactttaatgctatgtttaagccaatgcatccaaaatattaaaatttcaaactttaattggtatttacattattcttaagggctttaccttcctttttctttgtacaaagtcttcgaaatctagggctcaatggtcacatgtggccagtggctgtcacagcagatagcctaggtgttggacgtgagctgaaggggcttacactagagatcccatagaagatacacctacagccttggtgagggacaagggcatatatcaaggtacttgcaatggaaacaaagaatcaatccataatcacactgaaaatatgaagcagagaaccagaaggcaaatgtaatccaattaagtataaaattgcactaaaaaaaaaaaaaaaaaaaacagcccaaagtacacagaagagaatggagcttcaaaggtaaaggataaaaacaaaccacagcccaggagagaagctcagagacaaactgtacaagaaagggacctggggcaaatgtgtcagtaattaggaggtggtcttggaagagcagggtagcctgggcacctcatcctcatgcacatttgagtccaggcagctgcacactttccttcagcctcacaaggcccagcaactgtgctctcaacaaaggaaaagctcttctgctggtttatatttatgagaagcagagtagaaccctggggggtgaggggggcaatgaaatggagcctttggagctggaactggcccagcttcaggtgaagcctccaagtgggtattctgaagtgaggactgtaacaagagaggccaagaaggctatgttccagttaaggaaaaatcccctctggcacccccaaagcaaagcagtctcccccatcctgctctccccacaattatagaaggcagacagaagagatcaagatgcacatgaatagaaaacagcacttctcatttggattgaggaaattttcagtcttcaaccagtccttcaacatgagcatgaatagataactgagaatcaccaaactttgaaagaacaccaacacctacaagaagcatcaaatcaacaaactgaagaactaactcaccccaaggagaccttgtcaacagaaaaaaaagcaaagacaattttcagataagcataataaccaaagaaatgtaatcattttgtcctcaaatattcaataaaataagaccaagccactctttttaaaactcctgggagatacacgctgtcagtccaaagcaaaatgcatacaactaaagaataaatgtcctggaaggattcctaaaaatatcatgaaaacaagcatagggatggaaagaatgggaagagtgatgtaggaatgatggatagagccaaacctcaaacgtctatcaaataggaatttcagaagaaaagaacaaaaaatggaagagggaaaatactgaccaaattaaaagaaaatttccctgaagtacacagcttggtaaatgttcagaatatttacatataaataaatatatgaatatataaaggttccaggctgcagggagaagtgaacacagattacttacaagggaatgaggagcaggtaggatgagatgtttcatcgcaattcattctacacaccagcagtcattggatcaattctcccaagtgctcagggaaaatgaatactagtttgttaccagttcaaactcaaatttaatgtgaagaaacgatgagtgattggacaaagtttacccgatgacgtcctttctgaaagaataactagggaatttatttcagcaaatgaatccaaaaaagaaggactgcagatattaaaagtggtagcaaacaaaaattcttaccactgagacgtaactgcctgattgtgcatcatatatatttttttaatctcaagcaaaaattcccagatctttttgagaatcaatatcctaaggtaatatcttctactgtcttgtaccaaagaaagatcaaagtgttgcccatgacctgttaatacacggcgaagggatcctttactgtatgtgactcagagtccaagaacctggtcaatcatgttagcatcctgcatccagtcctccctgaaacctgagcaacccaagccactgtcctgtgccctgtgtcagaagacccctctgtggctttcctctgtccatgcccctcacagcagcatgatgagtctgcaggcccccaagcccatgcttccccttgccccacttgtgggccatgctccaggtacctgggatggtagaattcccagtcagttggccctgaggccccttccaaggcctgcaaagctgttctccaggtctgccctcccactgctgaccaggcatcagtgtgtgccctccttggatgaaggatggccaaggagtgaggttttgctgggaggagggagtgatggacaaaacctggacacactcgctggtgcccttgtgtatcctgctcatggtatggtgtggatccaggtgtgggaagagaaatgggtggggcagagggccaggacctttcatttgtattcccgtcctaagtcctgaaaatgtcagggactggcctgctctcatctttgacagagcaagaaagacggggaggagggagagaattcagtacagaaagaagtgggattgcaaaaaggcttcagaaaaaagccaaccagacatagcaattggaggaggaaaaggtgggagcttttgaagtgttggaggtttcctgcagtaagtaccagaaaacctagctacaaatggcccaaaggaggtgtgtacccactgtcactcataccgcaggagagaggcctcaggatgctcccttccttgctcagtgaactcctcagggctccggagcccttctgtcttccctctctgtgtctgaggttagtgtgcggcttggcctctgtggcctgctcccccagcggcccagggcgactcgtagttctgggtgatgcccccaggccacagtgtccagaagcaggaagagaacaagccagcctcgtgtctcttttccagagtaagaaaacctcctggactccccctaaccccaggtctcatttgtcagaaccaatcactggccagaagaagttcatttcccatgtaccaggattcactaatacaaggtcagccgtgacaccatgagggccagtcaactccaaggcccaggccacctggacactgcacagaatcgagcttcccacaactgcaagagggggcctggctggggagcaggcacctgcagggagcaaggctagaggcgccgaggactgaacctcacagtggttctcaaagtgtggtccccagactaacagcctcggcttcacctgggaactcactagaaatgcaaattcttcgccttcaccccggatgtctagaatcagaaactctggaggtacggcacagcaatttaggtttcaagtttttgtttctttatgttattatttttttagagatgggggtctccgctctgtcacccaggctggagtgcagtggcacaatcatagccgcagcctcaaactcctgggcttcccccatcaaccccctcttccccaacccccattagctgggactataggtacaggccaccatgcctggctaaagcaatttaagttgtaagaagccctccaggagaggcactctataaagtgtgggaaccgctg

SEQ ID NO: 1887309 - DNA, 4001 bp, Homo sapiens
taattatttttactttcttgatctcctcttgttgcctgctaatcagggaaataaagaaaaaagtgaacagacaaataaagaagcaaaggtcctccccagtcagctctgaagatacctatgctctgtgctccccgttgatctagcgaggccttcaaaaatgatttagcccactaggagttctccagttcttaggataagcatttatgcccaaattgccattatagtgattttctgtgctctctagtctgtggcattgtatttttatcatccaagcaagtgattagtggaatctattcatgctttatctgtggcaaactcaaatttacattctttcccagcttgagggctgtatagttggatggagtgtagagctacttataaagggcctgcaagaagaagtgatggaggttggttggctaatgggtagttttattcaatataatttattttgaaaaatcagctaaatgaaaagtaactccatggtcaaaatgatcttttgtgtatcctacaaatttcaaattccattatatcactgagattaataaacacactataagagcaaaatatcttaagagagttcctcatactgaactattcagtgttaattatattaatagttgggcatggtgggtgatgcctgtaatcctagcacttctggagtctgaggagggaggatcgcttgagccaaggagttcaagaccagcctgggcagcatagggaaaccctatctctccaaaaaacaaaaaaagtagccaggtatgatggcacacacctgtggtcccagctactgagaaggcggaggcaggaagatcagttgagccggggaggtcaaggctgcagtgagacatgagtgcaccattgcagtgcagcctgagcaacagtgagacactgaagagaggagggaaggaaggaaggaaggaaggaaggaaggaaggaagggagggagggagggagggagggaaggggagggagggaaggggagggagggaaggaaggaaggaaagaaagcaaaagaagaaacaaagaaaaaggaaaggaaaggaaggaaggaaggaaggggagggaaggaaggaaggaaagaaagaaaaagaagaaacaaagaaaaaggaaaggaaaggaaggaaggaaggaaggggctgggtgcagtggctcacacctgtaatcccagcactttggggggccgaggcaggaggatcacaaggtcaggaggttgagaccatcatggctaacacagtgaaacccggtctctactaaaaatacaaaaaaattagccaggtgtggtggtggtcgcctgcagtcccagctattccagaggctgaggcaggagaatggcgtgaacctgggaggtgaagcttgcagtgagccgagatcgtgccactgcactccagcctgggtgacagagggagactccgtcaaaaagaaagaaagagagaaagaagggaggaagagaggatgggagggagggaggaaaggaaggaaggaaggaaggaaggaaggaaaaattacattaatatgattaagatttaccggaaatctgtcattatttgagagaaagaattttgtctgatgcacagagaaaggaaggggagcctgagaagttctaggtgggtatgttttggctaggcaggggagcactggaaagcaagtgaaaagcacaaaaggaaattcaaaggtaagattcaaagattccaatcttcctaccttcctcatggttttgccgagggctgtttcaaaggttggtgcacctggagaaagccttgccatctgctccctttggacagcctcaagtttgcctctgctggaagtgagcttccaaaattagtctggaacattaaaaacctcggtttccattaattcagctcaaggtccccaaggactagcatatttaatctagatttagctgattagcctgcatttcgctgtgtaattcccatccttggctgctaaaatgggaggaaaaaagagcaagtgaaagtaacaagtcctgtcgggatttggctcaaggcaggagttagagaagccaggtggcagactgcctgggaggaagtgcagagtgggaaccaagggtgaggcagaggtagagtgtagagttgaaggtcagtgaaggtgaagaatgagtcttatgaagtagttattgatgcaagggcaggaatctagctactgacagatcatcaaggattaagagaaaatcttacacaatacttaccagagaacaatgacattgaactttgttcctctgaccggatgtggatctcaaaatgtgagttcagtgtgggagccaagctagcacatacatctgctggcttagaggaagaggatggagatgagaaaagcaaatgattgccttggaatgtttagagcaaatggatgcactttccacatcttctctttccctctctatttttagttcaatatacaaggatttctgtggctccaagaaatctcaacatccttttcctaaaaatacaggaagctcctggatggactttatgaattttccattttataattgattttgcctcaccaaccctggtcctacagaacgtaatttaacaaagcacatatgacttatttatatttatgagaagttgtgggaaaatatcttcatatgtgatgcttaaagaaatgttgacttcagaaagactatttgctttcgttatcataatagttgagccaatattaaccaaattatttttaatgagtagggagtcattcattttgagagaaaatgtttataaatcatatcttctcattcatgtagtttaatgttctgaagtaactgaaatctatctaaaagaaaaaacacattaaaaaaatacaaagatgatgtacaaagagcacctattgaatttgatggcaactgcccttccataggatatgctgaaatgaaccagaattgattaattgcacatttatccatttatttttcttttaaatattgaagttctgggcaccaattaccaagataaagtgaggaggaggacataggccttgcctttattcaacttaaacatttaatggaagtatttttcatctagaattttctttatcctctttggccatatttggtagtagatcagattttaggactattcataaagtctttttgtatttcttaaattatgcattttatttaatatttacttaaaaattattttaaaatatcacttcaaacaaattttaataagaattcatttaaatgaatggaagaattttttaaatctcatatatgggcatttttggtaattaaaagcaatacggaaagatacctactctgttagttttctagtcagtaatattattttactttgtattgatagttgcagaaccactcagtatgaaaatgcgtcctggtataataatagaaggcaggcccggtacggtgcctcacacctgtaatcccaacactttgagaggccgagatgggcagatcacgaggtcaagagattgagaccatcctggccaacatgaagaaaccccatctctactaaaaatacaaaaattagctggacgtggtggcacgtgcctgtagtcccagctactccggaggcttgaggcaggagaatcgcttgaacacgggaggcagagattacactgagccgaaatcacaccactgcactctagcctagtgacagagtgagacttcgtctcaaaaaaaaaataataaaataataataataataatagaaggcaatattgtgaatacttaccatgttacacctctgttcttagtgctttacaggggtgatctcatttaatcctcctctctcaattctatgacataagtaatattacatccattttacagatatggaaacagaggcatgctgaaattgagtaaatttgccagggacacataactagggattactgagggtggttcaaacccagggagtctgggtacagagagtgtgcccactggcactctgctgtgttgcccacgtagcacctggatgttgctgtgtccctgaggattttaaaatctattgcttttcatgtct

SEQ ID NO: 1887310 - DNA, 4001 bp, Homo sapiens
taaaaaatatggaaacggaaggatgtcaattatagtctcatgctgatgactcaggcttattttactagcaaagggtcaatgataattttatggatatggagacagaacagctcattagtggcattcgttaataaaatagggcatgagcatagcacagacacagagaatgtaaggcatgcgctgtttgacattaatttttaatttaaatatacactcagtattgcagtaattctggctcggcatacaatggtgttaagatggtgaacattttcaagaatcgaaatggtgtgagtgtcagggttggcttttcacataggattctcaggacatccctgaggaaacttaaaccaaataaaagggagcagacaagtttctcttttgtggtcaggcttacctggtttaagtcagtaattgaaaagaggtgcaggaggatgagtcagatgccttgtcattgctttctgaagagctaaaagaaacagcatttatatcttaatcttccagattgtgtgctgcaataattcatttagtttaagtgcacttcaaataaaaatgtaaattatcccattcttattcatttctcaccatgaactctggttttgatggtagtaaagaaggtgagaactctccactggatgttcaggagtccggtataggaaataagttataactctatttgtgaccagggatgttcttggagaaaatcagtaaccacatgtagcccacgactaggacctcaatggatgcatttcttatagtaactcaccctcgattttattattttgcagtcgccttgattccctaactttacgtacgtatgtatgtatatatgtatttttgtctctaaattatggcgattgtcttgtatcattgtcatgccagtaaattcctaaaaacacaagaccccaaagaatggtgcctcagatgactatgatgtctgaactgcttgtgggtgtgtgtaggaaattcactccagtagagtgtgtaacagtctccctggagtcaactttctgtcaggtgggcctcaggcagctgtgacctaaaacccagcctctgcggctcagacctcgctctgtaattgaccccagggcagggaccacggccgtcgccgagggcagcgggcagggcggagccggggccgaccgcgcactcaggagtgagtctttgtgcagtcagggcttctgctgggcagggccggctgttaatctcgcctggcggagcggacaccggggcgtggtgggggagatgggccttataggtggcgtccgctggtgagaaacaccttgcgcaggtaaaagggtggcggcgagagggagttcccacccgtggctttcttagagaaatgaagtcttaagtcttaaatagacaacaaggaggggccgatcggtgtcttttggacgcgtctggagcccctccctccgccaaaggaaaagccccttggatgagaggcaggcgcttcagagaagctaagaaaagcacctctccgcgcgccccacctcctccgcctcgcgctcctcctgagcagcgggcccagactgcgctccggccgcggccctcgccccgcggagccctcctaccccggcccgacgctcggcccgcgacctgccccgagccctctccatggaggcagcccgcccctccggctcctggaacggagccctctgccggctgctcctgctgaccctcgcggtgagtgtagccgcggccaccgctccggggaagggggcgatcgcctagggtgcagaggaaaactaggggaacggggataggtgggggtggcgggaaaagctggggtgaaggggcctctgggtggctagaaaatggagttggcgggggtgggggagggcagataggaagaggatcgcgacctgagagttgggatccccaagggaagggaaggtgtctccggtagatgtaatcagcgcactcaaggagaggcgggagcgggccgctttcgcccagccaaaatcgtggcccctgggtacgcgccggggagcagggtgcgccggggcgggagtgcgccggggtcggagtgcgccggggcgggagtgcgccggggcgggagtgcgccggggccgtccagctggcctctggcaccttccccgggaacgtgcggctccctgtgcctcgggaacgtgcggctccctgtgcctcgggaacgtgcggctccctgtgcctcagcgcctgcccaggccacggaaaggggaaccgctgggcggccgggacggagagcgagtgtccttgggtgaaaaagggaactgctcgcctttctgggaattgtttactctgagagaagggcggggggaagtggcgggtgggggaggggatcttgaccctttgctcctgaggactgtcgaccggcgagccctaggtgagcatttgtacagtttcagtggtttcttaacgtgcgaggcttcagttccctaaatcttcggaggaaggaagggtctttctgatttcttgtccccagaggcgactcgatttttctgctcaccacccgccccccgcgccaccgccccttgccccaggttctttctttctttaaagagcactacagcaatgaccctaccccttcccagagctgggagcctaagtggttggccttatttggggcgggacagcccctttcccaggcttgaccgatgggatctcgttggggagcctgaagacgcaaaaagccaatgccgggagcagcgtctggggaattggggatataaaaagtccgattggacttttcctggctccctggaagaggaaaaaaatcgacaggtgtggaaaagtgctccttgtcttaagcagaaggcgttgggcgccaatcaatcttgaaggacaaagggaggaacccggaaggctaattccttctgggagaagtgaactgggggctgaaatattcgtataatttccccttctcttccgctctcacttcgcagtagagttccacattttacaatcatgaattggtaattgttactgttattagaatgtctttctcgaggagctcaatggacttcaaacccttaactgaattctcagggcatattaataacatagaaagggccaagtacacagcagttaacattttacagatgaggaaaccaagaatggaataaataacggtcagaacatatgttgatgagtaagaaataaattttcattagactcctaataaaattgcaatttcttttaaaaccaccggccattctttaaaggaaaaggcatgcacagacgctggcaatgcgtggcattgctctgcatatacctgcagagagagctttctgtgtgttatctcagattctgtttaggaggaggtggggtatcactgaatacactgaaattgaatttccattccttgttcttccttagcttcggagtttgataggcggggagtggggtaggaagtatgctggccctgcctacactctcattctgctggtttttgctctgtgcacatctgtgcaaagccctgccaacctcacgtggctgttgtggttgtgagtctcaagtgtgagaaatgcgtaaatactaagtgtaagaaattattaagtaagaatgattgtagctgggcatggggtgcgcgcctgtggtccaagtcactggagagaggctaaggtgggaggattgcttgagcttgggaggtccaggctgcagtgagccctggtcatgccactgcatcccagccttggtgacagagcgaaatcctgtctcaaaaaggggggagaaatatctttggtaggagggtaggatcctttaccttccttccttcccatatacccaagtaatccttcaccattccacaaatcagcttttcctcacttcttaatgtttcttcagaccacacctggcttagccacttgaactctgtcttctgctaaccactaataaaccttctaagatcactggctctcctgtgctaaatccaaatgactcattctttatatggttccaccttgtagcttttgcccttattcttgacattcactcccccccgcctttttttttaatct

SEQ ID NO: 1887311 - DNA, 4001 bp, Homo sapiens
tgtcttttaattggagcatttagtccatttacatttaaagttaatattgctatgtgtgaatttgatcctgtcatgatgatgttagctggttattttgctcgttagttgatgcagtttcttcctagtctcgatggtctttacattttggcatgattttgcagcagctggtaccggttgttcctttccatgtttagtgcttccttcaggagctcttgtaaggcaggcctggtggtgacaaaatctctcagcatttgcttgtctgtaaaggattttatttctccttcacttatgaagcttagtttggctggatatgaaattctgggttgaaaattctttcctttaagaatgttgaatattggcccccactctcttctggcttgtagggtttctgctgagagatctgctgttagtctgatgggcttccctttgagggtaacccgacctttctctctggctgcccttaacattttttccttcatttcaactttggtgaatctgacaattatgtgtcttggagttgctcttctcgaggagtatctttgtggcattctctgtattttctgaatctgaacgttggcctgccttgctagattggggaagttctcctggataatatcctacagagtgttttccaacttggttccattctccccatcacttttaggtacaccaatcagacgtagatttggtcttttcacatagtcccatatttcttggaggctttgctcatttctttttattcttttttctctaaacttcccttctcgcttcatttcattcatttcatcttccattgctgataccctttcttccggttgatcacatcagctcctgaggcttctgcattcttcacgtagttctcgagccttggttttcagctccatcagctcctttaagcacttctctgtattggttattcttgttatacattcttctaaatttttttcaaagttttcaacttctttgcctttggtttgaatgtcctcccatagctcagagtaatttgatcgtctgaagccttcttctctcagcttgtcaaagtcattctccatccagctttgttccgttgctggtgaggaactgcgttcctttggaggaggagaggtgctctgctttttagagtttccagtttttctgttctgttttttccccatctttgtggttttatctacttttggtctttgatgatggtgatgtacagatgggtttttggtgtggatgtcctttctgtttgttagttttccttctaacagagaggaccctcagctgcaggtctgttggagtaccctgccgtgtgaggtgtcagtgtgcccctgctggggggtgcctcccagttaggctgctcgggggtcaggggtcagggacccacttgaggaggcagtctgcccgttctcagttctccagctgcgtgctgggagaaccactgctctcttcaaagctgtcagacagggacatttaagtctgcagaggttactgctgtctttttgtttgtctgtgccctgcccccagaggtggagcctacagaggcaggcaggcctccttgagctgtggtgggctccacccagttcgagcttcctgtctgctttgtttacctaatcaagcctgggcaatggcgggcgcccctcccccagcctcactgccgctttgcagtttgatctcagactgctgtgctagcaatcagcgagactccgtgggcgtaggaccctccgagccaggtgcaggatataatctcgtggtgcgccgttttttaagcccgtcggaaaagcgcagtattcgggtgggagtgacccgattttccaggtgccgtccgtcacccctttctttgactcagaaagggaactccctgaccccttgcgcttcccaagtgaggcaatgcctcgccctgcttcggctcgcgcacagtggacgcacccactgacctgcacccactgtctggcactccctagtgagatgaacccggtacctcagatggaaatgcagaaatcacccgtcttctgcgtcgctcacgctgggagctgtagaccagagctgttcctattcggccatcttggctcctcctcgaaaccaattcatgtgatttttttgtgtatggttttatgtccaaagtacacaattataaataagtccatctaagtaaatttttaaaatcatagtattagaattatacttaaaatgatttctaaccaaattatttcaaataattataaaatgatttttagagcatctctagtatgttaaaatcttgttttatttcattcctctttggaaatgctctggaagaaaaactaatgataaaggctgttctattattgttaaatatgcattcataatttcattttctctttctcctataaattcagaaagcatatgcttacgcagatgaagatgaaggacgcccatctaatgactgtttgctcatatatgacatcgaaggtgtaggttcccctgctggctctgtgggttgttgtagcttcattggagaagacctggatgacagcttcttggataccctgggacctaaatttaagaagttggcagacatcagcctaggaaaagaatcatatccagaccttgatccttcttggccaccacaaagcactgaaccagtttgccttcctcaggaaacagagcccgttgttagtggacacccaccaatctccccacatttcggcactaccacagtaatttctgagagcacctatccctcgggacctggtgtactgcatcctaagcctattctcgatcctctgggctatggtaatgtcactgtgaccgagtcttacaccacctctgacactctgaagccctctgtgcacgttcacgataaccgaccagcatcaaacgtggtagtgacagagagagtggtcggcccaatctctggcgctgatttgcatggaatgttagagatgcctgacttgcgagatgggtcgaatgttatagtgacagaaagggtaatagcaccaagctctagtctacccacctctctgactatccatcatcctagagagtcttcaaatgtggtagtgacagaaagagtaatccaaccaacttccggcatgataggtagtctgagtatgcaccccgagttagccaatgcccacaatgtcattgtgacagagagggttgtttctggtgctggcgtaactggaattagtggcaccactgggatcagcggtggcataggcagcagtggcctggttggcaccagcatgggtgctgggagcggtgccctgagtggagctggcataagtggtggtggcattggcctgagcagcttgggagggacagccagcattggccacatgaggagttcctctgaccatcactttaaccaaaccattgggtccgcctcccctagcacagctcgaagtcgaatcacaaagtatagtaccgtgcaatatagcaagtagtcaggaccccagctcactttttcatagtcattgtggtttagatccaattcccaccactaaaaaaccaacaatgtgatttataacgcacaacttcgtgctcaggtcatctaggagcaaggtgagaaatcacaatgagaaaaataaatggaaacaccactgctaggggagagctctccttagcattcataaacttttctcttatattaggactaaggaactaaaacttgaggcagagtcttctttgtgcctgagtggcctgtagtccatctccagcatgtaactggccttacgatggcaattggcatcattctccttgctctgttttgcttttccatatagctcgagcaaaattcaaaaagaactaaatatgcaatatatgttcatatctatgggaaaaatctaaaatgtgtgccagatgccctgttggtttcacagataacataaataaaaattcaaccacagatttatacaagggttaaccattttttttaagtttgactacatagtcaagtccacaagccatcaagcactcctaccttaattattgcactagagaaaataaattccaaattaggaagtgtttcctaggag

SEQ ID NO: 1887312 - DNA, 4001 bp, Homo sapiens
tgactgaaatttagtctttctctaatacccatattcattgcatacattatttttttagttgagattatcctatataaaagcctgtacctgcattttacgcttaatattcttcataaaataattaaagagatatttcatcccatgaaatgacactgaggtttcctctactcctttaatattataagtgattgtgtgattaatatctttgtgcatagagcttaacatgcactttacattatttccattagaattgaagttttggggtcaatgactatgcacatgttttaaaatctgtatattacaacacactgttaacaagacagtccttgatgttagtgaagacaccttatacaccaaagtacaataatcatagctataaatttttttatatctctggagttctagttttcctcccagttctgagtctgtgagtccaatagatatcattatgaaacttacatttgtttataaggatgccagcattataaaggcatatttaaatagataacctctgctatcaggggttaggttgtgccagttgtttttgatggccataaaacttacttggtttttggactgaagacaatataggctttgctatctacaatgtgtccagcccctatctatatatagtatagtcctagaaccaaagttataggacataattttctaagaaagaaccatattacatctaacaatttgaacactgaagaactctctcctccaagaaaataggcatgagaaggcctgaaccacaatgccacaacagaatctcccaggtattacctgtgggctgattgatagaactcggaagacagctatcaataagtatccttagatttaaatacacgttttagaggaaaaaaatattcccagcttagtccttcagtgcaaatgagaacaagaaaaaaagaaaaatatatatattcccagcaaagaggacatgatctgacatgataatggtggatcttatcctgagatggcacttattacttatcttcattcctaatttcaaacaactgaagatttttacactgtccagaatacattacactatgactaatctttcacaatttgtggatttcatgtactagcctgctccttgttattttctatttccatagtttctatttccacccctctctttgcctcccttaatttagggaatgtatatgctctgcctcacctgcactgtgatgttggcaagaaagaaggtactgtgacaactgacattttaactcagataaaatgtcttgttttatcccttggacaggatggaagacctggacatgtgagggaacattccgtttatatagtaatcactttcataacagttacaagctggatgcaaactcccccaaacaaatgtcgcaagctaataagagtcactaactttttctgatggctgttatctattcatacagcagcataatcttcacagcatgattagaatcctttaccaaagactcagaatgcctccaccaactactgaaatctagtagtacttgaggaccaagccacagagcaagcgctaaaaaaaaagttaactagaaccttaccactttttcacgcaccccaatttcataaaatgtatcagtaaaaaaaaacaattatctaaagaaaaaaaaagtaaagaaaaattatttatcacataggtaacttggtgtcaactaggtaactgatctattttaatttaggaagttagtgtcttccttcctcaattttcagattttctgaggggaggctcaaaaggctcgagaggctctctacaaggagaaagcaagccagagaatctgaaaaagtgagcaattcgctagcagaataagacagaacagtacacctaccctctattaactccagcctctcccagtctctctccaaggcatcagctcttttctgccctgcatcacaggctacctccaaaaacaaagtccagagcatcagtacggcactgggcttccccgattcctccctccacactcttctctcccctaaagggcaaaaggaggggataaagagaaaagaccacagataatctcactggcttgggaattatggtttccgtggaataaaaaggagtgttctttctctgaagatgagggtgtgttcatttcactgcatgttttggcaaagtacttgtcaagcatccttagctaagacagaaaagcatgtagcttaacaagaaaaaaggctgagaaatgaaatctgaagttgaaaccactaagctccatgacaggcagacagattagcagtgactacttgaaagagaaaacatccatcaatttgccaacaagaaaatctggtcaaaataaggaaatgctttctcgtgagtcctgaaatttgaaacaattggtgactctaagggttgggtgcgtgattaatagcaaccatacctcctgaattttcagggcaggttcataattattatcaccacccctctcaggcttaacttaaaatcatctacctgttgtcctcttatgtatacattcttgttacattaaattgagttttagaaaatacaatcaccgtaatgggcattcattaaatatttgtcaattttgcataaccaatcagtcatgtataatccttcacagcatgaatcgaattagttcctttctttctatgcctgttggcacaccctgatccaaaattataccattatctcatctatctctatgtctctaggtcagactgtgctcagtacatgttaggcactaatacatgcctataaaatgaatatttgttgagttatccttcttcagtcacttcttaacacttttaccaaaatcatctcttctattagctgtagattatgggaaaaaatctatcttttaaaaaaagaaattataaagagatatgtttttaacctttcaggggtaaaatattagatgcttcagcttcttgcaaacaaggcttgcagctttgcatgactggattgagaattctattcatatttgggtccaattcttgcataagacacataaaatctgttctcatttcttttcttatttataaaattaaagaatttgaccaaatctgtgtttttcaaactgttagtcacacctccaatgatgggtcataaagtcaatttagtatgcctatctagacatttttaatgaaattaaataaaatatttaaaaatcagaatacatcacacaaagtaagagtaagtattgccttaaaaaatttgtttcgtttctgtacatgtgtctgtgtatgtgtgtgtgtactggttggtggcataactatgtttttgaccatgagttgtggttaaaagaaatttgaaagccactagactagttcattttaagtttcctcaggctctcaaatgcttgaattctatgagtaagttgagagagatataggaagggttttagtgctaggaagagggaaactagagcaatagacacaaggcagtatcccctggagcagaaaaaatgctgtgcatgtgagagataccatcagtacactccatattattcacatcacaggaagataagcactgggtaggtcctttctacagaacacctcttccggaaaagcactgggaaaataagaaagtcattaaatccctagattgcaagagaagaatttgtaaaaatgagtactcaatgatcctcacctactctaggcccattgtaatcgttactaaggagaggcagtttatctacatagaaagaaggctgtggttgtaggtgcattatatttcttcattcatttaaatgaagcctagaaaaccccacttttgactgtctttgctttgatcttcaacttttgaaatataaaactagaccgcatcttgtagatgttgatacatgtgccccttatctactagcactttgtcctcaacactggcaggccatgcaagggtagaccagtcccttatccctctggacttcatggtcatcaccttcaaaaagtgagtttcttgggcaacataatctctgggtgttaaattgcccagttgtcacctattcctatttagcaagataatccctgtt

SEQ ID NO: 1887313 - DNA, 4001 bp, Homo sapiens
cgaggattgcatgctgagttctgaacagaaatatatttgtaattaaacattaatcaggctgcactttggcccacttcgttgttgctaaaagtcaggtagcaccaggtactgaccatttgcatttccattgttcctatagataggatctctgaagttagggtcataaagctgttgaagaattgatttgcatcccgcattgttcccctgtgtactgtcagtgggtattgagataaatgaaggcaggaatgggcctttttgatgtttgtcacctcatacttactccagtatcaaccaacaaaagaaatagctggtgactgaatgaacagagggccagtcataggaagaatggtgaactgtggtgggaggaatttacctgtctcagagggtaagggtttttggtacatttaagcaggacaattgcaaaaatccaaacaaaattttcagactggttttctaaacctgcacatgattcatttaactgacaacatttaatctgctgcatcccaagcccaagttagttctcattgttaagtctgaattgatggattctcaatgggtttgagggattctgaggaaaactacagaggtttcagtgcaggacacgatctatttgcaatggttcaaaatctctttcagttcctatattctggttacttggattgttggagattttactcactgtattaaagatctgttttattcttctttctttttacccgaggctatacattaagacgtaccctatatgttcccctgcccctcgtctacagctttcagcttcttctagcaggaagtttggttttgcaacccctcttgagttggacccttctaaagtaatcttgagtttctcattccagcctctccaaggaccacatctattgtttccctagtttacatgggttctttttcaaagaaaaacactggattgggatacttcaatgaaagaagttggaaaacgcacaaaatacaagcatcttaaatgcttctagatataccccaactagatgtaccaggttgaattggcttagcagtaaactatatgtatgctcacctagtaataatccatgtgtttctacacttaagagatcctctggactacagaaataagatggaacagaagcactgtggcataactatgagtgttatatgctttatggccacaagatggcactatgcacgcagtaaaagaggcaaagtcaatctatcaaagctaggaagaaaaaaaaaaatcaagcaatttaataagttcgtgagcaacacaaacttgcaaaggccaattccttccttcactaattgtgaccctctcagataaagtgtgatacgcttcagagttgcctgagaaacgagacctggattacggaagtctaataaaacccataccactctttgatggtgaaatacaaaatgtctttctgaaggtcagtcatgagcctttggttctatcaaaaatgctgcactttggaggaaatgacgctggccaatggatttacgaataacacactcagcctgctgtgggctatcttaaagaatagatgttgactttttctgaaatattagattcaactaagcatatgttgaattctcactatgtgcagagccctatttagtggctttaaaattactcaaagatgagtaaggcccagaccttgccctccagaggctcacaatatagtggaggaagtagttacaaacagcttattctgaaaaccaagacactgtaaaaaacaacatatcaaagatagaaagaaaatgccaaggctgattggagagattaattcttcttttgattaatttctctttgtcattcccaattcctccaagttgaaggggaaagggaatgtctaggagctcttcttagacaggtgggctttcgatgaaaattggaagttaatatagttaggatacggtcccctccaaatcttagttgaaatgtgacctccaatgatggaagtggagtctggtgggaggtattggatgatgggaaccgatcccgcaggaacggattcgtgccatccccttggtgatgagccagttctcgctcaggtcgttcacgcgagatctggttgttttttaaaagcgtagcccctctctcccctctctcttgatcctggtctcaccatgtgatacacccacttcgccttccgccaataattggaagcttcctgaggccctcaccagaagcagatgccagcaccacacctctggttcacctgcagaaccgtgagccagttaaacctcttttctttataaactaccagcctcaggccaggtgtagtggctcacacctgtaatgccagcactttgggaggctgaggcagtcagatcacctgaggtcaggagttcaagaccagcctgaccaacatggcgaaacccgtctctactaaaaatacaaaaattagccgggcgtggtggcgggcgtctgtaatcccagctactcaggaggctgaggcaggagaatcgcttgaacctgggaggcagcggttgcagtgagccaagcgcgccactgcactccagcctgggcgacagagtgagactccgtctcaataaataaataaataaataaccagcctcaggtatttctttatagtaatgcaaaaatgaactaatccagagagtaagtaaacaggaggaaggaccacctagatcagaagcttacctcacacaggtgagggtggctagcgggtaagggattagaggcggtgagcacagcagaaggtgtgggtgaagaggcaggtacaggccaccctgtggaggacttggaacagcagctaaggctgtgggaccagactctttatgcagtaaagagccacagacaattgtgagcaagacaccttataaccaggttttagaaagaatcctcagctggaaggaggagattctgcaggaagagggtgggggaaagttgaagttaactccaaccaaagtcaaccttaaatattaacctttttttcttctgactttcattgacttttccgtgcattttcagtgcccttttcttgctgtaaagtaaattttaaatattatgtcaataggtcacagaggcaacagacaggcaaggtatggttatgagaaaaacatttccctaaacaaaattagaagacagcatttgatgaaagatttttttcctaacttgtgagtttgtttacataaaaacacttacaaaattagtcaatcaaaataacatggagtcatttacttaaagaattccttacgtttaaaaataaagtacttgaatatggaatcaacctaagtgtccatcaacttaagtgtccaatttaatccatcaactggattaaaaaactgtggtacatatataccacgggataatactcagccataaaaaagaatgaaatcatgtcttctgcagcaacatggatggaattggaggccattaacctaagtgaaataactcaaaaacagaaagtcatttgagaccagccttaccaacatggagaagccccatctctactaaaaatataaaattagccgggtgtggtggtgcatgcctgtaatcccagctactcgggaggctgaggcaggagaatcgcttgaacctgggaggcggaggttgcggtgagccgagatctcaccattgcactccagcctgggcaacaagagtgaaactctgtctcaaaaaaaaaaaaaaaaaaaaaaccgtatgttctcacttataagtggaagctaaacagtgggtacacgtgggcatacagagtggaataatagacactggggactccaaaaggtgagaagggaggagaaagtaaggattgaaaaattacctcttgggtacaacgttcactgttccggtgatgggtacactaaaaagcctagatgtaactgttatgcaatccgagcatgtaaacaatctgcagccgggcttggtggttcatgcctgtaatcccatcactttgggaggccaaggcagcaggattgcttgagcccaggagttctagaccagcctgggcaacatagtgagacctcgtctttacaaaaattttaag

SEQ ID NO: 1887314 - DNA, 4001 bp, Homo sapiens; identical to SEQ ID NO: 1245136

SEQ ID NO: 1887315 - DNA, 4001 bp, Homo sapiens
gagcatctgctgcctgagctgctgccggcggacccggccatggagacactgaacggccccgcgggcggaggtgccccggacgcgaagctgcagccgcccggccagcaccaccgccaccaccacctccacccggtggccgaaaggcggcggctgcaccgtgcgccctcgcccgccagacccttcctcaaggacctgcacgcccggcccgccgcgcccggcccggccgtcccctcctcgggccgagccccggctcccgccgccccgcgctcgcccaacctcgcgggcaaagcgccgccctcgccggggtccctggccgcgcccggccgcctctctcggcgcagtggcggcgtcccgggcgcgaaggacaagcccccgccgggcgccggggccagagcggcgggcggtgccaaggctgccctgggaagcaggagggcggcgcgcgtggcgcccgcggagccgctgtcccgggctgggaagcctcccggagccgagccgccgtctgccgctgccaagggccgcaaagccaagcgcggctcccgggcgccacccgcccgcaccgtcggccccccgaccccggccgcccggatccctgccgtgaccctcgcggtgacctcggtggccgggtccccggcccgctgctcgcgcatcagccacacggacagcagctccgacctctctgactgcccctccgaacccctgtccgacgagcagcgcctgctccctgccgccagcagcgacgccgaatccggcacgggctccagcgaccgtgaacccccacgaggagcgccgacgccgagccccgcagcccgaggagcgccgccgggcagccccgagcccccagcgctcctcgccgcgcccctcgccgcgggcgcctgtcccgggggccggagcatcccgagcggggtttcggggggtttcgcggggcccggcgtggcggaggatgtccgggggcgctcgccaccggagcgaccagtccccgggacccccaaggagcccagcctgggcgagcagtctcggctcgtgccagcggcggaggaagaagagctgctgcgggagatggaggagctgcgctcggagaacgactatctcaaggtgagccgcgcctcggccgcaggtgtcccggggcgcccccggagggcctggctgcggcggggacccgccaacccctccttcccgggcctgtccagcgccttctccctcctgctctccacggtcctacccccgcattgtcaggcattggcaacttaagcccaaacttctggaaggagaagcaagacctgtgggaccccgccagttcgcaacccacttctcttttctcgcgtctagaactcttgcgtctcttcgctgatacttttacttttgttgacctgttggggcagaggaggctgtaatcgttttggggacatcagcggacgcccccatccccgctcagaacgtgccagcctcacctgtaggaacaggtgatccttcgccagggagctctagccgggccacgtgcgggcgtggcggttcaggataatgccactggagggcccccggctacggacccgcttgccccttctcctgcaattacggaaagagctgggggctctcagggtctcctgggctccgacatcccgggtagagggggccgcgccgttttcggtgagcaagctgaagctcagtagaggtccttggagtgtggcccgggttgaggagcaacggtgttgcgcgggccagtcctttgtaagcatccaggagccggctttctgtgtcaggagaggccacgccagcactttctaaggaatcgcggcgcctgctgcactctctgagtattttccggcagggcctgcgggcagtggcgtcttagtcgccttagcactgggtgcttaatccggctccatcttttctccacggagggggcctggtgctgcagacggggttcccggggtcaggacgatccaggtgacttgagagaaaataaggggagttgtattgacaccaactgttttatttattgtgatcttcaggttagtaaacaactccagtggcatcaatctgtgtatctgttaagtcttaatgagcagccaaccaaacccaggggtgtggccctgcttcttcagtgggttatgtgatttgagctgttttctcagcaaatgatgagctaaccaatacgggcccagtttttggctagtgagattgaggattgggctttaaggtgcatggtggtgaagtctgcagttcacacggaaatcagagcacattaactgctgggtgatctcaagcctaaatttcttatggagctgctccaaccaactgagccttgtggttattttactttgtgcaagaagtaacagtgaggcagagaaagagaggtgataaaagaaagattgggacttaaagcaagatatttcagatagtatgtttgtttttgtcacttactcttaggtaatagacaacggagtgaagttcaaaggcaactatgttgtgggtgactccatcatgaaagcagctcttttgtaaatcttcaacaaatgtaagctccctgagggtgaccaagataatcttgttgtttttgtatccctggctcttagcataacccctgacttactttctgattgaatgatgtttatccaaatgactgctgtgcaagggaaaactgtatttctttaaagaagtttctcattgcatctttgatcttaaggtaggctatccatcattttgaagttcattcttggtgcaactggttatttcctttattttttcccaatgaatgaaatgtgtctgagcctggagtctgatacagtgtatttgctatttcactggatcttcccaacaacatagggtggtggtggtggtatcatgatcataactagtatttcacagacggagatgctgagaacctaaaacagaaatgacttggccaaggtcatagagtgagtaagaggtggcacctgcgtttccccagagcctctgcccattttactgcaccgggatgcagccctatttccagcgaggctgctttcctccgagcacactgcttctgagttgttttcgtagctcaaaatgttccttgtggtgagcttttctaggggccctctgttttcttttcaggtgagagggccgtcatgcccgtctctccactagcctgtgtacgaatggtcacataaatcccactgccagtgtttcagttgtggggactgttcagttgccatttactgtggagaaggtgtcacttgcatccgtttactctgcctgaggccacctccccactgttcctccgacagcaggggagagaagagggttgtgaaggaggctagcaaaccagatgattgcgtgtatgcatgtgaggtactcatttggccactcagaagcttaaatgacaatagttcaattcgggaaggaaacgcagggatcctaatggacttttctacaggtcgtggagcctgcccacatgtgcaaaattgggcccagagcttcagggaccccctgtggcagaggcagtagtcatgcctttgcagtggtggttagcgtgtgccctttataaatcaaaacttctctttttgttattttcaggggtattttttccgttttttgtggtttttttttgaagggatggtcttgctccgtggcccaggctggagtgcagtggcatgatcatagctcactacaaccttgaacccgtgggctcaagtgatcttcctgcctcatcctgataagtagctgggaccacaggaacacaccaccaagctgggctaatttttaaatttttttatagagacagggtctggctatgttgtccaggcttgtcttgaactcctggcttcaagtgatcctccctccttgccctcccaaagtgctaggattacaagtttgagcctctgtgcctcgtggggtactttttaaagagggtagataaaagtacgtccttgacctgctgctttgttagggagcactgcacagaactaactctcaggattaggtatagcattcatctattccaatgtatctgataagaggct

SEQ ID NO: 1887316 - DNA, 4001 bp, Homo sapiens
acaacattcactacccattccctcgttaggttggaaaaccagtctgaaaaaataaatacaatctgtgaccatgaaaaggagcaatcacttatttttcccatatgttttgaacattatttttaaaaatagattgggaatctggagggtaaaatgccgggtcccttcccgagcccttagagcccgaacgttgtcgaatcggtcaatgtccaccccgctgctcacctctgtcccagcagcgccggggccagcgcgccctcccgccgcgtctgcggagctgcgggaaaagcaggtccccggggggtatcgagtgtccagggatatccacgcagacatccttgtacttgcaaatacaaagaaacacacaggacagagatcaggctcgcgccagggctcgatctcctcggggctcagggttggaggccgtacacagcctggacacaaactgagccaaagagtttatttttagcaaataagatatgagtttttagaaaattgcttcgaatagcaaatccgagaaacattatttcaaaacgttggaatcaaaggaaatcaaatgcccacaacccatttccgtcagtgcttacaaatgagcttctgcaaaacccagtccacttaaacatttggtcggaactcacgaaaagaaccaaaagcaaggcattccgagtcctggcgggggttgagcggccgggcggacgcctggctatctcttctgggagtcgcgcattcgatcgcattcaggttaaaatttaaagcccctggatcctgctccagtcgccagcctctccattccagagttttctaccttcagccttttccaaatgcggccacgctgaaactgggagccgccgcagtgattgggggaggcaaagtggaacgtaataaaagtgactaaattggatgagaacggtttctggaccttctcggtagcaatttaaaattcagaagtgtttagaagcaatttacaacgaagaatgaaaaacgaagaattctcgccaacttcctgaattccttgccccctcccccgcactgccaggccctgtcccgctcccccaggagccacaagttcacaactcacagttacgtgcagaggaaacaacgcttagctacgaggtctcaccatctctggaaaccatactttacaaggcacctctccaccccagttcaactctgcacaggctcctcttccttccctaactgggaaaacacgaaaatagaaacaaaacaaaaaaccagagcctaaacgctttctaggagaccgaccttcagaaaatcatttacttggatttacctgggcggggggtagggggtggggtcggggtaaagtataaaaattcattctcacaaaaacaacgcctcttgtcctaaagtctccctcggcagccttctggggtcacgtctgtcggaagaaatcctttctgtaagcgaaagggagcgagacatatatcacggctcctgcagcggacgagcctgcggccgcgcgagttgccgctgacagatcggcgctgataaccccgcgacgttcatttccagtcccttttgcccgctagggaccgtatcagtttgtacagagttgtgataactgtttggagggagcgaagagggggtgtgtatatgaacgtgggggtggggaagcagcatttagcgctgggtccagggaaggtgacaccccctcttcgcagtgacttatctgtgacttacctgaaactctccagggaaatatcagaaactctccagggacatcaaaagttggagagcgtcctcggacacgactgatgtggaagcccttttccattctgcgtaccccatagactacctttccgtacatgacgacccgagttaaagttcccaaaggtcagctggggaatgttgtcttgaggttcccgaaaccaccacgacctgagccgtagcatcccgagatagggtcggagaaagtttaaggtcggtctcacacaacttcagggcaaaaagcgcatttgctgtgaaggggctaggcgggggttggggggcgggggggcgcagagcacgttcccccttccttctgggggcgtgctgacccaaggtctggagcgcccctcccgccgcggcggcggcgcgggactgtgcactgccaactcctcccgtgccaaggctccctccccctccctcgtgtgggtgtgtgtgtgcgactgcgggagcgggagggtgcaccgccgctggatgggtgcgggtcgctagccaggtcaggcgttctgtggcctccgcccctcccccggggtccctgggctcggtgccccccgggtggactcgcccccactccggggacagggcttgcggctcagcccacgcccgcaggcagcgcggctctcattgtctgcctgggcggcgcgctcccctcccccctcgccgtcccctccccaccctcttttctctcctcccctcgatccctcctcctcctcttcacctccagcgcccagctgctcgctgagcgcagttccgacccacagcctggcacccttcggcgagcgctgtttgtttagggctcggtgagtccaatcaggagcccaggctgcagttttccggcagagcagtaagaggcgcctcctctctcctttttattcaccagcagcgcggcgcagaccccggactcgcgctcgcccgctggcgccctcggcttctctccgcgcctgggagcaccctccgccgcggccgttctccatgcgcagcgcccgcccgaggttcggctgcttcctcctcgcgcgatctccccgctttcctcccctccacccctactcgtcgcgggcccctggcctccggctctccggccctctccaggccgcggtcggctccgacggtgtttccctccttccctccgggcgggctgaggcggctcccaggctcccgggacaccgcggaccaacttctagtctctttttctctcctcgaagcgcttatctgcgcgcagccttatctccgagttatctcggcgcaaaggggcgggagccggtagttaggcaggcagagaaacttctttcttgctatctagccaggtctgtgtgtgggcattaattttagtgtggtaatctccgatgagccgaggcgatttggaagagcagcctggaggaggccagcccggctgcatttcacctccctcccccactcgctccgagtctccctgtcattcttcctgctctcccatttggggtcgcctcggctctggggcggtctcacgctcccccctccccagcccgttgcgttccccctccttttctctgctctccgctccaccccgctacgtccgattccggaacggtccggcgtttctgctgctggagatgaccgcggggtgggccgggtggcccggccggcgtgagcgcgcacgctggtggctgcaggcgcgggccgtgtctaaggtgtgcggcgccgcggggacgccggtggggctggcgattcccgccccacaagctctccgcattgcctctgctgggaaggacccagactgctgcccccgccctggcgtcccactttccctgggccgagttgcatttctctctggggctcgcgttcgggctggtcagcgcagtccgggaagctctgggagagccaatataggagaacgcggcggtttcgttttcggggacaggttgccttccttacgcgaagggttttcccgtggggaaccctcaccccgaggcatttcgggagaggggcatccgcagagaggcgggatgcggcggtgccgacacgcacagctacttaaattcttttgtgtgtcatcagcccgggggagacactttagggcggaaggaaagcctcagccagcttctgcagatcacccctgggatctggcgcgcgcacggagaaaggatgcggccgagggggtgggcggggaggacgcggggaccggagcggtgcctttgagggagggctggtatcccagcccttccagggccctgtggcggctgcgcaggctcccttcccctcccttattgatctccacgcccggggcagaaataggatctttg

SEQ ID NO: 1887317 - DNA, 4001 bp, Homo sapiens; identical to SEQ ID NO: 1245161

SEQ ID NO: 1887318 - DNA, 4001 bp, Homo sapiens
ataaaataagacacattttaggaaaagcaatctagagtaagatgaaataaatagattcctaatcaaaaatagaatatttcacacatatatctaatacataaataaattctcgtgaaattatgctgtgactgagcagttattagtctttagggcaagtaggtatatgttctacattacacaacaccggtgtatacagttatggtaatacagaatgtacacgagtaaaattatgataatgtaaatattgaagtagccaacaggaagaagtcaagtgaatggaaagctcagtcctaatctgtgattgaattctaagaactaaaatatgtgtttggaagtatgctgcctgcattgtacaagttccgtaccttgttattttctctttggtataacaatatattctccattgcatatggtagaacttcctctgattgtttataaacattatctttccaaacaaagattagaaactttctggtgactgagagcttggagccaggactagagaaagttccatccagaatcaaattttttgcccatagggatttgggctccaattcaaagtaagatgagtttggagacatgaaacaccacttgccgttagtgccagtataaggtctggtgagaaaaatgaaatatctactcccattttatcttttcggtctacctttttaaaatatttttcctctttctaatttcgaagtctcttccctcaaacacttcttagcaaagtttctcatattagaaaaatatacataattattaccttaaattatgataataaagctctcaagtgggatttttaacatttttctaattacaaaattaaactttccttgtgaaaagatctcatccatcaccagcaaaaacttgaggttttaccggagagaataagggctttacattgcccaagaaatcttcgcatttgaaccacactaaagaactctcggattctccaaccactccttgatccattagacattgttctacaatacaaatggctacatggctaaaagttccgtgccacagtggcacaagagccatgtgcaaggagcatccttgaaactcaggtttaaatgttgctagtttggtgtgcctgacgaatttttgaattcaatcaaatactatttgtagatcagtcaaaatgtgaaatacatagaagggcttccaattaacattaattcctttacaccctgatctccccgagtctgcagaggcctttccactgcacagaagcatggtccaaacagcctggtagtctggctgcctttttttttttttttaaccgatattttaaacctattatttgacctgtctccttaaggttcttcttcctgtgacagaaaatatatgagtaactattttcaggccaggcattatgggtaaaaatggtttaataaacctcaccctgataataatttccagcccaataatagaataaaagggggaaaatacattagctgtatgtaatttgagaatttattttagggcagagtttcatgcaaatcctaccatatagtcagatatttacattgcttatgtttaaagttgggttaggttacatgtgcatacataaccaaagcatactcttcaaagtcactttgtatgtccacagctgaaaaaaaaatccctctttcctttgcctgatggataagaaacagtgtgctacatttttcttaactaagggtctcacacattggcaattttgtcaacctagatgtaaacaccactgccacgtccgaatcataataaattttgtttactgtagttagacattgggtttgcttacattttagttaaaacagccgaagatttatccttctgtcagagccactggaaaattgagagtcttgtgcaagttgtaagctttctgcttaatcttctggaaacttttccaattttcctttaataacaccaggaggccagtggtgtgccacttatggatggagggggaggagttctccatcctgagtttccctcctttgctcagctgacaggctccacagaaatgaaatgcagtaatatacattagcactaacttatacaccaagctgtcaccatcaggtaaaattgatcacaaattactgattactgaatcaagaaagtcatcagttatattgtacttgattactttctcataagaggaatatattactgaatatgctaagattactcatgcataagaatttggaactgacactccagcagcccacactcaggagggaagaagaattgtgctgagaaattagactctaagttctatataaaaattattttaaactggttcttaaattatggccaagaccataatgtctccttgaataattttcaactcttttacacggtgaaagcttcttcatcacacattcttctaggatgtaccatggtcacgctcatcagctaccctccttggtaggaagcactctgatattggtcaagtttacagaattaagccaatagagtttatggaaatttttctaggacaaggtaagaaataaaacatccttttctttgtgatgtattttctccttgaagacctgttttgagcttgagcttagccaaaaggccaagaagcaattgaagaatgtttcgatttgtcttactcttctctctcctctcctttgctgttatcactttaagagttactgaaaactgcctctcatcaaaaagaggcccttctgcccttggaaaaccatatgggccagacgagagtcctaagacagatcttaagcaaaatatgtgaaagagatattagcattcatacattgcctaattaactcacctggaacatgaagctgaagctttctttttcgacaaagagcacgcatttgcccatatagagataattttatcattgtcaactgagagcagctgattgaaattcagtctctgtgaaaggaggctgaacatacaaaagaaatataaagttaggttgacatcttacactacaccaaaataaaattcagatgggtacagcatgggttttccaaataaactctggcaaggtttttttcccaaactgggatatgcagagagtctcagggaaaaacagcagtgtagacagaagcatgagaaatcaaagaaaaagctgaaaatatcttcctagattgtttattttttgctaatttggtatactcacagtctgaaaacatttaggccaatgtcttatttttctttaagttcagggagcattatgcttttacattcagggagtgttttacaatattttgtgtgtgtgtgtgtgtgtgtgtgtgtgtgtgtgtgtgtgttatgtgcctgtcagccccatcgtcttcaccatgtcatcagcacagttggtgctgcatgaatacagcttgttctgctgggttaacagcactcactccactcctggtggtagtctgccagtgatacttagttactagtggtggtcagttggagtcaacaaggactggaagctaaacaggagggagaagattaggaagcctgtcttcatccactggtataagtctggatgtacccacagctattgaccacatttttcattgtctatgcccaaattttgtcagtttcccccagccagtgttaccttatccccagcattctaactgcattgcaagttagcactcaaagctagtttccaactgaatgggcttactgcctatagattcctgatacaattccatccatatgtttggatttctttgaataaagataccagccataaacaaacccaagtcaatacttggtttcagaatatgggtatttgcaaagggctgaatgcggtggctcatgcctgtaatcccagcacattgggaggccgaggcaggcggaacacttgaggccaggagtttgagaccaactaaaaataacataaattagctggacatagtggtacacacctgtaatcccagctactcaggaggctgaggcatgagaatcacttgaacgtgggaggctgaggttgcagtgagccaagatcatgccattgcactccagcctgggtaacagagtgagatcctatc

SEQ ID NO: 1887319 - DNA, 4001 bp, Homo sapiens
ggtgcctccatgccaggaaccggtgcccccttttcagttcaacccatctgccttcgtgaccacactggcataagtcacagttgaacctcctctgcaatggtaaactttaatctcaccatctgattttgtccactgtctttccagacttttctgtcccttattcttacagcaccactttttcttttaagacttgtagttcctttgttgtctccctcctggcttcacattttccctggccagctcagcccagttccctcatgtcagccattctcttgccaggatcttcagtccgttgcctccctgctatcctctccccatccatgcccaccgcaatcccagctcctgactaatgcgtattcactgcctaccttctctaccccaggtgccaagcactgctgagtaggaaccatgaggccttgcagatagctgtggccctgcagatgcacagcctcagcgtgcaggcattgtctggccgtccttctgtgttgttagtctgggctctccctgctccctaggaaagcaggtctatgctggcaggcatctttcctcccacctgaagctttcagtcccttactgcatgtggtgagaccttccactgccccctgcagaccatcactcagcacacctcttcctgcctctttcccctgtggtcctggaagaagtgtcccttctctccagcctcctgcacctgtgctctgcatcctttccattcctgcctttctagagatcttactccatcagttatctcagggcctgcctgtaagctgacgtttcttctcttttgaacatttccttttagagcccggcgatgtggctcatgcctctaatcccagcactttgggaggccgaggtgggtggatcacctgaggttgggagttagagaccagcctgaccaacatggagaaaccccgtctctactaaaaatacaaaattagctgggtgtagtggtgcatgcctgtaatcccagctgctccggaggctgaggcaggagaatcgcttgaacccgggaagcggaggttgcggtgagccaagattgcgccattgcactccagcctgggcaacaagagcgaaactccatttaaaaaaaaaaaaaaaaaaagaaaaagaaaaagaaaaagaaaaaagaaaagaacatttccttttagaatgcaaatatgcttaagtctgttccatctttatgaaaaaataatgtcccttggttctgcattttcctccctaactcatctccttagtccagactggcttcttgaaattttagactgcattttctctttctggatttttccaaccttctttcccacctccagcctccgcaacctgacctttgggtcagttcatccagctccttaactgccttaacctgtgccattctgtgtggttacgtgtgggtgtattttgtctctcggtgaaattgtgatctcctggaagcctgacttgggtttctttcttcttgttttagttcctctctgccctctggttcccgggagaggttcgtattgtttgctgtgcttttacctgcgctgcctcagtaagccctccactgcttcccctcactgtgtggaggcacctccctgactcttagttgatttaactgaaaacagcagataatatcacctacttctcagggattttcctgaagaattccacatcgtgtatatcaagtgtccagcgtactacagtgcctggcatatagatgacttgcttaaatacaagcggttctcaaaatcactctttctctcgtcccttgcttttcccactgccttttctcagcccctcttggtagccctgtgtgctctgaccaccgaccccctgtttattcagaacactagcccagcctggcctcggcagaccttgtccttgccacaacttgccttggttcgaccacagtcctctatccttccagcctggcctgcccacggcgggtgttcctgtcttagtctcccgatctgcacttaagagtgggtgcccagcgggaaacccactgtccttggagcagaatccttagtgggtcacgttgttcccagcctcctctctcctgcctgatgactcaccaactttattcacgatgaaaacagaagtggttcctcatttcatcccctttctctctaaacaaggcacaatcgtggcgttcccacctccccccactttcttgtcctgctctacctccttcccctcttcatagctattattataatctagtatgatttcagaaagaaagactttatgtcctgaaaaggaaattccagccttctgcaggatgataaggttgcatttatttttgggaggggctgggggttgttggaggaacagaggcaccttcctggtttaacctcctaattgtcctagaaacaagacagccttatttgaacacattcctattctctctttgtcttccttacttgaaatctgagtaaagggaattcaccctaccccaaatttaagttcttcacctatgcctgaattatattttaaaaatggaatttttctatctatgcctatacattaaatagaatctgaaagacgtgcacatgtgcattttgtttttgataggtgcattttgtttttgatagtctgaatttgtatttagccctgcaggtgcaggaagattgttctgtggaaattcctatttgttaaaactccttgtgaaactttgagatacccagaagctttccagccagaagagtttagtcagataccaagtgtttgtgctgtgaacatggttccaaattacttgacagtcactgagaatactatcactgttttaatatagatgcttcttagtactttaaatattaatcataagccaaatgatgaccatgtctggctttttagtacttttataaaatgcagtgaaatactttatgcattctgatatgcttggaaccaaattatagcctgagtctgtgtcctcttttcaattgcctaaactgtttgcttgtctacctattcttttttttttttttttgccttttatatgtattttgttgccttcagttttaaggtaacttcactggtatttaacagtactcccagggggaaaaaaagcattttttgaaagaatactgtgtgcattatattgagatgtttggttggagtttaaatcacaaggcatatcgagacgaaagaaggaactgtattttaaaaatagagtgtggccttgtgacatgaagtcatttaagatgattaattgctggggctctgaagggcagaaagaattcccattcatgctcatttcccgtagtttctaaaggtctaagttctggggcagaattgaagatacatcctgatgtggttcagatgcttttcctacatttagaatctgtgtctctgaaatggtgattgaaagtaccagggttgctgggaaatagttgagcagatctgaagtctggaaccagacagtcagatcaggactgctttttagttcctggtaggggtatgaagcacttgtaacaggctgcttatctgcagttccagctggaagctgaatgtcaagttcagagctcttcagaaggaggaggaattaaagaggaaaatggtggcatttggaatcaagggtagacacgacttcttgtttagttaaaggaaatatgtattagaagtatccttgtctattttctctgggaagagtttagtcattgggggaaaaatatgtgagtttattgttttagacactagactcaggatttgtggaatcagttcggtgatggccagtgaattatcaaacaatttgagaagttattttaaaaagttctttctgtgcagtcctgtattatgaatggtgtgggttctttttctttgttcataaatgatctttgctggtctaaggttgcctagacctagtagtgttttatctgctccggtacgtgctttgtttttgtttctgagaccgtaattcagtcagtggttaggatgcacattaaaatgtttattgtgcagccaaatttcttactattagtagcttctggggaaatgaggattttgcaattgaaattctagcagaa

SEQ ID NO: 1887320 - DNA, 4001 bp, Homo sapiens; identical to SEQ ID NO: 1245184

SEQ ID NO: 1887321 - DNA, 4001 bp, Homo sapiens
ggaatatgacacgtcggggctccagatgagagctgtgttcagaggaggaagtggtttttccaggtagatgtggccatcccttctctctttaatgatgacagaatgggacagagcagagctggcctcagcaggagcgttcaggctggagtgaggaccagcgtgagttttccgtgctggggttgacggcctggggaggcagctgcattgttctcatcctgtgcttcccgaggtcgaggctctgacaccatcctgctcttcatctgactgacttgggtccagcgatggcatcagtgaatgagtctgtgggcggggcctgggtggtgtttgaggtttgtctgtttggagaaggggtggggacagaagggaggctggggtgaggggtgagggtgattcatacctgtgagagggaggctgagattccccgagggcaggacggtggaccacagtgaccctgtgggaagaggtctggggacggatggcccatggcggcagggtgcgcagagctcctgggtgctgggccatcaggccacactgcacaggtgaaaccggctctcaacaggacatgccctcggggaagaactgaacagaaagacagatttgttgttaattttggaaggtaggggattttatcagccagtgttccattgaggataatgggttttaagcccctgctcctgtttgttgaccacgttattttgaagtctcccaagtctactagaaatattctctttttggttactggggagatagacaaaggaatttaggaaatccttaactggcacttagtactataaagaagttctttatgaaaggtctgaaatgggcatgttcagtcaaaaaatattttgtctttgcagagcttggaattctggcctggcataggttgtcagaaataagtagtttttcctaataaagctgtaactttcagggcaggtgagaggttcccatctctctgcccagtagcggggctggttctaggtcagcctggagctcagcctcctgctgagaacccaacagccccacccgtgcctcttcctactgcagcttggtgtacaggggagtgcacgcaatagcttgccacccactttgatcccagccttgagtgttatcagttacaggagccaaaagccattcttttaagtaccaagtctccatctgggaaggaagagacagtttagttcaccagcagaccttccttgtttggggcctgggacattctcctgcagtagaacatcctgccatccataaaagaggtatgaagatgccatcacaaaattctggtgtgggttggttgaagaatacagggaacatgggtgtttatgtagcccacgccctatgaggtcagtgaggtttgagatctcagaaggaaggccaggtgcagtggctcacgcctgtaatcccagcactttgggaggctgaggcgggcggatcacgaagttagcagattgagaccatcctggccaacatggtgaaaccccgtctctactaaaatacaaaaaaaatgagccaggcgtggtggtgcacacctgtagtcccagctactcgggaggctgaggcaggggaatcgcttgaacccaggaggcggagattgcagtgagccgagattgcgccactgcactccagcctggcaacagagcaagactccttctcaataaataaataaacaaacaaataaataaataaaacaaaaggaaagaaaagaaaagaaaaaagatctcagaaggaagacgttttcaaatttcataaagttgggaaggattctaggcagatgccatgagaagctcaaggcaagaaagtcaggcagtttttacccaagtgggaaaaaaatagcaagctgtgacccacctgagggcaaggctgggggcagccgggcagccatacatgggctggtggagtcttgacttatccctggctctgagctggttgcagatattaagaaataagacaggtggagaaatcagcactcacacccagttctcagggtgccggaggctggaagggaaggagctggctgtttcctgaatcaacagtccagggcttcagccagacaatggattttctctccaaaacacacagtgttgtgctgagagagaacattgtgatttaggagcacagccagatgactgggtagggacagatggaaaaagcctagctatttatgaccttgaggacaggagagaacgattccataattgaagaccacaggtaactaaaaaaaccatgtggccagtaactttaactaattctgcctttaaaaatctttcacaatttgctaataatatattatttccttcttttatctccttcctgcctcattttccatatatttatttctagtgaggatatttactcagctagagaaaattttcttcacccaaagggacacccatagttaactgtggttcctataagaacctctccacaggcttttacatctattcattgatttctttaataatattgattgattgcttacagtaataatactgattgattgctggccatgtaccacactctggggactcattagtaagaccaggcagacataaatccctgccctcatgtagtttatgctctaatggagaaaagaagacaagaaatatgatgtgtatatttgactatcatgttagatggaaatatgagtaggagagaagagtgaagcaggaaaggaggtaggaggagccgggagtctgggaggtgagatggggagtggagtgagggaggccacggcgatggtgatgtttgcacgaaggcctgatgaaagtgagggagttggctgagcaggggtctcaggaaagctctgggcagaggagcagcaggtatggatgagccctgtgtgcagggagcagcgaggaggccaggcatccagagccaacctcgggagggcaaggggaggctggagagctggtgggagccacatcagggagggtcatgtcaagttcattatgaggacttgggttttcactctgagtaaaatgaaagctgttggagagacctgatctgacttccatctcagcaggaacatcctgactgctctcttatgagtaaaccgtggtggaaggacaggggaggagctaggagatcaccatggggaggggagattgtaccttggaggagggtgactgtagtgaggtggtgggaaggggtccatttccagtgggttttggaggtggagccaacagagtgtgtggatgggttgggatgtaagggaaaggaaggggttatggatgactgcagtggcatctctatccccagtgcagtttctgagatagggaaagctactgggggagtgactttgggtgggaaaatgaggtatttggccttggacatagtaagctgagatgtctattatacattccacaaggatatgttgaacaagtgactggaggagtctggggtctagggcaaggtggaaaggtcagggataaatgtgggaattgttagtgtgagacagtgactgctagagatggcaaaggaatggtgtatgcagaaaagagaatggagccaagggtgagctggagcactccaaggttaagaggtcagggagtggaggaggagctgagaggtgtggagaggagtgcagtgccatgtgcgtcgggacatgggaaggatgcggttccctgtgggagggagcagaggtgtcaactggggtctggtgagatgaggccaagttaaccacatgggggtctccagggacctggccaggcggtgttggtgcagtgatgggccccaaagcctgattcggatttgtttaggggagaatcagaaattagacacagtgagtacagaaaacttgtttgcagcattaaactgtgggagcagagaaatgggccatggggcccagagcatctttttataagaccagaagttagagcatgttggccttctcgtgggaatggccgtgtggagctgttgttgatataatcagtgtgtgtcaaaatgtccagaattcaggaatccatttttaaagttacctgtcatttgaatgttcattggaataa

SEQ ID NO: 1887322 - DNA, 4001 bp, Homo sapiens
aaaagtacacatacaaattgcataatggaaagctgtatatttagtgtaaaagaatcatagcatttacttgaggtccagtaattttgaacaccttccccaatgccacatgaaaattttggaatatttaaacattctgtggttgccatggtagtacaatctcagccttattcattcccttcagaaaatgaaaactcatagatatctttaaactaattggataccttataaagattatagcaaatgggtgtggtatttttatgtggcaacataagaattttagccatcaaactagcactattctacagtaatgttgaaggtggatgaagtatatcgaatgagtttatgtgagttaaagtattgaatacatttacataaatttgcatgtatgtaacactttccctaagaaactccacaatgctatatctgctctatcttctgtttttaacattgtgagtaaattggactcaaaatttactgatttgtacaactgatatacaaatacttaactatatttcttgtaactcatttcatcttgttcacccctattctggctgaaaatgtctggctttgtccaccaaggatggacaaagtccatctcagtctctcttgaattaaaatgtgtcagcttgagttaattactcagtattttagttgttctcgccctttctcccacattgcactgggatgcaaagggaaatctacagaatatgatgacgtggattgataggtagagggagtctgggggagggagctgcttaagtgactacagctgtcataattcataattggttttctcatattggtcaaggaccaagtctcctgtgtgaattcagcctgcatcttgcccaggttggtgcagctggttttggccttttacaatgaagtccttttgtccctacacttggtgaccagtgaacaccattcacaatagcacacattctttctgggacatctggtaacatcatagggaaccatctcggatgtacgttcttagatgctgtgctgaccatggggcccctaggagacatgggttttccaggtctttcaagggacaagggatcttccaggttgtgtccagggaagtaagaaagaagcttcctatctaggatctccacccaacctcaaatgtttctggaagtctttattgcagtctctcttctgagattcagttcagaggggagagaggagtgtaaagtctaacctcatgtctctctctctctctctttcaagcctcagcatctgaacctatagtgaccagaagaaatttcttcctctggggtgcaaacttcccttatctcagatatctttatgtcttttcactaggactaactgtaaaactatgttcagatgtgtaagctttgctcctaataagaaaaatgcatttttttttttttgcttgttatataatcatcctacatacccttaagcaagccaggcttgcaactcactgtcttataagggaatttaatgatgtctaatgaggcctccaaagtggaacaaggttccctttctctaggctgtctccaaagaagtggggaaggaaagcaagatggggggttatctccagatttaggctctttctaaaaagttggaaggaaaaatatctttatctttcttggctattctttttcttagagccacacttgaggttttctacatacagtggccataaggtggctgttggttgatgtgttttactttcttttttttcaaagttataagtagggagagagtttttttacaagtaccttgtgaagggcagtctggttcctctggtgtggtcaatcttaggctttcaggatgcctcagctggtttcagtggtcctggaatctgtgttggatgcaaggcaggctggatttgtacttgtgccactctgtgagtcactggccaatctgagaagtagcactagggagaaattaactcacaagaaagggaccttgacagactaaattggagacaagttcacaggaaaggggtgtggaaatcagagtccatcatttcctggaccagctcacaggtgggcttcagatggctgttgaactgaagtggcaggaatgttctgagaagttaaaggaacatagtgcagatagctacatcagctaacaaaatatatcaaccatactccccttcatggccactggtggaaggaatccatgagttgagtgccttgtaaaatgtttccataatctcttggggagtggcaggaatgaatttctcaccatggtatggaaagagccatccactaaagacaccatttgtgaaaaagcgagcacccaattcacgccttagagcagggagcctttatctgaagtcattgaacttctggggaaaccatcgatggcagccagggtgatttatcacgcaaccatgtgtgcgtgtgcctctgtgcattttctcaggagagattctggggctttcagccgattctcaaaagagtccctcactgcaaaatatcaagggccattagatgaatggaaatgttgtactaacaagtaacataaagcttgatgcataacccttttctctttcccagaaattccagtcaaacagagcaatgtcagtgatcacaaagttcatttctattttcaggaattccttttgtggtaaaactcatataaaaatgtccacttaaaagagaataacaataaccaacaacaacaaaagagaacaaagtcttgtcttgggtgttttgtgaacactctcataaggacatttactaccaataagcaaagaatggagaatatctttaaatcacggacattccttatagggtgtccagctttggaaattcatttgtgagccaagaagtgtgtgcgtgaggatgagcgtggcttatgataaataacttactgtaaagggcaagtttcagttaggaattaacgattcgtcctcaggaggcctttatttactattaaaaacctgagtgccttttgctgttagcaggctgatacagggaaattgattctcttcacagaatttcccgacggtcccaataagccattaagcgctcctggccttaccttccttggtttagtagctgctctgccgtggtcagcatcgttctctctgcagcaattagtggcaataagtgggagctcgcacaattgatggtgtaaaatgcctggacagtgtgcaagcagcagttctgaaatgcttcaccgagcagagctcttgtactcaatgcctccctcccatcagttttccaggtagcagagcctaatgaaggcacacagcaggtggtgcagggaccggaggatctccggtgcggagctttctgtcctggtcagaaggaccagactttgcttaacaggcctgctacggatcccttcatctaccaccccaactgatgcaactcaattaatcctgaagaggttttgaaaaaaaagaggcttttccatctctctcttacagcatttttgatttctagcattccttcttgatttttttttttttttggaatttccatctctctgtttaattgtccccatctgttcctgcaagttgtctacttttccattagaatctctagcatattaatcctaattgttttaaattcacaatctcataattccaacatccctgccttatgggattctagtcctgatgcttgcactgtctctttaggatggtttattattattattattatactttaagttctgggatacatgtgcagaatgtgcaggtttgttacataggtatacacatgctatggtggtttgctgcccccatcaaccagtcatcgacattaggtatttctcctgatgttatccctcccctagcccccaaccccccgacacgccctggtgtgtgatgttcccctccttgtgtccatgtgttctcattgttcatctcccacttatgagtgagaacatgtggtgtttagttttctgttcctatgttagtttgctgagaatgatggtttccagcttcagggtttgtttgtttgtttgtttgtttgctttttagtacaccttgtgactttttgttgttgtgttga

SEQ ID NO: 1887323 - DNA, 4001 bp, Homo sapiens
catcccaaccccattcctgaatgcatagggtgtaagaccttcattagtgatgtggacgcctgcactgtggaagagcactccaagctatactgtaggcaatgttacaaccagactatggtgatgtcatcaccaagcagatcctcaccaacatccctcactcccatctgcctttccacagtcaccctagtatccaccttaacctcagcacatggcaaatatgacctttcagttttcatcagtccatctcaagacctcctgggcagggacacagagtgctcccacacggtctactccagggagaagtggccagcttgccaagggtgcaggtgccatggctgtggccatacatgctccaggtggagctaagggcccacagagcatttgggtacaatcctctggcaaactggtagttacctttttatacgaatctgaaaaccattagaaatactggataacatagttttaatctgaaaaaaagaacttctttatcccataaataatccaacaagtaagaataataatcaattcaggagtgaatgaagggaaaaaacacagggttgttagcagaactctttatctgggtgacaaaataaggggtacaccaaacttctgcaacatgcaatttatataaccaacctgcacatgtacccctgaacctaaaatacaagttaaaaaaaaaacctatgtacttaatgtaatatttaacttcctttgatgataaatttaagtattggatttttttctaggttaaattatttctataatcagaaaaggaaagaagccaaacataccagagtacatatataactaattcaatttctaaaagttcagagacaggtaaaattgctctttagtgagagaagctgggatcctgattgcccttggtggaggtaaggacttggagagaacacatgaggaagatccttggggctggtaaaatgttctggtccttgatctgggtgctggctatagtattatattgagttttggaagattcactgatttatgtacttttctgtgtgtacattatattttaataaaagatttcaaataaaatagaataaatatatgaataagtaaataaataaagacttaccataaagctatggtgatcaggagggtgtggtgttgctggaaaaattgacaagtagattagtggaacagaggctgaggtaggaggatggcttgagactgggaagttgagtgaggctgcagtgagccctgattgcaccactgcactctagcctaggcagcagtgcaagaccctgtctcaaacaaacaaacaaacaaatctattaattaaaaaaaaaagacatatagctgaagagggaactaatagaaaacaaaatagagattaaggcataggaaggacagagtgggatctaacaatcatctatttgaactttcagaaagagaagagagagaaaatggagaagaatcaatgtctgacaatacaatggctaagaacatcccaggactgttgaaagacactaattcacaaattcaagcccagtaaatctcaaatagcaaaataaaaaagagatctacccatgcacacatctagtgaaaccacagtccaccaaaagcaaaaaaaaaaagttcataaaagtacccattaaaaactacagactaccttcaaagaaaaaacaaaaaaacaattaaactgctgtttcttaacagaaacaatggaagtctaaacctgtaaaataataccttcaatgcactaggaaaataaccatcaacctaaaatagcatacctgatgaaaatatcctttaagaatgaggatgaaataaagacattgcatacattagtcaggattctccagagaaactaaggaattggcccatgtgactgtggagattggcatgtccaaaatttgtaggttagagcagcagacttaagacctagagaacagctgatgttccagttcaaattgtaagcaatctagaggcagaattctctcttcttcaggggagatcagtcctttctttaaggcatttatgcctagtgctccactattggaacgctaagcttgtgggatttatttatatcctactgctcaaggtcattgccaaggtctgatttttcacacaaaaaatttgcaacctctggcataaacgggttaaggccttcgactgactggataaggccacccatattatggagagtaatctgctttactcaaagtccactgatttaaatgttaatctcatctaaaaaaatcacttctcagcaatatccagatgtgtttggccaaatatctgggtgtcatgacctagccaagttgacacagaaaattaaacatttaatttataaacacatttataaaataatagacatatttaggcagacaaaaccaagaagccgatcacatgagaccaccactaaatgatgtttgaaaggatgtacttcagaacaaaggaaaattctctcccactcagaaaaaaaaaaaaaagatttgggatataagaagcagtgaaaattagtgagctaaaccattgtttttttgtctaaataattagaaagttagacatcttgaaatgtaccaaaccctgaagggatattacttatttttaagtggaatggtgaagagtttccataaataaaaaatcaaatatactttttaattttggtctttgctttacttactgatacatgtggttgattcaaatcttttaaaaacttgaaatacttcatcttttgctttgcattcttcactaccccaaaccaagtaaataatacttttgtaacatttatgagtatgataatttccacctgctctctgactttttgttaaaagagggggaggagctggttttactcctgggaaattaacaggaaatgttcatgaacaaaattgctaaagcaattattgctggtttgcctggccgactaatggtagcaatcaatagctggctttgtggaatatatctccatgggctaaggagaaggagtgagtagtggcctagcttgtttccttctttgctgatttccatctttagcagctcacagcattaaaacacctggttcaaagggaaaatattactatttcattcaccaaacaaatagttgtacttattgaaaattttggtgggtagtaggtgacagatgaggaattcttttatttatttatttattaaggagctattttttaatttttgtgggtacaaagtcagtgtatgtattatgggttacgtgagatatttcttttttttaaagagggacccctttgttacacatttataaaataatagtgtaatatagttattaaaaatgggacaatttttttcatttttttcttgtattcaattattccatcctcttcacagtcttccacaacttgcttttgttatccacagtgttcacctgaaacttccaccccaccattcaaagcacaactgaagaataaatgatctaatagattcttgtgagacattatcaaataaattaatccagtaacacatgaataaagattgagagtttttaaagaaatacagtaaaacaaaacatacgaagcataatttaatctgatgattcagaaggcacctcaagattgttgttccattttcctcatgctgcgtgtttaagtgcctgtaacagaattctggttagtaaaattttgaacaagaaaaatttcacatataattcacatcaaatgatagacacaatatgggcattttgatgtgtacgtttgtacttgaccagggaacaatttataatatactaagaaaactttaaaaattaattacaaaatgagtatttttagcacacttagtaacagctacttgttttaaactattatttcatttttggtgaccaaattatgttggagcataattaaagaacatataaccttaaaataatatttaagaaacgtagttacaacagacatatgttacattaaatgaagaaaggaaagaaatgtacgtgtattaaagcggactgaggtttttcaaacccattcttttgaaaggccttttaatccactttcacgtaaatc

SEQ ID NO: 1887324 - DNA, 4001 bp, Homo sapiens
cattttggctttgcaactttaaatggcattttgatactacctttagctccagataaattccataaattatactgactcggtagatggctttccttttttagaagagttgaatataatgacatgttccttttccctcagcaaagaaaataacgtctagctataaaggaataggcatatactacatgttcttcagatcgagcctcagatctgaaacgcagtcttacttaacctctgcatgcatccttccttccgtttaagcatttgttaaaaaatggaaagcatttctattttcttaactttttctttcatttaatgtcttttttaatttagagtttatttgagcatccagtgattcatgaatcagtcagcactagaccacaagcagttcagtgctccactgtggaggcaaaaagggaaaacttttgtaagatgtttgcagacacaaaacaaataaaaatatttggttaaattgggaagtccctagtgagaagttggttgacagtttctagttggttaagcttaagttttgttttctggatttaacgtcttgtttctataattataaaatgaatacagtcacttcagaaacctagaaatgtataaagtaaaaattttccacaatactccacccaaagataacttttttgagtatgaatttgttcttcctcaaaatacgcgttttaaacaattgatatcaaaatgcatcttgtttatttggcttttgaaactgttataacacaacttataacattggaaatacattattttattaatacaaagtagttttcatagtaaaataccaaattaattaaaaggcagaatgaaacgtaccatatacatgtagacgacaaatgaaaactgtcaaagtatccttctctctaaaaagccacaaattacgttctttgaagtaagtattgggttttatttcctaaactatacacatcaatatcacctcctgaagctttttacccagtttcacggttggtatttcggacatgcaatgttccatgctgtcaaacttggaatgcctcgtttggatacagggagacaaagacttggagacccagaagcctgaaagtggttcttgaccgactttgtccactcaaattaaggcatcatgcagctggtcatcacttacattgctggttgcacgcaggcacacacacaccagtgctcacagccagcacttgttaagaatggttgagctggaccaaatggtatacgtgtctttcatcaatataaacatggactgcattcatctggacacgggcctttcccgcctaccgagcctgcccaccacccgaagtttaagctcatcttggaggacctgacactcaggaagccgtctcccgttgttccaccggctttgtggccccaatgtctgtataagctgctgatttgccttgggaaaacaaaccagcatcgatttcagagaaattactggataatttgcgctgtgaggcgcctagatcgcaaggcgcactccgcaaatgacagccgctcccgtgcacttgtccagtcattcgggtggcatactgtccgggtggaagcccgccaaaataatccatttggaagggacggagggcttcgtcagaaattgccttcttgtagctatgagacattgagcaaaacagataagaactggggcaatggaggcataaacattaaggctaggatgtatttttggggagaaagcggcggctagcagggacgaagctcaacttcatgcgccgcgccccggaatgctttgcctttagccactagcggagccgcccgcctgagggagccctccgggagtgagcgcacgcaaccgtgcagtcagattcctccgccgaccgcggccctctctcctcgggctttgccttcgctctctagcttttcttctttcactcccgctcgccgactccagcccgctgggctcacgctctgccggacaccaatcccggcggccctgcccgacggagctcaaggctaggcctggccttgtccgcggagtccgcccctcgccgccaccgggatccgcccccgcgccgacacgcacttccggcagcgccgcggccgggagggaccgagcggggagcaaggcctgcggggaggcgcaggatggacgcgttggctgtcatgatgtaggacctcctgacctagaaccatgcccggcgcagggagaacaacgagcttacggaccgggtgcgggggctgctgtgcgagaaagcctacctgctggcccgggagcgttcgccggcccacctggtggctttccctggacgtttaacggcgactccgcccggcctcccgactttttgatgcaggcgttctcttacatgactttcttcgaggctagattctcgaaagacatcctgaaggtggctttcttaattagctgcctcaccggctggcggagcagttcgtagtcgcctacatcgagagggagagccccgtcctggctcagtactggggcttcgtggacgcgctgtagcgggtcttcgccgtcgtgggtaggaaacagtcgggccggatccccggtgtctggggagcggctgccggccgggcccgcgcgagccgcttcactcctacaagcccggctcactagttccaagctgctggactttgaccctcgctgggaagcttgatcgccgcctgttctcgccaatctctatgcctttgcactgcccagcaacccggtcactgcccaggacctgttaaaagttgaatggacctcccagaatcacgccgctgccaccgccgtttctagagacggcttttggccacctttgagaatcagggtcaaacttggaagggcctgcatttgtcacacttcctcggacactaatttggatagttcaggcccagagacggcttcccgggttagtgtgcctgacaacactgaagaaaaattgtgacattttccttccccagaattacttcgttttatacatttcacttctcttctgaaatcacagcaatgccagtttgcgccttttggtctgaggaacgcaggccctggccactaccaggaaaaagtatttacttttaaaacttgaatgtatatctttaccgtatgcctagtacagtagtgcttggaagaaacagattagtaagacaaaatatatgtcttcaagaacacttacgttctgagaaagaattctgaatgcagattctaatgtctggtaaaatgctttacagtgtaaagaatgcatatatgattcttattttatggcattttaaactttccaccccacggttttaaagtgttaatatatgttaaaaatatatgcaatttataaaggagaaggaaagcccagcttgatttttgctgccaaagatggtatatttaaaattaaacgtaactaatggcaaaaaataatgggaatggtgcagtctttgagctgtatccagttggcattattctcttggactaaaaggaatagtattaacttcctcactttgggtaagccactttagatttttgggctgcagttttctcaggtaattagagactttatattatgaaagtttggttcacaattctttgagtctcttttgggaacaaagaaggtaagaggaggatatgtgccctcctctcaatcaaggggtttcttgaaaccctctaaggagaaaaatctgaaactgcctttcctaaaacgttcatgggtttgtcattctgatgatcaatatcgtcccactgaagtatctttttgaattcctagttaggaatctttatgttaagataaactgatcactctctccttcgtggacagtttatctacctaaagatgataggggaaaacactgtttttgaaagacgaaataaagacatgttgtagcagttattttattgccagttagtattacaaaagttcctaaggaactccccattaacttggcctcatatgaactacgcttgagtcccgttttaaattgagtcttgatcgtatttactgacagtttcaaagcagcgtttttttttttcctccatagtaaaaaacctacaggataccacc

SEQ ID NO: 1887325 - DNA, 4001 bp, Homo sapiens
aaatccgtgtattctatcaaatgtatgctcttgtgaggtttactgaaaaaaacttgttttttcctttggtggtggtatcctgtaggttttttactatggaggaaaaaaaaaaacgctgctttgaaactgtcagtaaatacgatcaagactcaatttaaaacgggactcaagcgtagttcatatgaggccaagttaatggggagttccttaggaacttttgtaatactaactggcaataaaataactgctacaacatgtctttatttcgtctttcaaaaacagtgttttcccctatcatctttaggtagataaactgtccacgaaggagagagtgatcagtttatcttaacataaagattcctaactaggaattcaaaaagatacttcagtgggacgatattgatcatcagaatgacaaacccatgaacgttttaggaaaggcagtttcagatttttctccttagagggtttcaagaaaccccttgattgagaggagggcacatatcctcctcttaccttctttgttcccaaaagagactcaaagaattgtgaaccaaactttcataatataaagtctctaattacctgagaaaactgcagcccaaaaatctaaagtggcttacccaaagtgaggaagttaatactattccttttagtccaagagaataatgccaactggatacagctcaaagactgcaccattcccattattttttgccattagttacgtttaattttaaatataccatctttggcagcaaaaatcaagctgggctttccttctcctttataaattgcatatatttttaacatatattaacactttaaaaccgtggggtggaaagtttaaaatgccataaaataagaatcatatatgcattctttacactgtaaagcattttaccagacattagaatctgcattcagaattctttctcagaacgtaagtgttcttgaagacatatattttgtcttactaatctgtttcttccaagcactactgtactaggcatacggtaaagatatacattcaagttttaaaagtaaatactttttcctggtagtggccagggcctgcgttcctcagaccaaaaggcgcaaactggcattgctgtgatttcagaagagaagtgaaatgtataaaacgaagtaattctggggaaggaaaatgtcacaatttttcttcagtgttgtcaggcacactaacccgggaagccgtctctgggcctgaactatccaaattagtgtccgaggaagtgtgacaaatgcaggcccttccaagtttgaccctgattctcaaaggtggccaaaagccgtctctagaaacggcggtggcagcggcgtgattctgggaggtccattcaacttttaacaggtcctgggcagtgaccgggttgctgggcagtgcaaaggcatagagattggcgagaacaggcggcgatcaagcttcccagcgagggtcaaagtccagcagcttggaactagtgagccgggcttgtaggagtgaagcggctcgcgcgggcccggccggcagccgctccccagacaccggggatccggcccgactgtttcctacccacgacggcgaagacccgctacagcgcgtccacgaagccccagtactgagccaggacggggctctccctctcgatgtaggcgactacgaactgctccgccagccggtgaggcagctaattaagaaagccaccttcaggatgtctttcgagaatctagcctcgaagaaagtcatgtaagagaacgcctgcatcaaaaagtcgggaggccgggcggagtcgccgttaaacgtccagggaaagccaccaggtgggccggcgaacgctcccgggccagcaggtaggctttctcgcacagcagcccccgcacccggtccgtaagctcgttgttctccctgcgccgggcatggttctaggtcaggaggtcctacatcatgacagccaacgcgtccatcctgcgcctccccgcaggccttgctccccgctcggtccctcccggccgcggcgctgccggaagtgcgtgtcggcgcgggggcggatcccggtggcggcgaggggcggactccgcggacaaggccaggcctagccttgagctccgtcgggcagggccgccgggattggtgtccggcagagcgtgagcccagcgggctggagtcggcgagcgggagtgaaagaagaaaagctagagagcgaaggcaaagcccgaggagagagggccgcggtcggcggaggaatctgactgcacggttgcgtgcgctcactcccggagggctccctcaggcgggcggctccgctagtggctaaaggcaaagcattccggggcgcggcgcatgaagttgagcttcgtccctgctagccgccgctttctccccaaaaatacatcctagccttaatgtttatgcctccattgccccagttcttatctgttttgctcaatgtctcatagctacaagaaggcaatttctgacgaagccctccgtcccttccaaatggattattttggcgggcttccacccggacagtatgccacccgaatgactggacaagtgcacgggagcggctgtcatttgcggagtgcgccttgcgatctaggcgcctcacagcgcaaattatccagtaatttctctgaaatcgatgctggtttgttttcccaaggcaaatcagcagcttatacagacattggggccacaaagccggtggaacaacgggagacggcttcctgagtgtcaggtcctccaagatgagcttaaacttcgggtggtgggcaggctcggtaggcgggaaaggcccgtgtccagatgaatgcagtccatgtttatattgatgaaagacacgtataccatttggtccagctcaaccattcttaacaagtgctggctgtgagcactggtgtgtgtgtgcctgcgtgcaaccagcaatgtaagtgatgaccagctgcatgatgccttaatttgagtggacaaagtcggtcaagaaccactttcaggcttctgggtctccaagtctttgtctccctgtatccaaacgaggcattccaagtttgacagcatggaacattgcatgtccgaaataccaaccgtgaaactgggtaaaaagcttcaggaggtgatattgatgtgtatagtttaggaaataaaacccaatacttacttcaaagaacgtaatttgtggctttttagagagaaggatactttgacagttttcatttgtcgtctacatgtatatggtacgtttcattctgccttttaattaatttggtattttactatgaaaactactttgtattaataaaataatgtatttccaatgttataagttgtgttataacagtttcaaaagccaaataaacaagatgcattttgatatcaattgtttaaaacgcgtattttgaggaagaacaaattcatactcaaaaaagttatctttgggtggagtattgtggaaaatttttactttatacatttctaggtttctgaagtgactgtattcattttataattatagaaacaagacgttaaatccagaaaacaaaacttaagcttaaccaactagaaactgtcaaccaacttctcactagggacttcccaatttaaccaaatatttttatttgttttgtgtctgcaaacatcttacaaaagttttccctttttgcctccacagtggagcactgaactgcttgtggtctagtgctgactgattcatgaatcactggatgctcaaataaactctaaattaaaaaagacattaaatgaaagaaaaagttaagaaaatagaaatgctttccattttttaacaaatgcttaaacggaaggaaggatgcatgcagaggttaagtaagactgcgtttcagatctgaggctcgatctgaagaacatgtagtatatgcctattcctttatagctagacgttattttctttgctgagggaaaaggaacatgtcattatattcaactcttctaaaaaaggaaagccatctaccgagtcagt

SEQ ID NO: 1887326 - DNA, 4001 bp, Homo sapiens
cccacgaaggaaaggtttcttaaaaatgattccctgacaaaggtcagcattcgtaattaaaagaggcccaaaatgagagaaaaaggaaaaattgtcttcctgttttgtgttctcctccatctctacttatgtagttgctagaaagagaccttggccttccactagatcagggatgacgttgccgagaccatgactgcagcaatgtctgcagtctgtttctttgcagacaaacaggggactccatactcacctgcttcagaagagagcccagcagctgcccacctcccgctggccccgtgggtatgcagctcggtggaccatgcagacctatgtggattgtgccttccgagctgtgatagaagagttaaaaataaattatttaggcagacagaataaggaagtccttggtaaggttttccttttaatgaaaagcattaaaaggaatgccccaaatcattttcttttctaacaaagaacaacctgtaaaatcaagctgcaggcacagacaagcaagctggaagcttgcataggctaatactggtggttgtgccaacagagaaaggttacctgggaatagacacgttcaaaacggtggctccatcttctcctgtctttgccacccgcgtgtatagtaaggagcagacaagatggtactggccaagtagaaagcccatttgtttaataagattagggtgggacgaccagccttccccgagcgctatgtaaacgtcacacctgatcagaccaatctgtgggccctgtgtaaatcagacgccgcctcctcaagcctgcctatcaagtctgctgtggtccacctcaggccggctttttcccttttggatgcctctctctagaaagagagagaaagctgctctcctctctcctttcttcagcctattaaaatttccgctcctcaacccactcacatgtgtccatgtctttaatcttcttggtgcaagatggtgaaccccaggtatttacctcagacagtgatgctgcttcagctggacggctcttgaatgcctccatagaggagacgtggtcgctgcctcctctggtggggaaaaacattctacctcccttcggtggttaacacctcctcaaaataaaaatggtaaaagccaatcagcagaggcagacatactgatgctctcagaaccctccatcatatgccactcctctctcacctaaggatcccacagaggtatatgtaccacaggcagaaatattgtcttatgacgacagacatgccagaagagcagaggctttcagaaagccaccaattcagcaaactaactctccgagcatggactggggaaattcctcagctctcttaactataggaattattttcagcctgtgtcagctatgctgagctcatccccagttctgaataaactatcactgatttctaccaaggacaattataagaagtcagtaaaatccacatgcagaggagatggacacccaactcaacaagtgaatgtgactacccagagggagagccctgtagagtccccgcccagcgtgcccacccagggtttccacccagtgtccccgcccaggtcctcaaccaggtccccgcccagcgtccccgcccagcctcccggggtctacaccaggccacctgcgctcgctggttgacagcacagccccttccggctagcttgacggcctccgcccgatccaccctgcgtgaatacaattatttccctctgccttccactcggagagagcggccaggatgccaactggcttcactggaaacaccccggccccccagccctcctggggcatctctaggtgacaccccacaaggcctgaggcctctacgccttctctcccatccgcagtgaccctgcctcgcacctgccacgtgggtccagccacactgtcccggcagacgctctcaccttagcctcgggctggacttactgcttccaaaagcgctgggcacagccttatatgactgaccccgcccccgagtcccaggccgccccatgcaaccgcccaaccgcccaaccgccactccaaaggtcaccaaccactgctccaggccacgggctgcctctccccacggctctagggcccttcccctccaccgcaggctgaccccgcccacctcaccaacagacacgccaactgcgtctggccccgcccccgccgttctctcttccggctccacggccccaccccttcgcagcgggtctactctgcccgccccaagaaccaccacttccacagccaggcaccccagctcgggctgaggtcttctttggctcctggcagctgttacccctgcagccatgtgtaccagatgtctgctgtgttttgtcccccacatatagttttgatacatttttaaaacttaatctatatctcacttactccactccctgtgagggtgggcaaatgcctgttcagcttaggatcggatccttagcacctgatacaggggctggtgctctatacccacacctgctctgccggctgcacaggatcatcatggcaaaatgagatggtctatgtaagagcacttgtgaaaattctagaactctttctatacccctgaaactccagaaacgtaaagaattattttcattattattgcttttcagtacattgatctgggccccacatttccagcttatggtttggttacagctctgcatgacccaaatggaaagataaaaatgctctcctttgctcatctccgttttaaacatgatttcttcttaaaggtgcttaaaggaatttcatatgcagtcagtccttttatcatctatctctaatgttttacctggattttttattggctgtcatacagtaatgacaagaaaatccatttgtggattggaatctttaggtatgaaatgtgccatgcttgcctggttgaaacaatgtaggaccgtcaagcgagggctggaggtttgtttgcactggtgtggaagaggaagaggagaaagaaaaaaggaaaacatagggtcactttaggccaactgctcagaagatgagagaaactggacccagtggcacttaggctgagacctggctgggtaaaaacaggtggcaatgtttttctaacaaaaacatcaggactcgtaaataagtacaaagaaacttttgtgggtagtggtactaaatatttccaattggaattgctgaataagatgcaatatttatggttgctatagtataggaatgatgactgattatgtgttttggatgtttgtcctttccaaatctcaagctgaaatgcgattcccagtgttggaggtggggcctggtgggaggtgatgggatcatgggggtggatccctcatgaatggtttctcaccccccccttggtgatgagttctcgctcagttcattcttggttgagatctggttgtttgaaagagttggacatccgccttctctatctctctttctcccattctctccacgtgatgtgcctgccccccgcaccgccacaacttcaccttccaccaccattgtaagcttcttgaggccctcaccagaagccaagcagttgttggtgccatgcttgtacaacttgcagaaccgtgtgccaattcaactttttttctttataaattacccaggctcaagtattcctttatagcaatgcaagaacagcctaataaaagtagagtcagcctgaagagatagtgtttcacatccctcgatgtctgtcatctcttcatctctggaaatctacaaatctcaccctcctcttctctctttccatctcttctctctttctgaatagcttcaataaggccctaaagaagtggggaagttgaacattttacatttctcttaaagtgtcagtggctgtgcaccacagagtattttcccctttgattgtaatctaccaccctgcattttttctaacaaatgtcaacacctggggctgtttcctaagaccaaagcatgggtatcctctgtgtctaacttagtggctcacggaatttgtctcatcttttccttaaatctta

SEQ ID NO: 1887327 - DNA, 4001 bp, Homo sapiens
gatctctttgcacacactcactcacttttccacttctctgctgtgttttgatccagcatgtagccctccccagaaacaagtcagatgtggtgctatgttcttggacttcccagcatacaaaatcatgagctaaataaacctcttttctttgtcagttacccagcctcaggtgttgtgtgacagcaaaacaaaacaaagataacatccattaaatgtattaaatgaattcccactcagtgtgaaatccaagaaatataattccattcacttttatctatttttcctgttggtttacttctttgggttcttacaagcaaaaaacaaaaaacctagccaactatttgtataaatttaacagatagcattaaattcacttaaaaaaatagaccaatttagaataaggtcaatataagtgaaggtcagctacagtttggaatgaagtcaagggttgatgccacctcacacattcatttaaataattctagatgcacagtctagctgtggagtctgcagagaactaatctctacctcctgaggagaaagaatgtggacataggccattcaaggacatgaataaaagttaacagactttgttccaccagaaaactggtgaaatctgggtctttgggcatgattcctagagaaaaaaactaaaaactaaagttaaatctcagattcatcacttattaaccattttatatttatgaggcttaatctgggaataataaaaagataaatttcatgggaaaaagatgcaaaagagaatgtatatgaaagcacatttaacattaaatgctattataaaattgtatgaaattatataatatacattttttgtataattgtattccataacataataacgtgcaaatataaaaccatcctcaatagagtttgtttttctagtacctaagatatatttatattttctatttacttcatggcaggaattagccactatcagttactagataatacactgaacaattaggaattttgaattctgttgtaaccattagcagacaaccatgttatgttaaacaagccactcaacctaagattatgtctccaggtatcaaacaagtttgtccccagctctaatattttaaaaagctctatgtttatttctgagattttactattttttctcttctacttttcatttaattttaagacaaatctaatacaggaagtaagttagaacaaaagatgaagacttaagggagagtgactttgaaaatggattatttcttaaaaatacaaattataaaattatgggtcacagaaaaattagtttccactccacttctctcaagcacataaaagcacttaccagcagaacagttgcaacagctcaacggtgccctggaaaagaagaattagagaaatgagtcattcttaatgatttttgccaaggaaatattcaaaatgtagctagatagggcaagatgagaaaaaatttccttggttggaaagttttcagtggcctagaaaaaaaaacacccttaaaactccataaataccagttaattggggaaaaaattatcatctaatattaaatgctcattagcaaataacaacaaaacacacacagagatacacatacatgcaaaaacagttactaaaataaattcacatatcaaatgccccataagtacaaggtactgggggtaacattaagagctctaagataactcctcgtctcaacaaatatataatctaggtgaaaagaaagacatacacagatgttctgaatcagttaggaggaccatgacatctttcatcatcacttgtcttgattctgaacctctgacttatatatggcagatacatacttcctagatctttattatcccagaattgtctccttcaccttcttgaagtgggtgtgcagctaaagtgagcttacctagccatcagagtctccatggaattctctgcgtatttcaatatggtctgcatgtgacttatttctgtacactcttacgattcctacctttggacaagaaactgggtcatgggagcaagagggagttggaggaaagaaaagaaatcggtactgattatctacttgttgcccttttctttgacattgtcttgtttctctgaccacagtcttgttctgccagatttgtttcattttctgcatgacttcatctggatgggcatttcaagctgtgatttccaagtttgatcgttcattgtagaccctgttatcactgaaaaagaggctttaaagttcaaagtaagctagaatgagcaatgtcttaaaagtttgtatctttctgatccttctcttctgttggctgcttcaaagaatgtcaaattattgtacattgtgtagcaaatatctccaatgggtattctttaaaaatgcactcagaaaaccagtcttccagctcaaaggtttgatggtgaaaccccttgttattaatgtaaaaaacttgttctgtgagcagaacttcagcagccacaattctcccacatagttcccagctcattgttcttgtcctcaaatagtgactgaggtgatctgaatagttccagattatttgaagtaacaattgaactctgttatccacatgcactgcattcctcaccaccctcggacaccaaaatgccccaaagatgcttttgtacaccctccctattcgatcctaggcatgttgttaaagcaaatgaaacaattaaatcttctttaacaaagcatagatattcaccagttcttactcttccagaattctaaccacaatccattcttgtgtgaatgtcagtttctatggatctgagttaaatagataattgctcaatttctacaaaaatatttttatctaatctagtggcatgattattttttaccttcttagaactcaaaaaagagttttgaaaatacacataaaaagggagcccccaccccagccaagggaggcggtgactgattgtgcgaccttgcccgggaaaccatgcttttcctacagatctttgcaacccgtggatcaggagatgccctagtgaccccatgttaccaaggacttgggtccgaagcatagagctgtgtggattcttggcggccactcaggcatgcgtggagacccaggaggttttgcatactccagccctgggaattccagtgagataggagatcctctgtgcattccccttggaagggggctgaagccagggagccaagcggtgtcattctgtgggccccactcccatggcacctctggcacctcacaagttaaagacccattggccagccagctagtggcagcagactggagactgcctgaaatgagttatctgggagagggacagctgccatttctgcggctcaagtcagctgttttggcctgccagctccagggagtctgggcagtccggactgggaggaatttcccatggcacagcacagctgctgtggcagatcatggcaagactgcttctttaagtgggaccccaatccatctctcctcaccaggccgggggagaacttccctatgggaagttcagcaattccagccagggtgttagggacagaactctgatctctccctgggatggagccactgaagggaggggggcaaacaccatatttgcagttcagcctgctggctttggaatgtccaggcagcttggatgaagaaagttcccctcagcgcagcacacctgctctgccaagaggcagccagactgcttctttttttttttttttttttttttgaggtggagtctcactctgtcacccagactggagtgcagcagtagctgatctcagcttactgcaacttccgcctcccaggttccagcgattctcctgcctcagcctcccaagtagctgggattataggcacatgccaccatgcccggctaattcttgtctttttagtagagacagggtttcaccatgttggccaggctggtctcgaactcctgacctcagatgatccacccaccttggcctctcaaagtgctgggattacaggtgtgagccaccgcgc

SEQ ID NO: 1887328 - DNA, 4001 bp, Homo sapiens
tggcaggtccaggcttttactatcattgtttttagctcaccaggtaatcaaagcataaaacaaagggtgatttgtcaaagcttatgctgttgtccctgaaccaccaaggggggggtggctgctggactaattcgcttcacgtgggaatcagtgtttaccatttaagggtcctgatagaaagtgcacgattttcaaactggaaaacataaataataacgcgtgttgccactaaagtagtggcaccttgccgtatttctcttctgaatggaacaacctacatttcaaaggacagtctccttccacatgtaaatatttatttgcttgctgctgaggagtgtcaggaagtactaaagaacggtgtttagagtttcagaagcaaattgcttctgcgcacgccttgagtcactggattctgttgagctctctgcctctacgtcagggcttcattaatcttttcttttcttaaaaaaatagaaaagcttttcatttattgcttctaggaagccaggtgcattgcagtggatctcttcggcagaatcactgctttgtgtgaatatttattgtgtaattattgagcacctaccatgtgcagggcaaggcggggggcacccaggcgtccactctcctgcagaagtcctgggtcccaggcccgcatctttggggccaccttcaactgggagggtgttcgcttttctgtgacacagagaggcttaaatccctcagtgatttaaaaatctcgtctgtgagtccaaactgctaggttggcagccaggaagagaaagttcccaggattttcagtggctgaagttctgggcaaacagcatttgcacaaaggagggggcgaggaaggggtgcagggagggctctccaagtgcctgttcggcatcagtttacaagtgtgcttaggttgtatttagatgttacgatgattttaaaagtgaaattttggcattttgcattcaatcctgactaaagctctttggtatatcgacttaaaaggtcttcagattgccaagattttgcagcttggataatatctttggaaaggttaaatgagtccattttctggagctttcgtcagcacaagcccatgattctctgccctgctgagaaaggaggaggcgagctgagttctagcagatcccctgcttccgtctccctcgggcgagcctgtgtcttccgtcccaggaagcccgctgccgagaagctgccgcgggtacatgcatttccacctgggcgcttcgttgcgtgtgaagaaggccggacgacgtctgttggtgtggccgcagcctttcaagacattttagcaacatctgaaaggagaactccacacaggagcccaggcctgcagcagggggcgcgcctggcctcagagcaaacacaaagaccagaggcaaactggtggggaaacggacctgctccccagcacgtggggggcgggtggggggggggagctcacagcgagcgctggggaagggctggaggtctgcaggcccggcctccctcctgagatggggagaagggcgtctcccccaaggtgctttccgttctgtgcctgtcggtgggaacacgtccctgagcccacagacgggtgccctcccaacacctgcgtggcatctgagggtggcaggcagccctgggcccttccacttcaggccagcccgccggaaagcccgcgagctcctctcccagctgacccgggccttcccttttcatccctcttcctctccctccccgccccccgcctacactcaacaattggtgacctccttccaactgctgtgaagtgacttgggtgaaactggagccaggggcggaggaacagccccctcctgctcccaggaactcgcaggcacagccctcttgcaggctgctggcttttgtttttaagaagcaccgtgtattttctctagcgcaggccacgctcaagttcagggtattaagaaactgccgagctgtcaccttcacctcagggcattctttctatgtagcgccatgtgtacgagcgagatctcccaatagctacgccggacccactcctcccacagtatctgtgtgctcctcccagacatttatgtgcacacatctgcagactgtcgttctaaggctggtagaaaatatcagagagcctttggtcaaatggctagaacagacctgctgagccagaggagagaacctaattaatctacagaatgttctcagctcaccaggatgttgggcaacaggaacgtcccaggccctccaaggccgagggagaacaaaaaagcggcctgtgattcagtcgggttcacaccgtggaagccagcttctctgtaaccaccgagacacgagtcctcccacacaggccgcacctgagccagcagctgccgctggcagtctctgaacgccttatcacctggtcatgtggcctgagcgtcaggatatctcatccacatttttactttccctgccatgtaatcaaatctttccaaacctttaaagagttaggtgggaaaaaaaaatcaaagccaagttttgcattacatctcctgtgtattttcaatccattacaacagaaacccagaagaggagaggaaaaaaattaggggtggacatctctggcatttttttcctgtgccccagtgaacccacgacttcctcctccttcccaccagggttgggaaagttcccaatactgtgattatgatatactatattggatacattctcttttctttttttaagataaaagttttatttcagagagaagcacaaagccccaactgttgtgaacaaggcagggatttgtggggactctgagaccttcaagaggaaacaaaatgcatcagcttttgattaagaagaggacaccatggtcccagcctccacctctcatctccctggccccagcccatgggttctcacgaccctggcagagggctcctggaggctcctccagccacattcctgctgcctccctctcgggccctgctactcttattaaatcatctccagaccctaagcctccctcccccatgctggatcagtttacctctggattcccagttcagccattgccacgaggttcttccttcttccctcaagacacagccccttgacctccctccattctgacttcggtaatcaccaactctgagcaaccacattcagacttcatccattcaatgtgcattaaatgcctattgtgtgccaagtacagtccccacacttggggtgcagcaggcaaaaggagagccacgggttcatcgtcacaggtttctgatggccacttctcgagttgatcctcaggtggaattgccagccttggtgacagggcttcctgtacatccatgcttccaactccaggaagacccacctcagctggacaagcacctcattctgcacctgtggattccacagtcccactgagacaccagttcaccccagttatctctagaatgaggcagagttcagggaaaccacaagagtcaagctgacccccatctttctgcacccctctccacccatgaccctctctagattgcattttcaatctcctcccacgaatcccttctcttattcccacaacacaagctcacctctccatgccttagtaaacaaaccaaccaagaaacaaaaaaagagccctctgttttcgcttcccaccatcacattgaaaagaatagttcccactcttctggcctcctactgactcttagatccgtataatctgacatccagctgaaaccttctgccgttatacataattgctttttcaaagattataggaccaaatgacccacgtttattttaaatttgggtttagtattcaatcaccgagtcactatatccatccttacaactcctgttcatgccaaggaccttcatctgaactgtcaccacattggtaaaggtcatgagaggagatgcctggggctaggtgtcctaacccgggaggaaatgccaaggacctccgacggggcagaggcagaggtaggtttaaatccaagcataaaaccaga

SEQ ID NO: 1887329 - DNA, 4001 bp, Homo sapiens
gaagcctaactgcatgatgtatcacagtaaaattgtcctttatttgaatatactgagaatttccttcttgcacagagtatactcatgacattataaccttttcggagagctgaaaggacacacacaaacttcttatttgttatcagatatcatttcacccacactgagcttaaaatgaccaataacagcactaaaaagtatgtccttcatgtttctctatttcactgggggtgggagggtaagacaaagaaaaaaatgctctaattgtatccaggatggatttttctcttttgttaggttcaaataacaaacctaggaaattttaaatcctggaagtccatctgtcagcatctggttccccagagaccaagaaaatgctttcatttagctgaaggctgctactggcagccacatacccgcctgagaaaatacatcattttttgcaagtgtgaaaatgactgctaaggggaataggagccctagttacatgccccatttcagagccttcagccccagctgcagggaccaaataagacagtgatggccctggggatttaagaattcagtttctctctgacagcctcaaaaaccccaggccacattgagaaagaagaactgcctctgtcactagctcagaaaactcatcaatggcaggggcccaatcttggctccaaaggagccgttgctggcccctcacttatcttacctatatgagtgaacgctgccataaaaggtagctctagacctacagctgcaggcaaagaaactctcttcctcttgatttaccattctcctaagctgcctgcccactctccagcttagtagaattcctgaccttgcatccctgactgccatctgccctgcctcttcccacatctcccctcccacacatcttggcaacacctagactgaacaggctcaggccccaacatgattctactgcttctttcatattcatgaatatgttcagagatgtttattattacctagatttacaaatcatagtttagcatatcgtttctgacataaaatacagaaaattctaaaagaaaaaaattcagtgccccttcagaccttcaataagagttactatgtacagtaaaatgataagaaaggaaaccctcagctattctgagatgcaaatgctaggtggtcagctaggtccacactcaagctcatcactgccagaacttttacacctggctctcagcacatacaattcaaatttgtgccttaaacctagtgcaagtggccagggagccccaaagtctgaaacacagaaagccaggactgttaaatctcagaccaccgaggctcctatatcaccaccagcacctgtctacccgtcaggcccatccggctccacagagagtggcagccccaggctacatcaagacctcgatttgactagctgaacccacctgcacaaggaggggaacaacagaccccttgctgttaaagggggcccaggcttcatgtgtgtgcacagcagtttggctgaaatggagacattacaattaatgctcctgatggccagaggcacaacctttttctcccctgcaggttggaaagtcctctttctgttgtgatggagtcctgttggttttcatttatatttttcactgtcacattgcctattctctccacctcactatcacaggtcagtcccattaaatcatgcctagatggttatgctaacccttcctggcctggcttcccaggctcaaccctaggggccaggtagatggacactaaaccaccacctatattttcctcttatattatttttgagaaacatcagtgagtccctttgatttaaatattgtattagtccattctcacactgcgataaggatactatctgagactgggtaatttataaacaaaggaggtttaattgacttacagttacgcatggctggggaagcctcaggaaacttataatcatggcagaaggagaagcaggcacctttttcactaggaggcagaagagagaagtgcaatcaggtgaaataccagacgcttgtaaaaccatgagatctcgtgagaactcactcactatcacgagaattccatggggaaaactgcccccatgatccaatcacttcccaccgggtccctccctcgacacgtggggattatggggattacaatttaagatgagatttgggtgggggcacagccaaaccatatcaaatatcagctccaaatgtcttggcccatctttccgtgtccccctaccctacacagcctctctcaccattttccagaatgtacctccaactccagctggacagatttactcactcttccttgttcgctcggattggtactcatatctttcctccacgtccaattttctcctttcttatctctggtatagaaaccacaccctccccttttctttatggcccagaacaagacttaggttctcagtgaagcattcctgaaatgtcttcagctgccactgtcttttcttccttttctggtgtcctaatgcatctgtaattcacaccacacaggttagcacttcattgtttgcaaattgtttcacatgtgtgtttttttttgtactttgagacttaccctgtatcacgctaatacctgcagagtgctagacacctgtgggagacttcccagttgatttctgggctgaatcaatttgcgaacaattgtaaaattcagtaatcaccatgtgaaatattcccatttcccatgtgatttgacatttttacccaggagaacatctctcatcttttatgctgctactccacggctttgataaatagagttcacctcaaatctcccttcaaaccatatttaaacttccccccttccagcaaagactccaggctagatttcattgagccagtcagctttgctaatttgtaaccaatttttgatttactaaatggcagcattcagctggaggacagatggaaaagctgcaggtaactgctgaccttctgattagagggattagataaccatacctgatttcacattcagattatctacagagattggatatgaaagatctttccaagggttagagggaggaaagaaagcatatggccccaaaatggcatgtggctgaaggatttatgaattaacagaagaagggatttattataaccttcaaggcagataagaaatatgctggtgctgtgcttttctgaaaagctgaatgccattctgagaaggctggttctaacagggaacttttattctctaaataagtagaatatactattaccaatcagggcttttgctcctaatgagaggtactgatggctgctatcactaaagcatcctgaaaacctgtgactgctctgtggcgagcaggccaactccaggctcaattgtgcaatacagggtgtttggtttggttcccgtctcacttccccttttctttcctccttcctttgtgtccatatctcttccaaatccccttcccagacccttcatgaatatctcccgtattagccatctgtgatggttactactggatgtcaacttgattggattgaagggtgcaatgtattgattctgggtgtgtctgtgaaggcgttgccaaaggagattaacatttgagtcagtggactgggaaacgcagatctaccttcaatctgggagggcaccatctaaccagctgacagtgtaactagaataaaagcaagcagaagaacgtggaaagattaggcttggccaggcacagtggctcacacctgtaatcgcagaactttcggaggctgaggtgggcggatcacttgaggtcaggagttcgttccagaccaactggccaacatggtgaaaccctgtatctactaaaaatacaagaattagccgtgttggcatgcacctgtaatctcaggtactgcgaggcggaggcggaggttgcagtgagctgagatcacgccactgcactccagcctgggtgacagagggcaactccatctcaaaaaaaaaaaaaaagattagactggcttagcctccaagcc

SEQ ID NO: 1887330 - DNA, 4001 bp, Homo sapiens
gggagtgactctcagggctctcaaattcagagccctccatggggttggccgaggcctctgttgcaactgttcctcagttcaccttcctcttctgcccaccctgggtcctgccattcttcaggtgtggctcctgagagcaccggcctgtgagaccctgcggagaaatcaccgccaaccgtgtgagcactcaccgcagggaaacagccttccaccacctccgcctcctgctcttgaccaagcccgctaggagcactaggcctcagcctcctcatctgtaagacaggggccaaaatggtcttaattctcagagtgtcataagcatgaaatgagagcgtgcacagaaagcccttacttaggcttggtgtgtagtgaacgcccaatagaagtgcttggtgtgcagtgaatgcacaatagaagaagtgatatgtggccgggcgcggtggctcacgcctgtaatcccaacactttgggaggccgaggtgggcggatcacgaggtcaggagatcgagactatcctgggtaacgcggtgaaaccccgtctctactaaaaatacaaaaaattacccaggcgtagtggcggacgcctgtagtcccagctacttgggaggttgaggcaggagaatggcgtgaacccgggaggcggagcttgcagtgagccgagatcgcgccactgcactccagcctgggcgacagagcgagactccgtccccccaaaaaaagaagtagcggtatgtatgatgttgttcgtcacagaaagcatggaaaatacagaaagacacagagaagagagtaaattcacccatgggtctactgccgggttaacaggcactaccaagatttcaggtggtgggggcgcacgcgcatgcgcaccaacacacgggccctagaaaaataaactcgggatcctaagcgtgtacgctgcggtgcccacacacgcgtctgccgttctcaccccgttttctgctttaattttctgcttaaattggtcattttctgtgaaatgcacattccacttctgggtagtgtgcaccgcccatctcccccacggagtgcaggaaggtggcagcggggctgtgttccaggccaaggccacacagcccggggggccgcacgcgggggcagccttggtacacgaggcctttcatttgttggttttacagctggaagaattcggatatacttattgaccgagagaagagtccaaaactcaggagtggaaaataacgaagaatgaagaaaggaaacaggaagaggttgacctgattgatggaaaggagctcctctttctccaaaaccagaaggaaaaggaagatttagagagcagaggagggtaagtttcccccggataatatgggttcagttgcataatacggccaggatgttatctgcaaagaagctgtggggaggagaaggcagagcaaggagcgcagggctgagactgtgggagatgcagccggaaatgacaaaacagaaacaaaacgtgaccaaggccatttggggtccagctgaagttcagcggcttagatgcgtagtaagtcccatgagcactgttgcacgacttgcccacagctgttcacatatggactttgcagctcacattgactctggccagggcgggagagccggggagccaggcaggtgcgtgggaagggagagaagaaagggaagacgcggtgcccattccatatttaccttagtagtcatccagacgcacttccctctccaatccccaaacaagaagaggcagaaactgtctaccagttagacgggaggtgtcagcgcccctggaggctgtggccattgccagggagaccccactctgcacagctcacaaacacaccgtgtgtgtgcagggtcctcacccgccctgggcaggaaatgggggagttctacgtccactttgtcacgcagacaatggaggggaccgcagaaggggcttccccaaggacacagagccagtggccgcctcactgtgtgcccctcagtgggcgtttccacactgcctggcaactttgagaacagccgctttcgctgggtctccagtgaaacttgaaaccatttgcatctgcaagtactttacttattccatttcaaaggcatgcacatttttaaagggacactgtttttagctcctgcgtcactgactcatcccgcataatttgactttatgggacagggtcccctaaggagtgtccttgccttgacagtcctgtcttgaaagctgtgaagaccaagtggtgccatatatattgttttaaaattatggactacctagaaaagaggtgaaatagtaaaaaaaagcaaaacttttaatattcaatgacaaacacagacagaaaatagggaaaaattaaatgttaatgtgttgggatgattggattttgaataaattttatttattgaattgatatgaagtttatggaacagggataaacagtttgtttcatatgattatatatttaggtattcgttgacatacatatatacgtatacatatacacgtatgtattgccgtgtgtacatatagacacatagcatgtatgtataaaacatatacatatgtgccaaattacaaaacgagaagtcgtgttgctcatcctgctctattataagaaacctcaagcaacagtaggtactggaaaatgccaagtctgcatgatcccggcaagggcagatcctgccactggagttctggaatgcatctctccccacttggcaaagatgcagggtgcagagggggtgtcagcagaggggctgggtgcagaggggttgcagacttaccacaggaggactttatcaagagatgtgggttttctgggcatccaggacacccacaatggggtgacagaattgtctgtggagtggagtcctagtattgaacttggcagctgctaccggatgctcttctggcacctatgttttcagaaaaacaggagctggccaagagtatttgccagatttctccctggattggactgatttctgcactcagcccaggtttgtttttttttttttttggtgtgtgcccccgcgcccggctaatttttgtatttttagtagagacggggtttcaccttgtcagccaggctggtctcgaactcctgacctcaggtgatccgcctgccttggtctcccaaagtgctgggattacaggcgtgagccatggcacccggcctcaaaccagcctcaatctgaaggacgtgcatactctccacaggtcccacaggtctttctagggtccttgccccttacgtgcacttcctctctgaagaggtccttcctccaccatgttgtcccagcctgaaattgtccctcattatggagacttgagtggtgtctcccactgactcctctctcaaggggtgagggtttgcttgaccagacaccagcagtggggcacaccccttccagttcaccctgatgagctccttatgccaccacagggtcaaaatcaggtttaatagcagcagcattcgcagtagccacaaaatggaaacaactcaagcacccctccaagagggggaatggataagtaaagtgtgctgtatccccacgatggaatattattcactcatgagaaggagtgaaacactggcacatgccacaacgtggatgaaccttaaaagccttatgctgagtggaggacgtcaggcacaaaataccacagattgttatgagcccagttgtatgaaatgtccagaagaggcaaatccatagagacagaaagcagatccgaggtcgccagggtctgaaggagtcggggatggggaatgattgctaatgggtccaagggggctttcctttctgcatgaggacagtgttttgaaactggaggtgatggtggcataacaccgtgactacactaaatgccactgagttgtacacttttgattttaggctatgtgagttttacttcagttaaaaaaatagattgaaggctcagagagatttaggggtgggagggtaaggatttaggattcaaaagaacttgactaaggagc

SEQ ID NO: 1887331 - DNA, 4001 bp, Homo sapiens
ttattgtcaagaaatttatcaccttgtcatacaacaccaacactgttgaaatagctattaaaacactgtaggaagtgctaaattttcacataaattttaaatttcaagtgaactctttgaaggcagaacccagttttatcttttatataacaggcacccaataaatgttggttaatggaatacaaataacatttgcagctggtcacttgtgaggaaattgtttcccacatttttctctagaatttttaattaactattactattaaactgagtctacatgatggaaaagcttgactctggagttttaggttgagttccacttttactagctgtgtgatcttggaacagtttattagtcttctaaattactgttccttactgtggataagagaattcatgtggattacaatcagaattaaaccagataatgtctacaaaaagttttctatgaactatttaaaaaggtaaggaattatcactcgaatgtattctgatttaaactgaattgtgttcgaattggccttgagtgacgatttggcctagaaagcctatcttcagaacatcacacacacacaaaaatccaattacttacaatgatttttttgagacggaatctcgctctgtcgcccaggctggagtgcagtggcgcaatctcggctcactgcagcctccgccactgggttcaagctattctcccgcctcagcctccaagtagctggaattacaggctcgcaccaccatgcctggctaatttcaaatttttagtagagacgcggtttccccaggctggtctcaaaatcctagcctcaagcaatccaccgactcggcctcccaaagtattgggattacaggcgtaagccaccccgcctggccagtgatcttcctaaacagaaatctgatcacataacttcccattacagagtctaaccctaaccctgtgcctacaacatagtcaaacctctttagcaaggcagatgacctcaagcaggatttcactgcctctttgtcacagcacttaacaagctgtgatgtatttatttttattcgtctacacaggtcttccctactagattctgagtttcagaagaaaggcctctaactcgaggttcatgaatggacctgcacaagggggcggacgggctgaagtcctgcctttttttttttccaaaaaacccgtatgctgtgccgttaacgttcataaaaaagtccttgtcgaacgttttaaacagccaaggtgtttcagctttaataaaagctgaaaatttggcaataccaaacaggtcaccaagccacagtccgcttcttggcctcctctttggtatcagagttcggctagcggcttcctgtggcctcttaaacaaggacctcattttgggagccattcgagagattttttctcatcatctaaagtagcattctcgccttgcacagctgaaagtcatttctcgaaatcggagcgccagaagcgacaggagccactccaggcccgggggaagcgagcaaaggggcagcgggctgcgtttgccaacgtaggcctctcgggtcccgcgccgttctgggccttctccgtgtttccggcgccgccctcggggtcccttacagagggcgggaggcgggtggagagacggggcaggaagcaggcgggatcggcctgggaagaacccgttctgggaccctctagaaatcccagacagccctcccgggctgacagcgcctgccttggagcccgacgcgctcatcgaatttagattgactccttcggctctccgttttccttctctaagggaagggtgggacttcctattttatctcttagcggcttccggcaagagctgatgtgttaaaaacaagacagcacatgggcctgccggccactcggataaaaaacaaggaactcgacctggattgtactaaaccagttccaagattctgtttttcggctgtggcgtccggcgctgcatccactacggagtcgccttggaagccaccggaagtccttcgacggagaaacaggatgtcccgcctcttcctcccaaagggaagacggtgagccggaggagtcagtcagaggggcgagcaggagcgattccgtcgccaaacaggtaagttattctctggccggggcggggggtttggaggcggggaccgtccagcgtcagcgcggggcctgggggcggtggcttgagggctcgaagccgggcggctgggcgcccagagccccgtctgggcccttcgctctttctcctcccccctccccccgcctccgcccctccctgtcgccttccttcccgacacccgcccagactcacgcccggacacacaccctcgctcgttcgctcacgctgcctcgccgccctcctcccccaggccccagctgccgccctgccctctcacccgctcgctccgcaggccggtcccgcgggcagcctcgctccgcgcccttgcgcgagcggagctcttgtggacacctcggggctgcggacctagcgtggcctcggtttcccctgccgggttcgcctgtccgcgcagaaacagtcccccgttccttcgggacgcacccctgcaccgaaatcgggccgttctcgcgtgcccgggttgctctcaagtggaaaacagatgctcccctagctgcacagctgcaagctttagcgtctggtttccagcaggggctccctggaccgcccgcccactctcgtgtcacccccaggtgccctggctgcgccgctgctactcgcgccttcttccgttaagcgacgctggtgtgggcgggcggagggcacacaagtgcggtggccgaaagcaccgcggtggcagcgaagggtcctagccattcccgacttcagctcgctttgcgccactgcggggagacccgcggctgcctgacaccgctgcgggcagcagtgggtttctcagtagatgctcacctctttccagccagctagcacgccctgggtgcttggcctccttctggagtttaagctggtggaggcggggtgcagtggccgctgacctctgtcggttgcgctgggttttgagtagccatttatttcattggggagttttggaataggacatcccacatccgtggacacacatgtagaatacttttataagtaattacagtcttaatagtgatttgagttacagctttgcagtctatgcctggtgacatcctagtcgtagtatgtatctgttttgtggtgaagtgctggtccatttagaacactgtagacaggggccctaacatatactcatcagaaccttattaagaagagcttatatgtcatttggcatactcactgtgcttcatttagtacagcaatcttgtgtagtaggaattattccctttttacaaactgagactcactttgctatatacaaaattactgctactggtacaaggtaaagctttcttcttgcgtgacatgtaaggcaggtgtgataattgctcacaacacagttgctactggtgcatttttttttaaactttatttcggaataaattaagatttacagaaaagttgcaaacaataggacagttccattggtaccttttaagcagagcaaagtggctccacttcaaaaacactggttcttgctttatgccaaacacccttctaggtgttggaaatagtaatatacttccctagaggattttgagatctggttgaatagacacataaataaatatatataatacctttttctgcttactaaaatagagatgtgggagcacagtggaagttacggctgattgatggtggggagtggtgaaagcttcttgcaggatatgtgatttgagataggtctcaaggactagtgggtattcacctggttgaagggacattttccccaacattcattccgattaggtttgttttattagagtagaactcgctaatcttaataaaatatactctcctagtttgattcttctctttctcatctcctttaagaaggtggtttgtatcccagatagtgagaagaagcctagtttctaa

SEQ ID NO: 1887332 - DNA, 4001 bp, Homo sapiens
cccatggatgaatcctgctgatgactagctatcccagggatggagcccatggtgtcaacccctcaggacacagagcagagggggaaagagctgagagtgaatctgaatgagggacagaagatgtgagttacaggtaactcattttattttattttatttttttgagacggagtctctgttgcccaggctggagtgcagtggcatgatctcggctcactggaacctccacctcccgggttcaagcaattctcctgcctcattctcccaagtagctgggattacacgtgcacgccaccgtgcccagataattttgtttttgtatttttagtagtttcaccatgttggtcaggctagtctcgaactcctgacctcaaatgatctgcccgcctcggcctcccaaagtgctggtgttacagacatgagccaccaggcttggcctgataattcattttagatgtgtgttcaggcttgcatgaaaggaagtgatgacaggaccacgagatttaagagcttacaaatcaacgaaaggagtgcacatgtgtgggtcatttgaggagtgatgactcgggatggaggtgtaggcacagcgggcctggagttcaagtgagtgatgacgggaatggtgatggagaaagtggaggtgtagatgggaggacaggttgggtgtgcttttgatagaggtggttagaggaagcttgctccagctaaacacaccagagaagtgcctgccgaatgatggaaacaggtggacatttcagaaaaagagggaagaaatcactgatgagttggaaatggatccaatgaggcaagaggagacagaaaccaccaatattcttattgctaggccctgaaccggcaataaagagggaaagggagctggattaggaacacgtgagggagagagccatgagtttttatttttttttgtttaaaataacttttgattatacaataaacacacattttaaataatttgcagtaaataacaaagagaaagcaagaaatttaaaatggccataagtgactataatcatggtttctaagagatagccactggttttcagcatttttggtagattcatttagtactaaatattatgtgcgagttgcagacatgctctcctgtgtcgaatctgcagaacacaatgtctgacaaccagaaagggccaaataaatcttcgttgtacaagttgttctttgaagaaatttagatcattcgtacatgtgtgtgcgtgtgtgtgtgtgcctgtttctagcattataatctgctttaaaaatacagttagcttttttgtcattggagattttatttataattttcattattataaatatgataactattctatagagtaaactgtggcgtatgtgtgatgctttgcttagtataaattggaattcgttactggacatgttgaacttcagcttttggaagaatatccagatggagcggtataggggtcaggaagagatgtattgatactatcacaaatgccttaaaataccaagtgaatacacctagtcttgccgtctctatttttttccttggggagatgtcagagaagcccagacaatggctgatcatctaaaatgaagtgtggggtaaagagaggaataatggtagacccttagagaacgctcattttcagacatgagaagaaagaaggagagttcggaaacggactgccgaatgtctgggggtgacaagaaacaccaggacaatggaatgtcactacaccgccaaaaagtgtggagccatttgtgttccctatccttctcaggagaagatctgggctggaagtgctggtttatggtttgttagtgtattagtccgttttcacgctactgataaaagacctaccggagactgggcaatttacaaaagaaagacgcttaattgtactcacagtttcacgtggctggggaggcctcacaatcatggcagaaggcaaggaggggcaaatcataccttacgtggatggcggcaggcaaaaagagcctatgcagcgaaactcccgtttttataaccatcagatctcgtgagacccattcactatcacgagaacagcacgggaaagacccgcccccataacgcaatcacctcccaccgggtccctcccaccacacgtgggaattcaagatgagatctgagtggagacacagccaaaccgcatcagttcggcaataggtactggtcagagccagagaccaggatgaccctgccccttccgctgaggtctagagtgaccagagaagggaactccagggtaaaacagagcggcaacccctaagaacctgggggcacaaacagcacaaagaccatttaatgaagcattttcagagtttaggatatttccaacaaaatattttccccaaaaggtatctttaataatattggatgcgttgatttctaagagggtcctacagagacacattccagtcactggtctccctttctcccatgtattggtattttcaatacataatgtctggagcagagcatggaaatggcctgaaaatatcctctcctttgcatacgggaacacacagatgggaggatgcgtcttcaggagaaggtgagcgagacctcggtagcagaggaacaagttcaagactacacatcttcttacttgtcagtttaaatctcaagtgaagagcgagctcactgcaggtctaaaaacagtgtttcctgctgccaagacatgaatgagctaattgtgttttaaatagttcaccttacaaaaaattttctttctttatgtgaaaagagctgtgatttattaattttcctttctattatttgctatagactttccctagcatcttccccacaaatcacttctctattgaaaccaatactgaaacctcagtgtaattagtgtagattgcaggacatgtgtgaaataaaacaagcaaatttaaaatatctgggcagccccctttcaggcagtaatgtaagggacccttcaaggaggattttcagggtagcatctttcaccttggcagccaatccagcatcaaaggtgacaggactgggcagtaggcacttagaaaagatagctgcaaatgctacaaagaactaaattagtaaaggaaacttaattatcttgcctgcagcctccctctggtcagtatcccaattgaacacagacaaaactcaacatttttataaatgcactacttcagacttagaataattcctttcttaaccattcatctagaactgcactggccatttttttttctgtcctttatctatagatttagaaacagtaaatatcaaatgacatccattaaatcataaaaacacatgccgctttgttttttaggaaaccagttttgacttttgtttttcaacttagaaaatgggaacaaggatatttttaaagacgtaaattatatagtataagcaactaacatacttatccaaatactttcagaacattctgtgatgttgttttatacacaagcacacatcaacgtgtgtgtgccatactataggcatgaaagaacatccttcaagccaagggtataaatctcattatagtacagaaaatgtgattaagtcatttctggaaaagatacgttagtaaataaggatgataaagaaaaaagtctattttcattgaggttatacatttgcaaggttataatattttcaaaatgtttgaaacctatcttacatgggaagacaccctacagaaattacctttcatatatcctcttcagtcttttctctctgacttgtttataaaactttaaattaaagatgatagaatcttagataatgttaactgtgttacttgcgactgctccattctggtgagaggaacagttctgaaacagttctggaaagcagaacatttctggagaggggaaccgttttggagaggggaacagttctggagatggggacagttctggagaggggaacagtttgggagacaaggacagttctggagacgaggacagttctgcagagagaagtagttctggagagg

SEQ ID NO: 1887333 - DNA, 4001 bp, Homo sapiens
ggcctcccaaaatgctgggattacaggcatgagccaccgagccagcccgaatttgtcactctaaaaggatgatgtgggtgggcatgctggctcatgactgtaatcctagcactttgggaggctgaggcaagaggatcacttcagtccaggagtttaaggccagcctgggcagcagagtgagatcccaactctacaaaaatttaaaaattagctgggcatgatggtgtgtgcctgtagtcccagctactcagggggctgagttgggaggattgcttgggccagggaggtcaatgctgcagtgagcgatggttatgccactgcactctagcttgggtgacagagcaagaccttatctcaaaataataataataaaatatataaataaaagcaccgtgcaaatctcatcttacagaagcatggatgttgaagaagagcaagctgaatagaagctccaggtgtcttgctccaggggccactagcaacttctctcattacaactccaacaatgccccatctatgggctccaacaatgccccatctgagcagtagtgcctcaataaccatcagcccatctcttctctatctcaccaactgacagggtggatacaaagcctcaagctgtgtccacacattccccacaaaaagtgttacatgggcagagaggaaaagccattggcagctgggccttcccatttgtgagcagagtctgccagcctcctccagctcctctgcaggctgaagtcaagacccaacaggcctgtgccaacgtcgtgtcctctctgtgttcaggcttggcggtatcgcattcctggcataattttccatccttgtgcctgcaaggcattactgtgtgggaacggcacccttgcctaatgatcttggccaaatccagtatctctcattcacatgggtgcccccttgcccccaggatagcataaaaggtggcagttgaagctgagtaaacaaaaatagaagatggaaaacgtttcggtccggtcccaacctcaggaaatcctgcatcacgtttgctgttctgatctagaagaaaggttgacaaatctttccttagcttttctcagcttatctttttcttagcttttcttagcttatctcaggatggtggtgttaggttttgctgatgatgggatcccaacttaactcttctacaaatcttaaggcaaagtgaaaacgcttgtgaaaatgcatggtattcctgagttcagaacttcctgtccatcctcaaatcaccagccttctgcagagaatcacacagtgggtgtgattctgccaccagtcagctgccaccaacgatgactggccacaacaaagctgaatgacatggggcatatcacaccaaaggacctctcttttgatgctagtatttatctttgagccttgcctcttttagaggtggcctacatgactttagtcagttctggcccttagagatctttcttatggaaatctccagaacattctgcacaccatcatgcctcatggaattgtggcctggcagacattaaaatacccgtttttcaaatagaggaagtgggttctttgaaatgaacagaattcagaagcactctgcagcatcttggaaatggtggcaaagcaattattttaagtacaagaggctgttttgatcttgggaattacctgtgaaggccccgtcacaggctctgctggccagtggcagctgtgcacggatgaataactgctgcaggcctgtgtgagcttctgcatggctggagcagcactgtgtcccacagcaggtatctcctggtggtagaagtggtgcccttcccttggttaagcagagtgtggactggccagtctcaagcttccctcaaaagttcttccatcaccagatacctgggtttctcctaaggcaagggatgctgactttccatcacaaaacggagcactgcggaagctggggagcagaatctcaatgatgcccacagggggcaggcagaatgccaccactcggccaagaaggcgtgtttggctacgacagcccagagtccagagccacggcacttccggttgctgtccacgcggcttctgctggtactcagccaccacgcccaccagagccaccgcacttccggttgctgtccaggcggcttctgctggtactcgcccaccacgcccaccagagccaccgcacttccggttgctgtccaggcggcttctgctggtactcgcccaccacgcccaccacgtggagtctagcagctctccctggttctccccagcttctctgtaatccttcctccacctggcagccggaggcattcacttaacatttagtgtatcatgcccttcccttgcttgccctgtaaaggcttcctcacatccctcatagaattcaaactcctcaccccgaggctcagccctccacctgtggccctgcctcgtctccatgccactttgaagctcacaggtgaccttgcttttccttcaagttgccagcattccctcatcatagagccttaactcgctgctccttgccctgcaagtcttgttccctgatttaaccaacacgaatagggcaagggatttttggcatccaactcatcttccctgatcatcgtgtagctgctctctttgcttttcaaatctcagggccgggcacagtggctcacacctgtaatcccagcactttgggaggatgaggcaggtggatctcttgaggtcaggagtccgagaccagcctggctaacacggtgaaatcccatctctactgaaaatgtagaaattagctgggcatggtggcaggcgtctgtaatcccagttacttgggaagctgaggcaggagaatcatttgaacctgggaggcggaggttgcagtgagccaagatcatgccactgcactctagcctgggtgacagagcaagactccatcttaaatgaaaataaaaagaaagaaaaatctcagcataggggccagcccatcagacagccccttcccgatcatccacactgacccagctgtgcagccgcatcgcccggttctcagtcctcgccttgcactgacactgcacgctcttttctgtattcatctgttcttgtctctcccaggaaagcaggcctctgttgtatccttcgtgtataggactgtactgggggcatgaacacaatcactcttttttgaagaatgaatgaatatatagaacactatggccccttctccccagacttcactgcacctgacactctcaacacaggcacaattatttatttgcaaacttgtaggaatgtgaaatctgcatgttggtgctctcctggccccacacaggaacttagctttcaaatgcaggcgtatgacgtaaatgtctatttaaccgagaagtggaaaatatgttctgaaggcacaatcataaggacagtgtttttgccttcggatcttaacacccagcattctattccttaggtgtcctgctgaatacccaattcctttgacatttaaaaataaagaatgcttccccaacagaaatatatcccattccctatgttactgtgcagatttggggacccaaaagttactttgcttctgtatattgataactaaggaaaaagtaggtttcagatcttaaactatcatgagaaatataatcagaatcgagacagagcctgacttgtgatttgcagttcccgtctcaacaattgcttcagctgcttagcttgacactgaattttttattaccttggtggcggtggggggagatgaaaagggagaatttcatgagctccagtgtcctcttttgcatcctttgaaattcaaatcatgttcagcaatgagcaattcatagacagggtgtaattgccgatacagcatataagatgtcctttcctcaccaaaacgcgatcagtctacacactgacccgaagaccacgcagaggagcggcactcctgacagacacagcctcagccgggcagtgtgttataactgtaaagagccttgtgccccagaggcctaattacatggcaaaatgct

SEQ ID NO: 1887334 - DNA, 4001 bp, Homo sapiens
gagccagtgtcccggggagatactaccagacttcctccacggaagacaggagcataaatgactggaagagcggagagctggatggagtatggtgcaaggaacaggtgcaggttgaacattcccgtcacactgtgaagtcccctgacatgggacctccatccctgttgcctctcccagtaccctgaacgtgcctggatgttggcgggatagatggataaggaaatctgtcacttcagtagagtttgggaaatgctcttctaaaaatttaaaagagatgataaaaatctgatatgacattttacatgagagagaaaaatctaaatacttacaaggaaatcaatacagttcctctgtgatgatattgttgaaaataccagagactcttcatggtttgctcagcatttgtttgtataaatctgagtctatgacatgcgtcactatgagggaggaccctttcactggttctatgtgctgatgtcctggatataccaggggctgctaccagtggtttggacctgcaagcctctctgcacagttgccgtggggaatggagctgcttgcattatttctcacttctctttgtgacatcatcattgtctacatcatctgcctctggtccctcctgcaggcctaggcatcttgggcaggtgactgaacactggagccagtgtccctgggagatagggaagtccctccccatgaagggacctaggttctttgtatcctctcctgtagtcctgggccaataactgactgctttatggaaaacacacacacacaaaacaaacaaacaaacaaagaaaccaccttgcattcatgccccaagactgagcagaccctgtggtacagtttattccccagaggccccatgggatcaagctgaagcccagctgcatcggagaccacatcctttttcatttttctttcctcccttcccaatatggctcccaccgacccctacatgtttcttgtgagtgcactccattgataaatgtcttgcacaaacatccccttctcaggttctgctccagggaactgtacccaagacactaccagcatctgtccctcaatgccacacacctgtcatcccacacatcaaaaggaatcccacgtaataggatacaagcacaactgcaaacacactcactgcccccgccccctccaacaaggagacaaatgaaaagtccatcactcatccagagaagactttttagagccactgttcttggagcctgttacctctgggtgagatccattttccccctatttctgttttaattttttatattttcaaaatgagaaaaaaaggtgggtgcaatggctcacatctgtaatcccagcactttgaaaggctgaggtgggaggatcactttagggcaggaggctgaggcaggagaatggctcgaaccagggaggcaaggttgtagtgagccatcatgccattgcagtccagcctgggtgacaagtgaaactccatctcagaaaaaaaaaattgataaaggaggaaggctgaacaaatcaccaagatcatgtcgcaggttggttgagactagaggcttctacagggatgatgaagtaaatgaaatgactgacaactctcataaatgttaatttgatgattaatctatttgataacaaagtaaattacctggtcacccagaaagactgccacagactctgtcctccgggagaattttgcttggccattgttcttccagagcatctcggagattctctctgtggaggtgggacagggaggtcttagtcacaatcacccattaccaacatcatttatacttatgcttgaacatttcagggggctgttagtttgagggatttttcttgtgtgaccattcttgtaaaactatggtcagccatgtgccagtttcatttttgagaattttatttgtcaggatagtgttgaaacatctttgtgaatctcctggctggctatactttcagggctaagccatacctgtgagtcttctgatttttagaggaaattctggggctccacctattttcatgatttttttccttaatgacctcagagcatgagcaggatattatagattggagtattggcatgggtttcagggtgcatttcttcgcaaatctgctttggagtcttgccaaaatgttgcatcacagccaaccgagtattacaaggggaggaatcttcattttcacttggtggtggagaaggtacattctgaagggcttgctcacatttctggctcctccttcctatatatcctcattccagttgctggtaatcttcagtttttcaatcagttcataatctctctctctctcacacacatacacccctggtggccaccacagtttgtccaaactaatagtggatgctgtgctctgattctctgcgtcagtgggctgtcctctattctcttctggtgacttccatggagcagcgtcggctgaggcttgccacttctctgacctttactgaaggccataaggaatcgataactcaatctgatattctgacatttaaaatgatgaattcctctaaagtctagctatctgatgaagtaagacatctgattcccaaggaacaagacatactgctatcgttaaacgtgcattgcagctctctatcccaggacaataacttcttgctggtcccaatccactctgacactttttctctgcaaccccattttgaataccaatttaatatgaatttcagtggtttgacagcaagtgatagaaatcctcacaacctagtagaaatcctcaaaatctacagaagactaaaagagaatacagtaggatctcctggaattctagggtaagagtaaacttaagcctctgttccattttgtgctgctgggaaaccaacaactccaaaatgtagtggcatagaacaaccattttatatgctctgactactgtgggtgaggaattcagacaggacatgacagggctggcatgggttgcatgtactccacaatgtctgggcctccgctggaggattcagagcctggggatatgcaggcatctgggaactagagtcctggagatgttatcatctgtgtgtgtggtggctgatgctggttgtcagcagaccctcatttggggctgtcactggaacatctatgtgacctctccatgtggcttgggctcctcacaacatggtggtcttaggatggtcagactctttatacagcggcacagaacaccaaaggcgaatgccccagcttagaaggcagaagcggacttgccttttgtgacctagctttagaagtcacacagcgttaattctgctgcattctcttggtcacaagcctaaccagactcaaaaggaggtgaactggactttacctcttaatgggaaaatgaatagcaaggtcttagaagagcatagggaatgggagatgatactgttttagtcatctttggaaaacacaatctggagcctccccatgatatttgcaaaccatcaagtacacgaacagtttctttacacctatttcatacttctttccttattcttatgagttgctttccaattcacctgtgggataggggagaagatgttattccatgatcttcaatattatgcttttaaaattgggtcagcaatccgtcataagtttgtttctttattttttttgaattagtgagatactctagataaaagagtattacacactaaattaaggttgtgtagctccaattacaaactaccaagaatgataatataatttttctgaatgggatccggtgccctccctggttcagacagctgggctgggacaagggtcatgggcccaagcatgacctcaggggctctctttaaaccaggcggacactctacaagggcctgtcacatttcctttgcatcattttgcttcccccagcttattttaaaactctgtgttgtcagacgcagaatttctattctcccattaaaagtatgcaccctcttagaattccccaagtgccctttgcaattagcaaggcctgtgtaaata

SEQ ID NO: 1887335 - DNA, 4001 bp, Homo sapiens
acttaaaaacaataacataaatcaaagggttaggacaaggagatatggatgtctgggagaacagctacaggttcttgaagattaagcttttcctgtgcagtttggtatcacagcctgataagcaatgcgtttgggaggttgatcctgcttgagagtaggatagagaaattaggaaagaaattaagagttctaaagggaatttttttagatttaggaaggtaaataattcaaaataacaactctaaaaattaaaaaaatctcaaatgtcttatgttcatcattatggaaataatgtttatcttctatccaagtcataatcacaagatgtgattagagatatttgtgacatatttgaatagtcttgggcctccaggatgttgaagatcagaaaactgtgtcatagctgggatcattgagagaaaagagggtgttcagcctggaccccttctaacaagagagctgatgatgtcctttgaatatgaaattctgatgtgcacaaaagaaaataaacttatttacatcatgttgctccagagaaaagaacaggaagcaaagagaagacacagggagagagattttgattcaacctaagaaagcaccttctgacattagtgtcagggagacctggggaagtggctctcctcccactggacgtcctcctgcagagggaggtgaccatctgcagggaccctgaggaggcgttttctagactgaacgggacagcaggccatatatccgctaaaggccttccttatcctgggattttactactctgggtcctcagagacaaatttttcatggtggttccattttgtttttagatatcacaccaccatgaccatgactaggttggcatgtaaagggggcagtcattagacatggcctcttcgcctgcaactgcgatgttggtgtggcccagagaagggggcaaggccttgtagtagaaagagtgtggatttggaatcgggcagttttacatttaaattctagctgttatgttgccttgtataagtcatgccacttttctaattattcgacttctctgcataatacctaagttaattagtacttgagtaatgatacttaagttaggtgacaggaactattcgaaagtgcctagctcccagcaggcgtccacaaatgcgaatttctctttctccaggactctgagtgtttcccttccgattgcagttattacatgatcgcacataatgttcaacagctcagctccctctggtacttccttctgccaaaactaggtctcagagactcactgtggctgaaaaaagtcaggaaggaaaataggccaagaggcaaagcacagcctggcctggtatctctcatcttcttcagaacccagaacatcacctttcccactaagttgcctcctttatttcttacttctctttgtgacatcatcattgtccacatcatctggcccctggtcccatctgtcttgggcaggtggctggaaatttgagccagtgtcccggggagatactaccagacttcctccacggaagacaggagcataaatgactggaagagcggagagctggatggagtatggtgcaaggaacaggtgcaggttgaacattcccgtcacactgtgaagtcccctgacatgggacctccatccctgttgcctctcccagtaccctgaacgtgcctggatgttggcgggatagatggataaggaaatctgtcacttcagtagagtttgggaaatgctcttctaaaaatttaaaagagatgataaaaatctgatatgacattttacatgagagagaaaaatctaaatacttacaaggaaatcaatacagttcctctgtgatgatattgttgaaaataccagagactcttcatggtttgctcagcatttgtttgtataaatctgagtctatgacatgcgtcactatgagggaggaccctttcactggttctatgtgctgatgtcctggatataccaggggctgctaccagtggtttggacctgcaagcctctctgcacagttgccgtggggaatggagctgcttgcattatttctcacttctctttgtgacatcatcattgtctacatcatctgcctctggtccctcctgcaggcctaggcatcttgggcaggtgactgaacactggagccagtgtccctgggagatagggaagtccctccccatgaagggacctaggttctttgtatcctctcctgtagtcctgggccaataactgactgctttatggaaaacacacacacacaaaacaaacaaacaaacaaagaaaccaccttgcattcatgccccaagactgagcagaccctgtggtacagtttattccccagaggccccatgggatcaagctgaagcccagctgcatcggagaccacatcctttttcatttttctttcctcccttcccaatatggctcccaccgacccctacatgtttcttgtgagtgcactccattgataaatgtcttgcacaaacatccccttctcaggttctgctccagggaactgtacccaagacactaccagcatctgtccctcaatgccacacacctgtcatcccacacatcaaaaggaatcccacgtaataggatacaagcacaactgcaaacacactcactgcccccgccccctccaacaaggagacaaatgaaaagtccatcactcatccagagaagactttttagagccactgttcttggagcctgttacctctgggtgagatccattttccccctatttctgttttaattttttatattttcaaaatgagaaaaaaaggtgggtgcaatggctcacatctgtaatcccagcactttgaaaggctgaggtgggaggatcactttagggcaggaggctgaggcaggagaatggctcgaaccagggaggcaaggttgtagtgagccatcatgccattgcagtccagcctgggtgacaagtgaaactccatctcagaaaaaaaaaattgataaaggaggaaggctgaacaaatcaccaagatcatgtcgcaggttggttgagactagaggcttctacagggatgatgaagtaaatgaaatgactgacaactctcataaatgttaatttgatgattaatctatttgataacaaagtaaattacctggtcacccagaaagactgccacagactctgtcctccgggagaattttgcttggccattgttcttccagagcatctcggagattctctctgtggaggtgggacagggaggtcttagtcacaatcacccattaccaacatcatttatacttatgcttgaacatttcagggggctgttagtttgagggatttttcttgtgtgaccattcttgtaaaactatggtcagccatgtgccagtttcatttttgagaattttatttgtcaggatagtgttgaaacatctttgtgaatctcctggctggctatactttcagggctaagccatacctgtgagtcttctgatttttagaggaaattctggggctccacctattttcatgatttttttccttaatgacctcagagcatgagcaggatattatagattggagtattggcatgggtttcagggtgcatttcttcgcaaatctgctttggagtcttgccaaaatgttgcatcacagccaaccgagtattacaaggggaggaatcttcattttcacttggtggtggagaaggtacattctgaagggcttgctcacatttctggctcctccttcctatatatcctcattccagttgctggtaatcttcagtttttcaatcagttcataatctctctctctctcacacacatacacccctggtggccaccacagtttgtccaaactaatagtggatgctgtgctctgattctctgcgtcagtgggctgtcctctattctcttctggtgacttccatggagcagcgtcggctgaggcttgccacttctctgacctttactgaaggccataaggaatcgataactcaatctgatattctgacatttaaaatga

SEQ ID NO: 1887336 - DNA, 4001 bp, Homo sapiens
gtgaggaggctggtgtacctggtgaaaactgctgtttaattcgctttttctcccctggggaagcatagcttagccaaaaaggctaaattctgagaagattaaattagtttgcataaaaggcagtgaatttctgggtaatttgttcaggcacccgtgtgtgccacttggattactttccccaattatgcagggtagtctgcaggtctttaggggattgggttttaataccctcactttcctaatgctaacatcctagggtttatgtgcccctccaaaggaaatgctgctttagcggatttggggatgaactcatgctggttggaaagtttcaagtgttgagtaaactcttccatattatgaaggcatgtataacactccctgtttaggattggaccaccacaggtttgcgtggctgtctgctactttcagacaatgcttacaaaatatttcctttttctaattctttatcaccatattaatcgtatacccctcttcacattcaactgaactaaaaacagacaaaaccaaaacatatagttgatctcccagttcctgccactgcccatcagctgcctataatttctcagcttcacaacttgttgtatttcagttaggatatattaaaacccagaaactaaggtacaagttgcattcttattctacagagaagaagggcacccactccacccctgagaggtggaggtcccttagacgttcctgacccatgcgatctccccttccctgaagacagggccagaactgactccccacccctccactggctgtacacatatatacacacatagatacatatatatgtgtaatatacatacactatatatacacatatatacatgtgtgtttacatatgtgtgtgtgtatatatatatgtatttacttatttatttccaaatatccctagtacactcttgtgattagaagcctcctgcttagggggtggagttcggggtgggagttgggtctgggttttaatctggagcaaaataaagactgggttttaaattttaggatagagcaaagaggagggtttcaggagtgagaggttgagaggtgcatctcggagttaggtaagtgtggcgtgataggaggggaagggtggaagttgcaagacctaaaaggaatatgaaatctgggcccatagtgtgcttaggctggtcctcaagctaggatgatgagctacaaggttctttttcccaccactttgcccttttcccactcatcccccagtttccctccactttactcccagcaaagcaagaggtgtctacatggagagagttgatcaaaacaaaacacatcactctgtagactgctggggacatacactgctggaggctgtaggtcagaggatgcaaacccagttgcctgcagtccaggcgagaagcctcggtaagggaggtactgggctcccacccactgtgggaggtggagaagcatggccagccggagctggtgtgccctgcctgatgtcattcaatgaagacaattctgcgttatcaaaatatgtctccctactgcccatcttaagaccctgttggtcttcataactcattctaaacaaccagcaagcagcagcagccctgagaatggttctccttcccatgaatggaaattcctgtgcaatctcacaggttgaatgctgtaatcaatgtacaggcacctggaacactgctcagcacaccgtgggttctcagtggaggttcagatgagacctgaatgtcaccaacaaagagctcttctgcgtgctccaggtataatccccataaacatctaagcataacttaccctgaacttcggtgtgagaaacacgaatccgtattgatccaaggatacttagatcccattgtggcaccgggttttccaagaccccaaggaagggaggcgctggcaccatgtctgtacatcagtgtgtgatgtccacgattattacaggatgagagggcactgctcatccccaggacccagagagctttgaaatactcatcctggtagctgttggaccagtctgaagtgagtcctagtattatccctgagttatccatagaaggaaagggaagaaccaaagaaacaaagtcttctcagcttatgtaaaatttaactcattcattcatgtattcatcaactttgtttgaacacctaagtcccaggcatggtctaggtgtggggttctgtataaacacaaaacaaataaaggtgagtgaggggaagagaagagccctcaggaagcagtctcttcaactggccaatgacttgcattttgtgcacagcagtcatatggagccctgcagtggaggccttgcctgctcccccaaccccttacctccacaccacaaggctgcttaccatgaacacctgtgactctgcctgagggattatttttttttctgatggcaggaatacacttagctcttatctcccttacaaagcaagccaaagtgctgctttgcagaagtgctgctttctagaagcagccctcaaaagccgataaacggctggtggatacataccccaaatgtctcacccctcaatgggataactctgaggtgtgctctatgctgcctgccagtggctgggggactttacaggctttattttccctttcctgtctcgctttcccactcccctaccagtgtttcctgggttcatctcccaaataaactatttgtatgcagatccttgtctcaggatctgcctctgagggaacccaaaccaaaggaccatattacttagatttttctggctagtgttagttttaaaaattccatcccacaccactatatggcacatttcaggtttagaaaacctgtttgccatgtgtataggccatagaaaatatctatgaaagaataatccttgtttggaatcaataaaagccaccttatccctgcactgtggcatgtgcctctatggataatagaaattaaaatatgatagaaaaggttgttttaagattttttttttagtaagtaattttcttaatatttcaatttctaaaaatggagtctggctttttttgctccatgcctaggattgtaggaaattttctagtataaaggtcaaggcacacctctagccatggtaaagcgtgctgggttaataagccccactgggctggctcggctcagccctcactcctgtctgcctgccccttgctcttctgatggccactgtcaccaagtaccatgttacagagtctccttgaaggcaaaagaaagaaaaaaaatcatcttcgttccagacagcctggaaaaaaatacacatagggaaaccaatatggaaaaaaagataaacagcaagcttcagaatttgtttagtgtcatgttacttgtctcccaaaagtcttgattttagccagacttccctcaggccagtttgaaataaggacattttgaactgttgaatcatagccaagctgcataaaaagcctgctgatatgctatttctgtgttttatgcaaaggctagtgggggaaaaacgtttttcaaacaggtctaaccacaaagaagtcacaaaactttatgaaaatctgctgaagatatttggctaagtgccttgtcctataagaattgtgtacatcagagaagacacaatggcagagataaacacatacacatacaccccacaccccacccggtttaacattttctctgaggcatatatcaacaagcaggacattgcctacttatcttacaaaagatagattcatctacaacagccacctacttggcatccctaaatccgctggagcagccaaaactggcttccgccttcacaggtgattctgagagcctgtctccaggggttacactcggaagtgacacagcagacagttttaagaacagtgacattgcaatctcagcccctgaggaaaagaaaagaaagaagagattacggaggaaagactaatggcttttgttaaaatacagtgaccatcgaacacaagatagaacatgcttagaacgtggaaaagcaaaggagaa

SEQ ID NO: 1887337 - DNA, 4001 bp, Homo sapiens
gccaggataggagtttggtgcccatccctggaactgaagggactacctacacctccctgagttgtgtctgtttccattcagtataattcaagttggtcaacatctataaagggacctcatataagtcagcaacatgctaagagctagaaatataagtttgaaacatgctaagagctgggaacacaaaggcccctgtcctcggtgggctcataatctcatgatgcaaacccacacttgaatgcccctaaccgtggtacagcagcatgcgggatgcaccacacattgcaggagaagggaaaggagcctacctggccgggcaaagctggaggagggcttcatcatagaaggtattagtcactttctgatgaagaagattccacaaagggcccatctccagaaattgattgagctggaatgcatcgcataacttggcctccccatcacgaagtggtagcagagccaagatgcttgactgtctgtctctgactcttgccgccccttccagtcctatttgcagatgtgaatgtctccactggtccagcctgaacactctgacatcatctaaatcatgagctgctctgacaataatgccaggcttgctaaacctgccaggacaccaagggccaggatgaaatttgaaattcaagctaagccttggacaaatgtcagctgccctgccaagtgccagggaatcctcccgctggccatctccacttggcagttccactggatcacagtttgtcttttgcttgatttgctttggttttgtcttctacattttactttaaaactctctgattttaagcctctgtgtcttggtaatgcagtaatttagaaaatgtaaagaagaagaaaatgatgtcagtgaaagctgaagcagttaaaatgtcagtaagctgggcagattttaatgtggggatggtgggagtccatgtgacctatgtggacaggggacctacccaagagacaagtggcaggtcgagctcaccaccagccacccccagggccaccagcttggctgaagtaggtgaaatccagaaaaggatggttcaggaagaaagaacagtccatagctccgaatctccctctcttttggacatataactacacgctcagtgtttggtccagctgatatgttcaccctcacttgttgacacctcttggtgtaggtaacactctcatcatccctgaagctgtggaacacagtaaatccgagaatattcaggggagcagagcagattgaagtttgactccaggccctcggcttaccagctggtgatctgggctagtcactgtgctttcctgtgggattagcactgatgtgttgacaaggaaataaggtaataatgtaataaaataataaataggcacatagtgtctgtttggtgtagagcaaacccctggaagtgatggctgttggtgttttattaccactgtgatcgcacatgagggaaatgtggcccagaggggcaggatttgacccagggctgataccatttttctaggtcaggccgtctctgcattgtgagaacactcagtgccccctgaaaatgtgagcaggacaagggcctcagggccacaagaaaccctctagcaaagatttggagatggtatcaggtgaaatccgaggctcattgtgaattgcaaagcttctatcttgtacaaccaaagagtgataaatactgagtgggtatcagatctctgcagctggaaacctggtggcaaaaatgcaggagttaaatccagttggaaggtcagtctcagcaaagatctgagctgaatggaaagtttctgatgaagtctcagattttcaatgattgcttcatcttttacagcctctctcccatccctggccctgggcaccctccctccacccaggctagaacttcacacagacttcaatcacaaacatcacaaaagtgtctcacaaaaatgttacctgcttccacggtaaaggatttctcagagtgaaagtcccggggtgcaggagtggcctgaagtgcgagcccgaatcctcgggctgactcaggaggaaacagctccaatgggaagggccctccctgatcacttgctccctcactttctgtggtcactgctcacatggcagtcacatggtggggcaaggagcggagcctcaggaaagttaaagaggtagggcttgactccagtccggctccttagtagctgtgtgatcctggacagtcatttattccctagatctgcactgtccaatgtagcagtcactagccacaggaagctatttgcatttacccttaattcaaataaaaggaaatacaatttaaaatcccacttcgctggtgcacttgccacactgctcaatagtgccctgtggctggtggccgctgtgttgacccagctccacagcgagtgctattggacagccctggtctaaatcttagtttccacctctgcaaaatgggtgctgccattggtagagggttaaagaagtttcagaaggctgctgtggagtaggtagccaaggatattagttttcttcctgtccctaacttcatgcttgaaatcgaagcctcttcctgggttttggtaaaaacaaaaccagggatgttcaggagtggctcaacctgggtcttctgtggctctaggtgggtgttcctgaccccagaaccccagggaattcagcttcctgtgagtacactgcagaggggagaggctcactgggtcctcagacccaaaacccttggagaagggacattcgtgaccacagcagcctctaaccaaaggtggcaccatcaggcaccccaggctgggagctggaggtggttcctgggtgtgagtggcccctcagtcccacctgggcctcctgttctcctccttcgacagagggatttccgtgctgtgtgaccctggttttcccagcatgctcaaatctattcctctgtacatgaagaatacttgcctccccctgaaaagacgggcactgcttaccctgacattgaggggagatggtttctcctgagaaggtggggagctgcctaagaagtcagtgccatggaagaagcccaatggccccagtggtgtcctattcgaaccctgcttactcagctgaggctgatgcatctccgttcctggcctctagaaaggaaatactcactctgaaaaagcaggtgggatccgagctctcagagagcctttctgtgctctgggggccgacttagccaagcctgctgtgccccaggccatctggcatctcccaccttttgggcaggggccccttccgctgcctggaggagcaatccgagcctggccagctactccagctcacccaggaggtggcccagaaaaaagggaggagactgcttcacgcttcccctgaaacaccctcctgccctgtcacccccacctctgcataactccatgtctctgctcttggcctaagggattgaatcagtaaaaatatgctttttaataggtcttacttcttgtcaaaaatatcacaggctgggcatgtgtgtatctacccgaatgtgtttgtaactcagataaaaacaatacactccatgaaaatgcccaagcaaaacaaatctttaatgacataactgcagtgacacatgcacgaaatcctggacgaaccccccccccggccccctgccgctgatggggcccttcccaggtgttccttcagatctgaagcatcctgggccccacgtgcacatgcactgctgccgtgtgactgggaagggccctcgctggaggttcctggtcctgtatcacgacgtttttgggaggcgctgtaaacacccaacatcatggaccctgatcctgtcctgagtatagccaccctcatttccaggtttgctcgtggacattgaagaatgagtgtggaagtaagtgacccagtacccccaggtggcgagcgagggaagagcagagggagggaggcccacggcaagtgagggagggcggccatggtcctggtggctgcaggagacacctcctcccctcctcccaagtctagccca

SEQ ID NO: 1887338 - DNA, 4001 bp, Homo sapiens
ataagaataataacctgattaaaaatgggcaaaggacctgaatagacattgttccaaagaagacatacaaatgggcaacaggtatatgaaaaagtcctcaactaatcatcagggaaatgcaaattaaaaccgcaaacaattatcacctcacacctgttaggatggcaattatgaaaaagtcaaaaggtaacctgtgttggtgaggatatggagaagagtgaacccttattcactgtgggtgggaatgtgaattagtagagcccggatgaaaacagcctgaagcttcctcaggaaaagacaaacagagctttgatatgatccagcaggtcccacttctggggacaaacccataggaaaggaggtcagtgggtagaagagctgcctgccctcccatgtccactgcagcactgctcactgtagcaaagacagggaaacaacccaagtgtccctcagcagaggccatttgtttttaaagctatcaggccacacctggccacaacattgttttactttaaaaaaaaacaaaaccacgttctagggcaggtgaaatctgggtgtactcacatctcacattagcatatagtgctccactgcagaacatgtgaactcggcagctcaagacaacccacacaacccacaattattctatgaaaatggttgactgaataactgtacatttaagcaagtctcaaccccactgtgtctcaacccctactgcctgtgctatcgttaagaggaactgtcccaagtcactctaccctgttttgcccagaaccctcctggtgacaggcagcctcagtgccttcttcctcctcactttcttcccttatagagttcaaatctcacatctttaggtttgttcagaactaaccagcaaaactgcacccagctgttttcctaacatcttccacgtgcagctccatgtatcacaaggaaagagattcctgaatgtacaaccgagccacaccaagtacaaagctgcacatcctaaaatctgcccactccctgtagtagctgctcctgcagctctcgctgtgggctcgcatggccacttcagctgtctaaacagaaacatttgcatccccagctccactcctttagctcctgcacagtgagaaagaaagagcgagtcaaacatgaaatccattaatatattaattcagctcaacaagcaaaacccaagagcccccagctcagcagagcctaccaggcatgactaatcagatccctagctgaagcgacgctctcttcctcggtcctttctggaagtgtgccggttatgcagcttcttcccccgagctcaggagactctgaaaaatgcagtttaaaaggatgtaaattaggaaaatgtaaatacccctggctccctcacacaggactaggtttcgtggtgggggaagttgctttacctcatcgagtcttggttttctcatcagtgatgacttgcagagttttgtgtgaagtcccagggccctggccccactacaaggagctcgaatttagcaggtctgcagtgggcctgggcagctgtaggtttaaaagttgcacagtgactgcgatgctacccagctgaatggcatcagcttagctcatggcttctcagatgtgacgtgcagactccgattcaatatctttaatgtaggctctgaggttctacatttctaacaagctcctggaggggccagtgctgctggcacgtggacaactctttgagtacccaggttccaggtctgtggctcccggtcttggctgcacttcagattggtccagtacctcctgactggataagatcttatgggactgttggtcaggaatccctaccctagccaagctgcaggagtgtgactcaagctggctgattatctggatcctctgtgaaagttgatcctggtgctcagtgactcaaagactgtggaaagtcagagttcatgaatccagattacaatgacatgcgagactgttcctggtccccgagattcagttcccagagctactatggcttattaggtacaggtgcaattttccttttgtaagatgctccatattattccaaatatggccttttttatttgtagaaaaaatatctttttgtcactgacaattaaagaaatataactgatatttctgtaagatgtaacatcccataattctgctctccctgtatcaacctgcatgttagtgttatcttccttatggggaagaggtgatagcaaccacctgcctggccccacacctccaccctcacctgaaaccccaggcatggagaacacacttgtcacctcccctgccttgtgtttgagtttctccctccgtaaagaagcgctctaaggctgggttttgataaaatgactccactgatggaggaaaactcctgcccagctgactctcacttctgggaaggactggtcctggccaaatcatgaaggagccaaggcttaaagaaggcctttcttcattcttttcttccagttatttgttcagttttcatctccagcctcctcagcatttgcctgataggaacctattgatgaaatatgtcccaaaacccttcaccaaagaactatttatccgtctagatcttcagtcctgtctgctttctaatatgaccaatagacaatccaagtgtgtagtcagtattggctattgacaccaacggccaataacagcttaattactcactgtcctgaggctgcgtgctctgatccagagacagattctagcagtgggttttaggtacgtttctcagtatcagtcagtacctgggagaaacttaggattcttatttctctcccccttgcttccacgtggcccatatagacactttattactaatcaagggtgagttgggtggcaagtaataacactgcccatcccacatgcttttcttacaatgtaagcttaactcaccagccatggaatgatggtgtctgtcccctctcattcagtctggctggatctttgcgactgccctgattaacggagtacaatgagaaggacatgattttacttccaaggctagcatgcgaaaggtgatatggcttcagcctggttctcttgggatgatcactcttagaagaaatttgaagaagcccaaatagccacatggagaagccacaaacagatattctggctggcagcccagcagaggtcccagccagcagccagcatcaactgccatgtgaagaagtgtgcctgcagggggtttcagaccccagctgccaagctgcttccagcctcccggtcttccaagctgaggatgcagacagtgtggagcagagataagccaccctacagtgctgttctcagatccctggctcgcagaactcaagagcactataaaacagttgctattttacattgccaagtttggcattgcttgtggcatcaaggacaggaaattccaagctctcggtcaatggttagtcatattgtcctgggtttgttttcagagaaagcacatgacagagtggccccttttctctcttacctctccagtgactgcaacgagaagtgccaagggccagacaggctttctctctgaaagttctcttttcctaatacagcaaccaggcttggctggttctgcactgagcacttcagacaagcagggtcccttgtgctgtgactccatttcctcctgctattgtaggaattctctggtctggttgatggagttaagcttaaggtctgattgtgagtgcataaaaaggaatatactgcccagcacttggttctaagctctgagctgccttatgcatattctcataaattctcatgaagaatttcccattgagtccaacctagtttaatggaattctgtttggagacttggaaccaaagccccaattaataataaaatgttgctttgctttcctttgccagtttagcctatgcatgtattttcctcagagagcccacggaggagagagagatggctaaaacaagaagagatcggtggatgactacatctgccggccagaagaccactctgatagctttca

SEQ ID NO: 1887339 - DNA, 4001 bp, Homo sapiens
gtaggcctatgtttctagtttttgctctgatactaattagctaagcaaccttgagaaagacatcttacctttgtaggccttcattttcttatctttaaaatgagctatagtgttttctatatgagctaccacacaggaattttcaaaagaacaaacactatcacataaatatattttggaggtggagagcaccatataattgcaaacactatcatgaatagaaaataaaagagtctttgagtaggccagtactttgaaaacatttagtccagtcctcttatgttagtgatgagtatactggatactagaaggttacagaacttgttcaaagtcacagaattggttgatgccagagcatagaaaaaaacacaagaattaaatcacccattttatttcttttaaaattcgacttccagctgtccagcttacctgatctctccagattattaaatggtttctctcctcccatccccagtgctcactttctgtggctcatgattagtctcctccgactctttgaagaggtcagagtcactgtcgttggcatttgtgtaaaatctttctacccttccgtgattctaggcttttagggttcaactttaaactgatatcccagccggttccctggatggctggtcatgctgggatcttcatcttctggtctgtctatactaaaccaaactgccttgaaaatcataaatgagtatcttgactttgcttatttgatcacctgactttgcactttatttgagtaaatcttccagacagatggtgccacccagctgtttgggcatttatacagcacagatgacttttctgccccacagtcaacaactgcccaagtcagctcatgtcctcagcccttccccattctctggcatatttttggtgaattatcattcaggtactcccagagatggaaaattagtccttttaattgcattctcacaatccatgggattttaagcagtaagattaggtacaaagtttatcaacaaattctggtcttctggtttctagacaagttattctggtacataatactatcttttgttattaattttcattagtgttatgattattattttgaagaacatgaaaaatagaaataccttattcattaacccacaactcaatttgtatttttctcattcaaggaaaggatgttatattacttgcctttgaatctcatcagcttattatttcttttgacagtgaaaaaagtcaggaaatccaagcactttctgttggcagtagtcagatgaaactcatatatacaaaatggaatgaaaaactgtctgatgagctagacttgaggcaggaggacaggcatcatatatcttattgttttatttgccttccttgatcctccaataactattcccaattttgctttgcatcatctgttctcccaaaatatactccttaggcttttatatttataggtcctacttgccttttcattcgttttatgttctttttttcccccttttctttcctctccaattattctatggaggttttttattgactttagcctttgatagctctatgtatttgaaagtagccattcaccacctcctgtggagaagtaccaataaagtgcaaaaccattatcacaaaactgtttctcaaagttttgtcacatcccagacagtttcatgaagatatgctgaaaagatttgttttgtttgtttttgctttagggattgctaagggcaacaggcagtcttgaaagggattgtaaatcatgacttattgtgacacatcttgtttgttgcagggggtatttgctttctttgggccaaaaatttcaaaattttgttcaaaactatttttcgatgtcccatgccatatcagaaaaatagtgcatgttttcttgcctgaaatggagaaaactctccaaattgcttttaaataatgtccaatctcaggccaataagcactgtattaagtagtaacagactgtgaggagacagagagagacagagactcagagacagagacagagattctagaatatgcaaagacaacaaattccagaaggctattacaaaatggaagcaagaactaacgtctgccaaggtagatcatctgaatacctggactctctaaggaatgctcattgtgttaggtctctttttaggaaactctgtggtgttgagataggccactgggagttctacttgcatgattttactctgacatggtgggccgctattcaggcagtgtcaacatacttgcagtgatggaagatgtttgggtttattctgagtggaaaatgatgtatttttgtttgtttgtttgtttatctgtactttggaagtcctgattgaggagcctgaagatatccacactgagcattgatctgtgcatcagtaagtctggatctaaagaggaagatccacactggagcacaggtcttctacaatgtagtcatcgtgccctgtgtgggggccaccatgggatgggccccaagaacatggtgtgaacaacaacagcaaaaatggtcttgacctcagagagttcaggtctactctgatgggaaagaaaatattacacagtgcccacctttccgatggagctgaaggagacggagtcagagggacttaaaacagtaacaacaacaacaaagtgacatggaatccatgaaagggagtgtgacagataagcaacttttcaactgtattcgcatttatagagtgttttaggaaggtaaatattgaaaggaacacaacgaagtaaatgaaattagaaatgcacattttattttgtgaaaatacaattttttgtctgtactaggactatatcaaccagaaagatagctctccatgagacatcatgactctctaaaagatgcttattgtacagatgatgtttttctaaatttacagatctttttcacctttagtgtttatgcctggtatacattttatcctatattatcttgcacttttatcattcatgaaacattcagcaagtctttactagctcgttggtgaaagcaaaatgaatacacatttctccccatttggcagacattttctgagggtgtaaatttaataaagttatactgagaacttcttaactacctcctatacacaagatatgcacacactgagagaatggtgcagatgtgttaattagtatacatagaaaagtaaataacaattcatggcaatcattgtatgtaggcaatcagtagggtttctattagattcattagttctttcattcactcttccaattattcatttgaaatatatcttcacatttcattcaaaacctaagattctctgattgtatgatatgatggcttcaaatccactcacttgtctaggtttaccttgaactcttctttatgatgtgtgtgctctctttccaaacagccctaagaaaagaggtcagaggacataatttctctttcttcagaggcgtattctctgaaactcctggaagcatgctatgaaagcaagtaatattctctccatatctacttgctaaaagaattagtgtatatatgcacataaacatacaaacagagatacataaatacatgtattttctaaatgtggtgtcaatatctcatcaatattctgtatctcatcctggattgagttacttatcccaaggagtctcttgctaaactgtagaataaagtatcactcagggcattttgatatatccaaattaatgcagctattttaatgccaccatttttatccaggaggttgtttgtagaattttttttatttggtcccattaaaatatgaactcactgcatttctttgttcttatttatcagggaggccacttaagagaagtcataattatcagcccattcttgatcctatctccaacacaattcccatccctcgagtgaggtaggcaaataaattttcccattgtgccttcatttgtatttatgcttatttcctgtctattcaaaattctccatattttcagtccaaattgcagaagaagctagtttggttggctta

SEQ ID NO: 1887340 - DNA, 4001 bp, Homo sapiens
taccatgaagaatctgcagcttccttggtggcaagatacagtatggcagacttgggagttatttctgaaagtttaacatacatttagtttcttccaccctctgagagattttataagttatttaatattctcataattggatccttatggcttaaattagccagagtaggtactgttttttagaattgaactgtgggagataaataactatttctggattcgaacctgagggactggaacagtggtggacacaaaagaaagaaaaagtaaggaagatgagaagaggatagagcctgaaagagaaaaagaagacgttttcttgccttatggagaaattgaaataggcagtatgacaagagggaagcagagccaaaacaggattgaaaaacttcagtatatccacaaagcaacaagcaaatatcaatagacacacaccctgggacttgaacacagaagccctgagtaacctgaattatcaggaagcctttggaagcaggcagcaccctgttaggaggagagagcttccaacatgattgctgaaaacagaaagattccttggaaagcagttccatgacagtttagatgaattcaaatggtctgtgtacatgttttggacattgtcacaaacaggaaacatgggattgagccattggatacagtgcctgccttgcttgtcagccagggccacaggggccagtgccagcgtaatgcagcagaaacgcacagaaacacttgggtgccaacaaaacacagagcatcctggaggctgctcttagacaacagcgggacaaaaatgccttccccacagaatttgaatggtcaaagaaaatcccatagtgtgaggtactggaaattgttttcttaatggaacatcagaacgatttacatagtaatggaactgtctaaagtttagcaatgtcctgggtttccagactgctcttgccaacgttagaccaaagattatacagggaaggttatgatagatgtgaaatagaagaaagggagaaacgaacatgactatgaatccatgggtgtgttttgcaagtgtttataatgtttcattttatttatttgctcatgtatttgttcttttgctttgtttttgctctgacccattccacaaaacacttaggcaagagttatttgtgacatatttagtgctttttacacttttattttttgaagtatgtgttggtaatcattaccttgataatatatacaatctgtttcctatcctgcatcctgtcgatgctccttctctagtgaatttgtaaggaacttttgatgaaagcaaacaaaatatgcaatcatcaacatgcttaacactcacagccatcattctcatatggaaaattgtttaaatcacccattcaaacatgttcattgtggcaatcacaccacctccataaattgtgttgtgaaagagaaaacacacacactctcccactgatgttcctgcctacaataactcaaggcaaaagctaaaggctacaatttgctgtcaggctgtcaagttctggacccactgggcacgttgatttcaattttcctttctgcagatgcaatatctggcatcttggggctacagagacttctaagtaggagataactacaatattctaaaaaggaaggggaaaaagaagagattaactctcacagcttcccaatgcatgttagcataaaaatacaacagtactctttataattttcattttagaggttatgaaaggcagtttaaacgtggcttataaacttcacctgaattattccgcagtgtgtatcgcagtattctgcaccacgtgggtcctgttcacctattatcacagaagtttagaggtggaagggacaataaatgtttgacaaggtgttaacagtccatatctccatgtcttccattcacgtggctcaccatccacatattcaggaagtacttttatctttcaaaacagtttggtgataagaaaagaaaatgcatcgtgtgaatgcacaaagaaaagtgcattgtgatgtcacaatggagcagctttgattctctttcctctgaacactagagaggccatgtcaaagctagaccctgggagtccaagcacctctgcaaatccacttctcacaaacatgataattatgatggtaggtaatgttatcggtctatttgtgtccctccaagcttcatatattgaagttcagccccaggatctcataatgtgatattatttggaaatagggccattgcagatataactagttcaaaggaagtcatacagaagtagggtgggtcctaatccaatacaactgatgtccttatacaattggaaatgtgaacacaaacatgcacacacggagcatgcaggtgaaggtgaaggcaaagatctataagccaaggaatgccaaagattaccagcaaaccatcaaaagctaagagagggatgaaacagattctctgtcacagcctcagaaggaaccaaccctgctggcactttgatgttggacttctgaatcctagaactgtgaggcaacacattcctgttgctcatgccatccagtatggcacttttgttatagcagccctaatacagacaaagatactaattaattaaaaccataaacctctaataacatgagcatatatcatagagctctttcaagattatttccccaagtcaagaaagacatagggcagagatttttgttttaaatgagctgatggaagtgatgggacttactctcagcttacactcaaaggcaataaaaaaagctgagtctagaaaggtgtttcagaactgactttctgcagattctgtgacaatagtccctggcctatattggtgaaaagaactggaaaggagaagaagactatgactcctagatagtctctgttctctcctgtctgtttcaccaggttagcaatgcatcttcaacaataaaatgttgaaggagatgggtgctataaactcagatcagagtgggagtgtgggagtagaaataacaatgacaataataacatctttgcttccataaagttttcccattatctatctctttgaactttacctacaaatacatgagatagtagcccacttattattatccatttttgcagaaagggaagctgagactctaagaagtaaaatgaattattcaatcagttcaggccacagctcggccaatgctctttctaggaaaccatgcttgaagaaaatgctttccatggagaatttgtgtaagaacatagttacaaaaataaaaaaggagccattaaacttcattaaattcctgagggttctgaatccttgctgcttgactgatgcaagcacatgtaggaaggtggcctgggaagggatggtggagtgaacgaactgagagacccctgaggaatacaaggactcccttcactgtttgaaaagtagtagaatagagcttccaatgtgccctctggatctagtatacatgaataaactcaagagagggccacaccaggcctgctggcattggtctacccaagcagagctcctgggactatgtggccacagcctctgcacacaaggctctaacctaccatttgatggcagcagcccagggttaaacctctgcaaacaagggattgattgcatcactgcaacctcaaaaggcagaaaatcttccagcttctccaaacttccttagaaatcccttattgattcgtcacctgggtatttatatagtctttcgaaaatctttcatatattcaatgcatttcctctctagaaataagaacataagattacttccctaatttttgtgtttcatagaaaggggaggcattagtaccttcttcctttgtaggcttgtctgagaactccatgaaatcagggatgcgaaggggatggtgtagagtagaatgtttctaatttgttcccacttccattcccattcatgcagtaatctaagtcaaaataattacaaatagctcctgacctaagttgactgcactgagaatagaaagaagcaaaaagaaaagaggc

SEQ ID NO: 1887341 - DNA, 4001 bp, Homo sapiens
ataactcatttcattattaggaaggaaataaatgtaaggacattttatagttcatggactacctggggtggctgtagatttaagctttataactaggtagccagaacattttccaaattacattgaagaaccactccagagaagatgactcatgtctcatacctgtgacactgagcaggagaaatgctcctggaggcctgatcagtgttgtcttgggaagctgaaggttttcgacatcagccccaccgaagcaatgcatcacctgcttcagccagtaagttaccttgcaatcaatgttctacgagtatatgtgagtggtagccgccagatctccattcttctagggtgaccaacaatcttagtgtgtccaggactgtactggttttagggccgaaagtcctaaattgcaggaagttactcattccttggcagactgggatggtggtcatcatactgcaccatagctgcaagaggacaagaaggcaaatttctactacttgtacagtagataattccttaaaatataccagcactctcaaccttaccaggctaccaaaacacaatagcaaatgccactactcagaagtgatgagtgagctacttcttcttaaattgctaactaataggagcttaaagtatcagaaaaaaattaaaatatattcagtggacatctttattttttaatcttccggtcaatatagatgccatccacctgatctcagtgattgattggtccacaggtggtcatgatacatcaggatgatcacagtttatctggcttctacaggacaggtttatatacacatagagtgggctacatctgtgtctcttaccttgcctccaacaaggaggaaaagagatgcttcttagtgggaactgaatgagttcaacatatggaggggaacagaatcaaaagcagagagaaagcgagagatgaagagaacaacagagagtgagaaagaagggagtaagagggaactgataatgctctgtgagtttctaagaagaccttctcagcatatcatgctaaattccttaataaagtacccttttatttaaagtggactggctttccagctcttacaatcaatagaacatgtacttgcaggatttttatttttgcaaggtttgatgcttgcaccctggaaaggcctgttgcagatgcatgctgcctgagtatggagctctgggaaaacagttaaaattactatagttagggagaaaaggcagactcctagcacacaaaattattatcctttttaaaatatgcctgtgtatggtttattacatctagatttaatttattcccaattaagtcatcttatcaccaggttgttatatattccatttcctaaatacctgtatttgcttgtttctctatatctcatataaaaatatcaactcctattcataattctttgcatcattttcttcagcccacattccattaatattttctgtacaggaataacttttatgattaagatttgattcttactttgggtccataatgccaatggtttaattaatgtctctcttttgctattcaaatttccaagcctctatctttggggcctcttttgttaggacttgcatttaagatttttttttaatgtgctttttctgggatgatacaaatgtttagtttttaaacactagaaagcaaaaacaagaaaagatagaaaattttgttaacaaatacctggaatgtctattttctttaatcattttaaaagccttatagcaattccatgtatataagctgcagggtacgcaatacaccagcagtcattcaagcaccgattttgcgaggaataaaccatgccactcaaggctctgttccagggaaagatgcttaccatcctcaaggctctgttccagggaaagatgtttaccatcctgtgaaaccgcacatttccagggaagaggatgagcaatagcaggacccatgatgcactgaagttctcctggtggatcagtccaggcctgcggggcatcccttgcctaacctaggtctcaaggccccagagggtggctacatgcttgccttgatgcatgctgctgattaccagacaaaggaggagtagataagtgacaaggaactaaagacctgcttgctttccctggaacttgaagaaaccacttcctcagcttgtctactatttctagcacttaaagatgaagtcgaatgtaaacataaagctgtcgtcattgtaaagcccttaaggtgtgttaaaattctgagtattagcagtatttttccttctcagacggaatctcatgtgaaaatatgaatgcagatttgacacgtatgtagaggatatcagtgctctatcaataatactttctacattttttgtgtctttaatttatgtatcctgcaaggtctttcttaaccctaaaatctgactgaagcctcatcctgttgcatctgttatcaactgaaaatcaaacctgtctgcctttcctttcttcctatcaccaccaaactgctttaaagagaaacctgcatctgctctttccgttcctgcttattaccttgaaagtcatacagctatctgggaatttctttttctctcaaagaagaaaaataagtaaagcaataatattaaacttaccaaatataacggatcattagttcccacccttttgcaacttcccttctacattgcacattaatgagtaccctgtcatgggaactctccttgttttgccttgatgacattctatcttcctgattaaaaaaaaaataactctgtgtattatcatccttctttcaacctttaaatataattccctataggtcttatttttccttgttttcattattttcttccatgtctacatcatttattttggttatcgtatgcctccattattgcaaatctgtcaaccaatcctaaaatatttatctgcaggcctagccacccaccaaattccggtttcacttccccaaacaaacactcaggtgaacctccaggtataaggcttggtgtcaaaaaatgaattgattttcctaaatcactcctacttaatttcctctctttctgtctgggttaccatcccaccccaattttctaggcacctggttgtgaaacttcaacattttccccctttattccacatatgggatcagttgccaggctaagtccattaggctgccatatacattcctcttattctaccctcttttcaatgctttcattcttttatttgcctcctggatttttgccaccagcctcccattcagtgattttcaagtgtgagcttcagcagaaggtgaggcgggagagtggggtgggcaaagcatgtcccattaggaagtcctatcaagatattggcagggaatggaggtatttgtaatgtgcagacaaggtgctttatgaggcttggccatgaaaatgactcatgcgttgttttcctacagaatctagggatacacacaacccagggagatgatccacacggagaaggaacattttagattttgttttccctttatacttatcctgttttcagaaacaaaatagaaaaagaatatcagctttattaatatctaatgtaggtcttgacaccggccctctgccctgctcctatgttcccagacaatgaataggaagtgtggagctcctcaaacctgggagatgggcagcagcaccactgcttgctcctgtgttagccacgtagtgtgttatgtttcaggttagggaaacacataaatgaatttacagattatttatcaagctttaaaaaaaatcgaaaaataaaatgttaacacattctagtaaaattagaaggcaatataaataagcacaaggaaacaaaagaaatggcagaactgatacttctatttctagtataagtattttgtcactcatgttgcaacaggacataatgataatttaaccagatctgacaaggaatagacctcaaacatctaaattaacgagaagactatttgaaatatggctatgtttccattttcagtgaagacgaaattt

SEQ ID NO: 1887342 - DNA, 4001 bp, Homo sapiens
tattggtatttttctctatttaaaatctctgacataaggtcccaaatacatagtaattgtgagttttagctttaatatttaattgaccaagatagaagaaaattggtgccccacagaattaggaacgtggtaaagtgtggaagcactggaatcatgaaccaaagttatgagtctcagaactggcctagctctttcataaagccaattcacttagcactagtctcatgaggggcaaatagggttagctcttccaattccttggctgcatacatttctatattactactacttttaatggcaaaaaccacaattacttttgcgccaacctaatactaagtatttaaactctccttagttgatcttacacatcatcaactcccaggaaagtggaacactgaatcaaatacacttcttgttcataaaggtatatttgatttctaccatgtaatggagtttcatcttttaaaacaactattatgaatcactctcttctcaaaaaccttccctcgcctccaaacagaaaccactctgaaagaagcagatcttagtgaatttttggaagctgtggccttgtctgatagactctgtttaaacaccacttttacattaaatgccaaatcctcagctctatgcactgcctcattagttattaatgaggcaacatatttgttcaaaatttatggttgttgatttgctcccatcactgtatgaaatattaacatagcatttgtacttgcaaccatttgcagacattagattgtgcatttgcatattcatgaacactcataaatgtttaaggagacagcatagaaagcatgggcgctgtcagacagacagtaaaaaggcatatttacagcgttaataagtatttgagtttataggccaaaatgatgagcaacaaattaagtgaaattctggtttgcctattgcagagacctagggattttgctattttttaaagcttgtaaacttgaaattcatttcatagatgctgaataaacgcttattgtttagtcacaaaatatatgcactctgtgcaaagaacttcctaagagtatcaggctcttggagatttcatctcactctttctgagatgcagtttttgtctgccttggggttcccttctatcaaagtaatgtgggaaggcaaatgtgtcatatacttaaccagaattattttctgttttggttccacagaggaacttggacaaatgatatgtttggtgtaacaacaacagccaatgtacttgactcagtctgtcaatttatacaaactaagtcctggcaatgaaaaggttcaagcatggagcactaatggacaatatgagggagaggcataaaccatccaactaacaaacaaacgcttgatttacaaataatccatgcatacgaatgtctgccaacatcccaccaaacccattccactataagaaatctcaccccttgccacattcctaagagtcatggtgaaaaatctagacccttttggaagttttatgggtaaatgatggagaaagtattacattaaatctctacctcacactatatacaaaaattaattccaaatattttaagagaattgatgatgaaaggaaaagctataaaacttatattatgtaaaacaaatataggaaaataatcttcctgacctcagggcaatgggaaaaaaggaattaagccatcctgtgggcagtatcactacctgtgccatgccattgttaaatgtctcaaatatcatctctgggtgaatgaatgtgtgagatagctcaccatatccttgtaccagcaggagagggaggtcatagattggaacatgggttgtagttggcttctgttgccatggcctaattgttctgctggtcacttcttgcccccttggcattactgctgaaatctgcaactagtagatccatggtcttttctttcttggcacagcaaggatattcttttcctctctggtgacacgctgtgctgcaacttttgctcattctattcatctatgaggtctgaaagttcttttcatttattctttagcctaggcaacctcctcaacaggccatggcaacaaggccacttcaccatccctgcagtgattcctcagtaattcaccaccagaagcaccatcaccttccttctgtgtccctccacaaagccagttgggacttctagatatttttgaaggcatattgaactagatggtgttctagggtactaatttcaagctgttgttctcctaaccatgccaccatagcagcaattttattctgatgcatagatttgtatagagagggtaagaaattattccatgaagtgatcccttctcagaattttaaataagaaatggaaaaactttctgtactctcagagttttcataatttcccctggggtaggagggcaggtgcagaaggtgagtccaacatgtttgtatctgatctcgtctctttctgacccccttcccttccatacaatcatcttgtaccaagagggatgtgcttttccttcctcttttctgtgcagcaatatcctctcttacatcctattctctttccagaaatacattgactctgctcctttcactagggctatggtggcagaaaggatacagggaaaaacacactgactttttgagaagagaataaaatctaacctcctatgcacacagcctttgatgagtcagaaacaacacacattacacacagacatacacacacagattcacacacacacagatacacacacacatgttaacttctactaatgggaagaaatttatttattaattcaacacacatttgttgtgactccatgtaagcacagtgactctcatgcaaacacagtggtgcacaaacaggaagctatttttaaaaataaagctgtattctacacttcaaggaaagaaataagtaataaacaaaataaataatactgaatatatcaagttattataaaatgctaaaaagaaataaggccaggtaagaccatagagaatgatagatgaatggaaaaatgctttattggatgtggtgactagggaaggcctttatcataagataacatttaagcagggaacggaacaaagataaagaaacagccacgtggacgtgtggtggaagatcgtttgaaggaggagaagagcaagtcaaaggccctgaggcaagagcacactgggcatgttcaaggttggtcatgaaagccactacagtgggagtgcagggatgagtgggaagggagtgggaggtaagatcagagggacggtgagaggatggatcataagcttagatcacaaatttggatctgcatgatttgggaagccactgaagaatttctagcagaaagattatacgatttcatttacattttcaaggaagccatctggctactatgttgggaacaaatttaggtggcacaagtgtggaagctgagagaccagctaggaggtgactacaatattccaggtgggacaggctcagactgaggaattagctgggaaggagagagaaatagtaacattccgggggaatgtgagatttgcatatggggtgtaagaaaaagaatcacagttactctatggtctgggacctgagcaaccagaattatactgatatgaagccaacagtaggaggagcaatttgggggtggggatcagagctcagttttgggcaggttcaggaggcagatctcaactgaagggaggccaaacaagcagctgcattctagagttcaaggagtaggtccaggccagatcagcaactaagacagtaactagcatacagatgacatttaaggccatatactaggtgggatctcccagggtgggattttagacagaagagaaaacagggtggatcttgatctctggagcactctgatgtttggaggtcatgggtctgaggagaaactagcaaaagagacagagcagttactggggcagaaggaaaagagaagaatgttgaaataaagaagtgtccaaggaggagagactgtgttgagtacagcctgtc

SEQ ID NO: 1887343 - DNA, 4001 bp, Homo sapiens
tgggagtgtaagactctggagcagagttaagggaaatgtgcctggaaagggaaataaagcccaagggcaagtatgaacctgtcattgagagtaaaaaggatgagaggccaagggcaatggctcatgcctataatcccagcactttgggaggctgaggcgggaggatcacttgagcccaggagtttgagactagccccggcaacatagagagaccctgtctgtacaaaaattttttttttgagacggagtttcgcttttgttgcccaggctggagtgcatgatgcgatatcggctcactgcaacctctgccttccgggttcaagcaattctcctgcctcagtctcccgagtagctgagatcacaggcacgcaccaccacacctggctgattttgtatttttagtagagatggggtttctctatgttggtcaggctggtcttgaactcccgacctcaggtgatccccatgccttggcctcccaaagtgctgggataacaagcgtgagccactgcgcccagcctgtacatttttttttttttaaattagccaagtgtggtggtgtgcacctgtagtcccagctactcaggaggctgaggtgggaggatcacttgagcctgggatggtgaggctgctgtgaactatgattgtccagcctggacaagtgaaaccttgtctcaaaaaaaaaaaagggtaagagctcaacttttcgaaaaaatacccatgctatctgacctaccaccctggcttagtaaagggtactgccattatgtttctagctcagagttctcaatccactgccaaagcctcagttactatcacccaaacctgttatccaggtgtcaacttcatggacagaatatgttgcacttagcagctgcattacgacaacagagttccccggaactgaattgttgttacttccagcattagacgcaggcattaatttacatatacctgcatacacatcactgtaaacgtgcctgagtccagcttctccttttgcagagagatttgatagcccctggatgtggatgcagggcttcacacctgatgcctgggatgatcatccataacgcacaatgtggaaaatgcccttccaggaaaccaggctgctgtgtgtgaacctagtgagcaagcatagaaacaggaaggctgagattagagcctgctctacagcgttttgatgtttcctgagccactgctgaggctctgagagctgatcaaaggtacctctgcaggctcaaattaacacagagttggtgaatcaggccagcacctgcctgcaaatagcagcatatttcaccaaatcaggttaatcttttcatcaaggcaggaggtggcaatcctttcataaaaccttcacaagttaagtttattcctgttgtaccttagctttctgaaggaaaagtaatgaatggcctgttcaattttcttcccttggaggtacgtatttattttaaagctgatctttacctcatggtgtataccattgaagacctccagccctaaagaacttgccttgtttcaaaaatggtggaggttttggggttgaaagagaagaatgggaaggcattgtcataaatcttcactttccttttaatgcaggtgggatttataacttcaagtatttgtataagagcagtacctcacctctgtttggggaaatatagctaaaaagccataatttttgcagagagaaagcagaaaggcgcagcacagagtaaactatagccactggatagatctaaagattctaacagagctcaaataaaaaacagaaactaacttaaaaaaaaaaaaaaaggtactagcctaaggctgcaggctcagaaaaccgatacctacaaagggaaatgaaatgcatcgaataatagattaagtgttaatacttacgcagagaagcttcaaaacagatttcttgccttggaggagttcattatttcaggcattggctagtcataagacttaggaaaccaagaggatgtgtcagatcctgcaagtctctccaagaagcagatgtggtcacaaggaaatggaatgggggaggggagggaggaattcgagagagcagaaaaataagttgagatatttggaaaatagagcttgcatatgattatctgccaaagcaacccccaaatttttattgaacagtataataaaaatggagacagttccaagttgtttcatttcggggatagggtgtggaaagagtgtgagcaaacagaatcaccccatgactgggggccccattacagctggtaaccacagacaagctgaactttgaagagtgtcagtttcctcagctacacaatgggaataacacgtcccattagggttgtgaggactaaatatgtatatgtggtattcaacaaatacaataataatataatagataataatttaatataaggtgtttgataagtacatcttttccttctcaaattaatccaacactttcacttcaatactgggtttacagatgataccagaaaataacactataatggaaagagctattgttatttatctatttgtttttgagatggagtctcattcttgcccaggctggaatgcagtggcgtgatctcctctcactgcaacctccgcctcccaagtccaggcgatcctcctgcttcagcctcccaagtagctgggattacaggcatgcaccaccatgctctgctaatctttgtatttttagtagagatggggtttcaccatgttggccaggctggtctcgaactcctagcctcaagtgatctgcccaccttggcctctcaaagccctgggattacagatgtgagccatcacgcctggctgggctatttttttgtttaagtttcttacttttattttttcaattaacaaaagtatatatttatggtatacaacatggtgttttgatatgtgtatacattgtgaaatgactgaatcaagctgttaattagagaatttaaaataaatgatgttctagattgtgtagatttattgtacaagcaggctaggggaaaaaatgttttgttcgttttgttttgttttgttttgttttgagacagagtctcgctctgtcgcccaggctggagtgcagtggcgcgatctcggctcactgcaagctctgcctcccaggttcacgccattctcctgcctcagcctcccgagtagctgggactacaggtgcccgctaccacgcccggctaattttttgtatttttagtagagatggggtttcaccgtgttaaccaggatggtctcgatctcctgacctcgtgatccgctggcctcggcctccccaagtgctgggattacaggcgtgagccacagcacccggccaatgttttggttttttttttgagacagtgccttgctctgttgcccatgctggagtgcagtggcgcaaccacggctcactgcagcctcaaactcctgggctctagcaatcctcctgcctcagcctcccaagtagttgggactaaaggtgcacaccaccatgcctggctaatttttaatttttttgtagagacaagatctcgctatgctgcccagactggtaagcccccacgctcagctgggaaaagatgttgactaatgtaatacacttgggcttttcacagaatcattcaagtaaatcaaatttcaaaatgaaaatcaggctaggcacagtggctcacacttgtaatcccagcactttgggaagccgaggcagaaggattgcttgagctcaggagtttgggaccagcctgagcaacacagcgagacttcatctctataaaattttaaaagctaggcctggtggagctcacctgtagtcctaggtactcaggaggctgaggcaggaggatcatttgagcccaggagttcaagactgcaatgagctatgaccacatcactgcattccagcctgggtggcacagcaagatccattctcaaaacaataaccaccaccaccaaaaaatccctgaaaatcattggaaagaaattaaaagcaataaaacattaataat

SEQ ID NO: 1887344 - DNA, 4001 bp, Homo sapiens
cttgagacattactaatcaccaggatgtgcctagctgataccaaatcaattatgaatcctttattcacatacaatatggcaaatcatacactgtacctgactcaatttttagaagagagcttttatttttcatacccaagagaaaacaaaaagtaaaccaaggattttttttagcatctttctcatgagcaaacattttatattactttaaaaaacttccttaggctgggcgcagtggctcacacctgtaatcccagcactttgggaggccaaggcgggcagatcacgaggtcaggagatcgagaccatcctggttaacacggtgaaaccccgtcctactacaaatacaaaaaattagccgggtgtggtggtaggcgcctgtagtcccagctactgagccgagatcaggccactgcactccagtctgagagacagagtgagactccatctcaaaaaaaaaaaaaaaaaaaaaaaaaaaacttttttaaacttaatttttatagtatattcaagtatactgatttatatgaaatatataactgtatctcataatagatacattgaggcaaataataggtatgattttataggttggtgcaaaagtaattgtgattttgccattaaaagtaattaaaagtaatggcaaaaccgcaattttgcaccaatttatattgtatatttctaatatagcaataattaggaggagtcaagagattatattcatttttattatttcccaaatgataagatttcataaattcttataaagaatgaatcttaaggtatgtaaagaaaaacatttgtaaaagcaagttcaaaatgaatttcagcagattatgtgttaccatcatgaataaatgtcctctaccaccaaacaaacaaacaaacaaaataaaacaaaacgaaaaaacatttaagaggatggagaatcacaggatgacatgcaaactgtaaaaaccatcaaactttattacagtatatgaaatgccccccttgtaagaggtggggggcgaagttgttgacctaaataacttggaaaacgatggagttcgtaagactgaaaggaaagggaattgtaaatagaaacgtctccagtaggtaaagttgtttcctgaaggaatatgtgttaattctgataccatgcacattcatgctgaaattttaaaaataaagtaaatgaatgtcagaaggtgggagtcaagatttatttttatagtgggaggttacagacaagcagaagaagaaagtaaaggattatatttgaagatatcagcatgaactcatattacttaatacagctaaacaccactgttctgtgcgggaaacgcatgaggggagaagaaaagacacacacacaatacctttaagggtaaacaagttttatcccatgtaaatggcaatgcagatataataagcaaatgatataataataagaaaattgatataatcagcagagtgatagaataagcaaattgcaatgagaagggaagaagaaaaagaaatatatatgtaagagaaaagaatatatatatatgaaatataaatatatataagaaatatatatgtaagaaatataaatatatatattatatataagaaatatatataatataaataagaaatataaatatatattatatatattatatataagaaatataaatatatgtaatatatattatatatataagaaatataaatatatataatatatatattatatataagaaatattaatatatattatatataagaaatataaatatatataatatatataagaaaaaagagaaatatatgtgtgtgtgtgtgtatgtgtatatatatatatatatgtgcatcctccttaccagacaatggaggactcaccaccagaccgggaagcaacagcctgggctccagagtcggctggacactctgtgtccggctcctctttcgtgcacagacgaggagaggtctcatgaagcttcagcacagtctgggatcctggctctttctgtaacaagttgttgtgcatgaggcccggtcacgagggcccttcactactgggctcaaggaacacaaataggtcaacttgtttttgtgattgtctattgtttttcaataactaacatataggaatagattgaaatagagatttctctgaaacagagctggatgaacgcctcaaggggctcacacaacctgttctgggacttggtgatcattgtttgtgtccatgttcaattgagttcagatttaatatttaacttttcctccacaaccacacatgactgtactaggaccatgcaactaataattcctattaaagaaaaacaatacgcagtaggggaaacaaaacaactgacaaaaatataaggaaagactgatttcctttgttatacaagctgaagagaattgcagaataccaggcaaatgagtgggaaaagtatacacatggctttttgaaaacaaaattatagtacaaagataataagaattttgtaaaagttatctatgaattggaataagggaaaatactgaaatgtaaatttcaaaatcttaaacaagaaagtgtacataggttaattgttctaatattcactgggtccagatgtactgtactgagataacaagagtaacaaaatattacttgaagattttagctatctgagaggttagtcaaaataaataattcaataattgggaatcataaattttattttattttatttgaaatggagtctcactctgtcacccaggctggagtatagatgctggatctgggctcactgcaacgtctgcctcagaagttcaagggatcctcccacctcagcctcctgagtagctaggattacaggtgcccaccaccacacctggctaatttttatacttctagtagagacggggtttcaccacgttggccaagctggtctggaactcctgatcacaagtgatccatctgtctctgcctcccaaagttctgggattactggctgagccaccatgcctggcggggagttgtaaattttcaaaggtcatgtacttgtaatcttgaagattaatttaatggatgttatgggttaagtataatgcaaataataaaatatttttgtaacatttggtttcttccaaaataaaaaaaaaacagatggaatattactcaatactctgttattttcctatcatttaattttttaatgaataaatgctatattaagttgtaatttcccttcttccctaggaaataatagggaaatacacacactcgtaatgagcctttttagaaacctgatacttccttttccttatatggaaaatagacttcctactcttatccaaattacagtttagtgtgaaaactggacaacatataaattccagtaaaattacatagtatacgaattgccaaaaatattgaaaactacgtaatatgatgggtttgagataatggagattttttcaatgccactcttttcatagttttcagagtcacaatacaccaacaaggctttcagatacattggtggtatgcctgcattgtgtattagtctttaaaaggttggttatttagcctgggaaatgctatgtgtacatttacctgtacacatagcaagcatgcttttaagggctattcccattaagtaatctatttctgaaatcacttcaagactcttcttgatgcccaaattttgcatttctcctgtgttacgagaacagcatgcttgattttcacgtgaatcttagcctcactttaaacttgaccttacgtagtgacaatttaaggatcccttactcattttggaatacattatcaagttatatttttgaatcgtctgacattgaccaaaattttgtctcaattgtaatagcttccttattcctgaaatcctgcatgcagtttgtgtgtcaggataaggaggatgcactttgtttgaaagtccatctctctggtctttcatgcagcatacttatgcatgactttgctatttccttttccttccatgaaaactctttaacag

SEQ ID NO: 1887345 - DNA, 4001 bp, Homo sapiens
aaaacctcgggcaaataacttgcatgctttaagccttggttttcacacctgaaaaatgaaagtaaacagcattcaccttgcttatctcacaagacttttttgtaagaagctcattgaagactggatgtcagaaccagatagaaccacacagaagggaggcccaaggttaccagagaccatctgagcctgcccctcactgaggaggctggtgtggcaggaaggggccgggccattctctggacacatctgtgggtcctctggcatgaagtcatttggagaaggagaggacatggggctgcaggttcctacatgatccatcctcacgtctgatcctaaagctcactttcacagcttgcccaatgccgggcagggaggataaaagtgccctggctgagaatccatccagataccactggctcttccaagattaaacagacagtgcatctgactcccaaagcatctcaaagcagagctggcctttggttcaacagggccaaaggcaggaatgggtggggccctgccttctcctgccactcaaggtgggcatgagggatctacaggcatagccacttgttttgaggacatctagggtgtggcaagccagagaaagcccatagaagagagctaatgacacgggccagggagcgtgtgtggctgaaccaactgggcaggcccagtacacgtggaggtgcacctcattgtcctggactgggactcaggaaacctggctcttcttcctactctgtgtggccttgggcaagtcacatcaccttcccaggtttctatagattaatggattggaccagaatcttgcttttcagatgggtgcatttaggcccattactcagcggcaaaaagctaaaagttactcatcttcccagaatgccaattttacttggagattggaagaaacagtttttcattttcttaaacagctttatgagatataattcacatctcatacaattcacccattgaaaatgtacaattcagtgctttttaatgtattcatagggttgtcccagcatccccaccatcaattttagatcatttccattaccccaaacgggagaaacccattccctttggccgccacctcccaccacccagtccttccagctcctggcaaccacgaatctactttccatctctacaggtttgcgtgtttgggacatttcatataaatagaatcatacactatgtgttcttggaaggctgatttttatattaaaacaaacagttgtgttatgaaaagcatgccaaaattacattaatttctaaatcacaaaagacatttcagagaaatctcccatgtgtctagcagcttcatgctcagtctgagtctcctctggggacagtaattcactctcttctgcctccggggccacttggtggaaattctggaaggcactggacttaaggatctagattcaacttttgaaagaccccaaggctcagctagataaaccaacagagtgattttccggggaaaaagtcactaatcatgattttctgttaccattttcctcctcatcccctcatctttccatcttatctcacctccacacagaggtctacatttagaataactgaaaaaaaataagagaatgatcccactatttcagatttccatgtgaaagaataacaggttgcggctgacctccctgtccactcaccttgtaccattcttccagtctctgggaggagcttctttgtctgttcccagtacagggccttggaatatgatagtgaagcccagttccagctccacaaatatttgatggaagaaagaaatggaagaaagcctgaaggaagaaaatgaagaagcaagggagagggagagaaaaactaggaattcgggatcctaccagccctctgtctccccatccccacaccatgctacaatgcagcccccaaggggctttgaatttgcgcgttatcaatcacctgcttctcagaaatcattactgccccaaattaagacaacgaaaccaactgctcactaaggaatttgaaaatgaagaactgtgagtgggttggggagggttattagaccagaaacagagcacttttcactgacagagtgcttttgcatatattatctcatttgaccttcccagaagtctggtgagaaagccaaggccaggattctgtaggctgttttagacgaaaaacaaaaaacaaaaaacccagcacttaggtagaatgcagtgctttggcacacacaggttctagaatcactcagctttgtttaaatctgagctctggccctgtgtgaccttgggaccagtgcctgaccttggttatgctaaggggcacaggcaactgcacagtgtcatgtggggcaggtgggacctcacagggaggagggtctgcaggtgcctgggtctgtcctgcattctctcagcatcctgctcagagcctgcacagcgggctgtgctatgcttgtgctggaggagaggggtcctgtcccccttgttcttcctttgtattgggcataaagggagtctttagggggagggacaaatggcgcaagagcacagggcagtctgagcatagatgtgggctgtttcaggaggtgctgggaatgccagctgcccaggacatggagacagcaagcaggaagccaccaggccacttgagggtcacccattgaacgatttggcacacgtctctgcaacctctcgaaagatcagtttcctcatctgccttctcagaggattgtggcgagggtcaaaatgaaaagtacacgaagatctgttgcccagaacctggcctccagacagtacttggaaagggtcctgtacccacagctagaagagctggagcggagaccttgacccatggcctaggtgcttgtccagggcccctgcagggacacggggctgcctccctgtgcccagtgcaccatctgctccatgcgcttgacctcagagctgtttaatgacatctgtcccaaggcacctgctgccctaggatacagaggcgctaattaatgtattcatgaggcacagagaaccttttctgtttaatacacacttctcaggacgtcacaaatccagaggttaaaaggaattttcctaaacaaaaaatgcacaaactaagcttgtctgataggaatccaagccagcaaagactcctcctgagagctgcctgggtccccaggctatgagagggcatttgtcccatggaaggggcgtatgcaccccactctgtgcctcacctggagggctggggcagctccaatgtgtaaacccaaaggaaatggcacccaggctgggctgagcgctgacctgaccacctcaggcttttctgaaggccctccgacctcatgggattggcagtcagagcagccctgtgtccctgaagccactatcataacgtggtgttctctcgcgaggctgctctgggggatgggaaatcacagagcacttttcccacccactgtcaccaaaccttcaaaactggctcaccaccagatgcagttgctgatgcctttaatcccagcactttgggaggctgaggtgggcagatcacctgaggtcaggagtttgagaccagcctggccaacatggtgaaaccccgtctctactaaaaaaatacaaaaattagccagccatggtggtgggcacctgtaatcccagctactcgagaggctgaggtaggagaatcacttgaacccgggaggccgaggttgcagtgagccaagatcatgccattgcactccagcctggacaacaagagtgaaactctatctcaaacaaacaaacaaacaaacaaaataactggcttaccttcttgctgtggatagagccggagggcagaagctgtgaggggtccagtaacataggtaatgctgaccacgcagagctgcatggtgacttctggggccccgaggcatctttgccttcataagacctttcttccaaaaaacattacaaatatattttgcaattgcattgatatgaagatgtcttagtttgttttctgttgcttatatc

SEQ ID NO: 1887346 - DNA, 4001 bp, Homo sapiens
agacacaggacggggaacatcacacaccagggcctgtcatggggtagggtgaggggggagggatagcattaggagatatacctaatgtaaatgacaaattaatgggtgcagcacaccaacctggcacacgtatacatatgtaacaaacctgcacgttgtgcacatgtaccctagaacctaaagtataattttaaaaaaagaaaagaaatagtgtagttattaagagcagttaccctcgagtcagactgagtttgaatcctggctattgcacttattggccttatgagctttggaggctggataatcttctctatgcctcagtgtcctcctctataaaataggattcctgatagtacttaactcatagggttgttgtgaaagttagatgagttagcaatgtcacatgctcagggttgtgcagggcacgtcctaaacacttaagatgcattatctttatttcagttcatgctctacaagtatttgccatccttttctgcttttaaagcactatcagcaaatagcaggaaaagtcatcattgtcagagtaacacaccgtactttgacccacacccacaaaataaggcttaaggaaatttttttgcatgaacgtctgcaaattttggtttttcctcctaaatacctcctgctccattatagatgtctgagaattcagaaaatgaccactgcttttacagtaaatttggcaaaggtgtatattttctttccacccaaaaagggaactggaattctgtatccccagtccttattcctgggtgtccttgaatttgtgcctggtttgagggagattggctgaggattcaataacatcactctcatgaagtgctagccccgcatatcctggacgctccgtagggatatattcccattctttgttcttccgacctgtttaccagccttgactattgctacagctgtggcaagccttcccctccctgccccaccgggatgatgactgcatagagacaattgttttataaacccagtcaaggagcaaggaggaaggaaatgcacatatgatctcctaaataaaattagaccaccaaggctgagaaacgtttaatttgtggcccatgttacagaactggcttcctcagatagggaattttctttttgccaattctttgattccagaagtagccatgtcaggtggcaggggtggcatctctccatggtgcccaattccctggctggcatttgaatgagcagggtccttttaatcctgtggctgcttaccccagagtaatagcagatggaatctgctttttattacttttgcctgttgcccctgagtccacaccagaaaccactcaggcaggatctggaaagcatacaaacctcatcaaataaaacggaggaacaagtccactctggcttctgagaactccaggaactcctggaagaaggtgcttcatctctgcagtgcttggaaccctggctgacaaggaaaacggtgggtttacggggttcaaggaaaatagagtgtcacctaaaaaccagacctgaaagtggggggatgtggaatgccatcctctatagcagttttttctgtagtagctaattactgaggcactaaatcaattatttgtagaaaccctgttcctgaggacctagcttctgcaaagcaatttattcccaaagatatcctttctgcctctttctttctcccagaaatttattctctgcttcccctactgggaaaagagttgcccctttaagtatagctcatagaatttccacataggccaagaatcatccatcaagagcatacacaatcagagaaatctttatataaacactgcagttcccctactgcacgacaatgaccagatttccgatgtccccaccttccacataccctggcactggtgttgtccagctgtggtcagttcatccaaagggcgggttttcaatgctcacgtttcctcctgttacgggctccagctttacctgcctcttattgttctccttcgcctagagaatgctgagtgtaacaatgaccccaggaattcaagccaaggagcccaagaggggccagatggcgccttcattcctggtgccagaactgtggcgtttctctgaatgtaagactttcacgcagactctaaaatattatcacgtaagcaaagaaatttgttttttgttcagaaagaatgactggttattgtcaaagttctgcaacatctgtgccttagtactggctgttaagtggccttagaggaagaccatttgataatcagcccagaaggccaaagaattgtatgacttccaggtgggccccagtgtatgcttgggtggggaaacatattggtgcacatgcttttctcagtgggaactagaacgtgaactctgaacatttcctgcacctattctaagcttcacagaaagttttatgttgaaattctgttaagccttgctgtagatgaagaggtacgaactgtctgaaaatcatgttaaatgtctgttaaagggccaggcatggtgcctcatgactgtaatcccaacactttgggaggctgaagtgagaggattgcttgagcccaggagtttgggaccagctaggcaacatagtgagaccctgtccctacaaaaataaatacacaaataaattagctgggtgtggtggtacacgcctgtggtctcagctacttgggaggctgaggtaagaggattgcatgagcccaggctgcagtccagcctgggtgacagactaagatcctgtctcaaaaaatatataaataaataaataatgaatgtttgttaagagacatgaatcatttttgtgtgtatagttgatccttgaacaatgtagaggttaggggtatgaagcccccacccccgaccagtgtggtaaaaaaatcatatgtaagttttggctaccccaaaatttaatatcctactgttgaccagaatacttactgatgacataaggtcgattaacacatattttgtatgttatatgtattatatgatttattcttacaataaagtgagagaaaagaaaatgttaaagtcataaggaagagaaaatatattcactatattaagtagaagtgggtcatcataaacaccttcatccttgtcatcttgacactgagtaggcggaggaataggaggggttggtcttgccgtctcaggggtgatggaggcagaagaaaatctgcaaaaggtaaacccatattgttcaagggtcaactctatgtttaaatgtatgagttaacaattttttacataggaagaaatacaggtgctttgaggaaactgttctgagtgaaagctgggaattttctgattccaggctctgtattaaacatttctggttgtccagggaatgatcatattcaatttcagtgcataccaggacttcctagggaaattgattggtttgtttcttaaaatgtgtacaggcagggcaattctgactgaggacaaggtagataagtgtagatggatgcctctgagaaacattccaggatcaataactatctcccaccacggttagaagaccaccaagtagttgctctaaagagtgaaagttaagtaagaaaatacagagtcatactgactgtgagaaaacctgcagaattaaatcttactgggggaaatcagagcatagaaataaggagaggatagaccagaggtcaatacattttttgtaagggacctaatgctaaaatatttagtgtcttctagtatcactagatgatgctaaatatcttagactctgcgggtcgcagggtctctgtcaaaactactcatctctattgtggtagcaggaaggcagccacagatgctttgtcgataaatgggcatgtttgtgttccactaaagctatttataaacactgagctttgaattccatgtaattgtcatgtatcacaaaatattcgtctcttaattttttgtcaaccatttgaaaatattaaagccattcttacctcatgagttgtacaaaaccaggcagtgggttggattgggtggta

SEQ ID NO: 1887347 - DNA, 4001 bp, Homo sapiens
cctggctgctgcagttcaggcatttggaagttcttgtgtgctggagatgtggctgggattcgtctcacagtggaggcaaggaattgcaacttttctctattattgtacaccttgaaggcgaggttaattaaatcctgttgtggggtttgagggctggaatttaatttttggagttttatttaatgtcaggagcagattgggtaataaaatgtattttgagaataagacggccttttgaccttttagggtctagggctgtaaagtgtctcagggttgctgctgaacgagtcatgaattgggctggatttttatatttgatgaaaaagagcctaaatgctatctgatttgggataaagaaaaaggagcattaaccttgactatgcctttagctctccagccacctttttaagagtaaattgctgggcaggtgggggagggctagtcacggaatgaaactgtaagccggaccgggtgtgaggaggggaggtgataaaaggattatagggtggaggagcagaggctgaggaagaattgggacctagctcggcctggcgaggagcagcctggggaggaggggagaggtcagatgggtctgtagaaaaggaatattagaaagactcagcgacgcttggggttgggactgaggggacaggtgggagggtaaaaaggaagatttgggacaagttgcactgggcacagagactagggagggaccaatgtgtaaaagaatgcctggacatcaggcacctcagaccatttgcccattttacgacaagaattatttagatcttgcaggatggaaaaattgaaagtgctgttttccggctatttggaactactgtcgagtttgtattggggtcaagcggcattgcagaagaaaataagacacttagattttaggtcaggtgagagttgaagaggttttaagttcttaagaacacaggccaaaggaaaagaaggaggaacggagggtggaattttgcccatagtgaaggaggcaagtttaaagaaaagggagagtagagacacggagggaagcggtttgggggttcttaccctccagaaaagcaggaaaggggtcagggcacagagatacaaggttggggtgcagaaataagggatcagggcacagagaaataagaggttggggtgtggaaataagggatcggggtgcagagatataagaggtcggggcacggaaataagggattggggtgcagagataagaggtcagtgcgtggaaataagggattggggggcagagatataagaggttggggtgtggaaataagggattggggcacagagatacgaggttggggtacttgccctcctctaaaaaagcgggacttgccactaagagtgaaggagaaggggttgggggtttcttgccccccagaaaggcagagaaggggtagagacacagagagaagtggttggggtacttgtcccttccccagaaaagcgggacttgccgctaagggtgaaggaccaaggcaggcgtccctgcatggtctgacacctctgaaacctggaagaataatcagagaggcttccctgcaatgattaaacaccaagggaaggctgccttccctagtccgtgaccagcgccagagttttgggtccacggataaaacgtgtctcctttgtctctaccagaaaatgaaaggaattgaaattaagagaagggagagatattgaagtgtggcgccaagattgaaaggagaaagaggttgagggatagtgagggaggttggaaaagagagtaaaaagaggccacttactggatttgaaattggtgagatgtttcttgggctggttggtctaaggacctgaggttgtaggtggatctttctcacggagcaaagagcaggaggacagggtactgatctcccaagggaggtccccctatccgagtcacatcaccaaatttcatgagcgtccgtgtgaagagaccaccaaacaggctttgtgtgagcaacatggctgtttatttcacctgggtgcaggcgggctgagtccaaaaagacagtcagcgaagggagataggggtggggctgttttataagatttgggcaggtaaaggaaaattacagtcaaagggggtttgttctctggtgggcaggagtgggggtcgcaaggtgctcagtgggggtgctttttgagccaggatgagccaggaaaaggactttcacaaggtaatgtcatcacttaagggaaggaccagccatttacacttcttttgtggtggaatgtcatcagttaaggcggggcagggcattttcacttcttttgtgattcttcagttacttcaggccatctgggcatgtacatgcaagtcacaggggatgcaatggcttggcttgggctcagaggcctgacaaagccccttagggaaattatcctgtgagtccaccaaaggatttgtgcttatgaggtggactcctagaaatgagggttctgcatcgtgaccgagccactatatcctcctaagtgtctgtacatatgtgtgtgtgcatttctgtgtgtccatatgtgtgcatatgtgtatgtgtgcatgagtgttcatatgcgtgtgtgtgcacttgtattatggtcatgtgtgtgcatgtgcttatgtgtgcatgtatgtgcgtgtgtgcatgcctgtgtattaatatgtgtgtgcatgtatgtgtgtgcatatgtgtgtgtgtgtggtctttatctgcctgttggattgatatgggaatatgggaatgctatttggctggtgccgaccttcttctgatctgcacaatggcactgcagcactgtagaaaatatattgattgattgattgattgatctttttgaaattaaatgagcagggatctgggagtcatgagacctgggatctgaccagtggatcagtcagcagatatctattgagcacagggaagcactatgctgggcactatggaggaatcgaagaagcaaatgatactcttctgcctccagttaataaaagtgtgtggggcagtcaccaatttctgttgggccctctgactatgaatcctgaaatcacaaaactctggagttgcacaggggcatgggaatgccttcgccctgtcctcttacctcctggatgaggaagctgaggatgagggaattgagctgactcatgtcatgttccattggagtgtcctgaattccggtctgtgattattgaccagttgaacagctctgcctttccgaaaagatcacatgggctctgctctcatttttgccaggggacccagcagaaatgaggcctgcccatcttcagaatttatcttctatcagatgggcagggcagcccctcacaagtgctgggaagctcagcaaaaatgtccttggaaggtacttttcgtccatagcagggggatgaaagtgactcggattagaactgcattattataatgattacacaacaattaacttttatcttgcaataactaaattccagatgctttgccgagggctttatatgcatcatctattttaactttcagaacacgatgtgagtactattattatctgtggtttatgtgtaaggacactgaagctcagagaagtgacaagacttgcccagtgacacatagttggtgcctggatttgcgcatgaataccagctccagtggttgagcaaaaaatctcatcaacttaagttattttcgtttctacgattcccaaggacagtctaccatttatttattactaaaagcagttgctatttctatgttaatgtagacaaagtgtgtgctagtccccctttataaagccaaggttgggcatcagacagatacatttctagtaactaacccttttcatcgaaggttggcagcatcctgtcaaacttcataggcatacggggagaggaactgtaattaagtctgtggtgtaacagactaaaacagaatgcgaaattactggagtcttgtggtttggggaaattctcctcccaccccactagaaagacaaatagttttcaaaataattat

SEQ ID NO: 1887348 - DNA, 4001 bp, Homo sapiens
ggtgaaaccccatgtccacaaaaaattagctaggcatagtggtgagcacctacagtcccagctacttggggtgctgaggtgggaggatcacttgagccggggaggcagagagtgcagtaggcagagacagcgtcaccgcattccagccggggcaacagagcctgaccctgtcttaaaaacaaacaaacaaacaaacatcatacacacacacttctttttttgagacggagtctcgctctgtcgcccaggctggagtgcagtggcgggatctcggctcactgcaagctccgcctcccgggttcacgccattctcctgcctcagcctcccgagtagctgggaatacagacgcccgccaccacgcccggccaagttttttttttttttttttttgtatttttagtagggatggggtttcaccgtgttagccaggatggtctcaatctcctgacctcgtaatccgcccgcctcggcctctcaaagtgctggcattacaggcgtgagccaccgcgcccggccacacacacacttcttaaactcacttaactctaaaggtacacacaggaaagaaagctggtggtgttatttacatatgaggcaaagttgacaatagcaagcattattagaaataaagaggaacatttcacaattggaaatattcaaaagagctggaatacatttgtcttatttaaggcatagagagaagactcgcatggctgtagacaaaactgattggaggatgaccaggtactaggctgtatctgtaatctaggtgagagagcatggctcaggggtaatatacgtgggaatggcttggatttggtttatatattggagctagatctttgatgagattgagtgaaggctgcagtgggaaagggtaagcaagaatgactcctagacaccgctcagcaataaaaagcacttaaaatatttatcaatatatagatgaattccaacataattatgctcaatgaacagcccccacttccctaaagattacgtgcgatacaattccatttatataaaacaccaagaaaaacaggttgggcacagtggctcacatctgcaatcccaacactttgggaggctgaggcagagggtcaattgaagctaggagttccagagcaggctgggcaacacagagagaccccatatgtttaaaaaaaaacaaaaagctagacatggcggtcctcacctgcagtctcagctactcgggaggctgaagcagttggattgcttaagggcaggagtttgaggctacagtgggtcccgatcgtgtcactgcactcccgcctgggtgacagagcaagcgagacccagtctgtataaaaagatatttaaaaactccaggaaattcaaactatagtgacaaaaagcagatgggtgggagggggaggagggaaggagggagagaggaaagggttacagagagacgggaggaacatcttcactgttgattgtgatgatggtttcacagtgtatacatgtgtcaagatgtatcaaactgcacactttaatttgcgccactgcactccagcccaggtgacagagtaaggtcgctttccccgggctcggccggcctctccacccggcgctcgggtgctgcgctgcctgttcctgttgccacttcgtgtaagttagcgcaggcaacaacacacaagaccagcacacgtgaaatggtccattttaatgcactgcccccagggaaaggaacattaccggcttctggccatgtcgtcttcccagtcccagatggcggttccgggtttgggctccgaggcccttcgcagcactagggcggcgcgagtagggccgccctccgagccatgctgcggtccgaggtgacgcgcgcacgcgagttcgcggacacgcacgagacgcccgggccacggaggcgcggggctggcccagggtccccgccaggccgagctctagggctgccggcccggcccggtgacccccgcgctcccctccgtccgctaaggccccgcggcgccgcgcatgcgccccgccgccgcccccgcccccaccgcgcccgcgcccgcgcccaacgcccccaccgcggcccgcgggccatggaacctgccaaggccggcgcggttcgagcgctccggtgcgcgcgttcaggcgcctttcccccgtgagcccggcggcgctcggaccgggccgcccgccgccgggcagctccgcccgcctctagcgccggctgggcgcgcccccgccccggtgcccgcgcgtgcgcgcccccgccgccgcgtgtgagtgtgagtgtgagtgtgagtgggtgtgggtgcgagccgggccgccgacgatgccgcggggccgccccccgaagcccagggagagcaaggcgcgcggcgactccggtaaggcccgcggccgcgccctcgcgccccgccggcggccggtgcggggcccgcgccctgccagtccccggatgcggcgcggggggcgccgggagcggcggggcgggggcgggggccgcgcagacccgggccgccgccgccgccgactggccgggcgggccgcagcgcgggcggaatgatacgggcgagtcgccgcccggcccctccgcgcgctgggcctactttcctgggccgggcggcggctgaggcgggaggcgggaggcgggtgagggagcaggcggccgcctcctgcgcgcgccctgcccccgctggccctgccgcggcccgcgctgaacttgagggaaagtggccgccccgtgttccgtcccggggccggagggccgcggggcgcgctggggaggcggcctggccagagcccgggcctgcggataccgcgccccgggctcctcccggacggcgcccccgcccgaccctgcgcggcgccggctgccccggggacgttgggctcggcccacagggaggccgtggagcgcggggtcgtgcacacagtaggcgccagcgttgtccgggaagcgcagggtcgtgcacacagtgtgctccagtgttatctggggcgcgctgtggggcgtgcatacagtaggcgccattgtgatccgggaacttgaaccctgagcctctgcagacgctgtgggtagtgcatacagtaggcgccattgtgatccggggggctggaaccctgggcatctggagagcgctgtgggtcgtgcaaacagtaggcaccattgtgatccgggtagcttgaacctggagcttctggagagcgctgtgggtcgtgcatacagtaggcatcagtgttatgtggggagcgctagatcgtgcacacagtaggcgtcaggaagtgttttccccagtaatttattctccatggtactttgctaaagtcatgaaataactcagattttgttttccaaggaaggagaaaggcccagaatttaagagcaggcagacacacaaccgggcacccccagaccctggcccttccagcagtcaggaattgacttgccttccaaagccccagcccggagcttgaggaacggactttcctgcgcagggggatcggggcgcactcgccggtgccgcggttcccaggtcgagggcagtggggtagggggcgccgcgctttttctcgcgggcgccgtggttcccgtgcggccttggacgcgagtctccccctgcaggcctggtccctggtcctggtcacccgtgcaactggagcggcgctccgcgtttggaaagggttttgaagggggttctaagggggagtgggcgcctaggactccctatgggagtcggtgggttataccttgactgccgttgatttttatttaactgtttagcttagtgactcaagtgttccccttttcttggggatgagtaaactgaggctcattaaagagcttgtgaccaaacaacacaggtgccccagagaaaggtcgggcctggaaactacaaaggattgtgttaattttgtgtttaggaagaaagaggtaatgggtaggaatcaatgtaaacttattcataggccacaccaaaccaggaattcttgtcgtgattgcacttggtagagttaacac

SEQ ID NO: 1887349 - DNA, 4001 bp, Homo sapiens
ctcctgcccacccctccacccgtctccagttctgcccccaaaaaggcagctgaagtcatttcaaggcttcctactttgtttctgttccagaggccaagcctcctggtaagactgaggaaagcgtaaagcaccttgagttccatcctcccaaagggccctgtagctggagtcagagcctgcgtttcagcctctccttcaccaccatctaatttattgccttgagcaagccacttgcactccctaggcctgcctgttgcttcttccttccagagcacgaggaaatacaaggaatgaaaaggatcgagaccagcctggcccttgctaggtctcttctgggcaaatcacatgctcttccatccactaagtgaggccacagatgtcagaatgcagccatccagtgtgtccagttcaaagtagaaactgctcggtggatgggagttgcaatgatcttgaaaatgagtgtttggaaattgactgtctctgagattcctcgcagctatatttgatttgaatccccttccccaaaaccacctattgtgttgggagttaatcaaaccacactgataggcaaatggacatgccaatctctctctccctctctccctctctctcctcttgtcagataaggtttgagggagagaggaatcagcaggggttccccctagctgtccctccaccatcataagccatgcacaattgtcagtactcacctctgccctcctccttctccgggacaccctgcctcctctctccaggcctccatgggctccttggcctctgaattcctgtagacatctagagtccagatcacaaaacaatcacttaatagtcggaattttcatttgttcaatttccatttttggataaactgggcacatggctaaatgttttcatcacattgtatcaattaatccagtggttcccaaatgtatctacacttcagaatggcctggggagaggggggcttcaataaactactgatacctctgtcccaccccagaaattatgatttaattagagtatggcctgggctgtagaatttgttaagacctccctccccccagctaagtgattctaatgtgcaggcaaatttgggaactgctgacttcttagaactctctgccataggacttataatcatgtcctatttacagatgaagctcctgcagttgagcaaactccagtgagcccctcaagctcacgtccacactgcgtgagagccagcactccagcctggcaagactgcagctgtgctgtctcaatccttgctacccacagtgtggtccagagaccacagcatcacctgggagcttgttcaaagcgcacattttcaggccccacaaagtcagacctaccgaatttattcagaatccctccaagggagtctcatgcctgcttcactttgataacggctgctgtagtcatgtcaaatgccctgaaggttacagtcatgtgctggcagcctcgggagccacagctctggcccctagccatcctctgactttaatttacctgagtattatctgggctgctggtttaaaatgacccacctcaaagatcttttttcaggaagttagaaatcctggagttatagcgtttctgtgctgtttcgtgtttgtgagttttaaagccaataaggatcacccctttggagcagggaccacacatctattcctgccgccctctggcagtaatgagcaggtggcagggctcgggactgttagcctgattgatggcctggtggaaccaccaccagggcactaaggtaattagacgatctgtttctggaccttgctttctgggctggaggctgccgccttacgtgattaggatgcgtgggaggcgccgcctctcctagaagctgtgcaggtagcgctgggctgcaggaggcagccaagccaggcgcacgatcagagcagggacgcctcccgttccttggttcctgggctccaacgggcacctccaaaccaatagttccagcatctctgtatgcagaccttagaggacaggaagcgactgcgagccccacactctccagacacggaaactctaaatgcagagagaacgaagcatattttgtcttccttttcctttttttttttaagcaaaataataacttgacacaagtccaagtagttaaaaagatactaaaagaaacccaatttagaagggcttttagtaggctgaaaacagatgtggcaaaccatttcgggatattctgggagatgagatggggaggaccggattcgaaatgcctgggccgcctgttctgggcccgccccgccaggtgcctgtgctcgggaggggccttgcccagcacgcattctagaaggaagcggccccgcgcctcctccctcgcaattaccgccgggtcggaggcatccgggcggtgcgaagtcagcaccgtgccgagcagttgagagcagacggtgttttcttttcattgttccctcgcttcgctgggagagcggcggcacctgttccgcggaagcgcggccaaagttggaagccctggcggctgctgcctgcagccgacgcgcgggggcgcccggcttcatccggccgcgggggaccaggagcctgagagcctggaactgggtgcggggggacagccagcccgagagggcccagggtcggatttcggatggaaccagagctcgctccagggagttgaaggagttgggagcgcatctcccaataatcccaaagaaaccgagctttcagtgcatgcaaggggcatttgatttccctcatttctgagcactgaagcactccactgtcatatttttgaaattcgagaacaaggaggttaaagagtctaaatggaagactaggtgaccatccaaaatatcatacatcaattgcatcttgtaattagtaaaatcatttttattacttaaggtaaatcttgataaggtgtttttattaggtaagataaacctggtataacatacgttgcgggtgtgtgtgttttgttcagttgtcattttcagagaaataaatgaatttttaaagtgtatatttattcatcaataattatttttaaagtgtgcctgtataccatatatgtagttttatatctatcccactaccttctgcttgcataactgaagtcacaaaaaggtaaaaactaatcccccaatatacagaagaatctagtatgtcccataaaagcatctttgctaactggcatcgtgaaagtatggtgctggacactcttgaaatgaaatcattgttactgtcaaattagacatctccacaaatatacatgatctgctcaaactgactttacatctgggaaaggagaaattgtaggtctctcttactctgggatatttttgatagagcaaaggtatccatgatgtaaatttctgagatattatagataagccctttataaagtcacaaataatattcccataatgaggggggaaaagattccaaagaaggctgagcacttactgagggcagggaccatcattgtctcctgctttacagtatctgcaactcctagcatatctggtttacgtcttgccaactaaaggtaatgaggcttccctggaagggcactgaatccatggccagaaagtttcacaaggaggcagctgaaataaccagccacatagctcatgggggaacatcagtgcacctcagggggttggcattctgggagaggtcctctcagctcagatttcttttgtaaactttcccagtctgggactttccttcctacactgatcctatgactctgcataaaattcagttttatatgtatacattgcatatttagtgcacacaggacacagcgatcaggtgttgcagggtttgcagaaataagcaaaacaacaccctttatgtgctggccaggaataagtttacagtcaaacagtgcaagaagggcatcataccagggtcagaacaagcatgtttcatcagggcagcaaaaagagctcacatctatggaggagtctttgaaggagtgcagcgtgtgagatgtactt

SEQ ID NO: 1887350 - DNA, 4001 bp, Homo sapiens
ataacaatacatatatccataataatagtaacatgcataacaatctccaacaaagaagatttcatgcctccgcttctcagtctccctgtagcctatcctattgtcagaaaatattagttagtgacaaagttcatccattccagaaagaatcaatagtagatactaaaatcattaggtgaaaggttaatggaaaactcaatagtatcacccatagcttattttcttatcacaaaaggagatgccttcctttacaatagagggatctggcagtcatcaccttgaacagagtaaccaacacagtatcacaaatagtgggacagtcatccagacattaagtgcctcctgctgtgatgcaatatgaaatacacagcataaccacctctgagctattatcaccaaaaatgtagtggataaattacccttggatcaagtgaccatccctgtactacaagaggtggctgaggaagagagttggcttgaaatgtaacttacattgtataggaattactgggaagagagaaacaagataaacaggactgtgaggaaactatcagacagatctaggatgtaggacagtctgccaaatatctggcctaatttcttcctttaaaataaagaggaagacacttctagattaggagagacttgaaggacaaaatttaacaattcaatgccgtgccatctttatatcaaggtgtgaaaagaagcatctataaaagacattttgaggaaaattgggactatttaaatgagtcccaatttttcttctttttatgcttgtcacataaaacacaattggcactattttcttaatagttaggttattaatgacattaagaaaatactgccaattgtgttttatgtgacaacggtattgtggtcatgtaggaacacacctcttttagagatgcatactgaagtacttaggggaaatatattacaatatctgtagtttactttaaaataatccaacaacagaaaagaaatacggagatagagcaaatagggaaaaatgttaataagtgttaaatctaggtggtagattgatggatacctattctactattctttctactggtctcaatatttgaaaattttcatgaaaaaagtattaaaagcttaaaagtgtattgaaagcaatgttttttattgttttgttttgttttttggttttttttgagatggattctcgccctgtcgcccaggctggagtgcagtggcgccgaactcggctcactgcaagctccgcctcccaggttcaccccattctcttgcctcagcctccggagtagcggggactacaggcgcccaccaccacgcccagctaattttttgtatttttagtagagacggggtttcactttgttagccaggatggtctcgatctcctgacctcgtgatccgcccacctgggcctcccaaagtgctgggattacaggcatgagccaccactcccagccaaaagcagtatttttttaaaacactcatcatccagctattctaactcaggtgactaatactacaattaaatatacattcttcaggaacccccacaccaaaaacaaactgtcaaacaaacaaaaaaaaaaacccagctgataaccattcccccagtgccacctattttatagaggataattttgttgaaaggagcagagaccccacacacacgcattccctcaagcctggtaaagataagtggggtttattactaagctcaaatgatctcatgaggagtcaagaacaggagtagaggagacccagaattaaggaacaagaagttacctcatgagagttcgaatagagagtgtttctagaatcagtgcagttgcaggaacagatattcttgctttccctcggccagaagaatcattctctttctctcccagactcatcttctttctctccatcctcagtgtgttgacttctcattgccatcacagcttccccgaccctgactcagctcgcaagacgtttcagctacaatacccatatccaattggcagctttcttttgtgtttcttcatttctattcacccaagcaagaccctgattggctcagcttatctctgtgctggtacggtaagtccaatcagctgctatggttaagtccaatcagctgtggccagggagaaactgaatcaagtgataaaaagaacagcagctgagacaacaagggctttctgtgagtaagttccccctctgaggggactgtgggcagggaagacaatagcatcctaaaacaatctctatcctgtcttatagagagcattctgagctgcagggcgatttttgcaaggatgtgaagaagaaattcctgggtttctacatctctgcacaggaccattgtatcccatgagatcattgtctagctgattagtataaagcagtgattatctcagaacacaacatttacctatgatttttctctgaactgaacacatacctgaaaatagatgaagcaagatgaccaatcctctgtctgggtttgagcaatacaaaacaatcacagactttcattgagatctaatagtaccctttctttatttagccagtaaacatacattgagtgaatgtctgctgtgtgtgtcacactttactaggggaaatgcaggtacacacaaagaaggagaaggcaaagcctctgtgggtaagaatattacactactgttgagtgaaatgatatacacactccagaaaacacaaataacaaaagtaattgcatcagaggagagctgtcatagctcaatgtatgctaagtgtaaagtggatgctacgaggaaagctggaaaattcagataaaaagctttctggaaggagattggccttggaggacggtaagtaattttaaagaatgtacttcatggtagagaaaacaataagatcgaatgcaagaaatgtgtcaggcaagtcttgaaaaacagatcacaggcaaacctgattaaagaggattgtattgaagacaagtggacggtcattttgaaaagggggatatggggaccaggtggtgaaggaaagaccttgaatgccaggataatgagcttcatcttctgagtaaggctttagagtcaggaagggaagggatgagatcagtgttttaggaagtgctagtgtcaagggtaggctgaaaggccagagcgctttgcaatttacaaagcatcttcacatatgagtcatctacttctctcctggcaaatggtttcttatgaggcttttagaggctggtgcagggcaacattcagaaatctacccagactagagttacagcaattaaagagagtaagttactggcgccagaatggtcagacagatcaatgatgcaaaatggaacatctggaaacagacccaaatatttatatttatatatataaacttaatattttatcatggtagcattttaagtcagcgaaggaaatagaataatttaataaatggttttaaggcaattgactaaccacttagggaaaaaaaaataggtgagaggcctgccttacaacttacaccaaaaaatttttttgaatggatgaagaagtggatctcaaatgttggttgatatttaatgacctggagagtttgtaaaaagagagactcccagagattctgattcagtagttcttaggtggaccaagaaactacagtctataagccagactgtgataaacacttgcttaaagacaaatataaaagatgaaactacaaaagcattaaaaatagataaatatttatgtggttcttaggaggggaagcatgacaatgaaagcaaaaaaaaaaaaaaaaaatttgactccaaaaaaagtaaatactctttatatcatgtaaacaccaatttcccctttccttccatttagtatagctaaaatctctggaatatatatataaatgaggaaaccctgaagggtggagagaagaaggcaggaggctgggccatgcgtggaagctcacatctgtaatcccagcactttgggaggcccaggagtgtggatcacttgaggtcagaagtt

SEQ ID NO: 1887351 - DNA, 4001 bp, Homo sapiens
ttggcccagtggccagatttccggcacgtgtagcaagctcctgtgggaggaggttctggaggaacacctggccgctgcggttcaggcgtttggaagttcttgtgtgctggagatgtggctggggtttgtctcacagtggaggcaaggaattgcaacttttttctgttattgtacaccttgaaggtgaagttaattaagtcctgttgtggggtttgagggccagattccaatttttggagttttatttaatgtcgggagcagattgggtaataaaatgtatattgagaataagacggccttttgaccttttagggtctagggctgtaaagcgtctcagggtggctgccaaacgagccttgaacggggctggatttttatatttgatgaaaaagcctaaacgctatctgatttgggataaagaaaaaggagcattaaccttgactatgcctttggctttttaagagtaaattgctgggcaggtgggggagggctagtcacggaacgaaactgtaagccggaccaggtgtgaggaggggaggtgataaaaagattatagggtggaggagcagaggctgagaaagaattgggacctagctcggcctggcgaggagcagcctggggaggaagggagaggtcagatgggtctgtagaaaaggaagattagaaagactcagtgacgcttggggttggtactgaggggacaggcgggagggagagaaggaagatttgggacgagttgcactgggcacagagactaggaagggactgatgtgtaaaagaatgcctggacgtcaggcacctcagaccgtttgcctattttatgacaagaattatttagatcttgcaggatggaaaaattcaaagtgccattttctggctatttggaactactgttgagtttgtattggggtcaagcggcattgcagaagaaaataaggcatttaggttttaggtcaggtgtgagttgaagaggttttaagttcttaagaatataggctaagggagaaggaggaggaatggaaggtggaagcttgcccatagtgaaggaggcaagcccagacaagagtagagacacggagaaggggtagggggtccttgccctccagaaaagcagagaaggggttggggcacggaaataagggattggggcacagagataagaggtcatggtgcggaaataagggattggggcacagagataagaggttggggtgcggaaataagcgattgggggggttcttgccccctaggaaagcgggacttggctgctaagggtgaaggagaaggggttgaggggtacttgcccctgccccaggaaagcggaacttgtggctaagggtgaaggagaaggggttggggtacttgcccctgccccaggaaaccagagaaggggtagagacaaggagagaaggggttgaggtacttgccccttccccagaaaagcgggacttgccgctaagagtgaaggaccaaggcaggtgtccctgcgtggtctgacacccttgaaatgtgggtatataatcagagagtcatccctgcaatgattaaacaccaagggaaggctgccttcccagtccgtgaccggcgccggagttttgggtccatggataaaacgtgtctcctttgtctctcccagaaaatgaaaggaattgaaattaagagaagggagagattgaagagtggaaaggagaaagtggttgagggacagtgagagaggttggagaagagagtaagaagaggccgcttacctgatttaaaattggtgagatgttccttgggctggtcggtctgaggacctgaggtcataggtggatctttctcacagggcaaagaaaaggagtacaggggattgatctcctaagggaggttccccgatccgagtcacggcaccaaatttcatccgtgtccctgtgaagagaccaccaaacaggctttgtgtgagcaacatggctgtttatttcacctgggtgcaggcgggctgagtccgaaaagagagtcagcgaagggagatggggtggggccgttttataggatttgggaagttaatggaaaattacagtcaaaggaggttgttctctggtgggcaggggtgggggtcacaaggtgctcagtgggggagcttctgagccaggagaaggaaattcacagggttaatcactcagttaaggtggggcaggaacaaatcacaatggtggaatgtcatcagttaaggcggggcagggccttttcacttcttttgtgattcttcagttacttcaggacatctgggcgtatacatgcaagtcacaggggatgcgatggcttggcttgggctcagaggcctgacaatatttacatttatattcatgagtggtagagcctaatttaaaatgtcatactatttcttaagtttttccattaagaatttaagtaacataaaaattgttgagaagcaacatttctctttttctattctcttgaagtatatggatttggaagtaaaattgacccttaaacaacgtgaagtttaggggagctctgacctcttctacagttgaaaatccctgtgtaagctttgaattcctaaacacttaatgactaatagccaactgttgactggaagccttaccaataacataaacagttaacacgtatgttgtatgttatgtgtattatatactgtattctttcaataaagtaagctagagaaaagaaaatgtcattaagaaaatataagcaaaataaaatatatatgtttactatttattaagtagaagtggattattatgaaggtcttcatccttattgtcctcatgttgagtagactgagaaggaggaagaggaaggattggtctttctatctcatgagtgccagaggcagaagaaaatctgcgcaaaagtggacttacacagttcagacctgtgttgttcaagggtcaaatgtatttgcttacagaaaatctgaaagaatttgcctttatacctgttgcatgttttgcatgtttgaggtttggagaagtagaataaatttaattagtggctgtaggagtattcaggcttttcatttctgttttcccccaacttcttatattgaacaattgagaacttaaatgtgagttggatgagcaggaaaatgtacaattgccttcacctagattcttcaactgtaggcatttaaaaatatatttccattgtgtatgtgctttctgaaccatttgaaaataaattgtagacattgtgacattacattcctaaaacttcagcaagtatcaactaaaaatgacattttccaatataaccacaataacattatcaacactaaatgtttaaccttgatttagcaatactattacactgctcatattttttcacaattggaaatatctttaaacgttatatttttcaaaaatcaaggatcacacatgacattttgttgtcaaatttcttcaatttttatcctggaacacaaacctacatttaaaaaaatgtttcattacattgatatttttgaggtgcctagactagtaccgactgctgcacaatttgcatcttttataactgttttctcatgaaaaaaaaaaaacaaaaccaaaggttaaagatattatttttgtgaaaatattcttcatatgtaatatggagagcatctcaattcgtaccatctggagggttttaatgtcagtttgtcccagtaaattgatgatatgttgatcacttggctaatatgttgtccatcagacatttacattgcaaagttcctttgtaattatcaggctggtactttgtaatgataaggtgatactttgagatcctgttccttaacataccttcaactgatggttattagcaatccctttctttatcaattactccattaatagttgtaaaagtgatggtacaatactccttttttttcttttttacatgtagttaggtgaaatttttctgtgtaacacattctttcctacctcttcccctctctggacttcttatgagtcagtgtgaactcagacatttagaaa

SEQ ID NO: 1887352 - DNA, 4001 bp, Homo sapiens
ttgtttgaacctgggaggtggaggttacagcgagccgagacagtgccactgcactccagcctgggcaacagagtgaaactctgtctcaaaaataaatcaataaataaagtcagtgacagtggcacatgtcacacaatataaatgtgcacacacacactgcctcagagtttaaatgtaagatgaggccaggtgccgtagatcacgcctgtaatcccagcactaggggaggccgaggtgggtggattgcttgagcccaggagtttgagaccagcctgggcaacatagcaagaccccatctctacaaaaattagtcaggcgtggtggtgcactggtagtcccagatactcgggaggctgaggtgggagggtcacttgagcccgggaggtcctagctgcagcgagctgagattgcaccactgcactccagactgggcaaaacagtgagaccctctctctcaaaaaaataaaaaaataaaaaataagtaaataaatttaagatgatacactgagtttccagtaggtaggcatctttgaaggctattttgttctgtgctgaatgaccagtgtttgaaactaaatttgacatgctgagtggccattcttcactgagcttttatttggggggaaaataattagtggttcctgaacagaggccagcactgtggtttcttccagcagctcttcattcccaccccagaatggtttcccacttcccttcaactgcaaaatgactcctcctggtacagctgtggccgggatctccccaaccagaccatccttctcactgtcaggacttttagaaaaatagataaattcaggcagatgagtttcaacagagagaaactcttacttttcaatatctctctttacagtatttggcattttaaacatattttggtcttgagagaaatttgaagataataattattcagcacatattgactgagcacctactacgtgacagacatggttctaggcactgcagacccctgccctcttgaggagcttacattttagacaggtgataaacaagcatggggaaagtgtgctctggtgactgtagctaataacagcggatagtataattgaaaattgctaagagtaggtcgggtgtggtggcttacgcctgcaatcccagcactttgggaggccgaggcgggcggatcacctgaggtcaggagtttgagactagcctggccaacatggtgaaaccctgtctctactaaaaatagagaaaaattagccaggcatggtgaggggtgcctgtaatgccaactacaggggaggctgaggcaggagaatcgcttgaacccaagaggcggaggttgcagtgaaccaagaacacgccactgtactccagcctgggcgacaagagtgagactctgtctcaaaaaacaaaaccccaaaaaaaacaaacaagaaaattgctaagagtagtgttgaagggttctcaccacacaaaaatggtaagtatgtgaggctgcaatgttattagcttgatttcataattcaacaatgaatacatattttaaaacataatgttatgcaccataaatacatataatatttgtttatcaaaaaaaggtactctgcataccgtgttgaaaagtaacctggaaaaagcagattagtttgggatagtcaccagtgtcagcttgtttttctttttttggtcactttcttgctcagcgatctctgatgcttcctttagtttgtccctcagcctttgggtctgcacccagcctcccctccaagctccactgggatcagctgtttgcctaaactcccctcaggcctggttctcctgtcttccaccctcccttccagccccagcccttgctcccgtttctgcactcttggaatcactctcacctcgggcgtggtggctgcttcctgaagtctctggagacacacagtggtgcacacgctggccctctggactcgctggtgtcggtcgcctgccccgtggccacatctcctcggatgccgcttcaaggtcgctgagctgcgtatgaactatttccccatccacatcatctcctagggggacagtcacctccaggatttacctcagctgctctccatggacacgataggctctcagaaaaagttcttttgttgatgaaatggaagagaacccattaagtagacacactcatacacagcttctaaatagatctaccagacctcgtcccctgctcttagaagagataaacaagtaaaaattaatgcttattttgtcattctatctaccagacatcagttttttgttttttggtttttggggtttttgtttttgtttttttgagacagagttgcgctctgtcacctagactggagtgcattggtgttatctcggctcactacagcctccacctcccgggttcaggtgattgtcctgcctcggcctcccaagtagctgggattacaggcgcccactatcacgtctggctaattttttgtattttcagtagagatagggtttcgccatgttggccaggctggtctcgaactcctggcctcaagtgatccacctgtctcggcctcccaaagtgctgggattacaggtgtgagacaccgcgcccagcctcactcaaatctctatcatgataaacagcatcgctggctgtcagacaagctcgtgactttgcacagccatcccaaggccgtggcaaggactcggaatgtggtgaagacagtggagatccagagaagctcttcttttccaagaggcagtgaatgtgaacagacatgtttaagaacctttcccccgggggttgctttttcagtgactgcaccctcaaatgccacagagaagaaaccgcaaaaggcacaggtgtcttggcagagtcaacagcctgctctgggaacccgggggtttgctcgagggagggcagccacaggggccatctgttgtgaacgctactcacttgaaactgctctgaacttgaacacaaaagctgaatacaaccaaagcaccaaccgacaaggctgtttaaaaaaaaaaaagttaaaaatgatcatttggaagcctgctggagccaagaggacaaagaatgaggtcagatgccaaggtcaacagagcagtgccgccatcattccgataccctgagtcaggcacagctgaagcttctgcagacgacacatgaaatccttgagactttgtcagtttaacccacattcaaggccatgcccaagcgaaatcgtgaagagacaaagtcgcccttggtggctgcagtgtccacatctgcctgtcatactctggttccctgaaaccttccatcttctttaccttctaagtctcaggaaaacacgtgataccaacagtggatgtaaatagagttatggcttagttcaggagaatctggagctgggaattgggagtaaaacacgaaaccttaggcttgggagctcagggaaaggtctcacgataaaggacttagacttggcaccaggtggaggaggtgtcacgtgaggcatgggacagagacctgggcccctaaggctgctcccagggattctccctctgtctccacttgggtccttcatcctccttcccagccagtgctggccttgggcctcccacctcggcggtgcttcttgctgcctgcactggtaggtgggtggagaagagaatgagagcccacactcacccagatgtgccagtgccatgtgtgcctgattaggacaaataactgaaaatggttcgccaaccttgcagcagcttgcgctggaagaagcaaagcccaggacggcgcccttgctctgccctgagagaatgtgcttggcccaccactcaggagcatgtggacaaggctgtgtccccggagcgcagaccgggattcacccgcactgctccagcaccagcagccagagaccaccagcaagtgcacacagaggggtcttcagcctgggggtgaatacacgcaacatgcatgggtgaagcatggctgactccaaactccagaagctaccatcacacttctgtgtgctgcactgtaa

SEQ ID NO: 1887353 - DNA, 4001 bp, Homo sapiens
caacaggagaggccaggcgcggtggctcacgcctgtaatcccagcattttgagaggccgaggcggcgggtggatggtttgagttcaggagttccagaccagcctggcccacatggtgaaaccccatctctattaagaatacaaaattagccaggagtgatggtgcacgcctgtaatcccagatactcgggaggctgaggcaggaaaatcgcttgagcctgggaggtggaggttgcagtgagccaagatcgtgccactgcactccagcctgggtgacagaatgagactctgtctcaaaaaaaaaaaaaacaaaaaaaaaacacaaaaaacaaaaaacaacaggagggaaaggggcatcagctcctcgtgttaccaaatggcctggcaatgcaggaacaagtacgggcctctggcccaggcagatgggcgacaccaagatggccccagggaagaaaggaaagaaaagaattggagtttgattttggataaagagaggatctcaagcctgaggtttatttatttgtacctatgcctgctgtttattccctggtgaagctgctggaacaaatctgcgtccgcctcgtgtggcctcgctgcatggaagggagacagcagagctcatgctttggcgaggctttccacatgttggaaatgtgacagctgcctggactgctcgtcctggtctttggcaacactgaccacctgtgtgtgaagcagcaggtcattcagtgtctttgagcctcaggatttctctgtaaaaatgaggatatatattcacaatatgaatctcagacaatattagctttgaagtttttagatataaaattgtttatgccatctgtccatggccactcatagaattaaatgaagatctaggagggcaggcgtgtgtctgaggccctctgtgtccccatggagctgtccaaccttgctgtcacacacagtcagtgttttaaaatggaattgactccttgacgatgtgctgccgtttctctttcagtctctctctcatggtttagatacctcgagcctagatggccagggcagtgcattgcgtgcagtgcagacagatgagcattcaaaaggtggcacggtgggggctcctggacattgcatgggctctggagtcagaatgaattctgtccttgctctgtgtgaccttcagcaagccttgtattacttctccaaacctcggattactatctgcagtatgaaactaacaaagcaccaggcggagtgctgtggctcatgcctgtaatcccagcactttgggaggccgaggtgggcagatcacgaggtgaggagatcaagaccatcctggccaacatggtgaaaccccgtctctattaaaaatacaaaaattagctgggcatggtggcaggcacctgtaatcccagctactcgggaggctgaggcaggagaatcgcttgaacccgggggggcggagcttgcagtgagccgagatcgtgccactgcactccagcctccagcctggtaacagagcgagactccgtctcaaaaaaaaaaaaaaaaaaaaaaaaagaagaaaaaaaagaaaagaacaaagcgcctacctcctgcatgatgtggggagtctctgggccgatgcatgtaaagcacttccctgcaggcaacaccccagcataatcagcaggcagtggatgccggtaaccctggctcctcagtgagtcctgatgtgcacatgggaagtggttattgttatccctgctttgcatgtgaggagaatgagccttttcattaagtggctgatttgggattttttttttttttctcaagacaaggtctcactctgtcgcccaggctggaatgcagtggtacaatcatgactcactgcaactgtaaccacccaaggggctcaccttgcccgctgcctagacagagctgattcatcaagccaggggaattgcaatagagaaagagtaattcatgcagagctggctgtgcagaagactggagtgttattattactcagatcagtctccctgagcattcggggagcagagtttttaaggataacttggtggatgggggaaagccagtgagccaggagtgctgattggtcagagatgaaaccacagggagttggagctgtcttcttgcgctgagtcagttcctgggtggggcagaggggcacaagatcagatgagccagtttattgatctgggtggtgccagctgatccatcaagtgcagtgtctgcaaaatatctcaagcactgatcttaggagcagtttagggagggtcagaatcttgtagcctccagctgcatggcttcgaaaccataatttctaatcttgtggctaatgttagtcttacaatcttgtccccacacaagaaggaggtctgctttaggaaagggctgctaccgtctttgtttaaactataaactaaatttctcccaaagttagttcagcctacacccaggaatgaacaaggacagcttggaggttagaagcaaggtggagtcagttaagttagatctctttcagtgtctcagtgtctcagtcataattttgcaaaggcggtttcaatacctcagcttcccaggctcaagtgatcctcctgcctcaacctctcgcatagctgggactagacatgtggacaaccacacccggcaatgttttattttttgcggacatggggtttcactatattgcccgggctgctctcgaatttctgggctcaaaggatcttcctgcctcagcctcccgaagtggtgggattataggcatgaaccactgcgcccagcttgatttgggttttgaacacagttctgtccgaccccttgagaggagcacttttcacagtgccatactgaatgagaagtaatccttaaacttaagggaattcctttcgactgtggagaagccattgcccttcttttcttcttccttgccttcaaggaagttcttcttttgtactagaaccccaatgtgatcagggccttttttcctatccatggccaggctctcagggacagtgatcctatttcccccaagcataagtcctggtgagtctaagtcagctgtaatgataatgatcacattgtctctggggaacaggctcatggcagttctgggggagttgagaggaggagtctttgggtcaaaaaataaacacagctggtaatgacccaacagaatggtggagagaatctgagtccttgaagttgctgtggatttgtttaataaaaccattctgcaacccactaccccacctatttttatgtcacataataggactttttgttaggtgagataatacgattcacttaaagttattttattattattattattatttttttttttgagacaaagtttcgctcttgttgcccaggctggagtgcaatggtgcgatcttggctcaccgcaacctctgcctccctggttcaaggattctcctgcctcagcctcccgtgtacctgggattacaggcatacaccaccatgcccggctaattttgtatttttaggagagacggggtttctccatcttggtcaggctggtcttgaactcctaacctcaggtgatctgctcacctcagcctcccaaagtgctgggattataaggtgtgagccaccacacccggccaaagttatttttaattaggatttattttatatttatttgtctgtcagtatccacgggggattggtttcaggacctccctcggattccaaaatccgcagatgctcaagtccctggtataaaatggtgcagtatttgcacataacaacctacgcacatcctcctgtatactttaaatcatctttagattatttacaatgcctaatacaatataattgctatgtaaatagttgttatactgtattgttacggaataatgattaaggaaaaaaagtctgtacatgttcagtactgtcacaaccatgcattttctttcgcaaatatttttgatctgtggttgtttgaatctgtggatgcagaacccaagaatatggagggctaactgtatttac

SEQ ID NO: 1887354 - DNA, 4001 bp, Homo sapiens
gcagaggacagcaagctcttgccagagccccgggcttttccagtaggagcggcttcctttactatcagtcaggtccagtcagcaaaggagggcctaggacagagggagttaaaatggggccttgctgtaaaggtgcctgcgaaagctggagctggagctggagctggagctgtgctaaaaatcagagcggggacagggagggaaagggtgcctcaagcaactcagatgacacggcccaatccatagattgtaggccccaacacccaggccgcgcattgggctgatgtataatatgcttttggcagagcttctataaggactcattatcaatttacatttagccaggaaagcatgaaaataagtacttcatgtaaagccattgtgcacatatttgttgctttaaaaaaaaaaaaagattcaattcattaggaaaagccagttctggccaaatattttgaatggcagccattgctatttttcatgttctccccttttgctttctctgtttccctggtttaaagtgtgcactctaataatttagaagatggcagaagcattcaagagcaggaccttctgagcagggcgaggctttgagttcggggcagttttcatggtagcatctgcctgtgctgaagcagaaaacagcatctgggacccccatgacttgggcactcttaggacagcccgcagatggttgcgtggggttcaggggcccttcccgcctggctcctcttgtctgcatcctgccctgtcagtgtggacctaggttcacactctgaggccctgcaaaacatgtcacctgtgggcacctccagttttccagtgcctggtccgcagctcgtctcggcagctgcatccttagggccattcccaaaacctcgggtcacggcgggggcctagggggacagcaaggcctttgccccttaagcctgatgaaaatttgtaggagagacttcagtgtccttatgaatttcagtgaagccgagtgggattaaggtgacagacagaagctctaagtgctttcttcagggagataaagcgctggcgagtgcatcatttaaaccgaagatggagtgagcgccaacaggcactggtggttgttgctgttctaatgggattgcttcgtagatggcccttcatggcggaacacgcgtgtgtcagtggggttcgggctgcgggtggcggctgagtgtccctgtgtgtctcttacaggaacagtgtgtggtggatgcagctctggagtacgttcccggcgctcaccagtttggtctcacacaaaacagccatttcatcttgccttttaatcagtcggctgtcagaaagaagtaggtatcattctaacatccttatgcggcgtctcattgctagatgtatgggggtgttctgcagccacagagtcttttccaaaagaacctgcttttattttatgatgaagtgcttgatttgcaaccaaatggcaaagagaaggaattcagtgttggtgcaaatcacaacgctttcatggtggttcactggggagtctgtggtttctgccttttcccttctggagagtggctggcttcccctttctgtgtgcatgtaaggaagcgtgtgggcatctaaattaagtctcctggatctattattgtctggactttcaaccccattccactttaagcattccctagtctgatgtctttgtctacccaaactcttacactgtggtggccaaaatcccgagtgccacacccacccctctctgcaccttctggccctcatacctgcctgtccctgggacccttctgccaagggaagatctcaaggcctggagcttggggctcccggactccatgttgctcctctctcctcctgaggtcctccagctcacctgccaggcttgcctgcagtctctgccatgccctgcccgtcttgttgtcattggctgtgccaccctgtcatacccccttagacctgggctcctgtctgtcttctgcagctcctgccatcactctctgtgaattcaacagctgcctaacacctgacctttctgtgctcaaactgtgatctgtggaaggtctttccctgctccctcctcagccagcctcttccgtggccatacccttgacttcttcacaggtatccatccctctcacagtctcgactttaaaagcctcctattagcacacccctttcttcttgtctccactctgtgcctccccactcctgcagtttctcagctgcatggagacctctaagccgctagccctaatgccctcccaccactatctcccctcttctctagccccaaatcacaattcatcccccagataggttccaggccagtgttacaggtgtcctctgcaaaatcccctaaccctttctctctcccactcctgcgagcccaggtaaaagccaacattccgccttctctgtgccagaacccacacgggagaccaaggccaaggagatggatgtctccttcctagctggtttgagctggatatcatagccgtcaatctcagatggagcctccaaacgacatggggagccagtgcattgctctaatatgttcatggtttttattctccatgactacttcctcatagctgctcttagctcagagccctgtgcaccgcagtccctcttcccaccccagctgatgacttgcctcgttgagaagaaagagctccttcatccgtccaccaccaaaaagaccagcccctgcttttgttcctgaccctctatctcttctgctaccacagatgaagggtacttgttcctagcaaagcccacccagccagccccagcttgtcctctggatcccatccgccctctcctcctaggacatgcacagcagccactcctcacagaccagcacacagatgccgctgtcaccccatcgtcagcagtgacagcaagagcagcaaactattgtgctggaggttgacacaaagatttttacacagatgccctaatttactcctcataattctcctatgaggaaggaattgttattatctccatttaacagataaggagattgaggtatagggagcctgaggcatctgctcaaagtcacacagctggtaaatggtagagccgggattcgaacccaggccttctggctccagagtctgtgcctgtagagtagtttccccttctcctcgggggatacgttcaggacccccagtggttgcctgaaacctcggctagtacctaaacgtcatatacactgtgttttcctatgcatgcatatctatgataaagttgaatttataaattaggcacaggaagagattaacaataataataaaatagaagaattataacaatatgccagcatcactcctcttgtgcctcgagggcattattgagtaaaatcagggtgacctgaacacaagccccgctgtactgccacagtcgatctgcgaacctagacagctataaagtgaccaatgggcccatggctcctatggtgtggatccgctggacacgggcagacatggctcccatggcgtggatccgctggacacaggcagacatggctcccatggcgtggatccgctggacacaggcagacatggctcctatggtgtggatccactggacacaggcagacatggctcccatggcgtggatccgccggacacaggcagacatggctcccatggcgtggatccactggacacaggcagacatggctcctatggcgtggatccgccggacacaggcagacatggctcccatggtgtggatccactggacacaggcagacatggctcccatggcgtggatctgctggacacaggcagacatggctcccatggcgtggatccgctggacacaggcagacatggctcctatggcgtggatccactggacacgggcagacatggctcccatggtgtggatccactggacataggcagacatggctcccatggcgtgaatccactggacacagacaggattcactttctgggcaggaccgagtgggatggcatgagatctcatcacgctac

SEQ ID NO: 1887355 - DNA, 4001 bp, Homo sapiens
gaatgtggcaaaggaaaacagtatggcaaggtacagagtggctcatcaaacttctgttcagaagtgacacacaacacttctctcccatgccattggccaaagcagataacatagttatgcctggtctcaatggggcactaaagtttaatcctaccccaaggagaagaagtgtctattaccaaaaagtactgcaatcttactccatcctccaaagggctataccgtcaatgtagaatttcagactccatgctggacaatggaaaaccgtgtttgtgtgtgtgtgtgtgtgtgcacacgcactcacacacatgcacatacatgtgtgtgatgttgaatggatccaggatgaagagggattctctgggaaacctacttcctgttggctcttaagcatagtcatcgggccaatttcataaaggacaaaaaacagtcacattgatggaatgccatctaagtgctggctactatgccagaccttttctattcatattctctctcaagcttcacagaaaccttatgcaggagagaaaggaactaaccttgttcaaagaagccaaggcccaaagcaatttagtaactttgctgtagtgacagaggatatggtagcactaggatactaagttcttgaggacccacgaagctcgatctactcccaggaaaacacagagctgaaggggagacatctctctcccatgtaacaaagagaatcattgattcttctgctgacctgcatgtttctggtgatccccactggtgcagaattggcctctagtcatggtatacagatcagtcttagtccaatgtgattgttacaggttgaacatcccaaattcaaatccaaaatctgaagttaaccaaaatgtgaaaccttcttttattctttagagacaggttctcactctgttgcccaggctggagtgcaatgtgatatgatcaaagctcattgcagccttatactcctgggctcaagtgatcctcctgcctcagcttcccaagtagctgggactacacatgcatgtaaccacatccaactaatttttaaattctttgtagagatggggtcttgttatgttgcccaggctgatcttgaactcctaacctcaagcaatccttccaccttgacctctcaaagtgctgggattatgggtgtgagccacagtgcctggctaaaattcaaaactttttgagcatcaatatgatgcacaaatgaaatactcactggagcatttcagatttcagatcttcagatttgggatgctcaaccagtataatgtaaatattacaaagtttaaaaaaattcaaagtatttctcatcccaagcatttcagataagggatatttaacttgtactatcaaagtgaagctgtttctcccctatgagtacaaattttcagggttttaattgagaaagcagttcttcaaataaaagtagagaaaactttgttatttttactaatgaatatcaagaagtctactcaaatctagagtgtccctagatgaataaaaccaacaaaccctagcttaatgaaaccatgaactctgccattttagaaaaataaaataaaataaaataaaccacactttatagctttatttgagggaagccctttgatttacattattagtggtatatcaaaagaaaacttctttagctgtatttcaccttcaaaagcactgcacaacaagcagcaataatgcacattagagtgtatcactggtggagaaactaagaggcaaggatatccaagaaacagaaccctgcaaatcaggtaacaagcagctaactttgtcaactcaatccaaaagtgcttacctcactcagaaatggcaccaaagcccttcatgcaaacgcatcatgaaattatgtcgatgtgatgctgaactcagcagctccatcagcaggacaccagctgacttcaaatgtctcccaagaacaccatgagctaatgaccgtgaatgctatccagggtcaaccccacagcatcccaggagacaaacaccaaaagcccaagaaggatgtaatctttcaaagagtgagtcacactcactgaagtggctatatggcatagagacaactaaatatttattgttctgtaatattcaaactgtcaccattagaaaacaatttccaagaaatttgttggtttttattaccaagcccattataagtacacttggaagagaaaaagtcttactaactgaggagaaatgccacaataacacagcgttgtagtacaatcatgcatttttcattcaagccctaggagtgacttgtgttaacataatatgagcttggaagatctcagatgtaagttatggagctagcataatctccaagtcaactgcctataacatattcatttctttacaaattctctaagaatgataaatccagcctgactttaattactatggcatctttctatattttcaataacatacatatataaatcctaaaatccaacaaataataaagcaaaaatcactgaatacacatacagtgtacagttttagggaatactctgaactggctgatagtcctatcattagcttgttacgatctacaagctcagcctataatttttcctttactgcactttaaactccctctccatctcaacaatgatgctgaacgtgttcatatatcacatacagtatatctcttcatgttttccagatggtattggataaaatggaaacaaaagaaagatgtcgcaaagaaaaatagatgtttttctactttcattcttaacacagcttctcatctggtagagaaaaatacaaacccacacagagctgatggagaatctctagagatacagttcattttgaggagatacacattggatccataggttcaggcttttcttttgtcctcagccaatctcagcaaactaagggtatggatttcctgaactcggatgtacggtatcgttggcttgtgctttcagcagcgatttagtggagtggtttggatataattagactcattccagtatttgtccctacaatgatccccatgctccaaagaaaatatccacagttacagcaagttagtttttttaaggttagcatttatagaccctgagacatttaaaacataaaattatcaattttgaacaaatcagagaaacatttgaataagttatttgagaaataaaaatactgagttagaacatgacttttcaaaaattacctggagatttgacttttctccaagcaggtgaccctgagatgatttttttttccaaaaaatttggatataaacacttacgacttacaggtcatttgtgaggcaaacacacaaaatttaataatctttgaatgaaatacattgcaaggatggtaaagaaaattaacttatttaaagaggtgataaatattatgcacaatcagtccctctcgtttccatgtagtgtttgccattttgtttaactcacatccctggaaataagttgggactatttaccagccacgatggactacaaatatgtgcacacacccactctgcatttcctatcagggcttgttctgatggtcgggggttgggggtgactctcatgatccatcagcaacactcactctaagagccatctgtccttttggccagtgtctccccatgtcacttataatctatcttggttagttcttgctgctgtaactaagtaccatagactggttggcttataaacaacagaagtttatttctcacagtcctggagtctgaaagttcaatatcaaggtgccagcattaaggtcctcttccaggttgcagattgctctctactcactgtgtcctcacatggttaaaaagagggcaatagtgctttctagggcctcttttataagggaactaatcccattcatgagggcaccaccctcattaatttatcacttcccaaaggccccacctccaactaccatcccaattagaggttagaatttcaacatatgaatacaggggggcacaagcactcactctataacatcatcccaaacaa

SEQ ID NO: 1887356 - DNA, 4001 bp, Homo sapiens
tctttgcaacttaacatagttttcatctctaaacactgggctgctttagggggcctgaagcaacatggagatttgcttgatgaacatactgcagacacaggagctaaatggtatttattaggtttgctcgtccctcctatataagcaagtaatcacatgctgatgccagagggttcaaggatgaatgaagtctagaaactgacaggacataaatagttaacagtaaaaccttgggccctctctgaacctttcaaggcagccagtaaattgaaagcagcagcgagaaaacagagccacttctgcacacccatggaaacagtcaagctgccacaatttgcacaaggtgcaagtaacagatcagccttccagaggacccggtacacgctgcacattgcggcggtctcacctcggtcacagagcctctgcctcacagctgggctgaaggaattagcttgcataccagaatattaatgtcagcatcttttatcacatgggttggagatttgcaaccatttgaaaaaaccaccaactctgcttgtgattatctgtgatttagagaaaggggcaaagttatcatttaaaaaaaagtctgtcatcaaatctgttgatggcagcctctgtataagaaaatgtcactaaaagcacttggaatgctttcttacttataagctatcataacaatgtaaaattaaaaccaaaaaataaaaaccacccaaaattctagaaggtgctttaaaaagagaatgaaagggatgcttcaccacttctaccccccgccccccacaaatccaactggctatgaattggatatcagtgtaggcagagacacatcataaaatatttttggattgtgtggtgctatttggtatatattgcctatcttgttaggattgggtaacagtccaaacaggaagactcagggaaaggtggggagtaatggtataggattaaactgggggtaagttaggactcaggactcacttcccgccttgcttcctgccatggtcaggactcagggcagcagaaaccaacaaagtccaacagagagaagccaacttagaaactggacaaggtattcttcaggcatgaaatatctcctacttttgggacacagataattaagaacccagcctcaggtctttcaagttcttacttttctgtcaccaaatcccaaagtcaaagcaatttctccctatacttcacagatgctgtccaaggttgcatcaaagtcaacaagaaatgtgttctctgtcttctgacagtgaccattgtgagatagcaggatgttctcatcatacactcagtgatggtaaaagtctgtgctgataaaacctattacaacacaactatcgtggaattttttttttttttttttgagacggagtcttgctctgttgccaggctggagtgtagtggtgcaatctcggctcactgcagcctctgtctcccgggttgaaatgattctcccgcctcagcctcctgagtagctgggactacaggcacgtgccaccacaccccactaatttttgtatttttcatagagaccgggtttcattatgttggccaggatgatctcaatctcttgaccttgtgatccgcctgccttggcctcccaaagtgctgggattacaggcatgagccaccacgcccagcctgaaattttctttaaaaaaaaagacttgaaaataaaattccactacaacttgtctcacatgaataatttttgtcttaagatcttaacctagataaatcatttccttaaatacttcttaaagtgagatgtttagtgcctatcatggtatatgtcttaattgaatccctctccaactgcctttgtcctctttagggatctctgctctctcttatttgttactcatgtttttttaatgtactaataactgaagctatgttctgccttacctcacctgacactggagaatgcctgcatcagcacatactcacctttttcccatctacaaaagacagcagctctgtacactgcaattccctgtgatgtgctcaaattataggctgtgtcactaagaggcaagtcaaccctagtctcataatgacacaccattgtgtgttggcattgtggtttagaactcttccctgcctgatcttccaccatgtcagtcaatattcattagccaaatgtaaactgagtgtctattgtacactcgatggcaggcaacagatgatattcatctccatgctggtaacacggtaacatggagtcaaataatatctagtgcccaccatcagagagtgttaggtaaagacagacacagaaacagttgatcttagtgtcatggtagtgacatgcacaaatgttatacagtgtatgctgtaatgcctggttgaaaagcttcgctgtagagattaatgggactctgctgatctggctgttgaaatgttcctggatccttttgctcttcctcatccttccctttcaccttgtatagctcagtcccaaaatttactgagtcaaatggttttctgtctttaaactccaaattccacccatcactctggacagttgactcatcttatactttgctaaacaattccaagactccctaccaagatcccatgcctttccttctctctacacccaataatctcttggacttcagctatcttcatatccttcaggcctccacggtaggacatctgctctttccaaggctaattcctactgatttcattgagttctgcctccttctctaaaagctcactgttcaactaactcccatctctccagtgttgtcaatcagtctctctctgtcactttttttttaaacatgtatgtctcccttaacctaaaaatatcctctcatgtgcggagggttttttaaaacaatgatttagattttttcttcccatcttactatggcaggtgcatattatgcctcttaaaggctcccaatgttgtgcccatacatgcatattttttaaagaaaagatgaataaatgaattccataagctacctgtagttacataataatggtctagtggtgatatagtaaatagtgtataaatttggggctcagtattgtattctacatatcatataaatgaccttagaaaagttacttgaattttctctgccacaatttcctcatctgtgcaatagggataatgacatttatctcacagatatgtccatgaagatcaactgagatgacagatctaaattacttgacatagtctttttgtcacagagtgaattcccataaatgctagttcatgctacttggatttcaggaaataatagttcacatagactaaataaaggccaaagttatagtagttataaagcagttacagagactactctggctaaagtatcatatttgtttaagatattagagcaatactggtcaacacataagtgaccaatttacatacagatatatcattttagcatatattcaatgaagtaacattttataatacattcttttgtctggggattcttttgtagaaagaggcagagtgaatgattgaagcacattgttgtttaattgaaaatactactttcaccttatgcaaaacagaggcacattaaatcactaccttcaaaaaatgtaaattccaggtcagtagagtcatttggggacaattgatgctttataggtctggataaagaggagatgtctactcctatttccaggaaaaataacatttctaaaagactgccataagctctcatctgcaaaatttcatcgatttgggactttgtccttagggtaaaagtagactcttgttctctctgttaaggtgataaccaaaaaacagtaggcccatatgaaaaggaggcatatttaacatcttaacaaagtacatggtttttaagcaaggggcattgtatatattttcataaaacaacatatttgcaatggtagcataggcaggcattcttcaggccgaatctctatttccttctcttacagccttgattccctccaggcagcacatggttaaatacattccagtt

SEQ ID NO: 1887357 - DNA, 4001 bp, Homo sapiens
tctccaggatgtggggagtgtgccggcctcatctatctcacatgtctccacgtctgcagcatgggcatcttcctcaagatgagtccatcttcctcatgggcattttctcccttggtaggaagtagggagaaaaaaaatatttacagctaacactaaatgttaatttaaaaccctttactcaaaaggaaggaactgaagctaaatgtcccaggtagtgaccacgcaagaggaatgggaattgctgatggtatttcaatagctttgggccctaatttctagactttctggcccacactgaggtcgggaaagaaagggcttctgaaacgccactgcacccaggaaacctcaagttaaccaaccaggtgtttctattgtcagtccatggagagactggtgcagcccccagagctgctagagagcaggggttgggtggggggctcaagaagagaagctgaggatgtgccttgagtcccaggaaaggtcgaaagagctgagctcctggagcagaattctggaaaagcctgtggggtggccatgcaaaggcgctgtagcacagcttggcagcttgctttccaagagatgggctggcaccgagcctcaagtcggcaaactcctggattttagaagaacaattagttgacattattgcatcacgatcaagcaatgtaatgcagcccatagagaggctcccccagggttgagacttggaagaggcggccatgttctattctctgcacctgcaaacttagtgcctgggtgcagcctcagacacctggagcccaccaagtggccccgtgtccaccactgtaagcccctgggccatgtcctctacatgcctgtcgccttcctcagtctctcagcctgttcatgtctttactcctcatgggtcctgcctcatgttcttcctggctttggtgtgtgttgtcctcattcactgacagtttcagctgctagttgtttggtggtggggggtgagggtgtagaattgggaaaatgctgccgaaccagcttcagtttcccagagtggaggaggaggtggaaaagaggctttcaacatgatctggcctccaggtagaaacccaaaaagatgatgggactctccctacccctctggagttgtcttagactcagggtttctgtccccttcccagccaagttccatttgtaaaatataactgttcccttccacttctcagcagtcatcaggctctgggcttctgaatgacatggttgccttgggtgtagattgggtattcaccaggctccaaaccatactcagagctggcctggggaaactcagacgctgatgagtctaagggtcgcagaatgtgtgtaaacggcctggctctcagtggagggtcaattaatgtgagctctccctcgaaagtagcctgagagcagccccaggttctaaataagtcatcatccaactcagccagatctgctcctccggactcctgtgcacccaaaatatgaagtcaccctttgagaggtacttaacattggcactgaaagctgccccaaggattcatctttcccctgatggctctgtctctcctaccaaggtcacttcatgggtgatgcatgtcaccatcaatgataaatttcatccatgccagcagatttaattccctcttgcccctggcaggcagctccagggactctagattgataacccattggcacctcaaactcaatagccccaataccagtgtcatgatttccccctccaagcccccattatcttgcttgcctgtttgcgaactcactcaggctgaacatcttggagatgctgaatcctcatggctcaggccctgagactctgatacagggacaaggtccaagaatcgatctctgtttagcctgtgcagatggttctgacatcagggaggcctgagggcactcctctcccacactactctctgcaggatccccgctacatctctccatatctaagataccttgctatcttgtggaggatgctcagtaagcactgattctccctctctctcccagccaggatggccattccctgtgccaggccccaaaggcttctgcttctcctcaccactccaaaaaggggtgctgagacactgagaaactaaagctccagacatggaagccacatattcatttcctttactttcacttcctgatcatttacaccttctcaggtgtaggtcaaatgcctaatgagaaaactaggtcgagtttgttgagaaatgcaaagaatatttgcagccttttaaaaatgatggccaatagctcagagccaagtgacaaataattggaaatatctggttggcctcattaataaatgatattaaatgaagcaaaactagtggcccctggcctggcctctaagcttactagcaaaagcagtgagtcacctacttggcatacattcaggaacactaagtctcacacctcacccaagatcattcccctcccactgtgttacacccaaaaggattttgagaagaaaaaataaatttgctatccttagctactagagagaatgcctaaacgcaagcaccaggaaaggtagcacattgccttgaagttacggtaaggggtggattgcctctgggagacagttttgatatatgggagggaaacgagtgagtaaatgacaaggtgagagtagggaaaactgcagccccctaggcaggcacatcacccaggaagagtgcctggaaagccgcctgactgtctataggatgcagtggtctctaaagttagaaagtataaagtccttttaccaagtctaaaacaatgctaaatcataactatacctcctggtgtgggaatatagaaaatgaaaattttactacataaaattgggtttcctctgttagctatttttttgtaattcatttatcttttgacatttttaatcaaaatgacatctcagtcacagccaagtttctttctgggaaaatgttatttccatgaattttgttccatctcatggaggaagctttatgcaaaccagaggcacagtaagctgagggaagttgcagggttccctcccctgattcccagggcctcggttaacattctactctcccggcccagaggagccgcccagagtctgacctctgaggccactggcacatatgccgggagcttttggggccaggccttcctaacacagtcataatacattacagaaggcacaccagcaattctaaattatgaatgatgctgtatcgtggcaaccaggctgatgcaaagcagtgaactattaatgaaccttgccgatgactgcatctcacaccatccgtcacgttgccctgagccccacagcagattcgtagccagcagtttctgttttgctgcccttgggacaattagcccataaaatgaaagaaaagaaagagacaaagacagtgagggagggagggaacaagggaaaaagagagggaagggaaggaaggaagaaaaaacaaccaggaaaacagagaaaagacctctgatatgagttcctacatggaaaacagggcccctctgcagaacaggcagacagagggctctgccacagcgtggcccttgcagaccacagtcgccctaagagcctaatcaagtccccttcccaagctaggttcggggcatagagagcaccagagttgattaggctccacaggcactccagaagggaattgagccaaagaatcaaggggaagtgtaaacataaatcatcacccccagggactgcctaacggaaacctgcatgaaaaggatgtagggaatgagctacagaaaaggggatacatgtttcagagaaagaattagaaagagggaggtctacaaactaaggaaacctctccaaaaaacaactgctgctcttcattcgcctcaccgcaagtccttcagctcctcctgatcacaggggagtgagaggcagctcgcttgctcgccagggcttgctatttgttcaggtggcgagagaaagaacccaaatgggtcatttctaatacaagaatttgcaccaaagaaat

SEQ ID NO: 1887358 - DNA, 4001 bp, Homo sapiens
gtttgaatgagttagtttggttttctttttaaatctgtgttctctttatatcctagcctagtttctgggaggtgcaaggcactgagtgactcattgggacctgctgagtcattagagagagtgcctgagggacagaggccagactgcaacttaagctatctggaatcttacctctgctgtcttactggctgtctacatggggctacattttaactatggcttacaggtaatcatttaatgtcatgtcctttctatctttccccctctaaagtggtagtaatcatcctttatctctccatctctccaccaggatattgcaaagattaattattattaaaaacaaaatgaaattatcaatcccttcaggaatatgtttgctgtattaatataagaaactattttcatggtttccttgatttttatagctgtgcttattgtgccccttctcaatgaaggagatattccaaatttctcccagacagaaactgatttaaaatcgattcagtggctgaagaaccctgtaattgtcccagcgggttcttactctgccaggtaaatatttccaagaactaacatgctaagtttgagactggttattcataatataactgttaagagttgtattgtctttgagtttctttggggttacctttcttgaatccctatgattttgtgcatcccactcatctgtgtcagtgtatgttcttcaagactgagggatacgagacctggcaggaacaacctacttgctaaggaaggacattcaatgtgtacttaataagatgttcagaggtagattttcccagactggtcatgggtcccatgctctttctttccttccactccaaatctgcagcatgtttagtttttgtctttaagtttcatgattcatggccacccaatcattgccacacttctagacagcaagtctttacctgaccctgtacacgtcaggagtggagagactgcaaagatggcaagagaaaactcttctcccaggcctgtctcctttcatccaggaatgaaaatctctctcagtcttacatctattgaatctcatgggctttctggctctgcaagggtggctggaaaaaatgagtatcttgctttttcagcatctatattgagaggcaggcaaggaaaaggtggatgaagaccaattaaccgaagtgtctgttacaactaacaaattctttttctcttttcctctcttctactccacagaaatcattgcctgtcaacagcctccacccccacctccccacccccactcttgggaatggactctgacaaactcaccatcaggaaagttgatgtttcccatctaggatggaagaatgggattctgaactttgtcactgtttctgaaacgtcatcagctcctgtaattgcatggttgggacagatctatttaaattgctttgaagttttcccaggaaattcccacaaaattgtgcaacccaaggaattgaggtggaaaaaatggcactggcatcaatttgcttctcaccacgaccttgtgaaggaggcaggtagccactcatatttatgatttaaaaaatgagggatcaacaattaaaggggtaacagttctaggtgcttggactattagttttatcaaaaacacagtcggtataggttcattgacagctggcattcatcatctgaaattagatccccctttgaaattattctttctctcattttccttgcttttacatagaagttttttcttttttttttctgtaaatagttagataatggcatgggatgacactgcaaataggcaatataccatacaatcaattccatgtattaattccagaacagtttcctcattaatggaaatacaggatgcattctggtatcattattgttgacatttctctttgcttttattatattcaataaaatattgtattcaacagcttacctcagagagaagtttgatgagatttgattgtcctttagttttatctttatcaccaagacaggacccaaaacctgtcttcctcctagtgtggcagggctgttgcaatgaagcacacagacaacaaacacatctttctaaagctctccttcatctgaaagtaaagatgacaacttgatatgaataaaacccatagaattttggaaaattttgatgtttctcaatctgcactctctgattgggattgatttaactgagagtaacagaaacgttgacgctgcttaaacaaataagaggtttatttatcttgcaaacactatgaaggtattcatttcagggcccagtgcagctgctccagggccagctcatttgacctttcagcttttctgtcctgcatgtgtaactgctgagcatcggagagttacattagcaagccaggagaagaagaagaaagatgaagaagggaggataagtggctatagcaggaagtggaacatttccagaaaccccaataaatgtatatcttgcctgaactacatctcacaaccatctttagctgcaagagagtctggtaactgtagttttttcactgggcacactgccattcctgtaaaaattacaattttcttaatgaggacgaaatagagacatgatgttgcctcagcaactagcagtgtacaccacacccatcatcgccaggcaaagtgtagtgtcatgatttcatttgttagtcatcactttcaacatctattgccatagtaaacataagccaaaatgattagatatcaaaaactgatctaccatattattttgtttttccaataagtaatagcagccttactcattcacctttgagaagaagtttattttataggcacaattttacatgtatttctattttggggtgtgggagtaagtaaagatctgtgtctttgtttgggctgctgtaacccaaagccatacactaggtagcttataaacaacagaaatttctttctaatagttctggaggctgggaagtccaagatcaaggcaccagaaatctggtgtccattgagaacccacttcttgcttcatagatggcaccttctctaggggccaatgagctctcgggggcctgtttcataagggtgctaatcccattcatgaaggcaaagccctcatgacctaattacctctcaaaggccccatttcctaataccatcactttgggtattaggatttcatcttttgagttttggaaggtgttaaacattcagtccatttggatagtaaagtgagcttgagagggacaaaactcactggattgtcaaaggggtcttggattcaccttgggactgctgtgtttccctgctacactgtctgagcaccttggctttaccctttagaaccaaggcccctcaaccctgactaaacctggaaacaatttgaactcaaggctgaaaaacagcttctgagtcaatgggtggcctattttgggctctgcctgacttagctgtctggctgtgtctgtaggaacactcttgatggcgtcataggcaacaagtcaatggtgtatttaaacagagctggagaagtgctctatgcactgcctggttacatcatgactccaaggctcttatcccaggaacttaaatgaaatgggcataccaaaccgatggactcattgtggactcagcctattgcaactatgttacaaatttgaacttttttttccttctagtttttttttccttcaaatcttttattcttttcctctatttaggttttgtcttagaaatcttattagaaatttcaagttggaaagactttaaaaagaccttttccagctccccacctgcaggaatcctagggcaccacatccacatttttcaaatgtggacacctaaagctgagacaatcattatctcacaaatctgccagttttgagtaacatgtaagaaaggtatttcttattattacactgatagcttcaactggaagatttcataatctcatacccacagggaaactctaaaatcctatttaacaaaatgaccaaaaaacctgacgcactgagtgggtattacat

SEQ ID NO: 1887359 - DNA, 4001 bp, Homo sapiens
gatgtttgtggataagttgtccctaaattcaaggaacaacaatagaaggcttcccaattcaatttacagttctatcataatattaatgccaatacctgacaaacatattccaacaagaaaactagaatacttacaattaaaatctgaaaccagatattaacaaattaaatctagcaatgtgttaaaatagttatattctataactaagcaaagtttattccagaaagcaacatttcccaattttaagaaatctattagtataatgtattacattaaaaattttttaaagaaaaatatgtaattaagtaagtacatgccaaaaatatatttaaggtattggaacagatattcctgatcaattttcagtagtgatttttaagatgtgaatattttatctcttcatgcaaattataagcctttctcataccatatattatttctgtctgtgagctacatctacctgctataccctcattctgccatagatcccaggaatttctatgtagtgtatcaatcaatatatttagaagtagtttaaacatgcctttcaggagactagcctaagtaaatgcttcgtgaaaaaaatgtctatggcttagtaagtttgggaaaactatatattgtgtttttctcttagagatttgcaacaaaggttaatttaaagactcagagaagtcttccagggtttcccaagttaattgaacataaaacacttttgttcttatgatgcctattaataccccatgaatacactttgataaacactggtttagatcatgtcaccacaatgtcagtctcagcacgggtggcatttattgttcagggcattgtgtgaggtactactgcagatattgaattataagatataatctattcccacagatgattataatgaagtttagtcagaacatataaataaagagataaataatttgaggcaacatggcatacgtaccatataagccatccaaacaaaaagtgtagcaagggtgcataggaggcaggaatgttagatgctaaatggttgaggaaggtgtctaggaggatatatgagttaatccttgggagaaaacacacacacacaaacacacacacacacacacggcaaaaatgtgaatcatatatttgggagaaattaaagcactggtttatagctgttcaaaaggtaggtagggtgacagtgtaaagtatcttgctttaaggatctggatctttattactcagcccataaagaactaatggaggtctttcagcaaggagagagcatctcagggtaagtgtatttatagaaagttgcaattaacacaaaagttttcaaaaaaatgttttctgtttgactcctgtcttagcctaggctccccacaaaagcagaacatatgacaaagtccaatgtacagatgctttattctggggtatgatcccaaggagctgcagggagagcctgggaagaataaaaaaaggaagagggaaatgcaacccaatctagctcctcaccactgtgggcaactgaggcttgattcctctgggatcctctaaaaggaccagaaaggatacctctcagaattattcactcaggagttgaaaaagagaaacatttatcttccagttcccagaccccattaacaaaggattgccctcacatctgcaggtttgtatatgctccagaatgcccacatgcatttctacaggtatcctacttagtgaaggtggagaaaccctggggcagaaagtgagaaataaacagtgaatctaaagtgaggcattgtcaagttatacctgcatgcaactggtgaccccagcaatggctggagtaaaaaggggactcctcccagaaaagtctatataagaggtgtctggtagactctccaaaggaaggtcaatccaactcaacaccatacttcctggttcctacctgatttattttccagcaatcctttacacacatggtcgtttcatatgtggtcatctctaggctttttagcattgtttttttttttctccttccatttccccatgtcattctaaaacaaataaatgaaaacaaacaaaaaatagacataccattttttaaatgttgctttaatttatttatacaaagaaaaaccattttagatttgtttaataaggtaaatttgatggcaaaatgaccactagaacaagttctcagacaagatgtatatgctctgtaggtaaaaataaacttctacaagaaagttttcaataaattttacacttctatgacagccctgtatccccagtcagaaccaagcaaagcactaaagtcattcctctgcttattccagttaccgggtctgctttggcagaagccatatttggaaatctggttcttcataattgccacaaaccagcaatactcatcttccattcatttaacaaatattcgttgaggaccctctgtgatccaggtatgattttaagctctggagattaaggtctgaacaaaacagagtaagtctctgccctcatgaaacttacaatctcgcaggggaagtatacaagtaaatatgtaatatgttgaatggtgacagaagctgtggaaaaaaaacaaaacagtataagagaataaaggattcccagatgagaagtggaaagatgggtatcacaattttatatagcatggttataaaataaatttgtacagagacatgaaggaagtgagagaatgagccacgtagatagatggggaagaaacataccagatgtggtaaaaacagctggcaagaacttgaggcaaagtaatgctcaccccattcagggaagagtgaggaggccactgcagtgaaagcagagtgagcggggggatgttaaaggaggggatgtcagagaggtagccttgggtgagatgatatagggccttggagaccattataaaacttagggctttactctaattgaaacaggaagctatagaaggattttcagaagaggagtcatgtaatcaactcacatttttaaaggatcattcttattgccatggagaatagatataggtgtcctagggtagaagtgagcaggccacttaggaaggtaggtggaagataatgatggcccagatgagaatgatagcagcaagaaatggtagggttctaattatattttgaacacagagcgggcaagattagttgatgaattggatgtgttctacaacagaaaatgagaaatcaaaaatgactctaagatttttgacgtgaattgccatttaacacaaagagaactgtaggtttgaggttgaaaaaattaaaagttcagcttagggcatgttaagtgtgagctatttattaaacacccaagtgatgatgtcaaatgggcagttggctgtacgcagtcctctccttgcaagattccaacacgcacaaacttcagtcacccaggtttagttaaataacaccagtcctccaaaaatatgattgaaattgcatttgccacattatagtaactgaataatcgcataaagtacaatttcactgtttctcccatccacaaatcactctgtatataacagatgtatattatgattagtgaccaatcatgtcacttctttcagagtctgcctgactgattggtcaccgactggtcacttgtgcatctattattcagttcacacacagcaaaatgtgtcactgtgttgtctcctgtctctcagtaataagcccacatgacattccacaaaaatggattatcaaaagaagaaactggtccacaaagatgaaagggcagcaaggaaaaacatgacaacactaaaagtgaaattcaaatcaaatataaatggagttaaagaagaaatagctgccccaggaatactgacactgccactgtttaagacactagaatgcagccacaagcacttcgtgcaggtaactttatagacataaaggaggaaagtgcttgtaaggaaaaagacgaagatgttccagaggaatacgtcagagcaagtgattcaggcaaaatatttcacattaaaagaactcttagagataggt

SEQ ID NO: 1887360 - DNA, 4001 bp, Homo sapiens
tctcattttcctatataaccatgtatccttaaagtatatgttgctaaatcttgcatatatttgaagtttccatttaagataagtggcattatattgtagataacccagtctttggttcaagtttatgtttgggaagtcatccacgggtgttgacattttcagctgaatgtcattcattttcactattctatagaattccattgcatgaatatcccaagatgtatttactcatagggggatttttttcttttaattacacaattatattatcttagtattatacatacataacaattatcataccctattacccaaaagttgtaaacattctgtgaatataggctccaatacatagacgattgagctgtgaactcattaattttctacatagtttctttggaaaccaaagatttgaaagccagagttattgctgatctcctctttctgcttcattaggcctgcctttcccggtaacctgttcctcaaataatatttctcccaactgtgacaccaactagatgtcaaaacctcagtgatatccgttgatgtcaaaacatcaatttatgtcaaatataatttaacctaaagccgtttcctttattagaatgataatgtcatttatcatatgtcttttctttcactttccctgattttagttattaaaacaacaccccacttcaatgtgctcatttgtaaaatagcaatgccattactaacttgtgtctgttacagagagtatcctacaaagatggtctcaaagtactttgagatgaacagaatgttctataaatgggtattgaaaataatcaagacattcatggatccaaacaggccacagaaataccatagcaacaaatgaacaataattgctgcattatgggctctttccccagctgcactcatgcaatcaaagctctgctgcgtcttcagaggagcccaggtcagatctggctgccatcacccatgaggaagacgtgcggagccagacaggtgcctggaggaaaggtgggtgtgtgctgtcctgccccatcctctctgtttccctcccacgtgtttgcagagacgtcctcagcatggaaccagggcccttgacagagacattgtcattctggacaccccacacccaagccagttcatccaagtcacccgataaaattgtgctctgaagaaactgcctgtttcagcaaactccttaccttactggacgcatagcgatggccagcacaggatgaggccatgggaggatcttaatgacacagtccactctgcaaaccaaggtcaacaaggcagcaggtatggccacggcccctcaccgtggactctgtacgagccaatacactgtgttctattccccagttatttctgaatacggccacagggagatgtgagccagccctccttctctagggcacacagaggctagaaaagatccacaggacctgttcaacttgccagtgatcccaaactcctgacccaggcagatcactaagagagagagagaaatattcccttttctaggaaggtcctctggcctcacccagctccatgatgtgtccactagctcgagacaccccagttattgggggcatcttctccaacagtagggaggactgcggcgagggcagctgtggagatggtagaatctttcctgtgggattctggaatgttgtgtcccctctggaagagacacaaggagtgagggcgagactggaaagggtgtggaagggagaaccttccttattgcctagcgtccctcaggggccagtgaccaaccttattagccacctctgtgcattcaaccacttcctctctcctgaggcagcccgagcctgaatatctcagcaaggcattaagaaaggctttaataattgatttaattaaagtctaaaaattatagaaccagctcctatgcgttgagtgatttcagagctctctttttctttgccgtcttcgaagggtaatctggatgctggagggttgctttctggcttgacaaactcagtttgtttccatagttacaaaacacttgtgctcttcccgacccacaatccatcaggaggggtacgctggctgcctggtaaccacgagatcatttcctgaattcgcagacctctttaacattatccaaacattagaaaggtggttgaccacacctgttttgtgcactgcctgacaatctcattttgatttaagtattttgtaggaagcaaagtaaagactatttgcactataaattacaaatatttatgtctaatcccccaataaatgggaatttcaagggaaaaggcgggaactcgaaagagtgagcgcagttgctgcagtggcccaaggagtttgctcttgcccaggctgactccatgagtccagctccctccttggagaaaggaagctgtcgggggagctgaatgccacggtagtcaagggccaggcagcagatctgagagatctggacgtaaatctttttctttttcttagacgaagtctcactcttgtcacccaggctggagtgcagtggcgcgatctcggctcactgcagcctctgcctcctgggttcaagctattttcctgcctcagtctcctgagtagctgggattacaggcgtatgtgccaccatgcccggctaatttctgtacttttcgtagagacggagttttgccatgttggccaggctggtctggaattcctgacctcagatgatctgctcacctgggcctcccaaagtgctgggattacaggcgtgagccacggcgcccggccacgtaaatctttttcttactagatgtggataatttattctctcttaactgtattaatagttcccttatctgtgaaagaggtaactcatggctttgttgagaggattaaataagtgaaggatttaatacaagtatatattttgcactcaggaagtgatcattgctattttgccctattgtttcaaaacaccatccattcccatgatacaaaacagtgcgaagtataggacatgttcagtggagataaagaatcctcgaatgaatttagatggtggtgatgatgataatgatgatggatgtattaaagagtctagccaggcgtggtggctcacacctgtaatcccagcactttgggaggccgaggtgggtggatcaactgaggtcaggagttccaggccagcctggccaacatgatgaaactcctctgtactaaaaatacaaaaattagctgggtgtgttggcgggcacctgtaatcccagctacttgggaggctgaggcaggagaattgcttgaatctgggaggtggaggttacagtgagccgagattgcgccactgcactccagcctgggcaacagagtgatagtctgtctaaaattaaattaaattaaattaaaattaaaaatctagagcctttcatgtaaatgtggttgcatttgctccacttcatgcaagaggctgtttagcatgtgattacaagtggccctcaagccagagtgtatgagttcaaatcttgtcattatctcacactagatgtgtaatcttaggtaacctcctcaaagtttattatacttgcgtaggtttccttatcagtaaaatagaaataataatataaatcttactgcactggtaagaggattaagtgcactcagatttctaaagggcttagaccagtggaatgagttggacaccctgtgatacacacaaacctctcagtctgctctgtgagctgtttctctcctgccaccttggatgaaatcttctgctggtcctcataattttcacaatcactcctgaatggtacaaagtcctctggtcacttcttgaagtagtaatgaccttatttcagagattaacatgcctagtcccacatgagaaagtactaaacttcatcgcatgtttctcttcccccagtttacgctggcctaagggtatatttgaatttgtagcttttgctaagaaggttgatggaggggcaagagtcatggaattgattttttaccacttcctttaaaagtccctcata

SEQ ID NO: 1887361 - DNA, 4001 bp, Homo sapiens
gaaggaggtttggaagaaagaaatttatcatactcaaaggtcgcagagaggggacatctcatgctatgcagggacacagagaaggcatgggtgtctgtcagaaggcagaaaggagcaaagagaaagcattagaccacaggctttattgggttttccataggaaaaacagggcagagcaaacaatttagaacagggcttgctttaaaaattccggctcgactttgggctatagggatggcctccacttgagtgatacttggccctgggataatttaaggcagggcaaacattggcttagtgtgtgagagttagataaggaagtaattaatggattggttggtttgcatatgaaaggcctgcgttcataggcaaattgttattatctttaggaattagctagccctaggaggaggagtttctccatggtctacaaggctcccaaatgccagagcaacaagaatatagataataataaaatattataaattcagtattggccctgtgaagaatcgatgccaaatagacaaatacagaatctaagaaaacacaattagaacattaagtcatgaaatacaatttttaatatttttgtggatgaagaggtccaagaaagccataatacagcccttcttggctgcagtctgtacaaagtttggttcagtgaggggtttaatggtgtaggagaaaaacttccaagcagataaggttgaataaagtggcaccacaactcataaccactgcccctctgggttcataaaaccaccttccttatttgttttgttgatcttctttgttttgttgatctgctcctggtacttgttcctgaaaattgcctttagcatgtagacactgattttctggcctctatgtagttccggttctcaggcttctttcttaaagccaaccctgacctttgtcttgacattactgccctggttaccgcagtaatatgctgaacacataataccaagaataatgagtatttgtgtttgcttttttttttttaaacagaacctaaaatgttctgaacttgcacttataattttattaactactcaacaaatgatatttattattaccaaagaatactaaattacatttttatcatatgctttatgatttgtactaactattatacattaatacagttaggaatatatactgctacaaacaggcataatggagattttttttgagaagttttgtattttattatgtgttcttccatttaatttgaattacattgctttcatattacagcttatctggtctttctgtttcatgatatacatagaatatcagttctaaattactaaaatatttaaggaaaacatttagttcagacaccgtacctcactgtggtcacagaactttagtcattgactgaggtcttgaaagtcaccatcttcttgtttttttcttgcagaagaaatgtcaagttatacttctttactctgcaggtttcagagaatatttgttttcagataagtagcttggagtttacccttcagatattcaaataaacacagcaccattttcaacctttcaactttcttctcaaaaactttcaggagctcagcagcagaaagtcaccagtttttggagaaagaacttgaatattttaaatattcttaaagttttgaaatcaccaaggccactgtgtagaaaggattactgattctttctctagaaaattgcaatttgcagtcaattccaatggggcaatgagtgagggtagcgaagaaagaaaaaaaaaatgttatgactttatctcaatgaactattaggaaagtgttcgagacataccactagctaaaaaaatgattttaagaaaaacagacaacttgtcttcaccaaaaatttcttccatgcaataagattacaggaagagaaagaggaaggtgagtagatgaggcagattagaaagtaggtagtgtaaataacattatatggttcctcaataccttagcctcccttatttatcactgatagaaccttgatcttgttcagagttcttctgtacccaagcaatgaatcacaactcatctggcccattatgacaagcctgttctctgtcaggctgccttggagctaggggcagccaactgagttcttctgcatttgaggggctgactgcaggaaggacttctaggaaaggttttgctttcctggtaattaatgaggtcaagtagagtgactctccactcctttcttatcttctaccagctttttgctttgaaaagtggacccagtgcttatggctgcatcaccattttcattaccagttcaagaacagaagctaaaccactaacagtggcaacctaactcaatcttgttgtacaattacagaaatgatttccttgcttttaaagcctttataagtcaggaatttttaaaactggcattcaaatagatttctaattagtacaatgtagccccatctcagttcagttatgtcagccccatgtctatattgggcatctgaacagcatttaagaaagtttcattgcttaattttgaaaacactatatatgacaatatctatgttctcccaaatttgcttacctatgactcaatgcatggacaaagccaacaaaataaacaaaatgccattaatatgttttgttattacggactggaggaagagagattgcaggcagtggttggagactgggttcagattataatgggttgaggaataaatggatgctgagaaagtggaaccaacgtatgagctattccctcaagaagtctggaggtgaagagaaagagaaaatggtgcaaaattgaggactatgttatttggggaatacagaaaataggtttctagttgaggggaaagtgcagtggataggaagaaagaatgaatcacaagggaggaaatgatcaatggagtaagatccaactataatgtatgccaggctttattttattttatttttaacaggctctcactctgttgcccaggatggagtgcggtggcgcaatcactgctcactgccgcctcgatttcccaggctcaaacgatcctccttcttcagcctcctgagtatctgggactataggtgtgcattaccaaacctggttaattttttctatttttttgtagatacaggtttttgtagatacagggtttctttttttttttttttttagatatcttgcccaggctggtcttgaactcctgggctcaagtcatctgcccaccttagcctcccaaagtgcctgcattacaggtttgagccaccatgcccagccccagatgttctagttcttgaagactctgccaatattttagaaactgaaatacatcaaataaaaataaaatatgcaaatagaggccaggcaggtaagatattacatatttttaacaacacacaaatgcagacatgcaaatatacagtactttcttagaaagtattcaagataaagtaataaggaagtttttttaaatccacactataatttaatgtaggaatattttctacaaataataacaagtctgacaatatgttcataatgtcatcttttaagaactttttagatttcctttctactggaaaacttttaactttgaaaaccgcaagtaatatttttcttcctgaaacctctgcagtggtagcaatgcactgaagtttgattaaaaggtcagttaatgcaaacataaatcccttaaaatatttagagcacacaagtttcaactcatcttgtatttataagacaacattttaaaaggaaaatctcttaagaatggaggctattatgttgagcaatgccttcctttcccaacagagtattagacaagctgaatatataaatctgctttatgttactgtatcaatggctgatgttcaatggacttttggtattagggctataaatatctgacagagaaataaacatcatatggaagtaaattgactataatggaaggaggtgctctgaataggcctccatggaattatctgctcaatctttgagactttgttttggcgttgtta

SEQ ID NO: 1887362 - DNA, 4001 bp, Homo sapiens
agctagcacaggctcaggatcccctaatgggcatttctgccaaggagaccatcctcatgaaaatggagccgaaagctatgcgcacaagatggatggatgctcctctcccagagaccagcaggtgcaggtgtgcagggagtgggccagggaggggctgtgagcaccaacctgggaggggtggctagacctccattggatcctcctgtccgcaggggcctcagagggttccagcagaggccagtcctaggttccttgtcccatggctggcccctgagacttgcttcacctgccagctctttccacaaagacatcaggatggcatacccaacccagccccctcacagagaaaggggattaatgtcagggcccacggccatcctggccttttcagtaactgtttaaatagtggataggttaggccagaatgtgctgctgtggcccctgggatcacatccctggagggaacctgcctggggttgtgaactgaagggcgaggctggacagcccacttggggttcagtgagccgagacttagttttcagctcagttccctctgccactcctgggggacttgggcttgtctagagcaggcattgaggatggcagagagcagagatgctgagctgtcaggtgggtgccaaagggtgagcatgaggcatcccgagggttggagccatcagaaggcccttaggtcagcccagagccatcccagcctctgtacctggagctgcagggtgggcgctgtgcagtgggctggtcagagtggactgagaagccagttagggaggggttttcattgcccattttcctgcggtgcaaatcaagttccgaaggccacaagcgaggtggggcagaaacactgggctgaggcatcaccttctctcctctttggctcacataggcccctgactttcttgggcttgcctgaaagtgagagaagatccctcttattgtgcgggtggacacagaagtcaccagtcacgtgtgatgaggagggctgaggcacccccagagtctttgcagggcagcacccactaattgctgggtggactgggaggccaggctgggacactgggaactgaggtcaccagtccccactgtacctcgaatctgtccccaccgtgcaacattgggccagctcaggctctgtcaccagctccccacatcgtcgtccctcagagccctagggtgggttccccctactcagtgtctctggcccgtgctctccactttcaggcctgacaagcacccaggccccacaccagtgtctttctgagggcgtgggtgttgggatcgctggtacagaactcacagcttagctacatgtgtgtcccagacttgcttaatcaatggagcagtgaacccgctgcttctggggtacagtctcctgtatttcatgggtcaggtagacaggctgcctccccttcacctccaggtgtgcgcacccacagtcatctccacctgcaatccagtctcatctgaagctgcacgctctgcaacagacgcctgtgcacgacctcgctgtgcacacagcaggggctgccctcggtccctcactctcccctaacgcccctgcctcccagacccacgactcacaggaggagccagtcccctagcccagggagccagggtgggtgcggcctggggactgggcatggcaagctggcccatagggtcgtccctagcacctaccagagagtgtacgagggagccgagcctgcagcgccgggtgggcagcgagctccctggagacccatgcagcgggtcaggtgccagcggccgccaggtctgggcgcggggccgggccaccagggtgcggctttccgctctggagagtttatggcccctgtcgtgggacggctgcgcagccgccagggagggactgcagggaccgcggctgggacaggctgctgcgccaggcggccctggaccgccgcttctgcccctaagccgccctcgcagcccaggtgaccggtttgtcctacccggggagcatcgccctcctccgccgggcccgagcccggcgtgggggttgtaggccggcaccacagcgtgaggacaccgcgacctctgcccccgggagcgcgctgaatgccaggtggggctgctgtcgcaggccgtggagccgcagccccgctgaatggcagggtcaggctgggcgtcggggtcctggcagagaccgcggcgagggccagagcaggtgcactggccgctgcacacgcgccgctaggctcccggacaccgctggcgcgcacccctggtggcagccggctcaggagccgcgggagggcggtgcccagtccccagccaagcggcagcgcgaagctccttccccgcttgggggagtgggcgtggcccaggggcccgactgccttactagtgaaaaagctggggttggagctgccacggggggaggtggggggcctaggaggctctctctggaccttctgggtgtcctcctgcgacctcaggttcttcacctgtctcagaggactgatgggctggtatggcaaggttgtttggaggattaagccagatagtcgcagtaaagccccattagcccgtctggcctctggatttttttttaaattatttttctggctttcttaggaaactttccagaatgtgtccaggtgttgaagcgggaaggctggacaccctcccttggcgttgcggttccttccagacgccccctcttcttaggctcttttcaagcgcacgcccagcaacgtgtgctctacccaagagcgcgtcacagatcttcctgtgggtctaaaaccagaaggctttcttccatgacccctgccctcatatcaccgcaacgccatgtctcttggcagagccggctacagaatcgagtgtcagtttaatgcttgttccctaaggtctccctagggctcttatgacggcattagggttcgggttcgggcgcgcccctccgcgcctgcgcctgcgccggcgctgcgcgcccctccgcgcctgcgcctgcgccggcgctgcgcgcccctccgcgcctgcgccggcgctgcgcgcccctccgcgcctgcgccggcgctgcgcgcccctccgcgcctgcgccggcgctgcgcgcccctccgcgcctgcgccggcgctgcgcgcccctccgcgcctgcgccggcgctgcgcctttgcgaaagtgaagctgtgttctcatcagcagagactcgcagagcatggcgagggcgcagctgcgttcttctctgcacagatgtccggagtaccgcggaggcggagcagcgttctcctcagcacagacccgggcgggcgggcagtccaggggcaccccgaaggcagagctgcgtcctgatcagcacagaccttgcgggcattacctcgctttgggacaactcggggccacagcgacggtaaataaaattcttcctctttgcagccctcaacaatcagggtcagagtccagttagaagggtgagggttagggttagggttaggggtaggggtaggggtagggttggggtagggttagggttagggttagggttaagggttagggttagggttagggttagggtagggtagggttagggtagggttagggttagggttagggttagggttagggttagggttagggtaggggttaggggttagggttggggtttagggttagggttagggttagggtagggttggggttggggttggggttggggttggggttggggttggggttggggtagggttagggttagggttagggttaagggttagggttagggttagggttagggtagggtagggttagggtagggttagggttagggttagggttagggttagggttagggttagggtaggggttaggggttagggttggggttggggttggggttagggttagggttagggttagggttagggttagggttagggttaagggttagggttaagggttagggttagggttagggttagggttagggttagggttagggttagggtagggttagggttagggtagg

SEQ ID NO: 1887363 - DNA, 4001 bp, Homo sapiens
ttaccaaaactgaaactgtaaaaaatcaaagtttatatggtcttatagttattaaataaattgaatctgcaatttaaaaactaagcataaagtggcttcatcattagcatcaaattcatgcatactattctagggaacggcaaaagggagatataattcctaagtccttttaacttagtagaagtatggacattagacttgaaaaaatacttcaaaaaagagatcttaaagtgaccaataaatataaaagggcctcaaataattaataatcaaggaagtgcagcaaacagaagaaaatttcaacaaaatgtatatttatatcttagaaggcaaaagagcatacagcacgtataaaatcaaaatactgtaaaaatgaacattcagaaactgagaagatatttcagagtttgaaagatcctagcagaaaacctttaaaaagaatatgtggaagatgagttgaagaaaacatcttcaaaatcagaacgaaaaagaaaaagctgaagagaatgagaaaagagaagccattccctgcctccccccatgatatctaacatgagttggatccttactattctgagccccttattatgagggtctatggtttttccattcttgttatgcatgaaaggtaatatggagagctatatgtattttaacctgctcaataatcagcatgaagatttggaaaaggtttcaccaatcaacactctttcgttgaaggctgtgtcttcactgcctacaacagaggtttccaaacttttccagattagctattcattttcaaattttactcatgtattttatgtaccaatatttatgactaccctgaaatgttatgtttgcaatgataaactgcaaaatctatgtaaatttatacacaatgactatcagagcttctgatagttattccaaaaatactcataatagtaaagctcaattgttagaaacattaaaaccatatgcaaattgctgaataaaagacatgttagcctcagttacattatgtataatatgaggacatcctgactcatggcaacactgcaaatattaaatgactcagcatcatctttgtcattagttattataagcattaattattaatattgtcattatcgtttcacattcaattgagctgatataattctatgccagagcagaaaaaatttagtttatctgacagaggcttcttgttggtaactgctcagtttctattctgctttttcaaataatgaaagaggttcactagcccatgttagcatttttgtatattactacttatctccatacaccagcttggaaatcacttgctaaattaaggaaataaggaaatcttaagatctacttttaaattgatgatttatagggttatatcagaatactcctctttttattactccatttaaatcaaatataatatgcttttaaagcagaaataaaacatattcaataaaaaaccttgaataatagtgatattatttaggttgtgattcaagttataggtaattcacatagatctccagaatcatttttctgcctcataatggatatataaagttatatgcataaaatatgagtaagttaatgcatctgatatggaagtggtgtgcttggtgtcccaccagaatatttgtgaataattttaaaagatatttcattttcaaagcctcctgttaactggaggaaaggagaggggcttcaactgcaaatagagggacttaaattagttatgaagtcaaatgcccagatgagaggatgatttaacacggaaatgggatttttgaggaaccatgttttccagagcctttacataatgctattccagaggctagagatttgtatattcattctccactctcagatccaccctttggagtcctccaaatactaacgtatttaccggcattgtggatgtcatcgccatattctttccaataatttcgtatcaagccatgattcaaacctctggtttatttcactgcaagtggaccttgcttgagagccattagaacgcatttttggaacggtttattatggctagtgttccattactggaatgctaaacacaagggagttatttatatcctactgctcaaggtcatcgccaaggtctaattgcaaaaattcaaaaaattgcaacctcaggcataaatggattaagggaaaagcccgacaattacaccgactagccaacatcataggactcctgcaatccaggccatcgcaggccaaggtttttgaaggaagccctcaaagaaaggaagacccttttattatctggattcatgtgagtttgccattttgccatctggtggttttctgctgtaattacaaccatttaccagttgacagggaaacaatttcaccacagacttaatgagacgaagtcttgtgattttgagaaaagggaggcagccatatataattattccaagagacataataagaacgcccaaagagaattctgatgtctgtggcatatgcttatgattgcagtgatcctaaaggaaatctaaaagactgaagctgacagatactaccatatgctatagtttgaatgtataccccagatctcatgtgttgaaaacttaatccccaaattcatacattgatagtatttggaggtagggcctttgggaggtaattaggattagataaggtcatcaaggtggggctcccatggtgggactgatggctttataagaagaggaggagggagctgagatggcatactcttgccctttcaccttatgatcccctctgccatgttatgatgcaacaagagggccttctttaaatgccagcaccatgcgctgggacttctcagcctctgcaaccatgaactaaatacacttaatttttcaaaaaaataaattgctgtttgtggtgttatgttacagcaacagaaaacagactaaaacaccatattaccggatgccacatagatattgctttctgatggtgtgtgtgtgtgtctctggatgtgcaatggatatctttgcatcaagaaaacagcttgagaaagtgttctgacctactctaggagaaaaccaaataataagcataataaaaaatacctctttataaatacaaacatgcataattatgtcaaaatgctttctaccttagttgtaactctgagatatctagtaagacatctatttctcagcaggggctccccaaaagcctaagtcatagttaaaagggaaacttagctaacctggacccacactttaaaaattcataagttaagtgatcttttgtttcaccttaattttttatgattgtttttgttttacctcattttcaagttattgcagtataacatcacaaagagagtctagacattttacctttagtcattagaaatccccattatctcctggtatcttatgattttaaatttctgttcatgggacctaatgactataaacagagtgaaaaatgcagctttgaagtctggaattcctctgggctttttagaaatgattccttcttttaacctgtgaagaatccctcattaacagatccatcctgcaatatttgaaaggaacttataatataccacctacagtgccttaaattgcaccattagcaattcaaaacatctagtttgcctgggagtgggtaatgtgagagagagagagagagtgtctgtgtgtgtgtgtgtgtgtgtgtgtgtttgtgtgtgtggagtaaggacacattacagagaaacttaataatttgttctgaaaatgactggtcgtgactatagaatgcctgggtaaacccacgatcatggatggtgacctcccactgtaggcttaagtattaatatctatataggctagtatcaatttttatgtctaaaaattactttgtgtctgaattacatttcttttctcttttttcttttttgttttctgagccagagccttgctctgtggtccaggctagaatgcagtggctcaatcttggctcactgcaaactccaccttcctggttcaagtgattctcgtgcc

SEQ ID NO: 1887364 - DNA, 4001 bp, Homo sapiens
tatttggtacaatttttaatactcagactcacactcttgtattgtctttttaattggatagggcaaaattatcttatcagaactaacaactttcatttgatagggcaactatttttaaggattttgattaccaggagggtttgatccatgtcttatattgtttcttacatatttgtgctaggtataatatcaaatgtaacatagagtggttgttcgggatgtggtcaatgcacaggattaaaatttttaaaaaggtcaatgtaattatttgctgaggtaaagaactccagacagttctgacatacactggcttatgatcagggttgaattttgtgttcactaaatgtggtttacagtatagtccagaatatttttacctacgtatctgagatagaagtatatattttcaattaatgtttatgaatcatattttagtgaaaacacagttttttaccgactcgtgctaaaagcatttatagaagattgcacttcatgtccacttacaaaaatgaacaccacttttatttatatatttttgtttatgtaaagctccaaagataaatgttaaggctaacgcattttaagtttgcctgttaacaactgcattaataaatacatttttctcgctggtaaacaggtcaagggaacccagcttgtcatttgggaactgaaacttgtagccgtaagcacccctcattgggtatattaccatacctcaggcaaaatatgaaaaccaagttttcagttcactgtaaaagaactaatgggtagtagatttataaatgggtcaaaaaataatgtttaaaattataactacctgtattgataacaaactcaaatgaaaaaaagtacaacatataacgacaacataaatactatctccaaaactatttccaataatcattacattcttaaaatcaaaacttgttatttaaaaaacatatattttccatattgttaatgcaaacatatcaagtatatatccgtgaatattaaaattacttttcttctgacataaaacaagattcctttaagtgttaataaaacaaaaaaattatttaccttttccttgattccaaatcctaagcatagcatttaattattaagtttattcagtaatctctgtggcatttttaaaccaaatattacaatcagtgtttgatggtacatatatctggaatttcataacatcccttactaaagagagcatataaatttaatataaatcataataaatgtatgtgataataaaattatctccatactatataaaagtattaattaaattaagcaataatacccagggtaatatttagggaaatatttttctgagggattttgtttatcatatataattaaaataagatgattcataatccatttttatactttaatcaaataagtttatttccttattaaatcaatattatattttaatcacgcacagagagaaataaagatttaacccttcaatgtcattgtggtaatgaaagccattcttactgtaatttctaggcagattttatagcaatgcagaacttaaagaagaactgcatattcttaaagtactttaacccaggatttatgcatatggagcatttacgtttcatagaatttactccaagaaaaggtgatatgattttatttagtttccacaatgctgttgtaacttattgtaagccaattaacatttactgagaacttacatttgatagaaatgcgtccagtcctttcttatacaagcagaatgatattctctcttctgaccctcaacagtcagatggagagatgtgaaaaatcattaaatattttatttaaaaactcatgatacaatttattctaatagaatttcatttaacgtgaataaaaagcatagtgtaagaaactgcttcttgaaaacaggaaagcctttgcacattcgtctgtcatctcgccccagaaaagttaattttattttccttacttaaaatattatctggcatcctgatgatgaaggagtctcagaaatgtagtttcccagcctccattccttgtaatttgggggaagaactgtaagaattacaaaggatgacaagcgttaatgcagacacatttcaacatggaacacatactacacaaataccaaaatcactggatggaagcccacgtcgtagcacttagtggcttcgctcagtatttttttaatctacccagtcctgcagagtagatactatcctttttgaaggtaaagcagtttaagagacttaactgagtatactgggctcaatctagctttcaaatagaatctattaaacacatgatatttctccctgtatatagctattgatgacttatttggacttcatgtattcatctcaatattgaattactagcaattttctctcacatctccattctagcatttacataaatcataatatttatgattccttcacatcttcagaggagcaattttgttatcacccactatggtactaatatttgaatatttcaaaaatatgaaatctaaacatgtttgttttaaatcaagttactattaataggaaacatttgactcaattttgttaatgcttattaatttctcagttaccttccaatagttcatacatagaaattaaattaggaatgactctcttaaatataaaacattttatataaatatatttaagaatctgtttttaattatttgccattttatacatgagtatagtagagatattgtgcttataataaatatggaaaatttagaaaaataaatgaagccaaaacattaaatgtatattcatgtaacagaaccattgtgcctattgttaactggttttaagaagactaagccaattattgtaataaacatcaacattctagtaataaaataagcttcttgatgttacctttgcttccaattttattttaagtataggaattcacgaagatgctatacaggtggatttcaatgaatttttctcaatgcaaacaaaggtaaaatatgacatttgaaacttgtcctctgtcattttcccagctgcttacatagtagagaatctgctcaaagtctccatggatcattgttgatgtcacaggtgactgcagaagacttagttcacattataaacactattaccttcacagataattcagtatcagagaaggtcttttagcaaagctttctgtttagtaatttttcttttttttttttttttgacacagtcttactttgttcccgaggctgcagtgcattggcgcaaagtcagctcactgcaacctctggcccactaggttcaagcgattctcctgcctcagcctcctgaaaactggggctacaggcacacatcactacacctggccagtttttatatttttagtagaaacgaggtttggccatgttggccaggctggtctcaaactcctgacctcaggtgattcacccgcttcagcctcccaagtaaaatttatttttttaataaaaaaattgaatggcccttatatatggcatttgttaaaataagtttacttacagtgttttatcattcccattggttttaaacaatctttgcctttttgttttcaaataaaagtgtgtacaattgtgttagtccatctttgcattgctataaagaaatacctgagactgggtaatttataaagaaaagagttttaattagctcatggttctgtagcctgtacaggatgcatggtgacagcattagctcaccttttcaaagaactcaattatacttagacttgaaattatatacctatatttctaaaattatacttttctcaggttggaaccacttgtattttgtattttaactttacagactgtcatttacagtttgctaactaaagagtaacttggactaaatattcaaaatgctcaaagtctagattataaagtgccaactcatttagatctagtttcaaaaacattgcttattttgtttctttcatgaaataccccgtatgaatatggataacacacatacacacacacaatgcac

SEQ ID NO: 1887365 - DNA, 4001 bp, Homo sapiens
gaagcagaaatctcaaaggctaactctgttgacaaattgctagtattcccttccttcccttaagccagaatgtcattggaaacaatgttacatgcattcctgcaaagggtagcacccaggtatggccaattgcaggacatgagaaagcacagggataaaagcctttctaattatatctctccattttcactcataactgctatttctccttaatttggttgatgtaaaagtaactgtgagttactggaaattgtgatgcttctctcacctactaaccaggttctccctgtgtcatttcagagatatttatcgtagtattgatattattggatcaggtgtggcctctttaagaaaatgaattgagcaaccgcatggatcaaaatttcattttaatgcaaatgttgggggataagtgcaccattgccaccctatcccataccattaccatagtgtaaatgtaaggcatcatttctttgaacacatgtactctacacacacgtacacacacgtgcacgtacacacatacacaccacccacagaaataatatataatgtttatacaatttgaggggtttttaaatttttaatgatcaatttcactagataacttttttttgtttgtttgtttgttttgagacggaatctcactctgtcacccaggctggagtgcagtggtacaatcagttcactgtaacctctgtctcccaggttcaagagatcctcccacctcagcctccctagtagctgggactacaggtgtgtgtcaccaagtccggctaatttttgtatttttggtagagatgaggtttcaccatgttagccaggctggtctcaaactcctgacctcaggtgatccgcccacctcagcctccctaagtgctgggattacagccgtgagacaccacacccggcctagaaaacattttttatatgcactgtgatacctcagggaagctacatggcaggttgaagcagaaaaataaaaaactgtccttttttttctgactcttttgctctgaggtcttagagcacccaaacggtttgtggaggaggtaaagagaggggagctggggggtgggtgctgaagtagtaaagaaggagaccaagaacagcatgctggagaagcagggggagagtgaggggtgttacaccctccagcccccaccaccgagaatagaacaattccacagggcctggaggaggaagggtagagaggcctccgggtcccaggatgcagcctgggccagatttcctggcagatttcaggagaaacggacataaggtgagtgtccagaccggtccctgggcagcctcaaagaaaattttgtttgtcctggggaagtgaagaagcagcagagaactgccactcctgaaggaggctcccaagcataacacttcctaatttccccaggaggatttgccccttcaaggtaggtagagtccttgctacttctctcccagcaaaagaaaacaaaatctgctgtacaataaatcccagtcagggaacccaatcacacttcttctatgacatcccctgtcattgtcaaaatctgaaccaaagctgctgacatgccagcacgtgaaggcaagaatggtaattgattaaggtgcaggttgggttctcaggaggaggaatcttctttctatggatgcttacatttcagacacataaatgaacactcccttttctctgcctcaaaattaagctgaagtctgccttcctctgtaatatacaatatgtctacatttctttatacaaatttctagaggaaatagaaggcggagaagatgcagacttcagaaacccacttattatccaaggaggatgagggagactccaagtggttatcccatacctgctccccacaatatgcatctagaagcttctttctcagaagagcccgccacctgccgctcacagtggaaacttcactatgaactttgctacccattctgggtggtattagacaatgtgttcccatgtaggtaccacctatatccataggtccttgcaaaagactcaacactatgaggatagaatctttctttctgtcaagaaataaaacctacaccagattccattgtgacatacgcaagtcatggattgacataagaaatacatttttaaataaccatatacatatgtaaatatttgcctatttgaaaacttcacagtgctttctgtgcctgtaactgtgaccctgtccatgtccacagatcattctacattttttgaggctaaaattaacatcaccactgactctagtatctaagcaacaccaaaagagtagttatagataaacacagcatggtcaataactcaaaaagaacaaattaggaatctccccttggtgtagggtaagtatatttgtcttaaaacatacaatgctggttatcagccatggaggttagaattaaaaattcaaacacatttggcaggagttcctgagctgagaagagagaaagtagggtaagtataatattctacaagaaaatgactaagataaagacatgcatttttaagaaatgtatgaaagaaacaaagcccttggacagaatatgaaatcaaaatcaaacacattttagacccagtttagtgaaactggagagtgctgaagacaacgagaaaacaaccaggacgagaagtgccgcaaaaggaagataattaagaggcttttcattagtaacaagagagactgtgaataagaaatgctatcctcaggctgcttaggaaaaaataattgtctacccacactcatttgaactttcagttcaacagtggaatcaagaaatctacacacgaatgaagactgagagactactatttgagaaagacaggaattgatgaggacagaggagattagtagcaacatggagcagggaaaatggcagacacacgtggacaaatgtatatactacaattttaagtttctgtttgtgttttatatcttctgattcaggaagctagaaatagaatgtgaccaagaaggtatgtcaataagaaaaaacaatcaaataagaaggaattaagagctgcttcaggtgttaggaatcatgagaactaatccactacagagcatgctcgtcctgcctgccaaacataagttgatcactggctcactgatatggggtggatctgtgtccccaaccaaatctcacgttcagatgcaatctccaatgttggaggtggggcctaatgggaggtgactggatcatggggtcagagttttcataaatggcttagcaacgtccttccttgatactgtattgtgagttcttgtgagatctggtagttaaaatatgtgtggtatctccccactctctctctttctcctgctctgaccatgtaagacaagcctgcttcccctttgccctccgccatgattctaagtttcctgaggtctccctagaagcagaagctactatacttcctatatagcctgcagaaccatgagccagttaaatctctttctttataagttacccagtctcaggtatttctttatggcaatgaaagaatggcctaatatacccacctatcctgatttttagcattttggtcatttctggcatttgggtatgtctcttcagttctttatttaaaatgccattatattttaccctttatacttatgttcccaatataaaacaggggacttgtaaccacagagtacgtattgctggaagctgacattctaaatgtctacttataatgaatccaaaaagttgctatgaaactctagggaaaggtaggagattaaaatgctaagttctattattgttttttaggccttgagtatcagtttatatgtcttagctcactagatcatgggaagcaatgctgaatgagcatagcaaagggagaataactgacagacctttaggcttctctcatgaaagcattttgtccagttgctgctgagggctttgtgcttgtgtatgtttatgggacaagtgaggataaatttcaaatattactgatatgaacagcggtcactggg

SEQ ID NO: 1887366 - DNA, 4001 bp, Homo sapiens
agcaagcttaatttcagtggatataggtgcaagttagctcacctgtacaaagaaaacaaacaaaacataaaatgtgaaatgattatgctgcttatgtgatttggaaaaataactcatagctgcggtattctaaaaattcaaatttgactttaaagattgttaagagggaaggaagatgtgacactaatatttacatattaagttttgatggagaccataaaagaaactcagcatcaaacttaaatgctcatataaaagtcaggcatggttagatcatctccttacaatcacacaggggctctaacttgccatcgtaaacaaaaaggaaaactgggacctatgatcttgtccccagtcgctgataagcaactttacgttgtctcttcggatatgggtgaacatttagttggggaaaatgcagagactgcaggtattacagggagctgtaatggcgaacttactttgaaggtttttcattgctttttgctttagggaatggaagaaagaatttgttgtggttgatgatgtttcagttcaaggattagcatgtacgatactgagttctatcctacctataaaaccgttaattttaaactatcaaggggatgcacaaaagataaaaatggaatatataggagctgaaaggtaatattgtggaaatttttttctgtttcttcatcatacaaaatagggattgtgattttataactaaaaaaaaatcagtgctattttcatcagatgcttatcaaaggagaaaagttcttagttttatccaaagccaactttccccattgtgaggtctcccatcattttcccccaggagctataaatttatatctcatcattggtcatattatgccctatatctctatttattattagtgcatactttagagtgctggtgagtattggcacattttattatgctgataaacaatgttggactgctaggtaaaatgtgttgtcaacagtgatttctctcttctcgttcatacctttttcattttattctgggcttctagagatgagactgaaggatgggtctgattcttcttctgtgtttttcaagttgatgagttaggaatagaatggaagagattattcattatgcagaaatacacaaaaatattacaaaacacatttctcttcaaatatttagaaagcacattaaatagtcattgactcaaagtaagaaaatattcttctctaaagacatagaatttggacccttggactttcagaagcaacaattccacagtgagttcaactgatcaggggtatagtcccccaggcacttacctagggtccaggagactgagggtcagcagaaccagaaaagctcaggtactttagacgtcaatcacccacaaaggtttaaggctccctccacagtccagtgaatttcacaaccctgaagcaactcgtggggggaaatacaatgtagccacgtgaagtttctgaatgtccagttgaagggaatacttagtatcttcaagtttttaaattaaactgttgggtttgccttggttcaggtttaccgttttcattacatttgttgtacatggtcagatgattgccaaagcataatatggctttctaggttttagggatagttttctgttaggatatttgtaacgctagtcaatttagaggcagtctcaacttgagaggcaaaagtgtgatacaatgttatttatgtattttaatggcttttgctcaaagcatgacctcgaatctatccttctagctgtgtaggctcctgtaacacatctcagcccagtttcatcattttcagcctctttaagttatgaaaacaatctcattttgcttttttgcttctcctgcctttctcaaagttcctgcaagttagatttgcttctcgagaagttttgagatgagcagggcatgtgcgggcccctcatctctctctctctctctctctctctctctgtcttgttttcacccctccagtgttgtatcagttgaattctgttcttccaagagagaagttgatgtcctaacccctgtacctgtgcatgtgaccttatttggaaatagagtctttgtagatgtaataaagcgaagatgcggtcggtcgttcgagtggactctaacacaatgtagcccatgtcctcagtagaagaggaacatttgggtacagacacacacaggaaggagacagccatgtggagatggaggcagggattggagttacatcctgaaagccaaggagcagcaaagactgctggcgacactggatgttcagagaaaggcagggggcagcttctctcctccagccttcgagggagccgggccctgccgaatccttgatctcattttctggcctccaagactgtgagagaaccaccttcttttgttttaagccacccaatttgtgatactttgctatggcggccctgtgaaactaacacaagcagagcggagagaggtttccccagagcacacagccatggtgagaagctcatctttcttaggtcaccttcacttttccagatcatgactgatggctcacacaggagaggaaagtcctcaagaatcagcttacaagggatgcaaccgtaagccactccgtcgtcacaggtggtctgccccgcggctctgctagagcctctgtgtccctgctgggatggccttgcacccatcttctgagcaggcggccttcttttcctcgtggcgcatctctggtgagcttggatctggcctctgcagcctctgccctgggattctccttctctatcttagaaatgaggatcacgagggtggactgcaccgtccacggcgaagcacccgcacaccctctcttcctgtgccctgcgggaatgccagtggtgagctttgtggccaaacgtggtccccgcagggaggtggaatgtgagtctcccgtcttacatgtgcccctaggcttcaccatagactctttgaagtcccctctttcactttttggtgaggcgatccaagtgagtgtccccctccagttctttaaaggagaaaaattggggagggaaaagtctccctttttagctcctcctccccaaagcagagaggctttatttccatatctcctggtggtcaggctgactggaacagtttgggccactcggcccagcaacagagatttcctgcctgtaccaggatgtagtggttcatttcctgtatcaatttagagcatgcctttagatgagattaaccttcaaatcagtgaactgtgggtcaagcagattgcccttcaaagggtggtgggcctcatctaatcagctgaaggtctaaatggaacaaaaagactggcctctccgagcaagggggactccccagcagatggctgggtccacctgcaccgtcgcactcctgggtctctgcccactggcccactcttcagatgtggaattcaatagtctccataattgcataaagcaattccttatttaggatcaataataggatcctatattgatccttgttaggatcaatgtattatcctatacacacacacacacacacacacacacacacacacacacactactatcagttcagtttttctggagaaccacgactaacacacagggctttctttgaagtcacctagtagaatttataactttgttctcacccctgctctatttccactccaatccctgcgtgactcagtaatctctgggtgacaggcaaagaactccatcagtgccttaaaatatccatcagacaagcacatcttatatttgtgtgaaatctgaccccgctatgagagaagagggtggtggaggcagtgagtggctggtgtagcattaaagcctctggagacaggtgtgcactgcagatggtgtatagctgttcacagtatttgaggcctctttcttcgtgaagggagatgatccttccctgtgctattatgctggggtgtggccatgtgttttgctgtggccgatgacacgtgagtggaaatgtcacttccagcagcagctttgagcatcagcttgtgc

SEQ ID NO: 1887367 - DNA, 4001 bp, Homo sapiens
tctaggtattttcattactgatatatttctaatatttatatattttctctttttttttctatctggtcttttttgattgaagtttaaaatgtcattttgtcccctctttcattttattttcatgttgtgacttataaactctaccttgattcttaaagtggttacccttgaaattttactatgcattattaaattattgaaggctgaaattaatcattattactactcccttttaatataatacaagagcattaaaattaccttattataatttccccaaatgcattttgtattattattgttgcagcttctcaaattaggcataaatattaatgttcataacagaaaaaatgcgtattgctgtcactacgtttatcaccttctttgttcactatccccaaaatgtcaaacattatattggttttttgcctgagggtagcagtgcctccaaattccttcttttaataaaggggaatatatttgtaacgttttgttcaattgaaatataaagcatgatttatccactaagtttttttttcaatcctacttatttcaatagtttttgcattgtcattattttctaagtaagagtttctcaggagaatgatttttttaatattcaagagtttgacttacataaatgcatttatatgcacataaggtcgttgttattttctagtagccataagtatatacttttatcttctagaaattgaataaggttttattctacttttttctctcatagtaaatctattactcatgctcattattcaaagatgcttaccttcaaagcattgccttttactttgaatttcatattccatatatatgggaaaagtttcgtatgtatgcatacattaaataaaccttatgaattgtagagcttcatacttctaaattatttttcctacttattgatatattactggctggaaatgagttataatttatatcaatatccttttcccttgtttccctcttactctgcaatattaaagatacaggtctcaatttgttctattacatttcctctaagttatccataatcaattgaattagaccaaactagatgttaatcttcagagtgagagggaaagtttccctgaatcctgcacagtgggttgtggtataatgcagccctctgaggtacaattgtaggcaaatccctttaagcagatcccattaatgttcccactattccccaactgtcactgttttctctgtagcaactcatttcttcttttgaagaacacttttccttaaatctcactgtctgattagtgatactgataatttagttctaaaataactcaacctgcatctactctttacccttatttgccccatctataatgtttcatcaggagagaagaaagtattaccaacttctactcctgtcatttacagggttgagaatttcagcttaaatgcatgaatattgatgcgtggaagggaggtgagggagctataagggcagcccagtggagggccttttctaaaggcagctcggtgagacctgagtgtgcccatgtccacacagcagaacacggcaaaaccgacagatcccagatatgagaccactgtatccacagtttttgttctaagaagcacttgtcaagaaagaaatcctataaaccaatgattaactttaccttttactccaggaagtctctaccaaacaattacccaacacttaaggactttgagaaaacagctttcctgaaaaaagcttactcacctgggcgagccgttggtgatcaaggacacttcctgattaagacttgcttttagaacttcataactgctgtcgggcgcggtggctcgcgcctgtaatcccagcactttgggaggccgaggtcaggatcacgaggtcaggagatcaagactttcctggctaacacagtgaaaccccgtctctactgaaaacacagaaaatgagccgggcatcatggcgggcgcctgtagttccagctactcgggaggctgaggcaggagaatggcgtgaacccgggaggcggagcctgcagtgagcgaagatcgcgccaccgcactgcagcctgggcgacagagtgagactccgactcaaaaaaaaaaaaaaaaaaaagaacttcatattgctgtgtccacaaatcccagactattgtggatcatgttttcaagttcatgctcctcatttgaaagactcactgtcaattatttgaatctgtacccccaaaccctaaaaccatgagcctcacaaggtggtgttctcagttcctgcagaaaggccaattaactcgtctgcttgatccacaggcttcctggggcgctgcagggaaggctagtaaaggaagcgctcagggaacaattgctatgttttaggtgagggactacatgggagaaagaggtagaaaacatcattcttctgattttcagttactattttataaagacaaatcttaatatattgggtgatgaaaattgtagatattctcattttagttcattcaccttaaattaggatgacttccttagaaattctgacatctttttaaaatatgtttatatgtagtgcaggaacaaattggaaaaggctgcactggggactgtaagccagttccatactgaaataaaagtaactaactcaaaatgtttctcttcttctccaaagacacaatatcataaatatctattcccttttcatgccaaaggtgtggcggtgagtggaattgatacgaggtgaagatcaaaaaagggttcattgtagagttcaaactttgtgtggcccctttttatttgagtttaaaatttcaaacagtatatgaggtatgataatttgtaattggtacaattcatacaaaatttgacttaactaatgttttcagttttgacatttgtttttgaattctgagttgctagttttaaaacaaaagagtgattcaagagcatagaaattaaattcccagcatggccaatctgatgcaggtttcaagttatcactagtgcagatgttttggtttcattaactttattaaataaaattattaattccttgataattatttctgtaaactaatagaatagcctttggttatagtgatgaatgttcaaattttttggcagatatagaaactattgcgtaaagacttatactttttgtatcctgcaggaatttggaggaatttgtagtaatttaaatatatttacaaaaccagccactagcatttaattattctgaattctataagaattttaaaggagttgcccttgccaacaatgtcacaaagcattgaccttgtgaagctcaatcaataaatagattaattaataaataaggcaaaagtggagaaaattaaagcaatgcctatctttcgaaatatgttacacgttttataattattactgaaacactttcatcatgtagagcaaaagatagtcaaataatctgctttagatattaaaaagattaagtttgctattgtcatggttcaaaattggacatactatcatctagtgattttatttttcccaagcgtgatcagccttacaaatgttagttcttaggaattagaaagttatttgatattcagatgtaacctttaagcatcacattctagaaattaataaaatttttcacttggattaaaaagaaacagaatgttttgaaggcccaaaaggttttaatatcaacagatgcattgagaaacatctttcagtgatggaaattgatttattcattgtgcatttacctgtttgctaattagtagcttaaatggtttcacttcgtgtagctaatgaactcaagggtgtatgttattctgtacaagaatacagtggatttcttataatatattaattgtttaaaacaaacatttgaggatcattttcaaaatgtatttgcatggcaattactattccactagattccttcaaacacaagtatcaggatatctaatgaagcaatcattaaaatatttttctcttaaaattatctcaataccaatgaacaatcttttaat

SEQ ID NO: 1887368 - DNA, 4001 bp, Homo sapiens
aaatcaccagtgtgtgatttccttggaataaaaagcagatatataaggttactcactttttcctgatgttgaaacttgcctctcagtcacgtcagcctggcttcatccactgtcagtactgtctctcccgttttactattttatgtgtatattttatgctgtgagaaaggacacaactatttgtaccataagaaagactcttgtcatgagaagaaagcccccaaaatactctgtaaaactgtacttcttatactccattgttgttgttgtgggagggacggtttgtgaccaggctgagaaatgttttctccaacgattacattcccaaaacaatataaacaatctcagaattgaggagtgttgccttcatttaacatcaagcactcatggttttccaactgtggctgttccacatctctgcaggtaaaatctaggtccatgaaagatctggttctggacttcattagggaaagacatttgttattagatggggtctcctccctggcaagaggcaagtctgagaaccggcaagtcccaagcacttcctcacgactgctggtgttacagtctgtgtacaggcggttgaaatttttaaaaaatcactcaggaaatatgctttttgttctatcatgtcttgatatcatcagtgtaggtaaaagtacgcttttgagctgggcacggtgacatgcatctatgtcccagctagtctggagctgaggcagaggattgcttgagcccaggagttcaagtccagcctgggcaacataatgagacaccgtctcaaaaaaaaaaaaaaaaaaaaaaaaaaagagtacgcgtttgaagaagtcaaattgttagcataagtgagaaaattactcttgctgagaaagtctgtgcccagggctgtgacgactgattgaacgtagctgcttatgaggctgtggctgacctaaggaatgagtagatacgctaagcccagatcaggttagaagtaaacgacacaaggtcatcttttgagggcaaactgctgaaaataacttgtcaatcaaatgtttaaaattgaagcactggttccagtcattcagggccagcagtagggctggcaagacgtactacttcccaatgttttgttatttgtgccacagcatcaggggcccttcattcaggaaacgtctcttgtgtgttacatgcacagagtgaagaaagaatgacaaaagctctgagctcctggagtcaggaaactagtggaacaggccaacttcacccggtgcaaataatcccacaaatccgtgtctcgctggaatgtgtgatgggcaccatgaaggaaaagccaaggatgctatagaagagtaggacaagggcacccaggtccaactgggtgaggggagccagggaggccgccctgagtcaggagcaccccagacatcacactctacctgcccatcctttcttactagaggtaacatctggttcacttgacggctgtcatcaaacaggtgaagtttcccctggagttaaacctgcagatcagagcacggcccaggtgtaactggagtggaggcagccaatgattaaagacagaaatgagagacgagatattccgtttgcgttgttcatgtattccaacacctcgtacaacgggctgatcacagagagcgctgttgacattcgggacaaacagtgtcacaggctgtgttttacttgctctgaatagaaattcactcatggaagaaaaacctactaaggccaacttacatgagcggagtgtccttgcggtgcctgagctgtgctcaactgaaggtgtccacgacatactgaaggagctcttgttggtttctaaggaaatggaattcagagcacccatcttccatccctttgttttattttctgctttttccaacctctgtttccaccaagcttcgagttatccagtgtggatattccaggtagcggcagcaggtggtgctttatgtgaatgagcagctttatccagcgtttgtgtctgatgcatccgaagctgcagttaagtcatcgtttccatctgcattcagagagcatcccatcagggtggtggttgggtaattccaacttctaccttgagaactcctgcttagcagctagtttttggaagagatttgagagtcattttaacacaacctttcaaaatattccactttaaaggtagattttgtggcactaaacatgaatcagcacttttgcataatgacaggataaaagtatgacttctgcaagaaacacaaaacattgacttccagatttagctgtttataacaaaacaggctctctttgctgtatgtcttagctccactgccgtttccacttcttcacaggtgcccatgttcaatccagatttcctgaattaggtattagcacattgctagatgccctcgggtacaacatgcagatcagtgaaataacacagggattcctagatagaacacgtttccttttcatgcgtgttactgcgaagtgtgttctggttgagatacatttggaatgcaattcatctcattagcataaatcatagcagttttcgtttcctcaactaggtctttgtgcaatgtgagcaaatgtgaaaatgacacgtgcaccttaaaaagtctttcaaagatgagcccttggggagtggcttcacgtggggaggaggcgacctggagagggtgggcaggaaggcattattcagcgtgtcagtggcgagggctaatctccacactgggaaaaccacgaggagagagggttgggtggtgaggagctccggagtgcacgcacacacatgaatggacaaggcacccagggaagggaactatacccttgctcatcataccagcctggggccccagctgtctctgctcacaggggctaagaggtggaacggagagaaaggaagcagacagacagggacaggagcctcaagaaaccttgacacctttgattcccaaatacgccagcctctctcattcaccctccgacccacaggcttcactctcagtctcttttgggaattgtattcctcccagacattgaccccctccctgaatatggcttcccctgggctttgacaggaccttgctgaatctttatgaaatgtcgggttttccatgccatccctgctgcaggtggacgggtgcggggaggtggggaggagtgggggctcagcagcacccccggctgcttctgctcctcctgctgccatgagtgcagcagacacactaggaggatggcattctggttttggggtgaggggaaggcagacagacatttctattccctgctctctgtgaatgcaaacacaacactgcatggttttgctctcagacctctaggagctcagggagcagaatcccctcagtaatgccccttaaaacagggactcaagtagattattctcccggggctgcgggacactcccactcttcacttgacaagaacaccagcattgggctgtgccatgtgagtcttccctgagaaatgtgctggacagctggggtcctcacttccagtccagtcctttttcacgcccatcagctccttcctgctttgttcagccatggctgccccaattgagtgcagtggcaggcagtattttcctcctgggaattggccagttcccttcttaggtagctggtctctggcaccttctaaccactgaaaagtcaggaacgaaagagtttccggaccttggtcatttagataatggtatgctgtgccctcggacaggtcagggtactgctcatgataaatcccaccatgctcaccctgtcacctgctgggctgcttttttttgagacagggtcttgctctgttgcccaggctagagtgcagtggcatgatcttggctcactgcagcctcaatctcccgggctcaggtgatcctcccaccttagcctcccaagcagctgagactacaggcacacatccccacacctggctaatttttgtattttttatagagacggtgttttgctatattgcccaggctcaggtcttccgccccccat

SEQ ID NO: 1887369 - DNA, 4001 bp, Homo sapiens
tcctctatcaggggccatgtagaggcacaatccagattttacaggaagttgtgtcagaagaggatccttgtttgggaataaacctcagtggaggagacgaggctctgtatcagcccaattgttcgaggttcaactcatttcaaaagcagatatagtacttacaaaggggacttgagtgctactcatgacttgaaggagttttgaatagggtacaggagtcaaccagttgaaatagaaagcagaaaataaacaacctaaacggccgaatataggtacaaatgatatagttctggagtaatacattctggctagggaaacttaggagttatttacagaagaatgtaagcatctgagttgagacctggatgatcagataatttcaacagtcagaagaattttaactagtaagtggggtggttgggtaaaggacactgtgagggaaagaatggaataagcatagttactgaagcacccaagcaaaagcaagtgtggctatttggactgggctaggggttactacggggccaaaacagaagagtgatgaggagttagaggccacatttcacctcaaagttaaatgatttgaaatttattctgctagcagtcgtctactgtttgattttcagcagcaaatgatctaagcaagacatttatttttaaaatgttaaaatatatcttattaaatattaccaaaatagtatgggaaatgaagagactgaatgtgttactaatccccaactgagaatggaattgttcatttgtgaagcttgatatttccctgtatttttattactactaagctattattttttacatttgaggtcagagcttgggttggtttatgccaaagtgtcatctcagctatctgtgagaagctccatgtgtggagtgcaacaggagtcccagcctgctctaggatttccacgacctggcactgcactcacatgtcgtagtagccggggcacactgccttctcctgtctgcatgtaggtctttaccgaataccaggtcccatttttaaataagaggctccttctacttgtttgtcccatgcttcccctatttatactgcctgagaaattgttttccatcagtaaagctgattagtcttttctgttttcccttgatctttgttagcatctgggctacagaagttgtcctcctatattaatctgggtatttcggttttgcttttccaaaggacagcaagctcagccaggctgcctctcagttccaagggagtgctcattccctccttccccagcccttgctctttccaaaaggatgatttctgtcgtcccagggcttatcccctcccactccagctcctcccatcatttgagtcaatcccacagcccccactatggctctattatatagttgtcgtcttcccataaccaaaaggttttaacgccagcctggcagcgtctttagactctcgcactcccaaactgtcccctcctccagctcgactcctccgggagcgcgcggccaccgctgcaagcccagaacacaaacgcctagagcttcctccgcttagaaacccggggcgcttggccccgcctcacctgctttcggccccgccccgcccgccgccggcctgctcacggctcctcccgtcctccccgaagccccgcctctgaccccgccctgtcctgtctccgtcccgccccacgcccgccagccagcgtcgctgtctctcgccttccctgaggccccgccttcagccccgccttcaaccccgccccgtcctgcctccgccccgcccccgcttgccggcccgcgtcgccgtctcaccctccccgggctgcgcggccggagctggcacagaggatcctcggccgcggcgacatcaccgcctgggcacgcgggcgctgctctggatacggcgccaccgagagaacccgccgcccgcgggtctctgtcctgcggtccgtggttgcccccacaagcgtccggcgtttcctgagggcgggcgtgtccgggccgtgcgggtcgcggggaccgagcgcggctgaggagaccgagctggggcagcgcctgccgtagcgcgggagacgacgcgggggtcttgcggagccccgcgggagcctggcccgccgtgcagagcagttttctggaactctccacctccgtctcccttggggcccagtgcggcgccgagcccccgtcgggatctgcctgaggtaagcggacttggtggctcaggggtctctcgccatcctgcctcactcagccccagagcggggagcggagaatgggggcggcagggtcggaggacgccagtgaaaaaatgcaacaggcggggcggatcaggaaactcctagcctgaatgtttcctacagaggggagacttgtccaagactgaaacttgcttaggttcttccagccgcggacgggcacggagaggcgtctttcgacaccggggtccgagctccctctggcggctccacctgaggacagggactcggccacaggtgagcgccgagcgcggagctcccgcccctcggcttggcgcctggtcacgattcgcggttaccccgccgagaaaagtgactggtccgagtagttctcattaggaagataccttctgatcccatgaactctaaaccttcccccggaattaaaaaaaaaaaaaaaaaaaaagatcttttcaactttcagttttttgtccctcggtccttgggaacaagaaataacaaggatagcaggactcatctttgtgtaaactgcatttgaatacaaacattttttaagtgactgaagccacgttagtggcgttaaactatagatattgtcgggagagttctatcttgtatattttgtattgttagttgcttgtcttctgctgacggtcactggtttccaaataagtgcgtgtaaatggataagaaaaaaatcacttgccctagcttaggttgcagataatatgagattttactgtgattctaaaatttctattaagtgattgcagaatgtttaagtcatcagtttatattcattctcagcatacctgaagcctcagagaatttttattttgtcccccatccccagaaaagtgtcatgaaaaaagagcagaagagagacctcactgttgctgaaaggggaattttctttccccgttggcggttacttcatgatcggacgagaagtatctaggtgactgaagatattccatttttatgtttgtacacatgaagctgataaaagaagatgtgaacatgatttctctttgtcataataggctgatgagtaagtaagcctgaaaaatatttgaaatgaaggcaagaattttgaatttttaaaaaccaactaagactttgatcacttgttgaggatgtttctctctcataaatgaaagaaaaacgtattcacaagacaagaagtataaaaagttgagaggaatgacaactgagtccactcactcgaagaatgtcagtacttcatcatcttctttgggcaaacatacacaaatgcatcatacatgtgtggtgagcttatcaccagtgatggttttctgtgctagaaatgactcttaatttgaattttggagtgctttttctctttttttacaatgtgtgttccaactctttgtgttaaatagatttaagtaaaggaggtaaatgctaaattcatagtgttttttacctgtatcacttccctgtgtattatggaaaaattagagattttaacgttattcaaagttttactggaagcaaaactgtgccagggacagagatatacaatttaagttttctctttttggcaactgcacttgcttaaaatgtactgaatgtcagctggatttcacagcatatcagatttacagtctttgtcttatcaaggcctttactgtatgttttatactaaccagatgggaaacacattgagcatcatatctgacatgtatgcctaagggaggagctcccccatggatcatggcgttaatgtttacaggacatttactattcttagcattattgatgtttgctttctctact

SEQ ID NO: 1887370 - DNA, 4001 bp, Homo sapiens
acatttgacaaattagaatttcagggatgcagttttgaaagcttccccccaaaaatggaggtttcctctgggtgatacagactcacttgattctcttctatcaatgatcccaagattccaaatgccaatgtcaggcactcctgctctaaatgagtcactaaggaagtggctctaaattaaaagagattggcttcaaatgaactttgattgcttattcttaaatggtccatggggtttatcctattaccagacaataggattttatctcagctattagaaattcagtataaaaggccaggcaaagtggttcatgcctgtaatcccagcactttgagaggccaaggcgggcagatcacaaggtcaggagatcgagaccatcgtggtcaacatggtgaaagcccatctctgctaaaaatacaaaaaatttagctgggcgtggtggcacatgcctgtgtcccagctactcaggaggctgaggcaggagaatcgcttgaaccagggaggtaaagattgcagtgagccgagatcacaccactgcactccagcctggtgacagagcaaggctctgtctcaaaaaaaaaagaaaaagaaaaaaagaaaagaaattcagtataaaagtttattctctattataatgatactcctaggatcctaatgcatatctacttcttaaaattcaataatccatttttattctggtttctattgtaattgatactattttttggcaaaatatcagaagtatgaataaaatggcttattaatgaaagttctaactcatgtatgtggcttagcaaaatagaagccactaaatcacttgacttttaagggacaattctgtggagaaagatataatattttttctgcaatatgcataacctattcaaatataaccatgattaatctaaaaaggcttaaaggccttctaatagaagatgattatttatggtttatatgaagaaaaatcatcatttaaaaaatattctaaattctagaagacaaccccattattaatgaattaatgtaaaatataaactacatattataaacacctataaactgtcttcaataacttgaaatctttaccaaaatgtactatgagagaggaattgataactgaaatatttacagaggcaaaataggtaagttgaataagtgatgtaactaggtgggcacagtagcaaactggaaacatatgctttatgtaaaactagaatgtcttcatagtataccaaacagttatacgggctcaagattcaatcctttaagaggaaatccagatttctgcatgtctcctaaattttacatgttgactcaatttatgcaggcaaattttactttcttgtagttttacactaactggaaagaaaaaaaaaacttgggtgggaaagaatatttgaaaatgttttacctttaacaaatttaaatatttatcataatgcacagaaaagccatactaatagttcttgtaaaaatattaatatttaaagcaaaatcctagacaattaagttttgtcaaactattttcatagaaaaataggaatgtttgagcttccaaatataaaacaatttacatatgttaatgttaaaacaaacggatttcaaatattttgaaaataacattggttaatgtctaccttgttcttcaattcaatgtctgcaccacaggacagcaattttgccaccactgacaaattctcactgttaacagcataatggacagctgtgttgccatacacacctacaatatttggatcagcaccagaatctatgagaatatttgcacaagcctccctctggcattgcagagcctgtcagtattaaagcaagaagtaaattataaattataggaaatataaataaatattccacaggtttcacaaactagttatatttcaatgagataaattcatttttattctacgtatttaaaccacatccatctcctgctgaaagaactggctaccatttaccttcatcagagttgtcctgttttcaccatcaaggacgtcaagctggtactttctatctgccagaagtgttactacttctgcatggccattggcacaggcccagtgtagagcagtcctacgagagtgagaagccttttaaggaaagtttagtccactgtctcaaaacatagaatgatttatgtaattgtcaacattaaataccatgctctttctctgccttcaaaacaaatatttaatattctcctgaagaaactacaacattcattcactgttattactcactacattaatgaaagagtggcctatttgaatagaaagagcttggcctttggattcagttcaacttgggcttgaatattactttaaagtctttcaccttctagctatcacttaacctttctgtgcctcaattttctcatcaataaagtgaagatgaatacagcagttatctcacaggacatcactgtgatgcctcatgagaatctgtgcaatgtatttcgaagaattcctagcacatgtaacagctcagtaattgatagatattgtaattatttctactacttaacaaagaaaacattttaagttaaatggtacaattatgcctactttgtggtatgttttaaaggttagagataaaactattttaataattctaagatactctatttctcatattttaacatctctgacattgaaatgccacttataagtcattctttgttacaagtatattttgcagaaatttaaacgatcttttattggtacataaataaggaggcatcacaccattcaccgtgccttccatgaagtggaatatggtatatacaacaggatgatggcagttgtagtcataggattaacacttaaagaaattttagcttttaagagtgctatacaaaaggagagttgaaataaaaacaaactgttaaaacaaagtacttctttaatatttttaaaacttcaagccaaagaaaacttgggattcaagtaggtatggctcattttattccatgtttagatttacagaatgtatgtaaattcatatttaaatttatagaatgcatgtaaattaggtatttccaatgattaatattactatttaaagctgttataaatttccaaaatcgtggttggtagttatcttttactagtttcttacttcagaagtgtttttgttttaaagatgagaggaaaagcttcaattgagattcattcctagtactccaactttaaatctctcactttgctaaggctgagcaggtaaatgcgaaatttttaaggatgaaaggatcttgagagttaatgtatcttctacataataggcattcagcttacatgtgataaattgattaaaaggataaatacagttgaaaagttcaataccttaaaaaaactgctataaataaagcacttatattttctattttattttcttaataataaaactacactaattaatctataattattgacatatatgtaagaaatctatatataataaaaatatgtgcctaataagatgtatatgtaaatcaacaagcacaggtaaaaagactgtcttttgaagatgttaaaagttcacagaatatactaatccacaaaaaataataattaaaatatggaaagtgagaaattatttttattggtgcaaaattatatccctgctcttcccaaaaattatttcattaataataaactttttctaatagcattgtacatgctcaatgtggaaatcaaagataataaaaaggaaaaacattttatattaaaacaaatgccctcaaataacaaatgttatcatatttcatacacaacttcagataacgcaagactgtagtctgtgtgtatgtataatcaaagtgaactttaccctcacttgatacaccaaaatacattttcaaatgtcacctacttctctacatatttctacctttagtggtcacatattatcccatgctgtaaattcactgaaatgtatttataaaagtcattatatggattcttcttaataatatggtacttaccacc

SEQ ID NO: 1887371 - DNA, 4001 bp, Homo sapiens
acaggcatgagccaccgcgcccggcctccacaaaccttttaagtctacaattttacatagttttccatcagggaggcaagatatatataatttctttttatatttaactaaaggttttaagagggcttagtctgtaaatcagtaacaattagtcataacaccatacaaacacatttaaatattcaggaaagaggtttttaagattattgcttagtcttataaaatggtgaattttaatcaaattgatacctctgtattcttatttatgtttcctatactcttacatcatactgcttggcaagtaatgtaagttttgacataatttaaaaattcaagtagttgtaaacaaatcctaatttgttaacaattcatatattcccctttacttactatactacctcagaattaatcctccttaaaaaagcaatcatcccacatagaaaaaactgcagagcttcatctcttccttaaatattttcaagtaccgtaagaacacaaatccatgaaaaaaactgattaaaattggacatttcattaaaattggacattcacaattagctttactaattatggaataatacaaagacataaaaaaagttccttaatatttctttgcttaacagagaaatacaaagaaatactgcaattatggttatgggctatttttcagcctcttcaagtacaggacacaactatggttcctaccagtagggagaaacgaataatcaatcttacataacacgaaagaaagatgagaggcacaaaaagataaactgactttggcttttaagaacctaatgttaaccctgaaatgccacattcagtaacacaacaacaaaacaaaagatgacagcagcaagccaccacttcacacagtattaaaaattctgaaatacgtaatagccttcctcccatctcccactcaatctgctgtgtcgtctttttgtttttcctgctttttagctgcaggcagttcaaggcttgcccactgcatcggttcagcttttctcatagtgatttcaatctttgttgcagtcatagttaataacttcgctttacatcaatcacaccccataatttcacattttgatcaaattccttctctccttcaaatacaatatgcgcatctaacaatgtgctatttgcttctactcgactaagttctggaagtgaatttttagcctatactgaaatggtaacttcacctccagtctgatgccagtcatgtctacatggaacaacttttttcccagcatcttttttagtccacatgtttctcttttgtacagccctcttggtctaagaatgtattaaaatcagaagtttttcttctacaacagctccagtatttcgtcccctcatggaaaataggtactccagaatgatatacacagacttcttctagactctctagaccccgatatgtctttgaacaccctccattcttacatgaggtcccaatcttaatttcatcattgtcttcttttcttattttcttcattccctgatgacagtttaagtttatcaagtgcttgttttagggaggcagatatttttaattccaaatttgtcattggttcatctgggcttggtctttttatcgcgtctactgtcttaggggcttgaatgtgttcctgaaattttggttttaattcagatagttccttctcctcagtagtcttgacctcaggtttgactggctcaggtggcttctcactattatgtctaccttttgtacagcctacaatgcttaagaaatcagaaaaatcagttgttcttctcttacagcaagaccaaccctttaatgcatcgtgaaagactggaacgcctgggtgatatgtgcaagcatcgtcggaattggtctcaggatcgaagcgctgaccgcagctccggttgtagcacagcaaggccattttttttcccactgtcacaggcaaggcccaaacaccgggaacagcaagaggatgcgttagccaatcccgtgttgctagcaccagtctccatacctcagttttttaaagtgagaaaaaaatcaattgaatgccaaaataaatagcctgaattatttatgtgggataaattataggtgcaacatgaattttaaactattcactggtagtatggaacagataagtggggctgctaaccaccataaccaaagaccactaactctgttaacaacgtctagcagcaaccttagcacagtacgagtcaacgaatttcagcgtggctaatgatctcagctggcatttggatacagagcatttcccgtaagacatatggagccctgcaatacttctctctgtgttctgtgtcagaaacgaaggagagaaaaggcagggagcatctgtaagatccatgtcaccctgagtgtctacactcaccccagaagaacatggagggttctctagaagccaattaccgatcaggagatgaagtatgcagatcatcagagcagtaggtgctatctgtgaaaagtcttaggctccctggatttagctcccagatatcacttttaagtaagtctgctttagtggattaaaagttgagactcctttctgatggtgtgatattgagcctccatttttgctattgctgggtatttgaaatatttccatcggtggcatgtttcatatatttgcactcaagattatgctagaacaccatccaatatgcagagtctcttccctccaaaaggctacatatgcctaggtgcaatgtttttaatctctctctcacacaaagacatccatccatcctctagaaggacaaacaaggcttctatgttatatttaagcccaacgcccatctttaggaagggagggagacttactaggtacagttttttaaagccgtgtatagtttaaagctctccgatttccagaaatgagtttcttccagctgtgctatagcaatctgctttaaagaatgattccctcttccatctgcctccttcaaggagcctcaattaaccttaattctattatcaacaaaattcttgaaaagtaaagaatttaaacgaaatgccatttgtcaaaacaaaacagaaacctattttatgcatttatcttctctggaaaaataatttcttttctaagtggtaggagctgaggagaatatgctataggaaagctgcaaattccgcaacgccacgtaattcctagtcctcacaactgcaaaagcaattgatttccttttctttttctcttagattttgaacacgttgtttcatatgctgttaatgaccgtaaatagcttccctcaaataatgtcagagtctaggtgctgagctgaaaggggccttttaaaggccccttcgaccctctcactttatagattaagaaaccaacgccctgagcgatgaagaggctactgttctacaatctataatgggcccagtctgtctaccttttagctcagtgcttatttcagaaaacaacctgaattttcacagatgtttacattttgttttctttttttaaagtcctaatttctgttggctatattatttaagcagattctattttaaggaaatttcatggaagagctcctccaggtggcagcatcaattattccatggtaacctaaagaaaaagcaaaacaccaacctcctgaaaacgactgcaaggccctagcttacgtgtgttgtgacatgcctgcttaccaagccagcaagctgctggcttagagataggctggcagccattcatacctgtcaaacacatcagtacacagtggatacagcctttcacaccatcaggaaaaacaaggtatgtactaatatttctgcaattggcttacaacattcgtttgcaaattcctttagaataatgattcttgtacaatttagtagggaacttggcatatgttttagaaattgttttaatttcccaagctgtaggttgttcaggaattctaaatgttgctctattatgtctgacaaaggacacaggtcaacaaaattctaagacaaaagcattacttcagtgctctttttggta

SEQ ID NO: 1887372 - DNA, 4001 bp, Homo sapiens
ctataacctaccccagcttgaatttcttggcaattcttccactccatcttagtgcttcattatactctgggtcagctggcttctatgcttcaacaccttctgtgctcatcagcgccaatgccagaaacaaaggcagctgggtaaagaaaatatagccagaaataatagaaacccaacgagaaaggaagtgtggaatgaattctttggagctaaaagaaaatcaaaaggaggcctaaagataaccttataaaaaccaaactaaaagtcagttgtatcccatgatctggggtccagactccttccaggacctcagaactgagcttcacagcaaccctgtctccactttggagactgaaaagctcagctgtcattctaaatgaccctgaaatacatcagtgcataagtggatgatgtttaaataatcctctgaccatgctcgaagaacatctctttccatgccagcatctcacaagcacattctgatggcgcctaaactcaatatcaccatagaatctaagaagcattatctcaagttcagcttcatactgaaaagatggaggctgacctcagctggatgaggcaggagaagtacctgtcctggtgcatcagtcattattgtaccaacgcatcttcattattagcccaaagccctttcatccaccaaattgttggcattcacccggccatccttctggtggcccagactcaaaagctggtggtcatctttgacctctccctcttcttcattcaagttttgttagttctgtatccacaatgttactgacaagtgttttctcctttctgttttcacagagcacatcttgtaaatttaggctcccatcatttgcatcatgttctattgctgcggcatcccaaaattgtttgtatgacctgcttcttgtcccccaagtccactatgcaatcagagtagctacctaaagcaagggtaaggccaagcatgtctggctcaaccataattgcttgattcgaaaatgttcaaagtcccctttgtgcaacatatatttgcatggtattaaatattaccatttcatgtgccaacatagtgctctcaacatattgttgaaagacgtatctcccctttgacctccccttcaccacaaatatacttctatcgtttcctatttggcttgatgacattatttgtataccatatggctttttcaaaaattgaagaactcacaagtagagaattattattatctctacctgtcaaaaatcttgccaacatcaaagccagagcccttctcaaatgccatagattcccaggtgcttctgctaaatcccttttgttaaaagtaatttctctctcttttgacctctatggaaggtttcaacacaatctgcattgtattagagttaattacattcctatctcatctcccctatttgaacataagccccctgagggccaaagcagtgccttactcatccttacaggctcatgtctcttagcttagtgccctgcttgacaaatgtttactgtttcatggtcaaataaacaaacagtcttagttagaacctacaccccttagcaaactgtaaatggagaatatggaacatcaatgggaggcatcactccagctgctgctccaacactgttaattacacaatacttttattgagcaattcagtggtaattcttgctgctattcctccttaataagatccattgtgcaccataaaatagtaactgggacgcagtttgtattccacatgcatcacatttctttttagcaggttcttccatatccataatctcatcattattactattaccctcagaagacaattgacttgcattaatcagtcctgctgccattcccttgccagattttctgtagttttattgtgcttttggacattttaattaacttgaaaaattaattttaaaatcttaccttattaatgctctgctcccttggaaatccctccttcttgtttattatcactgaccatttgaagatgaggtcattagtgattaaagctacagacaacttccacgcccatcctgctgcagattttgtgctatttttaaacaggatgtgaataataactccaacttttaagcaggtggggagggaggtctgttgcttagggagttaaaagacataatttcaattatgccataacatttactccacaactactgctctctacagaagctcaacaacatttgtttattaataccatatacagaggtaagttttgttttacccagttgacaaactgaaatgagaaaggcaccagatttggtgactcaagaacactgacacaaagccaaataagcaagacgtgtctggtaaaactaactggctgattctcaatgctctatctggaccctaggaaaaatcacgggatggtcattgaacaacatgagttcttcattttctaaacaagaaaggcagcatctcacaggctaactccaatccattggtagaggctgcttgagcatcataatgagagtgtgaggttgtattggaacctgtcagaaagcgtgtccttatcagtgagagctgcctgctatttagatgggatttgtgaatgacagcagcatatctgcctttcacattataaaggcttgatatccttttaatagaatttactatagtgattctcaacttctaattatgaggatttactcttaattttagaaaaagggcagactcatatatccctcaattatagtgtctgttgatatagaaaatatctgacaaaaagctagtatgggttcagtaattattttacaggaatccttgttttatagatattaactacttctccatttagaacacatggttcacatgtgtgcaagatatattatttacttggtttacaaacatttattgatatgcctatgtatttacaccctccttgtctaaactctcttgccagccccctcccaaccctacccctctggccagggctcaggtgcccacaaaggacgaaaccactaattttagtcatacaactgaagaaatgaatattcaaaccaaaacactgatacaaatgtctaactttgaacattttcaaaatggggtttatttttgctacaattctatttgtagaatgatagaaaaatagagaactactctgtctacctgcctgcagtctaagctaaacatagcaagctatctaaggtacctgttgattggaaggggcagacacccagtaaagctagtttattacaagggtattttaggaatacagagtaataagatgagaccaatttgcaaacagtatggcctgtaattcaagttcctgttacgtcatttactggctggcattctcaagtaactcactaccatctcagagccttcgcttataaaatggaaataacaaaagtgtctggatcataagggtattgaaactattagatgcacatcaagaaatttgcctagtgcttggaacatagtaagtacttaatagatgttagccagtaatagcagcaacaatagcaatagaggtagtggtagaagcatagttgggccccatgggaactatgtgagctcaaatctccaaatctccaagtctgtctttcagaggctgcagagtctcttgtcaacccgctcaattctctttgctgcagattgtcttgctcttagcttcctagtttctgctcttctgtaattttgcctgactatagctaaaatgaagccctgcaactagaatagaggatccatgagagcaggtgtttgagctgattttttcccctattgccccatacaatgatgggcacttattaggccttcagtcaatcaatatttgtgagaagtatgggttgtcatggcacccactctgaatgcaactgtacatggtcttattagtaccagtaacccagcaccatcttaatgacccggtctctgttttcaattacatatcccaggaaaaactatatgattggctctaatatgggtccagtgtccattgtagtcaactcagcaggggtcaaggaggcaaagttacatataactgcccactct

SEQ ID NO: 1887373 - DNA, 4001 bp, Homo sapiens
tttgttcagtaagatctttattaaaattcagttttgttttttacataattttgaatgccattatagggactcagaaagcaaactgcaaataatttaggaaacgcaaataatagcctgggttgaattaaagaggtaaataaaatttcattttaaagcaataatctgtcaccaaaacgtaacatttaacctttctgtcaaatgattttccactgccgtttcaagttagtttacatgagtaataaaacccaaccaggcaacttcctttggcccgtggggtaaaattcgaattctgtcttaaaagcaactgctacctacacagcagggattaaatcatttagaaaatgaaggcttcaaatttattttctacaaaaaaagttcaaactagtgagatttaaaatcacttcaagttttttgtttttaaattctatttttaggctttgggatggtcacagaggaaaaaggtggaggagtaagaggagaagaggcccaaatttccaatcacagggtctctgaaaggatatctccagaagttgtggaggaattttgatttacattaagtgaataacaagcacttgaaatctgtaagaatgccatatcaacacattagttggaaccataaggcatgagattttggtgacctcatgggcacagccaaaattaactccaagtatttatgtaactgccagagatgacagggcaaaggttgcttataatttttttttttttgagtcaacaaatactgcatttctttggccaaagagaaaggaagtagggtactttctggttctattttgtgatatgcaacatttacacacacaatattctacccataataccatctgaatgtttagatgacggctctaaaaaggaaaaaaagagttatttcctgttgctcatcagctgagaggatgcgctttagaggtatgtgtgctctgcctcaaagcaaaagcattgttagcgtttatcaaggtaacatttaaaaataactaccccagtacaaaagaacttcagaggaaatatgaccgaagctatcagtctcccttcaagtctggccttgagctgcataagactctagctgcattctccattacattgttatccttatcaaacaatgcaaacaattttaatgagcttatctactggaacatattgccagatatgttaatgtaaaaatgatgccaaccgtacaggccaactcattaatcaaaaggctcacaatacaatgaccaagatcagtcccatcctcaaaacagacctcagcaaaagaccaggaatcaccttcctactgtaaataagaaggaaaggctcccccacccaagcggtggccataaactccttagaaaatgcataacagcgcccagtttttttcaagtcctttgcagtccagtctctttctaataaacctagggttctatggagaaaattttggtgaatgtctgacactatcacctctgctgtcaatccctgcaccaatcagcgagcagaattcttacaaagctccatcaatctggcggtttaacatcacagactgcagcttaatctagaggattccatctttcctgcacactctccaggttaagcgcaaacgtttttctccccaccctcccgttttctgccttttggcactgctacctaatggctcctttaaaatctaaaagggaaggaggaaaggaagtgctactgcctgtctccctttggacagcgggggaaaacagcatgcatttttatcagtgtggaaggaaagagatggagggagacccctcgaaggcagcaaacctattcacaaaatgctttccatctgcagtcgcggagcctcaatgcaaacccaacatgacacatggaaacagataccaaataatcacaaccgccttcacaaatgcatgcctgcagcaggggtcgcaggcagtgtctgctccattatataacgggctggatttccgcgcgccctcacggcggtccccggcgctgctctcgtgccagccccattacctgtaggaacgctccccgcgcactgtgtgcttccggaaaggaatgatggtcccgttattatcctggatgatgtcgttgttgttctcgccatttggggacagggtttgggtcggcccaggcattggcgcactcccgagaaggggaacaaaccgctgtgggctggctggtgaggaaggtggctgcgtcttcccgctcgctcgcctgctccgcacggaccgtgcctgccgcctgctcgctcactgccttctcccagctctcgctcgcgccccgccctcctgcggccccgccctctggcagctgacgtcagagcgccggcagcagcaccctggtcacgtggccagcctgttgccatggcaacccgctaactcatcacctcgcctcaattcgcacagggtcgcggcgtgaccacgccagcagctccaggcaggcaccggggcaggcctacatctggcatgtaaaaccccaggccaccctgcagcccccctcgcagactcgccttgtctgaaaaccagctcttcctctaaccatttcctttccgacccgtgctgccactgcagctgtgtacacaaaagaacgattcatgcaaaggggtgtgggagaccctttaactccttcaataccaagtttttatgccatgacaattaaacttggtcaggtttcagaaaaacctaaaaaggacctggtggccagcttgtagaaaaggtatcagactaaggttaaaatttctgcctttctccctttctccaaatagcagcaaccatctccccaaaaacaagccaaaaagctaaaaacctacaaggaagctgtatttccttctaatcaatgtagcctttaataatgtgaggattaaagatggcaaattaagagatcatctgtacaaaggaatccccaaagagggtttttcttttaaaaaaagataaccaccattttaccagttacccaaaaccctccaattcaaattctttatgctgcctcctgatacagatcattaattcattgacatttattctatttccatttgaattacaaaagtgatcacctcacttagtatttgaaagtgcttaacattcaagctgttctatatccttgcaataccgctttcaaatatattggctatgtgacagatactattattattcccattttaaagatgagtaaactagtaagattaagtaaactgcttaaggtcacacagctaggagtggtgaactggagcttccaagtgacatggttttatcaatgtgactggacagtaatgatctgtaatgtgagctcaataaatattataaatcaaggtaagaatcaagtacttccaagatgactgttgtgaaaagataactgtgaacagaattgctagcactgtgcagtctacggattagattataaactgaaaagaccctgcatatgttcagtactgtcctccagagaggagagattttttttttattattattttttagaggcagagtctcgctctgtcacccaggctggagtgcagtggcgcaatctcagctcactgcaacctccgcctcctgggttctagtaattctcctgcctcagcctcctgagtaggtgggataacaggcgcacgccgccacacccagctaatttttgtattttagtagagacagggtttcaccgagttgctcaggctggtcttgaactcctgagctcaggcagtccacccgccccaaagtgctaggattacaggcatgagccaccacgcccagccaggagagattttgaaggattctttgcttatcagcagtggtctctgaccttttatagggtgaaaagggaagaattggggtgtaaaagatacagcataaatatatgtgtcataaagtattaagctatgactcactccttcacatcactgtatggtttatcagctttatcattttgtgatacagatattaaaaacaagtaaacactttgtcattcctgacaattcttcagcatatgtccctggtaataagttatttctggtatcaagtttctggaattagaat

SEQ ID NO: 1887374 - DNA, 4001 bp, Homo sapiens
gaggccatgggaaaaaaatagtacagcatttgataatgtcagcatctgttatccctgtcagggagacagttgaaatgtttgagttataccagtgtcagcagatgcccagagtttaatatgtactcagttaaaaatgaacagctgatctaagtgatagatgtgacattttagagtgattgaaaatactcttagataagttaaactcgcaagcaccagaatcagcatataattttacttttaaaaatgaatagcctgtcattttattttctaaggattatttatatagtcttaatattatagcaaagagagtcttagttgctaggatgtttgagaaggattattaaacaacttgtatacctatagaatgaccaatataactgtttattataaaacacaagtagagtaataagctttgagtatttttatagaagaacctctacttttgaggtatatattttgagttcttggtatttaggacctatacaggtaaacttaccaaatagaacatgaatcattgccattctgttttgtggatgatcagaagggctatgcttatgtgagttaagctttgaactaatttctttgaaagtgtagaattttaaaattatgtgccttttataatttccagtaaacatgcagtaacacatatgatgccatgtgtaagtcattctcattctttataatctgataaaatgaaaatcatctttgtattaactagtcttattaaacagaaaatgaactatagttaaacttagtcatttccattcaatttctgatacaaaaaatttaaaatattatgcttttatacatgtgtaaatatttcagttgaaataatacttttagtaagaaatggttagaatatgtgaatattactcttattttctaactttgtcattagtagcttaaaacaggtactgcttataaattttgctaagagcattatttggaattttttataaataatatacaaactgtgtgaaataaaagtattttgatatttctaaacaatggattgatcaagtttagagaaattgaattgtaattgcatagtacaataaaaacagttcttcgatctgtataaattggttcttgactatagtgctttcattttacatgccctctttggagaaagcaaattcgaagataatacagataaattaatttcttttaaatatttggtagtctgttaccaatataccctgctgacttacagctgtggaccagaattttgtcatttttcatgcttaaatcttacattttaattaattttaagttttaacttcacatttaaagtagagatttgggttaagaccctgataaacttgagaaggaaggacaagggccactatgtttgtagctgtcaaaaaagaaagcctttttaaaacaacaaaacttttggtcagaaattcctctaatattaattatacatttatcaaaatgagaagaaatagcttattatgtgaatgaagccagctcttagtatcttatttttctgtacaaatcagtgagccctactaatgagatatacttaagattaaattgtggagacagaaaataggtcatgtgtattcctcattcttttgtgctagtaatactattttcccttttgcagtcaaattttaataatgagagtgcctaatttaaaaatgtaagatgtctgttttaaacttagatgatttaaaaggagtttcatgataattgaaatctacttcactggatcttcttttccttcatgaaataaaaaccttagggatagtttctatctatcagtagtagataaccttttttttttggtgttagtattgccaaaggtcatctgttcatgactaggttaatttaccatatgacggtcattcacgtagaaagaagcaagagcttcttttagctcagtttaattctcccttggtggtttattgcctaccaaaaatacatacttctttacattccatagcattgtatgttcatatgggtacataaagaagtatgtactctgagtaggtattactaagttgttagctgtaaaaacatgaaatattttattttcttatttgttagtgaaacattcagcttactaatgtagagcaatggtaaatcatttgcagagactaatttatcgaagactaaattttgtaacaagtttacctgaagcatggcattaatggttccatattcttggtggacatagacattcctaagcatttgaccagttatctgttgaactttgtcctggtttgattctttttgcaagagattcaaagaatcagtgtagtgttacagagtgtatttcggaaacttaagatcagcctagtgtttcttcagtcttcagagtgaatttcttctttttttgtagtctgcttctagatcctacaggtagatagtaattaattaaattcaattttttttttacaaactagatatcttactcaaaacctaacaaattaaccaataagtatttctgatattgactctagaagttgaaacaacaaggagaaaaaccaggatgagtgtgggtgaattgaacttttttaaagattatgaatttttgttagtgttttataaggtcacagataagaactcgtgatcatttgaaaatttgtcattcttttttctttattagttccttacctgaagtttgcactttgatgcttctctttgggttaaatacaaatatgagttgaatacaaattcaaatagatgtagaaatatctaattttggtgagtttaagttgttttgattctttaatctttttagtataaaggataactgtcagaatcgtcaacttttagaaagtatcacttcaaagaactgaaaggttttagtctgtgagcacctgggttttatttaccttgatagtttagaatgaaaagaaattatagttggtaagtagccttcagttattgtggtattagaaggttaatttaaaacctcaagaaattttcagatttgtcaaaggaggaaaaaaaagggcagggatagtagaatttctgcagcttgtgataaaaagctagtgcagcttatagagagcaaatcagaatgtagcagtagatagcccagcactacagcagtttcagcaatgcagcattagaattacaccatgcacgttctgatttatttttgtggccaattattagtaagcattaaaaagtattttatgatctgccaagtttcttggttgactaaaccttgaaatagaagctaatagttttagaaaataagtatactttggaagcaggatgtgacttactagagatgcaaaatcatcacttaatctgaaacaataatgactaaatctttaataatgtaaatgacaataatgtatttgtacatttttaagataaaaagttactgccatagtatctgaacaatattcctttttacactacattagctcttaacttgaattgtgaaattaggctatggttagatagaatttaatttaacaatgagaacatatattgagtcaataataggtaagcatgcagaaagtcataagcatccttaaaagtacaggccttatggtgctctgttacctgtaagcttagtgtcatgcagcatttgcagcaggaagaaaggtagtaacctagagaatcacatcaacagcagccatctcatcttgattgttcgttcactctatttgctgattcagcatttcttttcatgagcccggtgaaggaaggggatgtatcagtgaacacagaacctcaccttttaagataaatttgaaaaacaaacgagcaaacaaaaaacaagcttacttttccctctcctcccctcttccctttaccaaaaacaaaaacaaaaacaaaaaccaccaacaaaaacaactctaaaattgaatcagtgttggccatttgatttggaatgtcatataacagtcttgcacagttatatagggaaagttaagcaatcaaaaaaggttgctacaaaggccaagaaaatgaacctagcttgtcagatgaaatgcttcagaagaggggaaaaagttgcagaagttaatttt

SEQ ID NO: 1887375 - DNA, 4001 bp, Homo sapiens
ctgtgggagggacccagggaaaggtaattgaatcatgggggtcagtctttcccctgctattctcatgatagtgaataagtctcacgagatctgatgggtttatcaggggtttccactttggctttttcctcattttctattgctgatgccacgtaagaagtgcctttcatctcccgccatgattctgaggtctccctagccatgtggaactgtaagtccaattaaacctctttttcttcccagtctcgggtatgtctttgtcagcagcatgaaaacacagactaatacagtgtgcatgagcgtgatctgtataacagtagagccctctattaatgcctgttcaattagagcctttgccaaaaaaatacacacaaaaaggaatgtcagtgtctcaattatttcagggagtctgattctcttcttgacagtagatggtgccaggagggaagaaatgagaggtggtaagagatgcagggcaggcaggggtgctcttcttcttctttggacagaggcatctcatgaccttgaagcctttgtagtgtatcataaatgtgtgggctgcattcaggtgaggctttccagcaagggactcagaattatttcgcaaagttttgctcatttggctcccgtttggaacaattacaatggtcccaaaatataatgcgagccagtgaatgcccatctctggaaataacatcagacacatttaatttaaaagtgtcttcaatgcctaggacagtgtcaggcacacggtagtctctacacatatttatttcataagtgaatggttgaatggttgaatttgtttctgatggttgatctaaccctgtctatttgattaaacatgtcctacttcatttaaccaagcctggggagggaagctttagtctggcacaaacgaaacctactcctgactttagacacctctcagagacagaatgggttccaaaccagagcacctggctgggccaactgtcctagaaactgcatgggtcccagatttgctatggcagctcacacatgcttcataaacaattttctgatggtaattcactgatgcaagaggaagaaaggcctagtgtacgaattcagtaatcagcctagtaattgattgaaatcagtagaaatcaaacatattctagaatttctgaaacgtcagtgaaaccatgtgtaagtttattagaaagttggattttttaacgacgaaaagagaaggacccacacaccttaattttgtacctataagcttgcggtctgtctgcataacatagatttagcccagtcttagccttctgcgtctaacactttcctaactattcattttaagtctataagcatgggttaaatgattacctcgtgcctggccttgtgttgggggctctgaggaactctgcaatctttttattttcattttttgagacaggatcttgctctgtcacacaggctggagtgcagtggtaccatcacagctcactacagcctcaacctcgtgggctcaattgatcctcccacctcagcctctcaagtagctgagattacaggcacatgccaccatgcctggctaatttttgtagtttttgtagagacacggtttcaccatgctgcccaggctggacttgaactcctgagctcaagtgatccgcctgccttggcctcccaaagtgctgggatttcaggcgtgagccaccgtgcctggtctgcaatctttttattgacttgggaaaacaagaaaattaatcaccagctaaggtatgtaacaacagcatgtgagaggcagggttcagctaaccatattggttatgagtgcaaaagagccagactttattcagtaagtacacaagattgagaagactgatatcagatgaaccttcttgctcaaagcaaacgatgccaagacatttatcgagggaaggattgcctagcagtagctatttagtgtgataatggcgtttgatagtttagacacaaacaccattgtcacactccacagctctgctaaggaaactctgtagccacgaaggtgttaacttcacctccacattccaccattgtcactgataataggggaaccttgtcagctccacatattgtgacctaagcagagaaaagaagcatcacgggtacaagcatcttgagcaatgggaagagctgaacactctcaatgaaaggcttctgtgttctggaacagtagagtagtagaggggtccactgcctgtgttccactgccacccagcaaaccccttctgcaaaaacttcctgtgaaaatggacaggaactctgtttgcaacaattttctaaaatggctgagagagaaagaatctctagagggaatagatttctggaaataaatacttattggaagactacattataaatgagaataatctggccgaatgaatggatactctccaactctcacctcttcacctacttcccaatccatcatcagtaaatgtgatcaattctgcagtctaggaaaattaaaattattttatatggggatacagcagttagatgtgttgtgatctactctccgtggcatctattggatataaaggcatctggtcttgctcaaatgttcaatcttcttgaccacagtcattttccaccatggcggtgggtgggagatgaggggagagaagaaagagaggaagatggagagagaggaaacgagtccatttttagttcatgatactcattttctagcaaaaagggagctccaaataaatccctacaggatttacttggctttcctgttaaagatggtttataattgttatgtgaactcctgcccaccatggagaatgagaggaaataaagcattttacctactccttcttttcctgcaaatgctgaaaagggaaagggttgggagccagttattttttccccaggataactgagttgttaacatctgaccagagtcttgctttagccctaaaaccggcccatctttaacagctgtaaatgaacccttccgtatttttcagaaaaaaaaaaaaaaaattgcgccttattctcatgtagatcctgaaatcaccctcttcaagctggacttgcagtgattatccccctgcgaaagctgaaagtcgttctgctcccatgggttggagtgttgaagttgcctctttttttctttccctttttcactttgtggattcgttatcttcccctaagtgactgatttcctttggttcctgtctgtggccctggctttctttcatgaaatgtggtcatttgcaaggcagcaggccgtgccagtgctacacatactctcttaggtgggactcgcctcctgggcagttttccatgactcagagagaatgactacgaaccctagaactgctctaggtggccccagtcactgccacaaacccctagcactctgggtgtggccagcagtggacacaggcatgtggtggcccatcttgtccttccctttccctacagctcctcctaacacagtagccaggcttgtcctgcttagtctttgctgagggacctagaacagaaatcgccacctcctggtcataccagggctatcgctgaccatccacaagaggctctagaagtctcttagctctgctgggaagaaacagtgagaggtgaacaattcactgattaaaagggtccccggaggatgcgcttggagcgctctatcctgggcaagggcttggacccatttcacttctcagggctccatagcagtatctgagcatcctccacttctccatgggggctctgttggcttttggctttgaataatctgcaaaatacagaaaagggaaggaacagatggaagatgaaaagagatgaggaagttaatgcattacaggtaaatcttaccaactccccaccccccaaatcaacctttacaggtaaatcttaccaactccccccaccccaaatcaacctcaatttctatggcccagaaatctatctccaggaaaatgtcaaaaatttgtagaaagatttacctataaggttgctcatagtggcat

SEQ ID NO: 1887376 - DNA, 4001 bp, Homo sapiens
acaatgctgtttgtctgttctgatagttaatatttataggcatgttttcatctagagtttagccatatttatcatctcttagtatataggtaaaattttggatttaaagtaagagtagaaattatttctgctgataaaagtgaaaactgaatttctttggagtagcataatcagcatgttacttaggtactttctgtaaagatgctgcatttttagctgtttttagagctcccttacaggcatgaaaataaattagtcagcagtattctctgcagagctggcaaaaacaatcgataggtattttggaagtacaggtaacaataatataattataaagtttatatagtatttacgaatttttcttgaatagaaattgaatgtgaaaagtaaacgtaaaatatgagtgaatcacctgatgtgatatatgttgtttttaggttggtactaagataatttcacaggcgtttcttatttgcttactaattcccacaaagacacatattacaaatcttactgaatatgtgagcaactcatagttttccttctcgaatgttgtgatgctttttttactttttaaattctgaaatatggtctgtaaacaagactatgttggctatttgaagatttgataagctgtactgtattttggtgtttaatgctttccttacaactgtaaacatgctgagtgctatctacaaaatatagctgagtctattcggtaataggatacttagagtgtgttttctctaatgtatgctcatgcatctactctcaaacaccatattccttgtaatacacaaatgtactttctgtgactgaggtgtaattaataggaggaagaagatcttgaatgaagtgataagatatatatttatatatgtctccttttgcccacagtcttttagagaatgatgttcattttgaaatggaggagtggtcaggagttgagaatgtgtgaacatctgggtctttaaactactcttgtcttcagtaatcttcattaattgctgaaatgtttgtctctattaaataatattaaattatctatagttttattgcaatcattaagaaaattatacggatgttagagtaattgtcactttttttctttacttcagtttatccccactgaaggagaatattgtgtgtatattttttataagggacaaagaagacagtgaggagagtcatagtatttattgttagcagagttcttcattttacagctgtgaaaacaaatatggagaggtgaaatatttcatgagtaaaagtagtgatgcttagcattttctttcttttttgaagactaaaaacctttgattcagggtcagaagaactagataactgttttaagcctctccacaagatattctacagttatcatctttttcaccttacctgctaacattcaggtaaatagcggtaaaattaaaggccaatactatggaagatagtgactaaacatttctagagtgttatataatgttacagttttctttaatttaaatatgcacacatccatgtaaaccacactgtacaatcccattatgtgttcaggtgggttttaggtgacctttccagatattttcttcctttgaaggaagtttttgttgttgttgttattatgaagcatagcctacattttattaccagttcttttcttttctgaaggataagaaatttaataccaagagaccataataagtaaaatttttatttgaaatccttaagtcatccatacatttttcataaagctttttataaacatctttaaccattctagcttttccaggtagaattaacagtaacaagttatttgattataatcacagtctgcataatgtaaataagttgaaattagttggcaagtaattgatattcacaaatgaaaacgttggttgtcccgtagtaatcaatgcatagctacagctggttgaaggggaccaaatccattgaagaggcgatttggttccattttaccagctctagcaaagcattgtagtgctgctagtttggaatccaaaacagttaaatgcttttcattggtaaaattacagtcatggaccttctacaagtgttagaaattatcataccaatgcttcagtcactgaatgtcaaattttccattttgaagtcactttcctactgttttcctgcgcttaatggtttaaaaatcttttccttttaacacattactgcattaaggaatgatcaatgtacgtctttgttttcaacatctttgcttctttttctttttctaatcttgtccacagccgaagtctttgcttaattcttacatgtagacaataagctatttcaaaaccaatagtatttaaaggaacaaatagaccttgatgtattttagagtaatgttttccatttatctctaggcagcaaaccagataaatagttaagctaaaaggttggggaagagttcagttagtcacccccttctactgccactgcttcttttagcattatagttgagggctaatagcaaattgttgatgggtgtaggaatatcagtggccttaagaaagtacctctgccctttgatttataaatagatcacatgtgtattcagtgtattgcttggacttgtgtcgaaaggaactaccatgcatgccagtttttctttgtttttgcttacgtggtgttactaatcatagcttagtaatttaacccttttaaaggtctatttccttgactaagttctttgtcattttgggtacagattgccaagttacttctcattatcgccttagtaatacatggtggttagttacaatccatggatacaagtattaaaatctattgtgtggataatacttgaaaaatcagagtaaatttttgttataatgtggttttactgttgatttcaatgtcttgagaggggtgtcttcttgcataaaataaaagtttgataaattataatttgcctataaagttaagtgctctcagagaaatatagagtagagaaatattctttacagttactattttaaactgagaggtcaacgctaattcaggcagtatgcaaatgactcttacactaagtatattctgcgtctgttggttggtaagtatcatactgctggtgaaattaactacaattctttttcatcattttttctagtagaagtgaaacaggtgttaaactgcctaaacttaagtgctgaagatagcaataatactggcttctatttttactagttatatgggagctgtttagcagatccagttgctcaagtgtgtttttggatggcagttcagtttcatatactggccatatcggggcaaggagaggccatgggaaaaaaatagtacagcatttgataatgtcagcatctgttatccctgtcagggagacagttgaaatgtttgagttataccagtgtcagcagatgcccagagtttaatatgtactcagttaaaaatgaacagctgatctaagtgatagatgtgacattttagagtgattgaaaatactcttagataagttaaactcgcaagcaccagaatcagcatataattttacttttaaaaatgaatagcctgtcattttattttctaaggattatttatatagtcttaatattatagcaaagagagtcttagttgctaggatgtttgagaaggattattaaacaacttgtatacctatagaatgaccaatataactgtttattataaaacacaagtagagtaataagctttgagtatttttatagaagaacctctacttttgaggtatatattttgagttcttggtatttaggacctatacaggtaaacttaccaaatagaacatgaatcattgccattctgttttgtggatgatcagaagggctatgcttatgtgagttaagctttgaactaatttctttgaaagtgtagaattttaaaattatgtgccttttataatttccagtaaacatgcagtaacacatatgatgccatgtgtaagtcattctcattctttataatctgataaaatgaaa

SEQ ID NO: 1887377 - DNA, 4001 bp, Homo sapiens
gtcttcagagtgaatttcttctttttttgtagtctgcttctagatcctacaggtagatagtaattaattaaattcaattttttttttacaaactagatatcttactcaaaacctaacaaattaaccaataagtatttctgatattgactctagaagttgaaacaacaaggagaaaaaccaggatgagtgtgggtgaattgaacttttttaaagattatgaatttttgttagtgttttataaggtcacagataagaactcgtgatcatttgaaaatttgtcattcttttttctttattagttccttacctgaagtttgcactttgatgcttctctttgggttaaatacaaatatgagttgaatacaaattcaaatagatgtagaaatatctaattttggtgagtttaagttgttttgattctttaatctttttagtataaaggataactgtcagaatcgtcaacttttagaaagtatcacttcaaagaactgaaaggttttagtctgtgagcacctgggttttatttaccttgatagtttagaatgaaaagaaattatagttggtaagtagccttcagttattgtggtattagaaggttaatttaaaacctcaagaaattttcagatttgtcaaaggaggaaaaaaaagggcagggatagtagaatttctgcagcttgtgataaaaagctagtgcagcttatagagagcaaatcagaatgtagcagtagatagcccagcactacagcagtttcagcaatgcagcattagaattacaccatgcacgttctgatttatttttgtggccaattattagtaagcattaaaaagtattttatgatctgccaagtttcttggttgactaaaccttgaaatagaagctaatagttttagaaaataagtatactttggaagcaggatgtgacttactagagatgcaaaatcatcacttaatctgaaacaataatgactaaatctttaataatgtaaatgacaataatgtatttgtacatttttaagataaaaagttactgccatagtatctgaacaatattcctttttacactacattagctcttaacttgaattgtgaaattaggctatggttagatagaatttaatttaacaatgagaacatatattgagtcaataataggtaagcatgcagaaagtcataagcatccttaaaagtacaggccttatggtgctctgttacctgtaagcttagtgtcatgcagcatttgcagcaggaagaaaggtagtaacctagagaatcacatcaacagcagccatctcatcttgattgttcgttcactctatttgctgattcagcatttcttttcatgagcccggtgaaggaaggggatgtatcagtgaacacagaacctcaccttttaagataaatttgaaaaacaaacgagcaaacaaaaaacaagcttacttttccctctcctcccctcttccctttaccaaaaacaaaaacaaaaacaaaaaccaccaacaaaaacaactctaaaattgaatcagtgttggccatttgatttggaatgtcatataacagtcttgcacagttatatagggaaagttaagcaatcaaaaaaggttgctacaaaggccaagaaaatgaacctagcttgtcagatgaaatgcttcagaagaggggaaaaagttgcagaagttaattttatagtctaaaaaagacaaaaaaaaaaaaaaacaaaaacagaacccaaaacacaccttactccccccaaataactgtaaacattcaccctgtttttctttgccctccagaatacattgggttcttctgacttcttaggaaatagtctgcatctttcttgcttttagattttttttttttttttttttggtttttagtttccaggattaaatagtagagctgtagtgaagctaccttgtcacatccagaggtcaagtctgcaagcgaggtcaggacttccacatggtcactacgaggctaacttatattcttcctcagtgaccactggctaaactgttacagctttataggcagctaagcatttgaaacatgcactcccaggcaaacaggctctcttgtgcctctctcttccctgaccatatttagtcaaccatagcaaaaaatagcctctcagctgtcgattgtcgatccaaaagctgaggaagcctcaatcttgctttctgcctattgattgttcatcctgcggtccaaacactgcttagccatttgtcctgccccccacttttttttttttgagggggggtaagcactgccaaataaagcggtctctcatgtttccacttacatttcccagattttcactgagcttgcgctgagactaggaaagcctgatgcactgtcactatacttagaagcactgcagagaaaaaaggaaagaggaaaaaaattaccatggctagtagcaagacaatctttagacagttatggaacaagtgaagtccctctgctgccaaaatacattttataacctgattttttgattgataaaaaatgttatggatggtgatatgttacatatctaaaggcctgaaaggattttgtagggttatctttagagctagttgttgccatatacatgcttttaaagtttattgaatggaaaatgtatagaaatggtaggtaagacctgtatattggtggtggagagacatcatcaagggagaagaaagtagtatgtaaatgaaatcttagaagtgctacttaaaacaattcactgtcaatttcagttaattttttttataatgctttggtaaaaaacagggtccagtatgcttttgagtaattatacaagtattcagatgcattttattatgaattctactttatattcaaatgtgtagtgtttttgctgtcccttctacattgtcatgtttctctaattttctgaagtgacttttaggcatgatcattgcacactttacacagattgaaatagtcattaacctgtctataactctattacatagtatgtgactcagaggtaaaaatacttttgttttaaattttaatagcatattcacaatagattttgatactgaaatttttttaatcaaagagaaaaaatattaaaacatgaagtccagtaaacctgtggagatatagtttaagatctcacataaaaatgcagaagagaaaccagctataccttgttttttaatccaaatatgtcctcttaagaaacaagaaaaactattacgagttttctgagcttactcacctacggaagtttgtccttcacattcttgttgtctttagcatttaatatcatagcagtttaattattttgaatgtctgttttaaaacagtggcataaggaatacttctttagatattgggcaattttaaacagctttcctagatattgaaataattttactcatattatgagaagatgacatgtctcagagtataaagtaggttaattttcagttttctcaagtaccccattttgttaatgattttgtagcagtgaaagtacttattttttaagcaaacacttacataatgtgttatgtgccaggttctctttctaagccctttataaatattaactcatttaattttcataacaaccctataaagtaggatttgtgattcttctcacattttacagatgaggaaactgaggcacagaagttaagtaatctgctgaagtcactagccattgtggctagagccagaatttgaactcagataatttggtttcagactgggagctcttcaccactatgccacattgctcctcagatttgtgataatgaaatgagttaggaaattattcctcttgggaacaaaaccatgcatcaaatatatattgccaatatctttgcctcagtatattcagaaagatgattatttgattatttgtttattcatttcttccattcaacaaaactttgagttccctatactaggtatacaaagtatacctttttgatcaaaatgtgttcagttttatagtaacctgcttttagcatgc

SEQ ID NO: 1887378 - DNA, 4001 bp, Homo sapiens
gcccagaagaaaaaggtaaataagtagttgctcggttttgtttgtgatagtagaaagatttgtggttgctgtgatgactatcttaggacacctttggaataactatgaaagaaaactattctgagcaaccctttcacctgtcttattttggcttttgtaagtttgtttcttgactaataataaatggtaagttttctgtaatcccagcactttgggaggctgaggtgggtggatcacaaggtcaggagatcgagaccatcctggctaacacagtgaaaccccgtctctactaaaaatgcaaaaaaaaattagctgggcgtggtggcgggtatctgtagtcccagctactcaggaggctgaggcaggagaatggcatgaacccgggaggaggaactaggagtgagccgagatcgcgccactgcactccagcctgggtgacagagcgagacgctgtctcaaaaaaaaaaaaactggtagttttatattcagtacctcaggcccgtatgattatctgctgatggccccacttagatgtacatagccacttcaaaatgggccctctccccaaatctaagaagcttgttttcagtaattgatcacatttagttcttttaagtcaagaacctgagtgattctgtacacttctttttacatctaatgaacttaagttctgttgatttctaccatttaagtatttttcccccttagtccttaacgactaggtttcctgcctccagaataagctgaagtcctccaagatgtactgtggttttctctaagaaacttaacacatttttctttccccagatatcccagaagaaactgaagaaacaaaaacttatggcacgggagtaaattcagcattaaaataaatgtaattaaaaggaaaagaatgttggttgtctttattagtgaacatatttcaagtgtccttacaagatggatcaaatgaggattttttaggattagaactagaaacacaagattgtttaccctgcaccattaaaaaccattttcatggctgggcacagtggctcatttctgtagtcccagcactttgggaggtggaggctgactgcttaagcccagccagggcaacatgtcagaaccctgtctgttaaaaaaaagtaagtgtggtgtcacttgcatgtagtcccagctaattggggggctgaggtgggaggctgcagtgagcactactgcaccccagcgtgggcaagacagaacaagaccctgtctcaaaaaaagtttcattatcccaaaaggaatttgcagtggttttctttgcagaacaatccagtatgtgaatataccagttgatcatccccagttggaaatggctccattgagcattgcctttgagtatgataacagcactcaggctcaggttttgaagctttttaggttgatgctcaacctgtatcatttcgtcaattgataaaggggttttgtttttgctattaggaacgatggtactgtgaacgtttgtgtgcagatttttgtgttttcatttattgagtatatactagagtggaattgctagatcataaggttacctgagtaaacatctgaggaacttccaaatatttccaaaaaggctgcacgctacatttccaccaacggtttatgagggtcccagttttcacacaacttcgccaacacgtactgacatcctagcgagcgtcagtacttttcgtttataaagtgatgtaactgcttcttttaagcaactgacgtttgtaaagttggccttaatgttagtttgctctgcccttgaatttaagaaaccagcaaaactaatagcttatccacagttgcctcaacggcctagctgccaccttccgtgtgggtgccgcgccgtttgcacaggcatcatcctttaccgagatcctgcgttctgggtctgggtgtagtcaggtcaggctttcttcccgcagcgaagcttttagttgggcatctgggacgcgcaggactttcgcgctacctgcaggccgcagagccggaagcctcgccgcgccccttgggcaacactgctgcgtgctgtgcgaccccgggttgacgcaagcgcgcctttgtcgtccccgttgaaggcgcccattggctcggctgcggatcgtccctccctccggaagtgcggacattgtcagctgcgtttccgcggtcgcgggtgagtgtgcccgggctagcggcctgggttgggctttgtagctgctccgcaggcccagcccgggccgcgctcgcagagtcctaggcggtgcgcggcctcctgcctcctccctcctcggcggtcgcggcccgccggcctccgcggtgcctgccttcgctctcagggtaccttccttccgcgagcgcgctcctccgccctccgccccgccctcccctcccctctgtctgtattctttgtccaccaccggcgccctcggagcttgcatttgcctctccgatactttatattgattttgttcttttccgtggccaagtatcggtttcacatcctttctatgaccttcaccgttaggcctctgttctcgtctcttttcaatcattgtcattgactcaacctgtccccgctccctctgtctccactaagatgacatgctcaactggatgacttggaggaaggtgactttccctgttatgccttccctatttcggatggagcctcagactttaactgtctactctgttgtctggacttaagttgagtgaaagaagattcctctgcaacagctttaatccgttttgctcgctttgttggcttggagcgaataattaaaataataatatctcgtagccaccttctagacttttctgacccagtttccatatgtgtgaagtaaaatatcttaccgaagtattattatgaagattaaaagataagatacaaataggcttcattccgaagagagctaaaaagtctcttaaaagccgtaattgtggcgtaagtgattagtagtatttgtcctcgagagtttatgtacatcgtactgtgtgcgaacttacttaaaacacaattgcagaagtaaaaatgaatctttatgatggagggcctgtcagtcactaaactagtactggtagcattgtcagttgttttgaaggggtttcgttggtttggaaagtttggtaaaagtttggtaaaaacatgaccattgtgtttttggaagaggaaaaggcaagagcattgaggaaaaccagaactggaaataatggtcttagaagctctagttaccagttacctctgtgagaactttggacaggttacaacttttggatttttttttttttttaatcttgagacagggtctgcctctgtggcccaggctggagtccagtgggccatcatagctcacggcagtttcggctttcctgggcgcaagcggttctctccttcctcagctccccaaatacctgggactacaggcgcgtgccatcacaccttgctaattatttaaaaaaaaaaattaggccaggttccagtaatcccagcactttgggaggcctaggcgggaggatcatttgagcttaggactttaagatcagcatgggcaacacagtgagacctcatctctactaagaattaaaaaatctgtcgggcatcgtggcgcagggctgtggtcctacctactcaggaggctgaggaagggggatagcttgattctgggaagtcaaggctgcagtgaactctgaacacaggtggtatgtttgagccactgcactttagcctgagcaacagagcaagaccctgtctcaaaaaaaaaaaaatcactattgccccagcaattgattttattttattttatttttattttttttttttctgacacggagttttgctcttgtcacgcaggctggagtgcaatggcgcaatctcagctcactgcgacttccgcctcccaggttcaagcaattctcctgcctcagcctccccagtagctgggattacaggtgcccaccaccacgcccagctaatttttgtatttttagtagagacagggttttgc

SEQ ID NO: 1887379 - DNA, 4001 bp, Homo sapiens
taccacctcacgccagttagaatggggatcattaaaaagtcaggaaacaacaggtgctggagaggatgtggagaaataggaacacttttacactattggtgggactgtaaacgagcttaaccattgtggaagtcagtgtggggattcctcaggggtctagacctagaaataccattttacccagccatcccattactgggtatatacccaaaggattataaatcatgctgctataaagacacatgcacacgtatgtttattgtgacactattgacaatagcaaagacttggaaccaacccaaatgtccaacaatgatagactggattaagaaaatgtggcatgtatacaccatggaatactatgcagccataaaaaaggatgagttcatctcctttgtagggacatggatgaagctggaaaccatcattctcagcaaattatcacaaggacaaaaaaccaaacaccgcatgctctcactcatagttgggaattgaacaatgagaacacatggacacagggaggggaacatcacacactggggcctgttgtggggttgggggagggggagggatagcattaggagatatacctaatgttaaatgaagagttaatgggtgcagcacaccaacatggcgcatgtatacatatgtaacaaacctgcacattgtgcacatgtaccctgaaccttaaagtataataagaaaaaaaaagacagtttccaggtttcccacacagaagacagcatgtctgccttaacctgatctgttctgtagtggatcctgctgggttgttcaggccatgatggtgacacatgacccagagccttccctgcatctcgatccgctcaacttcccggctttcccctcagttttcacttaagtgcagcctaaaatgaccataaaatgtcattttatgctagttccctccagatcattcaagagaaggaaaaacactgcaccaattacattttaaaactagctcatttcttgtaaaagaggaggcactgtgaacaccatgaggctggtgaaaagcaagggaataaatggatcctttctatctaggacacagggttggtgtggaaagtaacatgcaggtagtcctgggggccaggggctcatctgaatctgattgaagggtgctgccccaagagcaggctctttggggaaattcgagccatagtcctcagctgtgaaggcagagtcactcagcggaccctgcatccaagctcccaccccagtgctgtgacagcctgcacaggtgaaggaaccttgcttttcacacctctcacctccagttttagggtcctcttctggggcttcttccctattgggagttcatgatctgatttcatttccttctggagtctctgtcatgttggcagtaatgtcttcaatgaaaccagctaatgcctacagtggtttaatctcccaccttgcagaaaatattcacattttaatagacaactcctaaaaatgcaatgcttttccgatctggaggcggtccagtggtgggcttctcatcaatgggagagatgtttggggagaaactgccttccttgctaccctcctacccccattgtggagtctcagtcacctggtctggggaccggaggtgaggagcagaaggcatcctcaaagcccagacccaaagtaggctgtgtcaccctgcagccagcaccagctacctgcactgggccagaggtgagccaagctgtgtacggagagacgaaactaggacaaaaaagggggctgaatgggtgacacctggggtggtccgggtcggcctctctcccaacaccccacccacctgcccaccagagcctggactttcccatggtctctgtgcagtcccctgtgtcgagtccctcaggacaagcggagcaggctctgctgcggacctgcgtccctccggctgcaacacaagacacgaggggtcagagcagcgcccgggtcctgtgttgtagcccgaggtctcacactgtgtcatggtgagcccgacctgcagcacctgcctggcctcctcttccaggtgggctgcccagcttctgcttggggaatccgacttgctgtgcatcccgatgaggaagctgtaaaagaacagaggtcagcatcagtagagggtcctgggactggggctcagcagaggccttgacctgaggagtcttggctgtgatgggcgaggagtcctgcccggggcagcatagatgacctgtgctccaggtgagcagcgagcctgatggaaatgctcagagaggtgaggggctttgcacgcaaatacttcactgtccacataccttttcctttaaacaatgaattatggctgtttacaagccactaattacagtttatcataacaatacttcctaggaaatgggttcctactctaatactatgatgagaattttgtaaacgccaagctagtacaatgaattgccctgagttataataaatatctgcactttgggagtaaggcagtaaacacaacattactgctatccatttcctataggcctctgaaggatttattacttatttatggtttctttttattcaaaaactcctacatatcatttttttgcagattattttggatgagtcatttctggttttttttacaaaataaaacgcggtaggcccagaacccaaaaagcgtcccaacttcagtccctccaaaggtgacttgttgagattcctccccgaggcgcgcaatccttggctgagctccacagaattcctgggctgtgggaatgaggagtaagcggcggtgttgctctccttatttctagcttcagtaaagtggacccatcagttttgttcaacgaatcttttgggaaggctgtagactttgagcccagatgggacattaaacagaagtgtagaaattaggtgtcacatcgttttctaccaacaaaagaagataaaagtagaaggaagagggataacaatatcatgcccacattttgtacaggaacttaaaattgaacaatttagagggagggaaatcccttctcttcctaaattgtctaaaagactgaggggctcttcccagctgaccagggtactccccactatatctgagtctgtgcagacctatacaggcacatgttctccaaataagttattttcccctccaaactcctttctcaggctgggcactcatgatctaagactgcatcaggccctgagaagcaacagaggactcatacactttttttgtgtgtggttttttttattatactttaagttttagggtacatgtgcacaatgtgcaggtttgttacatatgtatacatgcgccatgttggtgtgctgcacccattaactcgtcatttacattaggtatatctcctaaagctatccctcccctcctccccccatcccacaacaggccccagtgtgtgatgttccccttcctgtgtccaagtgttctcattgttcaattcccacctatgagtgagaacatgtggtgtttggtttttcgtccttgtgatagtttgctgagaatgatggtttccagcttcatccatgtccctacaaaggagatgaactcatccttttttatggctgcatagtattccatggtgtatacatgccacattttcttaatccagtctatcattgttggacatttgggttggttccaagtctttgctattgtgaatagtgctgcaataaacatacgtgtgcatgtgtctttatagcagcatgatttataatcctttgggtatatacccagtaatgggatggctgggtcaaacggtatttctagttctagatccctgaggaatcgccacactgacttccacaatggttgaactagtttacagtcccaccaacagtgtcaaagtgttcctatttctccacatcctctccagcacctgttgtttcctgactttttaatgatccccattctaactggtgtgagatggtatctcactgtggttttgatttgcatttctctgatggccagtgatgatgagcattttttcatgtgtcttttg

SEQ ID NO: 1887380 - DNA, 4001 bp, Homo sapiens
tttctatttggtactgtctaaggatggaagtaaggtatcttatgagcacaagaggagagaaaatgaaatctaaggtttgaggaaagtagaaaaataatgaaatattttctttctgacagaagaatgtgcaggaaaatgaagatggattgctgagcagaatttagggcccagtaagaatggagacctggatatttagtggcaccaattcataaatatccagaaagcctgagccacactggaacataagatagtaaaagtggcatttgagatttagcaaactcttcatctcaattcccaacccagagaatatacaacttgcatttctgaatccttcaaggttgcattgttctaggcaagaaacacctaccatttacgacctcttgttcagaactgaaagatgccagagctgctgtttttgttgctgttgttacagagaacacaatgcaaaggaatgattttgaaggttcgagagcattgaaggttaaggttgtggaaggggaagcaaagagaagttaagatgaagatattgcgggaaaagagggattaatacactgtcttatatcttgggcagaaatttgaaacttaaaggtttaattgcttcaaaatttctattcctcctggtggatgagtgtttagtggcagtctatcagtgcttagggagtcttagacaggaacccttaacagaaggaaaacatttatgtattaattttcactcttttctcaataaaataacaaaaagtaaaattatgtatgctcaagaatcatcagtatataaatacaagaaaatattccaaaataacaccagggtatatctctggttaacgaaattataggaatatttaattttcttccaaatgctttttctaatttttaaatgtttaaaatcacaattattaaacaccttttctattttaaatatgcctataattcttccattgtagttattatttaaggcaaataattatcttggccttggcgtcaacagttaaaatgcaactccccttagaacaatcatcattatatgctttaaatataacaaaagttggtttattaaattacattttctttggtaggaacaaagtaaggcagtgatttcgaaaatttttaaggctattaaataaaatatagtggggctactaggaataaacaatgtattttcacatcaacaaaaattacttatcctttgactgtacagaaaagtaatataaaataaaaagaaacaaatacgacctgcaggcaacactcttaactgatttataccactttggcaatccctaatctccctgcttcagatcagcttttagcattaatactgtgacacctaatagctgagcatcctatcaacgcaaaaagtgcaactttaactaggtgtttctgatacgtggcaaagtcactgatttaattagaatcattcctttaaatttcaaaagttcactgttacagtattttcacaaatgcctctaaaattaagtgaatgtttttgagttaaattttatctcattgatgattggtggccatgttacatcataccattccatctttcagtataaataagataaatctagagaaaatagaaatgacctttgcatctgattaaagtatattttgtatctggtattttaaaataggatcatttaaagttttctatggcaagttgatttgagaaacattcatttcaagagccaaagggaagcctactaatgcatttatctaaaactaacaatcataattagcttaagttatgcaatgccctcaataaataagtgacggttttaagccaagtcatatttttgctactattttgctaaatatttgtggaataaaatgatttgaatcatttgcaagttatataagccattagtgattatggcccaaggtatcaacggaaagttatttaagtaatttccaaggcctgttccacagtagaccagatgttaatcatcttttatgtcttttataaacatggaagcaattaagtgaaaattgccaggtttacacagaagacattatcattgacaattatagtattagagaataactagtgatttaagttttattgaagaatacaaacttcataccatattacaatggcccttttgtaaactataaaacaaagcaaattaagtaaataaacacaggagatttccagaaatattcatgggaagggaaagaaaacatttgcagtacagcagtgaataaaacacagtctcccttagaaatagtcaaaaaaatacatgtgaatgtgattaatcttaaaaatagtgagttaagggagagtgtgatttttatgatggtccagtcttttgattctgagagaggtaccatactaaaactgaggctaatctattgcttaaaagaaccaaatgtgtctctgccaggttttgatatcaggataatgctggcctcataaaatgagttagggaggatcccctctttttctattgtttgaaatagattcagaaggaatggtaccagctcctctttgtacctctggtagaatttggctgtgaatccttctggtgctgggcttttttggttggtaggctattaattactgcctcaattacagaacttgttattagtctattcagggatttgacttcttcctggtttagtcttggaagggtttatgtgttcaggaatgtgtccatttcttatagattttctagtttatttgcatagaagtgtttacagtattctctgatggtagtgtgtatttctgtgggatcagtggtgatatgccctttatcattttttattgtgtctatttgattattctctcttttcttcttcattggtctggctagtggtctatctagtttgttaatctttaaaaaaaaaacagctcctggattcattgatttttttaagggtttttcatgtctccatctccttcagttcagctccaatcttagttatttgttgtcttctgctagcttttgaatttgtttgctcttgcttctctagttcttttaattgcgatgttagagtgtcgattttagatctttcccactttctcctgtgggaatttagaagccagtattatcttgatatgaaaacctggcagacaaaaaaatgaaaaattcatgccaatgtccctgatgaacattgatgcaaaaatcctcaataaaatactggcaaaccaaatccaccagcatatcaaaaagcttatccaccataatcaagtaggctttatccgtgggattcaaggctggttcaacatatgcaaatcaataaatgtaatccatcacataaacagaaccaatgacaaaaaccaaatggttatctcaatagatgcagaaaaggccttcgataaaattcaacaccccatcatgctaaaacctctcaaaaaactaggcattgatggaacatatcccaaaataataacaactatttatgacaaacccacagccaatatcatactgaatgggcaaaatgggctttcaaaactggcacaagacaaggatgccctctctcaccattcgtattcaagatagtattggaagttctggccaggacaatcagtaaagagaaagaaataaagggtattcaaataggaaaagaggaagtcaaattgtctctgtttgcagatgacattattgtgtatttagaatactccattatctcagcccaaaacctccataagcaacttcagcaaagtctcaggattcaaaatcaatgtgcaaaaatcacaagcattcttatacactaattatagacaaacagagagccaaaccatgaggggactcattcacaattgctacaaagagaataaaatacctaggaatacaatttacaagggacgtgaaggaactattcaaggacaactgcaaaccactgctcaaggaaataagagaggacacaaacaaagggataaacattccatgctcatggatagggaaaatcaatatcatgaaaatggccatactacacaaagtaatttatagattcaatgttatccccatcaagttaccactgactttcttcacagaattagaaaa

SEQ ID NO: 1887381 - DNA, 4001 bp, Homo sapiens
gtctcaaactcttgggctcaagcaatcctcctgcatcagcctccttggtagctggaactacaggcatgcaccatcatgcccaaataaattttcacaatttctaatattattttggtgtttaattaaagaaccaagaagagaaactgataaaaagctctctcctaaaaactacatgatatcaaaataatatgcgccaaaaaaacctatatgctatgtggcacagtttcagaactgaagtttatcagacagattccttgattactgtaataagtaactggatccattaaagataattttaaggatgaggtgtttttaaagttacaatagaataattttaaaagtcacagtaagtttacttatgcaaagaaacctttaccagattttatatattctctattgtggaaaagttttttctaatataatgttcctgtcactatgtatttctacagcccattccggtttttggccctcacaccctcagagtatttaccaatcatttgttatttactgaagtaaaacaaacaaacaaaaaaacaaaaaaaaaactgtttaaatcaactactcatatttctataaaatgtttttatgtgaccaactttatattaccaacatgaaattatgatacatacaccactgctaaacatgaaaagtaaatactatacagaattagattccaactgagaaaatcaatttaacaagagactattttaccttggtagtaagattaaagtcttcctcaacttttgtagactgtgaattttcagtagtcggtttgccaaaaagactagagaaaaaagataaaacaaaaatgagcaaattcatatatttaaaaagaaaacctgccagttcatatcttagtgctcactccaaaaaatgagaacaaaaaacaaaatctggggaaagatcagtcctcaatatattaaatcatgtttcttggcataattaaaatatgccatctggttttcgtttttttttttttttttttccgagacggagtctcgctctgtcgcccagactggagtgagatggctcgatttctgctcactgcaagctctgcctcccggggttcatgccattctcctgcctcagcctccccagtagctggggctggagcccgccactgcgcccggctaattttttgtatttttagtagagacggggtttcaccgtgttagccaggatggtttccatctcctgacctcgtgatctgcccgcctcggcctcccaaagtgctgggattacaggcgtgagccaccgcgcccggcccctctgtttttaaaaaagattgcatttacctatttttgactctatctctccaacctgtaacatccaatgaacactcactcttagttccataaaaaatagtgaccgccaatataattggcataccctgagtataattagtcctcacaagctgtcctctatgatgaactgaaaatgtacttaatggctgacataacttttgatatctaaactggaacaaacttgataacctaaaatgaggaagaaaggtacagttaccttgtcccttatccattgtctatctctgattcaaagactaatctgtgtcactggaaaatgacattctttgtttttcagcataaaaaccacttaaaaaggccttgttgcttcccttcaccctaaaacgctacaagagagtgccctgaaatatctgaaatgttgaaaagctgaacctacaaatgtcaaaatacaaatctatatttgttattgggaatatttttctcacaaaaattgaaacattaaaagtaagaaagtctaactacttattttatacttttccttccttgttcaggtctacataaactagcaaagccttaaaaatcttcgtaggtacttatacccaaggagagagactgctagaaaaactgagtcctgatagttggatttctctaagtactatatatacagagagaaagatctggaagtgggagccactatatatagtgaaagtgtctcccacttccagatctttcttctgcagagcttcatggcagtctccaacctttaaatatttagctcatctaagcacagattactgaaaagataaactcaatgaccaaccaataagctctgtatttacctgttcctgaaaaacaactaaacagagtctcagtcatgttaccaaaaacccaactgaagctccatgactaatttgacagccaatcttccccctgctttacatgtacatgggtaggacatcagaggcttggaaaaagaggcaaacgggaggggacacctgccttaggccacagatctatgtaattcagcaaccttcaatcccctagcactgaaggggctctaagccactcctgtgagatttggggtgaaagaacagaataggacatttctattctgattgtggagacttttctgagttggtctttttttctaaatctttcaatagaaatcttgaagtttgcccattcctccaattaaacaagcaaaaaaagcagcaatctattcaggacttctttgaaccctattttagtatgcctttctagataactcccaatgtcttctgtgtttttggtcctctaatttatcttcatcaaacttgtcataagatccaatattctgatctctttggtaaaacccttactcctaccaatcctgggattgtttctcttcaaacttggcctttccctgataattccattcttatctacttctactgggttttccagctaattccattattcttttccatttgtttaatcagatccatccccttttcctttctattattcaaacactcacttacatgatgatataaaaacaagagtaatgggctttgaaatgagtttaaatattacttctgctacctcttatatttaaataagtcattttgagtttcagattctccatgtgaacaacaatttttccaggatattaaatagagtttaaaatatgaaagtattttgattagtctccaagagtccttaaaatcctaaaattccatgtgctttaattttagctatagaaaaatggggctggcagaaagaaataaaataatagaagaaaagaacaccaaggaaagcagagaagaaagtaatcaggaaaagattataaataagtcatgaaagaagagaaaagactctagaaaagaaaatgaagagtgcatgcaactaagaggggactgctttgaagaagaactaaactaagaagtcagtaaatagagaattctataagaaatagcctctaaatatgattaacatatctatatgtagatattctccactaagagtgaaataatccatctataggatttacctggtattgcatatgaaacaaaagcctatgtcttgtggccacagctaagtaagatctgctctaaaaacgttggtgataaaaacaaggtactggttaccactttaacggttaaacatgttagaacaaagtcttggattaatcaatgttctatgggaaatctctaaaaagagttaacatataacaaaatgtgactttgtgaattgatcccatctggtcctgtaccttgatcctagtgatccacaggtctccatcaatctatgccaagggggaagggaagggattagggagcaaggtaagcagatggcaaactcaagggtcagctactttttagctatgacatcataggccaattaatcaacctctctgaatcacatttgcctgattaatacaaagtaggtgacagtagcacagatgctttgcaaagctgtgtgatgactatgtgagatgataaatattaagcacataatacgttgtctagcccagagtagaatactcagcagatagtgatttcttttctctatattttctgagttaacatatacgttttaaaaaaccgcaaagtcttacctgaatgtggactctacagaactcacatcctctattaaagaaaagagtaaaatacattaaatcaacaaatataaataaaaaatacagaatattaaaaacataagagggcacgatggcacatgcctgtaatcccagctacttgg

SEQ ID NO: 1887382 - DNA, 4001 bp, Homo sapiens
aaatgtaatatttctagctttttctcaaataggatttctgaggtttctaaacatttctcttctttcaactgggcctaataaaattttctatatggcttttcagttgcaagaaaattcctttgcaagaacatagcctgcataccacattaaatgaagctggtgtgccttgagatctaaactccctgagaagagactcagagttgtgtatgttctatacagcagtaggttctttgttgcttagaacctgtacagtgctcagcagcaccctgcaagaagagatttggaatcttaaatggccttggttggttgaataggtaatcagacaaaaactaaatgaattttaattgttatgaatatagactcactaaatcagtgagaacctgtgtagacacaaatcaagattttgtctaaggatggtaaaaatacatatctgggcctgtggctgcctgaaagttaaatgagagttacatattttaaatactgaataacttttgaaaccagcacgacactacaactaccattattactaatagctaactttcaccgagtacttacttgagccaacattgatctaaaccctttacattgatctgagcccatttacccagcagatgcaaacaggatcagagaaagcacaaggtcatctttcctccctaggtcaactgaacactaagcagtagcataatggggcccatcccaccagctcaggtgccaggctctttgtggctcacctgtgatgtttacacctcatgtaaaattctggtgtccatgtttgctgagccttaagagaacaagagctgtttcttagaatataaatagatacgtatgaatgttacaaatgcaatgggtagaggatatatattttttctttgtttaaagcaaaaacaaggccagacgcagtggctcacgcctgtaatcccagcactttgggaggccgaggtgggcgtatcacctgaggtcaggagttcaagaccagcctggtcaacatggtgaaactctgtgtctactaaaaatacaaaaaaaaattagccgcgcatggtggtgggtgcttgtaatcccagctactaaggaggctgaggcaggagaatcgcttgaaccctgggaggcggaggttgcagtgagccgagatcgcaccattgcactccagcctgggtgacaagagcgagactccatctcaaaaaaaaaaaaaaaaaaaaaaagcaaaaacatttaaatttgacttgtatttagaattgttttaaaaacacttgttggaggcccacgtatgtgcgtaggaagaagttggaaatagtctactcttggtaggaaaaattaacatcacttcagtatacagttttctaatttgaacccacatgtggaatttagagaactggaattttattttagtgcattgcatttagatgaaattgccaaacattacaactacaagacagatttttaaaatcttttagtgctctaaatcagtgtcagtaagatgactttaatattatatcatgagcaagaatcatgtgtaaaaataacaaaaattgctttcctggtttttagatgtgtggtttttaacaacagaggagtggcgggggagaatctcttggtaagtaaatttaaatgacaacagtcttaactttttaaagaatcatttctagttttataacaaaaagcatattctttttatttaaaataactctgtttatgtaagcaatacaaatttattatacaaaaatacagatatggaaaaaaaggaaatttacaagaccgataattgtataaccaaggaaattcccttagtctgtgttcattcagatttcatatataaataaaatatatataatatatttctatttttataaaaattaagattctattttgtaactaaacttttgtacttactacattttaacatcgatagttattcacctacatcattttttttctaccctctcaacccagcttttcctgactctgggaagaactgggaagagaaggcctcatttttaatgcaaaacacattttccttaaaaattaaccagtgcaaaacaaattaactaatacagtgattttttttccacttatgaaatttacatttgtcatgaaacaattttgtatgtcacatgcctgtttgccagctgaagtttacatggtgggaatgttattgaaaccttttaaaatttatatcaggtctttttttccccctctaattctgagtttttgctaggatagatctttcacctcttagaaaatcactctatctgatctttaaatccgtgagttggaatgagaaatattccacttgctaaaattttcttcagctttttaactttttacaatctcaacaggtcaaaggcaattctactagaattgaaagaaactttttttgggtcattgatagagaatgacattaagactataaataagtcatgctggaaataaaaatttacaatcaggtcacaaatgtcaacactttataagaacttgggaagtaaaaacctcttgtacttggctttacagtgacttaggcactggaggaaatgaagatcaacacgatttcgaaagcaaaagttgcagagtgttatggtcttactcaagtgccttgtaataaatagcttgacgtgaaggttcacgttttctcattcaatccagccctttaggaatctcgtagacagatagtactctaaagggaaagatttgaatgtgtcactgtggccctggcccaggcaaatcattttgagcagctcctgtctgctgtgcattcttccaggacacaaagccgggggggaagacatggtctgaggctctcaaggaaataatgtgctgcaaagccaagctcgttagttctttatgaagtgagggacaaagatctgttcattcagcagagccgtggtatgtgcctgttaaatcgggcactgtgcaagccaatagggtgaagatatacatattaatgagacacagccctaatctttaggagctcaaactttagttgtgggagagacagtcaagtccattaaaatatacacagtgctaagtgtttaacagtagcctttgttaaggctacagagcacaaagggaaagagtaacaaagcgcctgggggaggtgggagagcttagagaggaggtagcgttctgagttggatcttgaaggctgtggtattgaacctccaaagcggggagagaggctctctcagcgcaaagaccaaggtattataaagtgcgtacagtagcagctacttactatggctggatgatgatgataattttatctaatatttatgtaatccgtagaatgtatcagttatgtcttttcctatttaatcttcagaaatagaaacagcccaacaatttaggtaagtatagcccccattatccctcatttccttttggagacagggtcttgccctgttgcccaggctggagtgcagtggcacaatcatggctcactgtagcctcgaccgcctgggctcaagtgatccttccacctcagcttcccaagtaggtggaaccagaggtgtgtgccaccatgcctggctgattttttatttatttatttgtttgttttgtagagatggggtctcactctgttgcccaggctgctcttaaactcctgggctcaagcgatgctcccaaagtgctgagattccaggtgtgagccactgcacctggcccctgtcctgcattttacagatgaagaaaacaagacactggtaggttaggaacttacccctcccaacaaatgacagagccaggattcagacccaggtgatctatgtgcttatgtttttgaccattatgttttatgctttcttacttttctggaagtgacaggaatttgctagaagggtagggccagaatcacatgtagactcctaagaacctggtattgaatcattgatattttgaagcaagggcataatttgatcatggtcatgttttagaaagagaaccatggcagtggtgtgtaggaaagaaagagatggaggggaaggaggctggaggctggaggctgggag

SEQ ID NO: 1887383 - DNA, 4001 bp, Homo sapiens
gcattgggagatatacctaatgctagatgacacattagtgggtgcagcgcaccagcatggcacatgtatacatatgtaactaacctgcacaatgtgcacatgtaccctaaaacttagagtataataaaaaaaaaaaaaaaaaaaaaagaaaaagcctcaccctggctgggtgtggtggctcacgcctgtattcccagcactttgggaggctgaggtgggtggatcacgaggtcaggagttcaagaccagcctggccaagatggtgaaaccccgtctctgctaatttttgtatttttagtagaaatgggatttcatcatgttggctgggctggtctcgaactgctggcatcaagcgatccacccacctcagcctcccaaagtgctgggattacaggcatgagccatggtgcccagtctctttttgtattttttattgttttttattcactcatctgtctcttctttcgacagtatcgcattaaaaaaaagtttttaagatagtattgcacttttaatggttataatgttttaatatgtgagatttccccttaccatttttaaggattttctttgacatccttatctgtttattcttccagaaggcatttaaaataattttctgaggctcttcattgggatttaattgaaattacattctatgtaaattaatttaaggagaattggcatctttattaaattttcccattaagggacaaatctgtgtcatgcaaacttttaaatattacatcattcctgtttttcactttattttgttgtggttggtaagagagatagtgtattttttaactggtggtggaacccatctagattccatctaggaggctatttcatttagttcaaaagcattttattgaattcttactgtgtgccaggcattttagacatcaaatccagaaatgaggtctctcttctggaatttcatctagttggcaggagttcagaatttatttttggtattagggcagaattctatgaaagaaatcatagtgttgtctttctctctgcctaaagaaataatttctccaaagtgccctgtaggtagaatgaaaataacacagaattggcagacctctataaggcattttcctatgtgctaggcagaaaaactaaactgagtattaattttttggttaatgttttaaaaagttttttccccactaaagaagtaatgtatcaccagccccaggttccccatcagcagctctataaatcttcctccaaaataaatcttaaagccacatacaaggccgggcacggtggctcacacctgtaatcccaacactttgggaggcccaggcgggcagatcacgaggtcaggagatcgagaccatcctggctaacacagtgaaaccccatctctactaaaaaaaaaaaaacaaatacaaaaaattagccgggcgtgatggtgggcgcctgtagtcccagctactcaggaggctgaggcaggagaatagcatgaacccgggaggcagagcttgcagtgagctgagatggtgccactgcactccagcctgggcaacagagggaaactctgtctcaaaaaaaaaaaaaaaaaaaaagtcacatatttctctctatgttaaaaatgatctccattttactactgactttctagtccaaaccaccagtatcctttacctgcactattgccatctctttgtaattagcctccctgcatttcttttgcccacgtttacaagccatattgcacacaacagccagagtgacctttttaaaaaaaatcatggaaattatcaaagcttcagaaatcaaatagcataattaattgatgtacccatcaccctcctccagaacttagcaataatggccactctgtatctcttcctactccctgaattcttgtgaaacaattccagatatcatgccatctctttttctttttaaaaaatttatttgtttttcttttcttaccctctcaacccagcttttcccaattctgggaagaactggaaagagaaggcctgtcatgccattttattcatacatacccagtgctcctcaacttactgtggggccacgtcctcatagaaccattgtaaattgaaaatacacttaaggccaggtacagtagctcacacctgtaatcccagcactctgggatgctgaggctggcagatcgcttgagcctaggaatttgagactaacctggtgaaaccccattcctacaaaaaaatacaaaaattagccaggtgtgatgacacatgactgcagttccagctaccagggaggctgaggtgagaggatcacttgagcccaagaggtcgaggctgtggtgagctgtgatagttgaaaaaccattaagttgaactgttgtaagttggggaacatctgtagtccagtatattagtaaaaaataaggacaccctttaacaaaaaccacaagcatgtgatagttgcacaactctgtgcacctataaaaaccattgaatttgtgcagtttaagtgagtaaattgtatgttaatttgtatctcaatggggctattaaaaaacataagcacaatagcattatcctattaataatattctagtaatttatcaaaatcatggaactgccaaagtttgtgttttcccagttattattattattcttttcttttctttttttttttttttttgagacgaagtcttgctcttgttccccaggctggagtgcaatggcgcgatctcagctcactgcaactccgcctctcaggttcaagtgattctcctgcctcagtctccagagtagctgggattacaggtgcctgccaccacacccagctaatttttgtatttttagtagagatgggggtttcaccatgttggccaggctggtctcgaactcctgacctaaggtgatctgcccacctcggcctcccaaagtgctgggattacaggcatgcgtcactgcacccggcctatattataattttttaacactttgacagagttttaaacatgagtcagatcatgttactcttacttaaaacccttcagtggcttttcatcctatttagaataaaactcaaactccttatgctggcttacaaaagtctggcctacaaaccccttgtgtgatgtggcctctgcgtgcctctctgactttatctcttgcctgctgaattgttcctacctcagagcctttgcatcagctgttcctctgctagaatgtccttccctgtattttcacaaggctggatccttcttttcaacctagacatcccttcctcaaagaggccttccctgatcaacccctcatcctccaatctaaagtggtatcccagttactctgtcaaatcatttatttaaaaagtctgggcgtaccgtggttcattgtctgctgtatctttaagaattaatttatcatctgtctttcccaccttctatgctttcccatccccccagtattttttctgttatgttcactgctgaatcctcagtgcctaaaatagtaatcggtacataacagaccctcattaggggatatcatacaaaaaaattgccaacacataccagatgtttggtatttataaaaatattattattttaaaccacccccagcccccctttttgtttttagagacagagtctcactctgtcacccagtctggagtgcagtggtagctgggactgtaggcacatgccaccgtgcctggctaattaaattttttttttttttttttgtagagataaggtctcactgtattaccccggcgagtcttaagcttctggcctcaagccatccttccgccttagcctcccagagtactgggattatagttgtgagccactgcgcctggcctaaaaggttatctgatagaatatatcaccttcctgcataaacagttccagagttctcattgatatgttgttttgaaaggactgttctaattttcataggtagctttcatttctctaataataagctatttgaggctaggagatggtttgatttatttgtgggtttttgtttgtttgt

SEQ ID NO: 1887384 - DNA, 4001 bp, Homo sapiens
gaaattgaggttgatttggggtggggggagttggtaagatttacctgtaaaggttgatttggggggtggggagttggtaagatttacctgtaatgcattaacttcctcatctcttttcatcttccatctgttccttcccttttctgtattttgcagattattcaaagccaaaagccaacagagcccccatggagaagtggaggatgctcagatactgctatggagccctgagaagtgaaatgggtccaagcccttgcccaggatagagcgctccaagcgcatcctccggggacccttttaatcagtgaattgttcacctctcactgtttcttcccagcagagctaagagacttctagagcctcttgtggatggtcagcgatagccctggtatgaccaggaggtggcgatttctgttctaggtccctcagcaaagactaagcaggacaagcctggctactgtgttaggaggagctgtagggaaagggaaggacaagatgggccaccacatgcctgtgtccactgctggccacacccagagtgctaggggtttgtggcagtgactggggccacctagagcagttctagggttcgtagtcattctctctgagtcatggaaaactgcccaggaggcgagtcccacctaagagagtatgtgtagcactggcacggcctgctgccttgcaaatgaccacatttcatgaaagaaagccagggccacagacaggaaccaaaggaaatcagtcacttaggggaagataacgaatccacaaagtgaaaaagggaaagaaaaaaagaggcaacttcaacactccaacccatgggagcagaacgactttcagctttcgcagggggataatcactgcaagtccagcttgaagagggtgatttcaggatctacatgagaataaggcgcaattttttttttttttttctgaaaaatacggaagggttcatttacagctgttaaagatgggccggttttagggctaaagcaagactctggtcagatgttaacaactcagttatcctggggaaaaaataactggctcccaaccctttcccttttcagcatttgcaggaaaagaaggagtaggtaaaatgctttatttcctctcattctccatggtgggcaggagttcacataacaattataaaccatctttaacaggaaagccaagtaaatcctgtagggatttatttggagctccctttttgctagaaaatgagtatcatgaactaaaaatggactcgtttcctctctctccatcttcctctctttcttctctcccctcatctcccacccaccgccatggtggaaaatgactgtggtcaagaagattgaacatttgagcaagaccagatgcctttatatccaatagatgccacggagagtagatcacaacacatctaactgctgtatccccatataaaataattttaattttcctagactgcagaattgatcacatttactgatgatggattgggaagtaggtgaagaggtgagagttggagagtatccattcattcggccagattattctcatttataatgtagtcttccaataagtatttatttccagaaatctattccctctagagattctttctctctcagccattttagaaaattgttgcaaacagagttcctgtccattttcacaggaagtttttgcagaaggggtttgctgggtggcagtggaacacaggcagtggacccctctactactctactgttccagaacacagaagcctttcattgagagtgttcagctcttcccattgctcaagatgcttgtacccgtgatgcttcttttctctgcttaggtcacaatatgtggagctgacaaggttcccctattatcagtgacaatggtggaatgtggaggtgaagttaacaccttcgtggctacagagtttccttagcagagctgtggagtgtgacaatggtgtttgtgtctaaactatcaaacgccattatcacactaaatagctactgctaggcaatccttccctcgataaatgtcttggcatcgtttgctttgagcaagaaggttcatctgatatcagtcttctcaatcttgtgtacttactgaataaagtctggctcttttgcactcataaccaatatggttagctgaaccctgcctctcacatgctgttgttacataccttagctggtgattaattttcttgttttcccaagtcaataaaaagattgcagaccaggcacggtggctcacgcctgaaatcccagcactttgggaggccaaggcaggcggatcacttgagctcaggagttcaagtccagcctgggcagcatggtgaaaccgtgtctctacaaaaactacaaaaattagccaggcatggtggcatgtgcctgtaatctcagctacttgagaggctgaggtgggaggatcaattgagcccacgaggttgaggctgtagtgagctgtgatggtaccactgcactccagcctgtgtgacagagcaagatcctgtctcaaaaaatgaaaataaaaagattgcagagttcctcagagcccccaacacaaggccaggcacgaggtaatcatttaacccatgcttatagacttaaaatgaatagttaggaaagtgttagacgcagaaggctaagactgggctaaatctatgttatgcagacagaccgcaagcttataggtacaaaattaaggtgtgtgggtccttctcttttcgtcgttaaaaaatccaactttctaataaacttacacatggtttcactgacgtttcagaaattctagaatatgtttgatttctactgatttcaatcaattactaggctgattactgaattcgtacactaggcctttcttcctcttgcatcagtgaattaccatcagaaaattgtttatgaagcatgtgtgagctgccatagcaaatctgggacccatgcagtttctaggacagttggcccagccaggtgctctggtttggaacccattctgtctctgagaggtgtctaaagtcaggagtaggtttcgtttgtgccagactaaagcttccctccccaggcttggttaaatgaagtaggacatgtttaatcaaatagacagggttagatcaaccatcagaaacaaattcaaccattcaaccattcacttatgaaataaatatgtgtagagactaccgtgtgcctgacactgtcctaggcattgaagacacttttaaattaaatgtgtctgatgttatttccagagatgggcattcactggctcgcattatattttgggaccattgtaattgttccaaacgggagccaaatgagcaaaactttgcgaaataattctgagtcccttgctggaaagcctcacctgaatgcagcccacacatttatgatacactacaaaggcttcaaggtcatgagatgcctctgtccaaagaagaagaagagcacccctgcctgccctgcatctcttaccacctctcatttcttccctcctggcaccatctactgtcaagaagagaatcagactccctgaaataattgagacactgacattcctttttgtgtgtatttttttggcaaaggctctaattgaacaggcattaatagagggctctactgttatacagatcacgctcatgcacactgtattagtctgtgttttcatgctgctgacaaagacatacccgagactgggaagaaaaagaggtttaattggacttacagttccacatggctagggagacctcagaatcatggcgggagatgaaaggcacttcttacgtggcatcagcaatagaaaatgaggaaaaagccaaagtggaaacccctgataaacccatcagatctcgtgagacttattcactatcatgagaatagcaggggaaagactgacccccatgattcaattacctttccctgggtccctcccacagcacgtgggaattctgtgcgatacaattgaagccgagatctggatggggactcagccaaaccatatcacatgccatttca

SEQ ID NO: 1887385 - DNA, 4001 bp, Homo sapiens
gaagaaaggaaaaaagaagacacaaattagcaatatcaagaatgaaatcagggacaccagtatagagccaatagacatttaaaacataataaggcaatatatgaatactttatgccaataaatttgtcaatttggataaaatggaataatcctttgaaaaataaaaataacacacaatgaaaaaatgttactagccttatacttagtaaagaaattgaacgtattatcaaaaatcttcacacaaagaaaattctagactcagatagtttctttgttgattctgtcaaacatttgagaaagaaatgacatcaaatatagacaaactctttctaaaacacaagagaagagaacactgtctgaatcacttttatgaggcctatataaatttgataccaaaaaactagcaaatatattacaataaaagaaaactacagaatatccctcatgaacctaaacaaactactagcaaatcaaatacaaaaatacatgcaaaagttcatattccatgaagaagtaggtgtatcacaagagtgcaatgttgatttaacatattaaattgtcaatgtaatccaccatattaacaaaacgaaagagaagacaaatatgtaatcatttcataagcagaaacattatttccctaagttcaactgccatttatgataatggtgaaatattgtcctcttttattatcaagaacaagctaaaaatgtttactgtcaccacttctgttcaacattgtactggaggtcctaggcagtaaaataaaacaaaatgaaataataggcataaagattgaaaattaagaagtaaaactccctttgtgtataaatgacatcattgtttgcaaagagaatcctgaggaatttatgtaaaaatagcaaggtcacagaatacaagatcaatctgaaaaaatcaattatatttcgatttactaccagcaaaaaaaaagtttaaaaaccaattttatttataatgatatctagaacattaaatacttagaaataaggttaacaaaaggtatttaataactctatgcagaaaactatgaatttagaagacctaaatacatggagaggcatttcatgttcataagttgaaaaacccaatgcttttataatatacagtctcctcagattgatctatagattcaatgcaatctgactgataattaggtcaagttttcagagaaactgacatattgattctgacatttatatggaaatactaaggtcctaggatctctaaattaatactgacaagacagaatatgaggacttccacaacctgagtttgaggctccagtagccaagctaatgtacacaaagcaagtttatgcaaatacatgaataaaacacaacaggcagcctagacctagactcacacctataaggttacttaatgactgacaaagccaccgaagctccaatgggaaaagtaagcgcttttctagaaatgatgctggaaaaatagatatccatatggggaagaaaatgaatctcaattcctatctcaactcatgcacaaaattaattcaatatggatgatagacctaaacataatacagctaaaattatagtagtccccctttaaccacagttttgctttccatggtttcagttaccctcagccaaccaaagggacatgtggctcatcatccactcacatccaaaaaactaaaagagaaattttagaaataaataattcatccctttttaaaaaaatttttttgagacagaatctcactctgtcacccaggctggagtgcaatggcgcagtcttggctcactgcagccttggtctctcaggctcaagcaatcctccaacctcagccccctgagtatctgggactatagacatgcaccaccacgcctggttaatttttgtattttttgtaaagataggagttcgccatgttgcccaggctggtcttgaactcccgggctcaagtggtctactcacatcagcctcccaaagtgctgggattactggtgtgagccactgcacctggccaactcatacgttttaaattgtgtgctgttctgagtagcatgatgaaatctcaggccatctgtcccgtccctcctaggatgtgaatcatccctttgtctcgtggatctacactgtagatgctacctgcctatgggtcatttagtagccatctgggttatcagatcaactgccgtgacatcacagtgctgatgttcaagtaacccttattttagttcgtaatggccccagtgtgcaagaatagtggtgctggcatatcattataattgtctgttttattataatttgctgtaatctcttcctgtgcctaatttataaattaaactttataataatataatattatatataatataatataatttataaattaaactttataataatacatataggaaaacaacacagtatatatacagttctttagtatccatggtttcaggtatccactggggggtcttggaatatgtccccagcagataagcagggtatactatatagaactgtcaggagaaaaatatttgaaacctgagaataggcaaagatttcataggtcacaattataatgatatgccagcatcacttgtccatgacaaggtgctttacagaggccattgtctccttttagctaggcagtgaaaagcacattacaagtaaagaaaacagcagttttcttagactgtttactttgcaataaaggaatacctgaaactgggtaatttataaagaacaggggtttatttggctcatgcttctgcagcctatacaggaagcatagggcctcagaagcttccaatcatggcagcaggtgaaggggagccagtatatcacgtagtgagagagggagcaagagagagaaggaagtctcaggctcttttaaataaccagatcttgggcgaattggtagagcaagaactccctcattactgcaaggatggcaccaggccactcaagagggatccacccctgtgatgcaaacacctcccactaggcccacctccaacattggggttgccattccaacgtgagatttgtagggcacaagtatccaaactatatcaatgtcctctgagtgtgtgtgtgtgcacgcgtgaactcatggggtttcttattctcataaattctggcagtcctctattaattacttacttcagacacaaattataaccagatatgggacaatatagttactagggaaaaaagtttactttctaaaaagaattggcatattctttggttaattaagaggagaaagtatccagaacccttttccagttctctttgcagaagcgtataattgctttaagggtctttctggcgaaaagtgattagaggatacattccgccaagcaccaggctgctccctcggcatgtcccccacttctgctgatgcactaacgtgtctcaaatcagttgccaattggcaggtgaatcctataaaactgcaaacctctggtggagaaacattatataaaaggaatgtaattgcaggaagctttccacctgccccattctagaggcatcgcaaagcagattttgtctaaaggcttaccagaaagtgagagggctccaaaaggacttagaaggcccatcaagcacaacctggcattgttcatccctaataattatatgtgcagagttttatagtagctcttctcctagtggttcttttcatcagccttgtcaatggagtgagaataaacctcccttcctgtctgccaccccaccccacccccactgtgaagcacctgggttttgtgtggggttgactcccccgtgcatcccagcatcagcccgggcctgaccagtctagcccaatcagggcatcccccactccccttgctgtggtattttgttcagggatgaactcctgcagagagagtatgtcttcatcagagacaactggcaggcctgccctgccgaggaaagccagcctgaagacaaagcccacacagggcaagagaaactaagagaagttaagacagaaccagaac

SEQ ID NO: 1887386 - DNA, 4001 bp, Homo sapiens
gattccatctcaaaacaaaaaagacttgtattctagcttctctggtttaaaaaaaaaaaattatctgccaccactgactgagcatacccaaagagcaaaatcctagtaggtgattagctgccctcttgcaatggggtgcttgccatctccagtcaccacagttgaccttccttgtcccccgtcacccctcagtgactctcatataccttactaccctgactcaacataacctacgacctactaataataggttctgctccttcctatcctaaaaaccacttgcctcaactaccccgaatgcaagctacaatctcctcctttctcctctcccaaatacttcctcagggaatggtctacatttgctgtcactcctatcccctggtaatagatttctgctcttccgcctctgctaaaactacagagagcagagaaagaatcttttcaccctcctgcctgttcagcagcactggacatcagcaactgtcttctttataaggcctcctctattggtttcctgactctgccctctctaatcctcctaatgaggaaatcacgtagacctccctatggttcaacacctgaaaacacctccgtgtgccacatagatttcttcagtgcttcctcctcacaagtcccagacatgcagcatcctccttctcccgtggaaccctgcccacagcctcccacgtcttgcaactcctctcaaggaaaaacaacaacaacaacaggaaaacaacctcagtatgaagacaagtacattgatttattcaacatttactgatcacttttcaggtggtaggcagaccagtaagagaaggtccttatccctacataagggattcacagtctaaaaggggcaaggataaacagagaggggtaacatgatacatatgatgataaagaaaaacaaaggtactaaggtgaaggccagaagagcttgctgagacaaacaccagagcctgatccccagcctcagacatatccactaccaccatttagtccaggcctcctgcaagagcttcccaactgatctccatgcctcccctttacccatcccaccctctcacccaaatccattctccacactgcagcaggggtgatctgcttaaaatcaggagcagagctttctcctactcaaaacctttcaacagcactgagaatgaggtcttgcatcagctataccatgccaattttcctaccttcatctcaccccacccccatcccttgcaccaatggcccttcagccacactggtatttcagttccttaaacagaatgagtcctctttgctacacagtctctgtgcatagcattcttttttaccagaatcctcttgcccatactctttgtattattaaaatctttttgacctctgggtctcagctgaaatgtcatttctcccattgtttacttaattgtttctatttttatcttcctcattaaattgtatgatcaacaaagacaggatctatgtctgtttagttcccattgtagtcacagtgcctggcacaaacagatactcaataaatatgtgcccagtgaggatgtaaaagtcactttcctcatccgggcccgtaactgtaagtatcccctcaggtttattcctcagccctttctaccactccctgttttcatcatttcaatgctgatgatgctcatctgcacctccagacctgacctctcccaacaagatgcagtgctccaactatgaagcctacaggacagttccacctggaatccttctctgacacctgcaactggatatgtaccaagacacattcattaactcttctcaaactctgtttttttccattgctgttaatggtgacaccccttacaaatcaagtgattgacttatttttccttcacccattgacgagaccatctgattccatttctaaaaatgcacctgtatgctcctgcatacaaagtcatgtgaagtagtgcattagcctcatttcctacctctagtcttttgaaatagcaatcactcacctacatgtatgttaaagcttaattctgattatgtcaatcaatgccctcgtcaaaatccttcaacagctccctcctgcattccaaagaacatccatactctttttgttggtattcaaagcccctctcaatctttcccaaactatccgagcaaggtagtctagttaaacagttaagaccataatctgtggagccagactgacacattaaatgcacagccatggggacaggtttacctgtccagctttaccacttatcttctcagtgccatttaattttgttataaagagcaaatgaattaatataagtacagcacttagaattgtgcttggtatatggccagagatattctaagttgtgatttattttgttttgcttccccatctccaattatcaatagcctacattcacatctgtctgaaccaacttactattaccacagcatagggcaggaccacagcacaaggaccagctgataagctgccagtgttgcatccccttctcaaagcatttccagtgaaaagctcctgccacaaaggtcctttctctccaggagtatgtatacatctcatgcaatgaaatgccccagaggttgctcatcaaaggatttccagccctgttcaaagactctcagtctaaattaaccacccttttcttccctctactttctcaatcccctcacaggtttcagatcagagaccatgttacccttatttcctatccccagtggcagagctgttttagtcatcttttgcccccagtctaagtaaaagttgaaactctcacggctactctccctatatcagttctgttacttgagacagtgttccctttgcatggaaacacttaaaataattaaaatttattctgcagtcctaatacgaacacaatatggacttcaatctccaaagcatcaggcctctccactatgacagtgctgccttcctacctttttttacagtccctgccacgcatggggacttgtaaatgttagtaaagtgtttactgataactcactaattcttaggaatggacaaatgagagtttcaatagtcccagaaatttcctcctaccctttaacctgaaagacaacaataaattataaaacataatgtgtagattccaaaggacaatccaataacttagtatgtgtctctaccaatgcaatgcaaattctactcctttctacaaatgaactgatactttaaaaatattcttttttcaatgagaagtcataacttccatgatgcttaaacctaaagaactgtcttcaaatcacctcctggttcccatagaagtttgtcctatactcaaggctgtcaatcaaaagattaacatactggaagccaatacttagacatctttacagaatcaaaatcaatcatatgttctctaacattagaagtcataaattacaacgaaggatttaaaggagtctcataacgatttataagaatttataatttgtaaaaatttataagaattctaaacactgaacaacaaatggatcacttgaaatcagagatgcactctcaactctcatcaccgctgctacatctgccctcaaaacaatcccaaacatccctccccattaaggactaaaatgggcttcacattgaaggtgtccctacaaaaatccatggaaaacagcagagaagttcaactgaatggctaatcactagtctatcattttaaaaagaatcaagcagtaacactccaggcagtgctagtcaaagtctagttcctagatggcaaactggcactcacctagtccatgaggagtaaggagagagggtgagagcaagcatttagaaactttggtagcaatttgacagataaatgttacatctactgaatccaataatttttgaaatggaaattatatattgtggtttttaatttcatttttcttgcaattcatattttacacatattaggaaaacatcagcccatgaaaagaagaaatgttacaaactgatccttcggggatattcaattccaggaagatga

SEQ ID NO: 1887387 - DNA, 4001 bp, Homo sapiens
ctgatttaggatttccactaaatgatagccttaattaagagtctaagtttctagaataggagtcagcaaacttactgaaagggccagatagtaaatatattaggttttgcaggccatatggtgtctgtctccatgactcagctctgctgttgcaagaagccttaaacaatacgcaaacacatgggcatggctgtgttttaataaaactttattcacaaaaacaggcagccagttggattcgatttacaggctgcaatttgccagcacctgttcattagcagactttgctatctgtgtgctttcctctaatttaagatatctagggaactgttaccttctttatccgtagtgtacctaattattccttcctagagcataagcacagtctctgtatactaatacaagaagtgtcatgagattggtttacatacttaattttctttgtaatggacatcagtactcatcattcttaaatacagaaatgcagatagagcctgtgtgtgttaatcaacagcacaagaaccactgtgtctgtcacacttccacatcctacatgaagaacagctggcatctgactgcttttgcaaaatgcatttcaggtacaatgtcaaagaactatctccagatccctatatactgtactacatctggaaaaaaaaactaagttgtagaatcaccagaaatcatattggccccaccatgcagaaattcttggaagaccaaactttacaaatacaagtaaaatctaagtaaggcattctggttcacagtagcttttttcctaaatgcagtctgaatttcaaaatgtagcttagcttattcagtgattgatttgcacaaaatatgaatgccataaaacacgatttgaattttaactgtagatgtcttgggtattctccgtttgcattaaaaccatggccagttgtatcatatagtaattacaaccagtagatggcatctaatagctagaataatattttggaactatttttaacaacagacttgctgatttatgagggttcaccctctggtgttatttatactggatcattttaatttttagccttcatcatcacagttgaattttaaaatttccatccaatgaatttatataaagggttacaaaaagaagaaaaacctcctcaatttcaactggatagttttattgcacttccacataataagcagattaatgttctgaatttaaaaattgatataacttgaagacattaaacactgagcacaggcatttcaaatatagttggctctctatgattgaataaagctgagttgctaatttctggaccaggaccaaaaaatatataatgagtgtaacaccatacaccaaccaacttgaacaaattcaatgagtcaattgagtttaaaagtttcacaaataattaaattactgaataggatagaccagaaggagaaaaccaaattatttaattctgttccttagagctcaatttgctttttagctgactgtatttagctatctgcaactaaaacaaactaatatcattaaaaacccatctattttcttatgcaacctcaacaaaatatcaatgggtttcaccacttgcagatagtatactttttaaaaggaggtaaaatctgccagtctcaactctttctttccctgcaatgctcatcaaagctagcattttagattataaataatctgaggccaagaataaaaagaatgcttctttatgttgtctaggttgtgatctacatattttggtgtctgagttagatggattgcataaataaaatagcattcttggaaatatgaaggacagaggtctgtgggggaaaaagaatcatctaatcagagacttgtttcttactttaatcatgagccataaaaacagccaaatcccatgtcatgctgcagtaaaggttacatcagcacttcatacaatatttattgtgtaaaggaagccctgcagtccaactccaatatgacattaatcttcctgctctctatatccctcattccatcctcccgcctcacgcccaccccttccctcagttaaatgtgctggttggtgccgcttatatagtggagatacctgatgggagggcactgatataacaagaaatctagacgacaaaacaaacagagaaatagatccaatcctaggaaagctgcattataccttttaagaaagggggggggggtcaatcatttcagtttgccctagttcgaggggattcctggatgtgggacttccagtgctagggccaacaatgtcttagacaaaccagaaaaagttcgtgacctaatgtttaacaggcttatggcttcagaatgtgaaggcatcattcaaaattatttattacaccctagtcgtataagaaatcaccaaaaccaagacatggtactgggctgtgctacttaaagcctgctgctactgagacaaaggtcagggtttaatttccagaaaagccagacagcttttctatgatctcagacttcttcattacacccaaccatctaggctcatgggtttagggagggtgagacagggctttagagagctaacaattcaaggaactaaatagctacattgggaccagcatctaaaatcagagcttactggcagtattttcctgtggtattgcccattctgtaatactcattgaaaacttatttatactcaaaagaatgcatcagagcagctgaaaagccatgcaggcgtaaggattcaatcaacctaattactgttcttctccatgaagctgctctggataacttgaggaccgtcaggtgggattagaaagctttgctgcctggaagtctatgctcattttttgaaaagctctctctctgactcctggtaaacaagtgatgaagaaaggtactgcaatgggatgcaagttatatcatcacctttactgcaacaatctagggaatggcaatatatgatctagcaattgaatagccgaagttattaaaaggtccccttggtaattgtacactgaaaactcaaaactagcattgttccatttagtacaaaccatgtcacagaaaatgactttgttttaacagaatcccttctgataacgtctgctcacattaggccaggtagagaaagaagagagaagatttcccccttttgcctgtgctccactctagttattccatttccccattcatgtcttataagccccctcacctttcatccacattcgccttccccgagatcagcaccagctcagagacttcactcactagagtcttgttgctttttagcaacccttcttctgaggggaccgtggagcatctcattattcttcttcggaaactggatttgtggaaaagcgtggccagccctgccctgtatgtgtgtggtgtgcacacttgtgcacagaggcctctgccagaagaagtggcagattggctgtgtaggcagcagtttcatggagcccagaaataagttctgcggcatatgcaaatgtaagcaatgggggcagcagaacgggcctctaggttcaaaaatggcagttgtctccaagaggccagcctttttcaaaagcagaccactaaaagttattcttacgaaaaatgcctccctctgaatgaatctcaagtttctactagtaggtcactggtgacttcttaaaaagccgtaagtagcttacaaaaatatgttatcctggaaaggtaatgattagcaatgtattacatgtagttattccagagttcaagagatagtgagaacagatggatacattttgactccaggtccctatgaataggtgtttgaaaacagtcccagggaaccaacggctaggagttgggggataagggttacaggtagtctacctgataatcttatcaaaggccaatagcccctcctctcttttgccttcttttcctatgaagggaaaaggtgaaaaagactcacacctggtacagccttaccagccatggtgccacagggatttcaaacaaaatgtccccatcaaagagagaaacaaacctttttcct

SEQ ID NO: 1887388 - DNA, 4001 bp, Homo sapiens
cagagaagccttgagctgagtggtcactcatgatttctttctgcaatagggtggtgatggtgggagcccagttagatctgatagtgggatcagggtatacctgagctctcagctctgtgtacctttccagtctggctcatggagacagtagtaagtatgacagttctggcagccgctgacctctgctcaacatcagcccattggagctctttgctgaattcagaattaaccgggaaagccatgtagcaagcaatgaatttgactaggacaagattggaagcttattcagaatggcaccacagtattaatcaactacaattgtcatgctgtccgagtttggtagagtgggttttaatagcctagatgtggtgaatctatggattattacagtcaatgattctgtggaataacaaaaaattttttccaattagatatggaccaagttaatgtgaatctgagacacaattaggtattttcttcttacaaagacaaagccaagtggggatttaaagctactaatcagttccacagaaccccaaatccataaagatgacttcatggaaagctgagctgcaggcttcattctgtaacctttgatgagaagcaaagtcactctcctccctgtttgttcagttcagttcctgctgccgacatcagccagttgtctgagagatgggcacagctattcgtgcttcattggtgtgtgacggggccggttttccagcatcttcatcattctcaggctatatcagaaactcccctggtgacccattcctaacactcaggttaacacagatattataacgaataacccctagatcctgaatctataccatcacccccattccttttaaacatggccccattatctgttgggttataaaagcaagggaaaccagtggcaggtgtcggaaatatgactttgatagatctgtctctggatctgaaaggtccgtttacatctctcaagcatatgagaaagtgattttgtccatccaactcatgatttcacacgtccactttcattaacaggaaagagaaaatattacttattgttacttagttatctaggatctattttccacagagttcaatgcactgcacactgggaagttagtgcttaaaatgtcaggatatattaaagctgttaggtcacagtatacttattcagaggatcattgctgtgctaatgtcccctgcccaaacactgaccatagttatgtatgaggccatgtttagatggaataggagcaatggtgtatactcccatcaagcccagctaccatttctcctcttttagaaccacaactaacttcttgcttttatgctatgagctacccaatcacaattacaatagagcagttgcaatattgtaatcttcagtttttcttagttgtgctttttatttcacaaaaatttgaatttgtttattccctgacgctgttttccagatttaggattcttttggggaactgaattttccagaaggctggattatggaagtgttattatagattattaattaccatagtattggtggcgaaccaagttgccaagcatgatgacattaaaaatcaattcttaaatacatttgatgattgacaaaccaaatcattgataagaaaccattataattattttgaataattgctgttataatccagtagtttcatattgtgttagttatctatttttgcataacagtattgccacaattttagcagcttaaaacaattcacatttattatttcacagtttctgtgagtcaggaatctgggtacagcttagctgtgttgcccgctccagggtctgtcataggctataaccaaggtgttgggcagggctagaatctcacctgaagcttgactgaggaagaatctgcttcagcttcagtttcttgtgagttgtgggtctgagggattcagttccttgctggctgttgatcagaggtcccccttaattattcgtcttgtggatcccttcatatagcagcttacactcaatcagaaagagagagagttaatggagagggtctactagcaagatagaagtcataatcttatgtgacataataatgacagtgacatcatatcatctttgtcataatttactgtttagaaacaacttacaggtcccacctatactcacagtaaaaggatcatacaatagtatgaatactaccaagggaggataatcagagggctgtcctagatctgtcccccaggaaaatattcagaaaggacaaaatatttgatctctttaggaaaaccccctttaaaagtttaggtctacacatgaaggaaaaggattagttaaaaaaaaaattttagttctaaaccataaagaagggaaaaaggatattggttgcaggagctcaaaatatatattttttaaaaatttaagctgggaaacatagattcaagttgccccaaatagatactccctagaacataatttttctctaagagcaagaaagtaataactatacaggacatattcatcagatggaagggaaagaagagaaattaagtagttattctttgttaaaaaaaaaaaacacaaaaaacaaaaaaagtaaggccaaagcaagccagaataattcaatgcaacacataattattgagtatctctgcaacttggactctactatgtgctgtggagagtgaggagattgtggaaacacaaaggaagagaaaagtaaataatacgtattatttttcccctcaagttgcttgtaacaatagcaagcatttatgttgatttcatactattccagagagaaatctttaccaactttacatgtgtcagataatttcaccttcaaaacaaccctgtgaagcaggtgttattcttcccatgatgatgggaaaactaatgggcagagaggttagtgacttgcccaagtacacaaagccaggaagtgaggccatgtggctccaaagtccatgctctgcaccaagagtcagcaaactacaacctgtaggtcaaatctggccagctgctgtgtatgtaaataaagttctactggaacacaaccgtgactatctgattccatattgtctatggctgattttacaatacaattgcagaattgagaagttaccactagggcctgaaaagtctaaaatctttacaatttgggtgtttacagaaaaaagtttccaacccgtactataaactattacagcatagtgcctctttgaagacaaacatacatattatgtacccagacttctaaagggcaaggcgaagtaagaactacatatgtaaagaggtataaagaaaatgggagaatgttactgtgtctttcctggacacaatggtggtgaatgagtgtgggaagcagggaaagatgagaggtttaaggttctctggatataaagctggtgtaatttcctcaacagtggaagcaagagcagcctaagtaaagactaaacataggtagctagattcagcagttggagggaaaaagaacagttgggataaaatatttataacctatacttactacaagtaactataatattatgtttttatgcaaataaagtaaaaacaaagtaattaaatatcttgagtttcaatagccaatttcacctttaaatttcaacagtcatattgaaagcagtttctgtcaacagaattaggcaagtggcaggtagagatcatgtgttgtctgagactccagggtgttgtacaaatatgaaacagtcattgtgagttctaagaaacctcaggggacatcacagataagctgagtacttaagcacgttagtcatcatgacatccatctgcacctcctttgttcaatttctttaactctcgctcccgggtagacattttgtatttattcatcacttagctaattcataccaaggggttcagcaagggaagagtcttcttcaaagcatttagcactggatgaatattcgctttgatctcccgtttctttactcatttgctaatgataagaaccggatggcaatgcggaaattctgtcctgt

SEQ ID NO: 1887389 - DNA, 4001 bp, Homo sapiens
aggcttatttgtaacagtgtcttattagtttgaaagcaaggtaagatcaaatcccagaaccaactataattctcttcaatattaaatagaaatttgcaactctttatttcattttcctcttttcaatatccattcttccgcaaggcctcttaaactatgagtggtgaaagctcctggtcttgcacaaagcaatcccagttcacacctgctgacctactgtttccaatccagtaagtgccccctttcactctccaaagtgtcctcacctgtacattaaattatatgatcaccctacttataacccaatggacagatatgtaattgctgaaaatatgtaaattgcttcagtgttttctttgtgatcatttttctttaaaaacaaaaaaaggaacaacagtctgactccaattctttcacttaaaacatgttttcctgcaggaacttaacccaccataattatattttgcaaataatgggaagaaagtttaaattcagtatcctcttgaagcaagatgacaatcaatggttgttaagtgctttattgttgcaaagcacatttaaatatacactattttttcctttttgaaaactgtcatccaaaacagaatgatgcaaaaaatcacatacatctgatctttcattaaatgttatgttaatatttaaacatggttctctcccccacaatattctggggaaaaaaatttctctaagaaatataatgaggccgcaccatgaagatgtgactctgcagattctgggaagctatccagtttgcgcatccttgtctctgcaacctcatccgtgctgggaactggagagcttgtctcttgcacagtaaagaaacaacctgaaacaaagtagtcttttatcaaaccttcccaaagggcagtcaaaaggctgaggtttcagctaccctatgcatgctctccaacaggtttaacaggagtaaagtcccttccattcctacttgcataaaaacgcagaccaacactccactagacgtccttgacattgactcctctctagctgatctgctgtaggggcagcagccatgcctagttcttcaccaaacccctattcctatctgccctgcacacacccctacacacagtgagatcttagagctttgacaaagtgcaaagagaagtcgctctacccaaatgtaccctgccaacaaggaagccaacccagtgttggcaaagcaaactctcaattaaacagattatgcaccgtacaaaatacatcttcgagtgaatcacagtaggaaaatcccacagaaagtacaagggaattatagtgcaggccttgctttacaaactccatcagatctgcccaaatgtcaagtgaattgataaaaaaaaaaaacccactttaccacttccataaactaaaatgttaaaatataataataataaacttgaatgtgacagattactcaaaggaaaaactgtgttattttgttttgttttgtttcctaagatactgacaaagctaaattattggggtttttttaaggaaggtcttagaaattcatagcagaaacaaaatttttgggtttaagagaggacttttcttcattgttgtaatttttcatcttccatgtgtatcagtggtctctgaagaattcaagtaaaataaaagccctccctggttgcccacatttcccctgtgaacacacaaacagcagatgtacatgcccgcccttcacactcctgctacatcttcctgaaaatccagctctggagtggcagtggctgggttcaaatccagtcactgccactgaacagctgtgacttgggcgagtcacttatcccctgtgctctggttcttttttgtgtaaaatgccaataacaacagcaccaagcacacagagctgtcacgaggattacatgggttaacaccggcaaagggcttaggaccaagcctggcacgctagtgtttgctaaaacattttatcaagagagctacaaaataaactccctggcaatgtctcgccttttagatgcaaggcaacattgaggtctacttcatccgcaaagtccacatttcttttgtgggattgtgcctaacaggaagtgagtgtcaacaaatattcgtgggacagatggatacaaaaagctgtacaaataaagaagcaaatgacctcttccatgattacagtcaaaattccaaagggcttcattaaagtcaaatcaccagaatggtaaactggagcctgcgtgctgttctcaccactaagtggtacttcctgcccttccacagtgagtcctggtcccagtgaaaacacgatagaaccagtcacgccccgcctctcctcatcgtaagaaagctgcccactgagaccatcccacactcgccaccaccatttccctcaacactgccacttctattactggcagttattgccagtactaaaacatgaggcaaaatgaaatttctaaagcaccgtgaaatctatggaaaaatattcagaagcaaagctttcaattaattcagtatttaaatgaaattcatttcagacacaattcgataaagccttcatattctgaagaaattcccaatagtatgaaaaaatatataggtttccaaaaagcttctgctttggtgcattgggaaactcgggctgctcttgcagtgtaacgcagtctgatctgcagaattaattcagacgtccacacaggaactgcaaaccctgactcacaggtgccttccactggcggccacctagatcactgcatctgccccagtcgatacaggaactccagtctttataccttccaaacttactgtccatatgtggacctaaaatgcctctacggcttggctctctctcccccatttatggcccctccatggctctcccgccctaaggataaagtccaggctgccacggcttctgaggcacctcctgacctggctccccacctgaccagccgacttctcttcccagccagactgtgctacaacctgactttgtgcgctctcttctcacctcctacctggagccaccttcccaccacctcgctgcccctcagacctccgtgtaaatgtcatttccttggatgcctcctgcaaccaccaccccgatcccaggctaggtgagggacacttccacagccagcgcttcccttagcatgacactcagcacttttcatcctagttcctttacttgagccctccgagagggctctttgtcactgtatctccagcacctggaataacgtctggggcacaggaggtcgtcaataccaatttagtaaatgagatgacaatggcttaactgcaacagtcaggatgagaaatagagaagaacccaaaaagaatggggtggaatccaataggacctggtgacagaacagacatgggcaataataaagaaagaagggcctggcctggatgtcaaatctccactggggcagcaatgtgagcagagccactcaacaagaaataggcaaaagcacaaactcaggcgagggcactagtttaggtttagacacgctaaaaacatgaggtgtcccaaaacatgtggctacagtgttgtggctaagaactcatccctgccctgctcaagttgccagtagcttcccagcacattaaggaaactccaaactcgtcactgagtcctacaaggccacatatggactgggtctagcccctcaagctctccgaccccactgtctcagtctgctttctccctgctcgcctcactggcaacagtggccctcccactgtccccagaggtgcccagcaaaatgctcctcagcacctgtgcactcactgcagcccacctggagcacggcacccaaatccttgcagggcttcctgcttctcttaatgtaggtcccacttcaaacatcacctcctcctgtcagtcgtgaaaattatccacagtagcaccccctgactcgctgtcacatcagtctgttttagtttaatcactaaacacttgatgaaattacactgtctgttcatttgttttgcatatttgttgtctgtctatc

SEQ ID NO: 1887390 - DNA, 4001 bp, Homo sapiens
cccctgcacatttccctaagatgggagattcagctccacctccacctctcaaagcctctcatcaccctctctacctctgcagtggaggtttcttccccaggcagctaacttgatggtggaccagacagtggcaggtgctgtagataaaagagtatacgtgctgcaggtacaacccaatgtctacatcttgaaatactccctggctgagacatccaggactctgtgtgttctggtccctcactagctagctctgtatgtcagttgatctttgaagtatggcagagctgaattcaaattctagttcacaacatgctcattgagtgactttgaaccagctatcaccctcttttgcaccccagttgcttcatctgcaaaatgagggtaataatatcatccatccagtgctgctaaatatgatcacacttaggcatagggctggcacaaaatcaatattcagtaagtgataagcacattatcttacctcttgcagtctaattttccccatatttaaaataaaaatgaggtggtgagttcccaagttccttctcagcttttaattttagggagagtgtacacatttttctcctctattgaggtattagctatgtctatgcaggacgggacacaaatctccttccatgcctgcccaaatgtgcatcctgagctgagaggctaggggactcagctatgaaacactcattccctttatggatcagttaatatcactcagggcttgggctacacacccaagctggacctctcactaagcctaaaaagtaagctcaattcagtattgtccacacccagtgctagagatgggatacccagaagacacatcaccaaaaggatcaggacttccatctgtgtatctggaaaacaataatttcttactgtgatatttttgtttcttaaagtcacaaaccacacattaaccacacaagccatatctaggagatcaagaattgcaatatcgctctcctaccacatttgggggaattgaagaattaaaaaaaagaactgcttttgctcaaggtcacactgtctggaatcaaaactctctttgtcctgaacttagtctcctggccaaattgcctctgaaacactttctccctctcctgggccatccctcagtctctgctaggaacaaggacaggagatctaagatctcgaagatgcttctaactttgttctttttccaagattttcagactctgggagccactgagactcctggagggaagagcagagctttgcaaatttggaatgactttagttcaaagcattctccactctccctgtgttcccagtgaagacaaaacccaagaaccctgggataccaaaaagacctcaagattatgttggtatttcctgaaaactcacagagaacagggccatgcaaaggacatgtcaacagcttttttgatgacttcagtataagtgaaccagaaaaagatggattaagtttcccttcaaatacacatgtgctggagagttgcagctgagaaaatgcttagagccatgcatttccaagggctggtcaactccaaacagagtgggatgttttgctgagtcccaaacactgacttctcttcccgtccctaaaaataactgagctgtccagctgttggatggatattttctcctttggtttttgtttcatttgattttctcacaaagtatcagggcgataaacaacttcaaaacctggtagaatgttctgggggaattaggcattcagaaaagtaaaaagtaaaaataaaaatctgccacaatctcacatcattgccctcaccaggcattctgtcctttgaacattacctgtcattacttacccatctgtcaatgtcaaccccaagatctgtttcctttgggattattttgatcctcatgaatatagaaatcaatcattgaaacaagtttttgagcacctagcatgtacccacagtgactgtctaagacaaggcccttgtccacagtgggtttatgacataattaagaagctcctacaaactcatgaaggaattaagaggtaataacagatggtacaggtaggtaagaaggtatgatacaagaataggggctttaggccttcagagaatagagaaggcactgtgtgtatcaaagaaagttggaaatcataataaccaacatccactaactgctgcgttttggggactttcacagatgttttctctggacctccacaaaagccctttaacacagacagggtattggtcatacagatgggaaatagagacttggaaatattaagtgtcttattcaaggtcattagtaagtggtggagcaggtgtagagacagactaaaggcttataacccaggcacctgtgccttaacgccacaccagttttcgaaacagtttgttaaaatttgatagatagataactatggccttatactgcagatgattggaatctgtgagatttctgaatatatccaaagttgacttgcgcacccccacctctccattttgctaatgaattacacccatctggaattttctcgtcctttctcctattcctaaagattcagcacaagcttgtacttggatttccccagcctaaaatgttttctccttctttggaataaataggacttaacgactgtatctctcacatgtcaactaattatgtactgggagtcacatcacttctgttttcttgtacttttacttaaagtatcttaggttattatttagcacatctatgtctcatcttctgcagagattagctgctctctgaggagagtttttatgcctgatacatggtcccaactgttttgagagtggtccaatgctatgcttagtgaatatgtgttgataggagtgaagatctccaccctatgctgagtcctgcatcggcaggccccgctcccatcttgttgtagaactctgcatctgcatgttctacatacttctcaagctccttgtgttgaaaatgttaccatcttcctctaaaactagcttctcatccagaggtttctcttgctgccagaagcaatataattctcccagtcaggctccaaaggtgatcatcagttttgatcttgatgccctagggtactgttgattgttcattgaagtttcttataaataaaaggtgccctaccttgtgctggatgatctggcagagatcaaaggaagagcaaattcctaggagagctcccaagcaaagaaaggacaagaaacacagggaacaaattagacaacaatgcaggcttttgtgtgatcagttcacactgccaatgccatacttcagaagcagggaagatgagcttgtgttgaattagcccacagatgcttcctgggaaagtatttgagtaatccctggaggcagggaggactgagttgagagaaggagaaggggaagcctctgggggcagccctgtggggagaaataagaagataaatgcaggtccctactctcaggcatcagaaattgtccagttgaagacaaagggaaaccggtatagggaagtacttgaaatccaaatggagaatcagtcatgtccactggggctatttaggaagctaagaaaaagataccagaattaacattcagaacctcaacttgctcttcctcctcttccagaacagagcctggtgtagtcagaatccccatggcaggattctggggttattctcaccttgccatggtgcatgtgcaggcacatgtcagaaagaaatagtactcagggcaggtcccccacacaatgcctttgaaagcctcttctccttcccccagagcttgactcccagcttggcttggggtgccccaaaatcaggaacctcaggtcagcctcctggaggctggaaggataggggcagctgagatcactgggtttcaactttagtgatgggttattattattgcccctaaatgatttttcaaaggcacaggaagaagtcagtcaacattccaagttcccacctggaggaggcattaggaactgtcctgagaatcccacttctcctttctttcct

SEQ ID NO: 1887391 - DNA, 4001 bp, Homo sapiens
gaataaagaggaaccattgagggaaaatatgaatatatatgtatagtgttctttgagaaaatattgcacttattcattcatcatacacacacacacacaattcctgggaatacaagaatgaacaagaaagataaaagatagggctcctgtactcatggattttatagtctattagtagatgtacaagaagaagaaaaagcaaatataataattaaatggttcaatgtgataagttttgggaaagggaagctggatagtgggcatgatctgctgtacttcagtggtaaattcatctatgtggacgacctggggggaagccagctaagtaaagcatggccttatcagacagcctggactgccaagtagtaggccttgagagggcgctgccagcaagaggagaccactaggagcaaaggaatggcatagtgatcactgtgtcttatgctgattagtatggccatactgttacttaccttgatggtttaagtagttccagaccatctttcaattttgttgtatgtctcaatggcttcataaattctttcttcccaagtaggcaacagtgagtttttctcaaatccctgcctgaatgattgagttgcaatgacttgctccttgagagtgcactagcaagacacaccagcaaccaaaacctgtttgtcatccaggaatagcctgcatgctaggaggaggtggtttggaacatgtgtaaaatcaaaacatttctcactgttaatttcttttcacagttcagaatctctgttctattccatgtgaaaagtaaaataactcctttgctcggatttcttgctgacatttctttttggtgggagtcaggggtgggagttcactctgaatgcttactatacctcctgctacagctctgtggcattttcataaaataccaaccaccaaaattctagtaatcacaaaaacatgtgctttctcctcatatccactgaaattctttctctcattaaaaaatagaagtctcagaaatgtaattagaaagctaaactcgatatctttacattcctttggtttcaaggcgggggaagaaagctgcagtttttctaatttcccttcagttcaatgctactcttgaatggggaaaatgatacaaaacgtctgaagaattgagagtctgacaagaggggaggatttgtatttccttgttattaaaaaagaagaaaaagccctcagttatgtctaatctttaggaacgcagtgccctgtccaacccacgaactgttggcagcatcataactctacacagaatgttcttttaagcttttccctccttcccaagcctttcctgtgaagttataaatctcagcatttagagatattcttatgcaaataaaggagggactttaggttgggacctttcatgttgattctgctgagggcatgctagagaaacagccccaagaaaagcaggcgcacttccatggctaggttctaggtttgactttatttgtgaaaccccatctgtccctcctacaccaagtaccaactccaggaagctgtgatttaatagctctgtgcctagaggaagttttacccaacccctcacaacatcctcctgattgtttggaaagtgaaatgattctgaagatcaaactctaccgcttcttgcactgcctcctcttctgtgtatagctgacctcctcattccacctacacaacactccccttaaactttgttgcagcaggcagagcagtgtggccttaggtgtaggtgcacctggaaaaaccccaaataatgtccacttgaggtcacataggcaagcagatgtcctgaacctattgctgcccttgagtcaaagaatcctaattctccttatctggttattttggctgctccgtgatagtgacatatttttcaaaatacattcatgtgcattttctcctttgaccatcatagccccatgagctgagcactcatataacgtcctcagggagcattcccagtggctttgctcagggactcaagccaaaaaggtgatgatgggctctgacttagtacagtgagttatcaccgaaaggaaatgggaaaagaaagagactgaccaaagagatccagccaggcagccttgtgcaagtgatttaaacaacctctgcctgtgtttgcaaatccaaaatagagataatagtagttagtaactcacggggtgtgtctgcttataaagttgtagcatatgtacctatatgtagcagaatgcctgactcatagaaaatataccataaatgttagtggttattaatgattattattaatgtattgaacacctatagtataccaacctttatttcatattttgtttacaacgattctagttggttttcaatagaatacatcactgttggtataattacaaatgcacaggccttttttttttggaacagagtgttgctcttgttccccaggctgcagtgaaatggggcgatctcggcttactgcaacctccacttcctgggttcaaacgattctcctgcctcagccttccaagtagctgggattacaggcacgtgccaccacacccagctaattttgtatttttagtagagacagggtttcaccatgttggtcaggctggtctcgaactcctgaactcaagtgatccacctgcctcggcctcccaaagtgctgggattacaggcctgagcgaccgcacccggctgggcttgttttcttttctttttttttttaattatactttaagtattagggtacatgtgcacaacgtgcaggtttgttacatatgtatacatgtgccatgttggtgtgctgcaacccattaactcttcatttaacattaggtatatctcctaatgctatgcctcccccctctccccttcccccaccccacaacaggccccagtgtgtgatgttccccttccagtgtccatgtattctcattgttcaattcccacctatgagtgagaacatgcggtgtttggttttttgtccttgtgatagtttgctcagaatgatggtttccagcttcatccatgtccctacaaaggacacgaactcatcattttttatggctgcatagtattccatggtgtatatgtgccacattttcttaatccagtctatcattgttggacatttgggttggttccaagtctttgctattgtgactagtgccacagtaaacatatgtgtgcatgtgtctttatagcagcatgttttataatcctttgggtatatacccagaaatgggatggctgggtcaaatggtatttctagttctagatccctgaggaatcgccacaccgacttccacaatggttgaactagtttacactcccaccaacagtgtaaaagtgttcctatttctccacatcctctccagcaactgttgtttcctgactttttaatgatcgccattctaactggtgtgagatggtatctcactgtggttttgatttgcatttctctgatgaccagtgatgacgagcattttttcacatgtcttttggctgcataaatatcttcttttgagaagtgtctgttcatatcctttgcccactttttgatggggttgtttgttttttccttgtaaatttgtttgagttcattgtagattctggctattagccctttgtcagatgagtagattgcaaaaattttctcccattctgtaggttgcctgttcactctgatggtagtttcttttgctgtgcagaagctctttagtttaattagatcccatttgtcaattttggcttttgttgccattgcttttggtgttttagacatgaagtccttgcccgtgcctatgtcctgaatggtattgcctaggttttcttctagggtttttatggttttaggtctaacatttaagtctttatgcatcttgaattaatttttgtataaggtgtaaggaagggatccagtttcagctttctacatatggctagccagttttcccagcaccatttattaaatagggaatcctttccccatttcttatttttgtcaggtttgt

SEQ ID NO: 1887392 - DNA, 4001 bp, Homo sapiens
ttgaagaataataccctgtaactagaaaatgctttggaaccagaaggaaagacatgtatagcctgcatagaatccctgtgcaaatccctcatctggaatatgcataaacctgctgtgagcaaagtgaaatctttcccccctggtgcccttcctatcagtaactccacatcactgcttgcaattgacacatctctccccccgccccaccccgcttgatcattttgaaaagtatatgttatttttaagcgtcaacttatttcaggaatgtgtacagtctttcttaataaactgcagataacaacataagaattgggaagccccactttaatttccccagactgggagaggacagaggctgcaaggatcaataaagagactacagtatggaaaccagactcaaatcaaggactggatataagcagctggagcagaagtcttcagaaaccaagcccaccctgactcctagccctacttttggggagcctgccacagatggtacccctgctgactgcaaggcctggcacaagccccagggtctccaagccatttgaatggtattgaacagagcgcaaacctacctttacagcttctctttctcaagggcactatgctgcacacctttctaaatatcaaactgaacaatgaatgttaagagatgcatcaatggatgaagctggaaaccatcattccgagcaaactgtcgcaaggaaagaaaaccaaacaccgcatgttctcactcatggtgggaattgaacaatgagaacacttggacacagggtggggaacatcacacaccggaccctgttgtggggtggggggagggggaagggatagcattaggagatatacctaatgtaaatgacgagttaatgggtgcagcacaccaacatggcacatttatacatatgtaacaaacctgcacgttgtgtacatgtaacctacaacttaaagtataatagtaataataataaaaagaaagaaaagtcttatttagcaaacactcatatatagtgcttgctatgtgtcaggaacagttcaaatactaggttattcaatcttcaaaatgaccctatgatgattcagcaattctacttctaggaatgtaactgagagaatcaacagcaggaattcaaacagatagctgtataccaagttcacagacacattcatcacaatagacaaaaggtagacacaacccaaatattcacagatcagtggatcaacaagcagactatccatacaattcattattattagccttaaaagggaaggaaattctaacacatactatcacatggatgaaccttcaggatgctatgctaagagaaataagccagaaaaggacaagactgtatgactccacttacatgagggacctagaagaggcaaatccatagagacagaaagtagactggtgggtgccaggggctgcgaggaaggggttactgtttaatgggtgcagagattctgtttaggataatgaaaaagttcttggatggtggtcgtgattgcacacaatgtgaacgtacttaatgccactgaactgtatactgaaaaatggtgaaaatatggttaaaatggtaaattgttatgtgtattttaccacaactaaaaaatgtttaaaagttaaaaaacagtaaattttacttatattttaccataataaaaacaaacaaccctgaaacagggaaacaggtcctttactataatgcttattttccagatgtgggcacccctggccagaccaaacaccacactggacactagagacacagtagtgaacaaaacagcctctagccctgccctgatagaacctgcattccactggggagacacatcaaccatcttttaattcaattaaggcagagaccacaaagtgaagaatggagctaagagggcaaatcacaggggaccacaaagtgggggctgtcagggcaaagttgccaggaagctacagaatcccgagttatctgaaatgtctacagcaaaccccacatgtcactctggtgagcaaaggccttgacaagtcaagagcttgcacacattcctgctctcaattcatacgtggtccaagctctagcaaactccctagtgaacagcagtcatgcgtgaatcatctccaggacctgatcaaatgggtctcagaacagcagcacagctctccaagcctccaatgcattttcacaccatcttctagcacactatggcagtgaagagcatgcatggtgaagccagacttcctgggcttgaatcccagccctgctgctctctggctctgtaaccttgggcaagttactagatctctgaatctcagcatctcattgtaaaatagggttattaaatgagctgacatacaggaagtttttacaattcattggttagtgtcacagaaaaaagcaagtttttaaaaagtattttttagaacaatccttgccacatagagagttagctgttattctcataatcattattaccttattccaacctcataagacccaagaggcaggtggggcaagatcaaactgcccccagttaacataggcaattgaggcaaaggaagagcaagttgcttgagtttacattgctagttagagccccctactcttcccaccacactgtggcacttacgataattcaaaagcatttgatgaaaatttctagcatctcaaccatatttgggcacctattatataccagatactggccatcctttcttctagtgcctgtaggaaccaagaacccaggttctccaagcccatcatcttggtctgtaatcccagcagccaagttttgaacgcttcactttatctactggaaaactgggctaagagaacaagcttttactgagcacctacaacagatgcagtgctctacattacagggaagacaagagtggtcaaactcatggtatctgccacccttcacacctggtagaggaggtaaggagtcctcagctgaaagagaacaatggaggggcaggtaccactaattgctgagccctggtggagcgcataaaaggtagaggaatccagctaagccagtcaagtgtaagttgatgtaatcagggaaaacctcacggaagaggtgggatttaggtggggctttaaagattgcttactgggatgatcaattttatgtgtcaacttatgtggccactgggtgcccacacatttggccaagcactattctgggtgtgtccatgaagctgtttctagatgaggttaacatctgagtcagtcgactgagtaaagcaggttgccctccccactgcgggtgggcctcatgcaatcagttgaaaacccaattagaacaaaaagtctgggtaaaagggaaccctgcctgtttgagctgggacactgctatttttcccaccttcagactcaaactgagacatgagctctttccaggtctcaagcctgctggcttttggaacttacaccactgactctgctggttctcaggcctttggactcagcctggaactacaccatcagctctcctgggtttccagcttgctgaatgcagatcttaggacctgttggcctctgtaattgtgtgagtaattccataatatataaatatgtgtatttcctatagttatctttctctagagaatcctaatacactactattggtttggcagagagtaaaaggggaggaaagcttccagaagtctaagaaattgaatgaaaagcgaagatgtgaaaaaatgagagaataggaaggccatgagaaaatggctttgaagggggagagagaacaaacaggaatgaggactgtgaggtgcaacagctgatctgagaacagctgatggattctgaacatgaccctccacacaggtagatggggtgcctgtgatcttgagaatcacacaaaagcagagtttaggagaagtgatcccacatggataagcgtagaaaagcctggagcccaggaggccagcagcatatacctgtccaggtaggagaagacatgtggggtgcgatagcagcgcctagctc

SEQ ID NO: 1887393 - DNA, 4001 bp, Homo sapiens
aacaagtagcagaatttccaggggaggtctcagccttatatacagacatttgaaaaaaacaaaactccaaagcaacaaactgtgtactcatgcataacacctccaacaggaacaaactaattccaggcttgaaagaagatgaaaaagcctgacatgcatcttcctaaagggagtcccacccggaaatgttctgagttgacagacccctcttaggtagaaagaaacttcttgagaaagagcttctcctcttctcagctctgtcctcagaccaaactccaagaagaaccacagcaaacccgaaagagcatgcatcatccatagcagttcttgggaaatgtacctttttttaagaacaggtctttgaactgagcctccttcagtgtgctgttgttcaggtggtcactggacataatcaggtcctctgcaagtgggagtccaactgtgacgcagcccccccacgttcaaagcatcccttcagcttccggcaatctcctctccaggcagctcagagctgcagttatagctggcatggggtgtgggagagtgtgtgagcgtggagggggggggggtgtgtttctgtctgcctcgttcactctctctctactgtatcagcagggcccaccccaggtgctagactcaaatgctgtggctccgaccgcagactgtggctaccaattatcaactgccatcaacagaaaccaggagctctgcggcaggaagccggccgtgtcaccgagcagagaataagtccggggtctccgatcctgagaccagctgtacacccagggcactactgtttacagcaacgtctatcagtgagcagtctgcacttctcaggtttggcctcacacctggacgtgtcacacacacaggcaagcagaacgcagctagacggctcatcttgtcacactgcgttcagtaatcttttcaacaggcaaatatcaaaccagtccagacagaaaggaggaaatctgcaagtctcacacaatactccttcccttgatctctgctggaagctttcagtgtggaaggaccggagagggcgcttaccaaggcaggacacgcgacaggcgggacgctcacgttaggctcgcgtgcttctcccctgcagatccgctcccagagcgtgctcgcccggctgggagcacccacagcgtccctcaggctgcgagccaggctgcgggctgtcctcttctggtgctccctctccacatcctctaactgatgggagcagctcccagcggctcttgccaccgagctctgtactggcaaggcgtgaggtcctaaccgcagcaggaaacactgcgcgctcctttccccccggctcgctcttccctcttggctctcccattcattccctctccctctgcctcacatcattattccccatgtatggtagcacaaaaacaccacagagactccttcaaagtcaggatgctcaatgttcctaggcagttttagtttataaggatcagaaattagagaacagaatcccaggcaattcaaacatgaaagcagagacatgtctcaggagggcgctttctcctggttcattttgttcaagcacagtctcttttccccgaggtctaaacagtttgtttcatctgagtgtaaaacatctcccgtgcattcggatgcccccaggctgtgtgaagaaaattcagggcaggctgcgagtctgtcgcagttttcagagaaaatcacggggtggccgtggtggaaagggcagcctgccatggtaacgctgcaaataacccccaccacaagcactgccgggagcccagaatagcctttgtttttccttatttagggtaaataggaatgacatgtgggccataacaatagttttggctgtaggaggagttgtcaaagcaaaactaaactctgttggttactaccagcgttagaagccaggacagtgacgttagcggccagccctgctgtcagcccagcacgtcacctggggcatgacagcagggactgggccctgatgtcaccgcagggtcctccaggtggctagaagacatcactttctcatgttctcatttttgggggcaggggcagaaaagcaacagaagaaccacccagaagagtttccagaagcttcacgtggataaaaggaaaccagagaatttcagcaaggaaagtgaccatttattaatatacagccgcgagggaaatccggatggtatgattcttcctgagcaatttccgaattaaaaatggaactcccctccctgtgccagactttccctgacttctcagagtcaccctgctgggtgaatgaagagggagtcaccctcagaaagaggcagcttcagaaagaattagaagctgcagccacttcaagccgcccctccctggctaccagcgccccttgtccctggagccccgaggctccttgccacctgggccagcacttcctggtcaggctcagtcacatgataggcttgccctcaagccagggccttagtgaggagcgctgtaggccactgtacctgtctgtttcttaaaattagggctttgtggggcaggcacggtggctcaagcctgtaatcctagcactttcggaggccgaggtgggcggatcacctgaggtcaggagttcaagaccagcctggtcaacatggcgaaacccgtctctactaaaaatacaaaaattagccaggtgtggtggcacacgcctgtgatcccagctactcaggaggctgaggcaggagaattgcttgcaactgggaggtagaagttgccatgagccaagatagggccacttcactccagcctgggcgacagagtgagactccgtctcaaaaaaaaaaaaaaaaaaaaaaaaaaaaaaaaaaaaaaaattagggctttggtgaacttcatggaactggaaaagttcttctctcctttgctaatgaacatatttgcattttgaaatggttataaatagcccgctctgggatttaacatggtgtaaaatgaatatttcatatataaaaaaagaaaatcaacatttttttctttcatttaacggccatcagctattccccagtgtctcaacacacttactgtgtttggctagcttccctgtcactgggcatcttggccatgggagccaatctttttcttttcttttttctttttttggatgcagtcttgctgtgtcgcccaggctagagtgcagtggcgaaatttctgattactgcaacctctgtctccccggttcaagtgattctcccacctcagcttcccgagtagctgggattacaggcgtgcgccaacatgccgggctaatttttgtaatttttgtatttttagtagagatggggtttcaccatgttggccaggctgtcctggaactcctgacttcaagcgacccaccagcttcggcttctcagagttctgggattacaggtgtgagccaccacgcccggccatggagccgatcttaattaagctccttgcccactcagtttaatgttctcacagttcaacctgtttaaaaaccactttcaaaacttttgactttatgaatacaagtttactttgaaaacattgcccacacctaacacacacacacacacacacacacacacgcacacacacacgcataatgagcgctcctgtgggtgtctggggacatggtgtagagtctgtcttgggatgtgtggcttaaacacaggcacagggcctctcccagcgcctctgaggggctgtctgggcggatgtactagatagtgctcttgagttttgtttttattccttttaagcaccacttgaagatggtgcttcagaaaggaagttccgaggtcaagtcgtgactcagggttcatgccctgatacacagctcaccctggctgcatgacagcacgtccatcactgggaattttagctgagagctgccaatatttcttttcccttcattcagagaaaatggcagcacacatagcagaagggcatgggagagggaagtctgtggaacacacaaatatgaaagtgtaaaaacatttgca

SEQ ID NO: 1887394 - DNA, 4001 bp, Homo sapiens
ggaagtttcccctccttaccttcccctcctcctaccttccctttcaccgaaagagagaagctgcagcagaaaggtgtcagagaaagtgatgaatggaggctgaccccagggcagagctcacgtggcccgcctctctacccccatcgaatcagcccatctccctcatactcacctgacaggcaggaagcagagccccggggtaggagcaggggcaaggcacgtctcctggggccacccccacatcactagggcaactgggcagacttccttgccccacctactcctggccccaggtcacggtccccacccctgccagagcccctcgactggctaagccatccttcaggcccagctgacacgtgcttcccgagtgctggtgacaggcgcccagctggaaaataacgaactgtggagatggggcaaagtgcaggttctcctgcatcagaaatgacagcctcggctaaagctgcaggcagggtaccctcacacaggcgtgtatacacacatgcttatacacacatgcacatttgctcacacactcactccatcttggctgcatgaatgggacccaggaagatgaagtaggtctcagcttataaggggtggtgccaactgccactgctctctctgaaagacgagcactaacagcagcaattccttccacatagattacatcctacagtttgcaaagcacttccacacctgctggatcaacagataagtaggggtgaaaaatgaactggacagtcactttgaggctaaggggtcacacgcaagctgctgaacctctttgtgcttctgctttaccatctgtacaaaagggttactaatagcacccgataaaagccacagggactggggagttagggcggcttcattaaaaacccagaagagaccattcagttctgcccccgtctgcttcagctgctgatggctgcagcttcccaacttcctggtgctctaaatttatcacgttccacagcagccacccttctgagccgcctgggtgaactcctgggcagagtgacaccagccccggagagacagaagaggagaaaccatgaatgcatacgcatgcaccacacaggcgcggccactgcaggtccagcctgtttccgatgtctgctgtctctgctatgggcttggtgctgggcagaatttccagcctgccacaaagactcctggcgtaagaatgggaagaaataaggccacaactacagaactgccaagaaacaaacccacagctcatttgagacagccagtgagagcacttaatgtacaaaagttagtatggagatgccagcatgggctcattcagcccatgttcattcagcatatccagtcaacatcccctaaatacctgctacctacccagctctgggatgggtagcacagggtgggcaggaaataagaggacgccactcaggcaggcctgagacatagacaaaggagacagagatcttctccagcacctgccaccatgcctgaaattccaccatcaggaatgaaggctatgaccatcgatgcccatgtttgcctatgtgcacatgatagggagatccgcctcctctttatggaattctttccttttataatggttatacatatggacagatgtttagaatgtcagaaatggatgggacttgggagagcttctagtccttccatcttcaaacaaactctaagtcaacaggtaaaatacacagaagtggcacagacacaattgggttgggatggcagtgagtgaggagggctaactcagcctctttaaactctctttgctcatgatgtctcctgacttccctcagagaatttggaaagcacttctcaagatatatccttatgattaggctcaattgcaagcaacaaagattctaaacatggtggcttaaacagagtagtggtgtttgttctttttgttcccggagaagtcagatgtaggcagcacagagctgatgtggatcttggattcacagtcatctctttgcagaccacttctggcctctgcttcacatcttcatggtccaagatagtaggcttatgattccaggcagctggctggaggaaatgacagaaaagaaagtctcccagaaggtgctgaggacccattcacatcccactagccatgatgtacagtcacatggccacatacagctgcacagcctgctggaaaatgtagttttacttccaggaggccatgggctcagctaagagctctatgacatgaagtagagggagaacgactatgaagttaagcaattggtgattactgctctatcagttcaatcctctactttataagtaattaaaatgaggtggtaggatgattataataagatcattggttaaggttgtaatgcccaagagattttccccaatacccaacataaggcttgacttagacaaaaacaaaaagataagcccttgtcttcccagtgggaagggagatatgccagccaacattaacatgataaatgatgtgacaaaactaagtgcaaaatagaatgggaataacaacacagagcacccaaatctctctgtgagggtccaaggggtcactgagagagagtgctttgcagctgaggctggattagtgtgagaattggtgtctgttgagtggacaagaatggggaaagataagtctggcaaaaggaacagtgtgtgcaaaggcccagaggcaggatagtggaccatttttggaagctaaaaagaggtgcaatattgccagaacatacagggcaaagggggtgtgatggttaatttcacgtgttcacttggaaggtgttttcagataagattaacatttaacttgttgaactttgggtaaagcagagtgcccccaaggcttcaacatacatgcatatcctatcggttctgtttatctggagaagcctgactaatgcaggagatgaggttggacagataggcagggaccaaatcctgaatggcctatgtgccattcaaggccatttccatcttacaccatagaaaagggggattcattggagacttctgagcaagataggggtcagacttggatgtaaatcatggcttaggggtgtggtggggactatgatagaccaacatgtactgttcgtctaccgtacgtgataagcactgttctagaagctttagaggagagtggtcaaggccagtggcagggagacagaagataactggatgtgctagtggaaaggtagcagaggcaaaggagactcccaggtttccaactttcacagctccacaaggacagagcctgactctcttgcccatccctgcacccccggcactagcacagtgtctgggactaggcctgcataattctttttggaatccagaatgaatagctaaagagataaagactctaacaaagaagggttgtaggtccagcgtaacattgtaaacaaatgggttctcacttcaattcaaacacttgttgactaactgaatgaagggcccaaggatgtgagatgcagccatgccacccgcattggccctatatgccctccaatctgatgaaggtgctaccaggaaagcagaggtggagggtaacattcagatttcagagaatgctgcatttctgcttttcctccaaaacatcctttctccactgagggatgtatgaaactccactgtttagagcttaacatccttaatcctgacgtcctagtaaaggcaaaatcccataggcgaggatccccctctacagcctaagaagacattcacacccaagtgttgacggtggctctcagcgcaggaatgggtgaggaggagagaagtaggagtgggacatatctgaggggaaacagaggagatgaagggaggctgagagccgctgaggccagcctcatcccttgatagttttgcagaagttgagctgtctttggagagggagaggaggactgagagcagcaggctggagtccatcaaaatctttgctgcttccttgaagaggacccaaatgctaaggattggaagattaatccagtgactaaacttgg

SEQ ID NO: 1887395 - DNA, 4001 bp, Homo sapiens
aatggagttagagaaatacacatataatgccggagagctcaccaggatgccactgctttctttccttctttccaaattacatacatcccagattttttttttttttttttttttttttgagatggagtcttgctctgttgcccaggttggagtgcagtggcacagtcttggctcactgcagcctccgccttccatgttcaagtgattctcctgcctcagcctcccaagtagctaggattacaggtgcctgccaccacgcccagcaattttttgtatttttagtagagacagagttttaccatattgcctaggctggtctcaaactcctggcctcaagtgatacaccctcctcagcctcccgaagtgttgggattacaggcgtgagccactgcacccggcccataagccaccacgcctggcctatgccagattttgtacaaagtaaaatcaatccttgtcccccaccactgtgatactagggtttgtttgattttagtgacatctgtattagggttgacacagaattaataactgaatcaataaagagaccgggaacagggccacgccttacacaaggtgacatgaaaaatgttgaggtgtagcagtttattcccttaggttaatcatgaacctttctgttaggcccctttgaaatttagtatcactctgtcctaaatcaccagtaccttgcaagtgttgattctagcccatataactcacctttctcaaaaattctgctatgtttgttttagtaaccaaatactgtattttattttcgtaagattttcttcccaatctagattatatatttcagagagaaagcgtcctattttatgtacattttgtatccttttggtgtcaaatatcatgctatgaccataacagtaagtgtaatacacataatatcctccccccgcccccccgcttttttttttttttttttttggagttcctactgtgttccaggttccatggtaacattttccttgttatctgtaatcatcacaacagtactggagggtaaatacggtcattcccattttacagatgaggatacattcaatgtgagatgttaaagatgttcttcagaatttcccaggtagcaggcagctcatggtattcaaaaggtaatggttaagagaaagaatggataatgaatatcttgtgtctattttcttgagacagacgagactgagcagcctgagaacatttggtgctcagagggaggaaatgctaagaggggaaaacaagtctgaaagggaaagaaggatagttcaaagaccagtttcccctgcttcagaattctgactggtgccagctctaactgcgtatgtttgctttacttggaagatagaatcatagtgccagaattcacggaagtctgttttggaagatgcattagtcagggtatgctaattgctggaacaaacaatccccaaacttcagtagcttaacactgcagagggttattaccctccggtgtcacagagcaacgtgggtgggctctggtcctagcctggcttcttccatggctcaggtctgctatcccctaggaccttggagttcactagatattggcatcaggctgatcaaagaggaaaaggagagtggtgcatagacgattacatgggaaattttaagggccaggtctggacaaggcaagtattacttctgctcacattttattggccaaatcctagtcatatgatcccatgactgcaaaggaagatggggaatttcagattcctaggtggtcacgggcagaaagagatggggattggtgaaaacatagcctggctttagccacagagggttacaccagaggcctgcaagtttggtgaccactagttttcagaggtattgggtatttgataaaatccagtgtcttccagaggttgagcatgagccacatataaataactttcccagtgacgggccatcagcagtccaatgaagacattgggtcttcatgtcttcattggactgctgatggcctgtcattggggaagttatttaccttctctgaggagaaaataataacttgcatttcagagtggtttgggacactaaaggaaatcagaagatggaactgatttgttaactagaaatggacataagtattggttacaggtttaaaatgaaacttgcaatgtttgaggaagaaagggaaaatgttaatgcaaaaacaaaaaaggtaaagaaatggtgggaagtagattattggcactttttctttggaaacccattgccatatttcatgtaattaaacttcattccttttaatgaaacaattcttctaaataatacagagatttcccaccaatataatatttaacatttataattttcaccttaaagtttgaacatttttaattttaaaactgtttgttgcagtttaaatctccttatgccacagaactgtggactttctctggttgcaaaattctttacagtgtcttgaattgaaaagggcttaagtaaaaaaagctgggggaagtgggggccttttacaaacaaattacaactcatttggtacaataaggataattcattttgtcttgttttgcatggctgtatattgttttgaattcattctgcatttcggaagcttgcagtatttcttttctgtaggtttcttacttgtaactgcagatttcgcggtttcttttgtgtaccacttgcctcccagaatttggcccaacagttttgagtagctgaacaatttatcggggacagatcagctgaaatgtggctcaacttgagtaaagcagaaggaatgacataaggttaggtgactgatgtgtgagtttttgaatttgatttggttttacatggaaaggttgaagcaatgatccatgtattctaataaaaatcatcagtacaaatcaaataaaatctggcttagtggctattttcccactgtatcactcatggctagcctgtgctgttacagaccacatttggcaggcacggctttttcctacaacaaatcttaaagtaacattgcaatctttgctgtgttaaaaaggcatcttttctaatcaaactgtctgctaatctcatcagataaatcattattctctactgacagctccggctttcccggaaccccttccctgcttcttgttttctctcaagatgtctggttatcgtcattcttcaggtctttgcctctatctcctttcacactaatgacatatcttccattcctgaggaagagttacagctttttaccattccacttactgaattggtaagaccagtacctcagagcagctcatctctttctgaccggtattccactagttatcagatgggcaaaaggcaggatgcatccaagttgcagacctactagaaccaaaaatgcctattcccaggaatttgatgtgattaaacctaagaaatcatcagttgatgcgttctcatctctttcagctggactagtaaagtaaggcagatgtattttcactacttcagtagtgaacatgttttatagaacctgaaagtgaaagtaagggaagcagcatggtttagaggaaaccttggtccatttttccgtcatagacctgtcctgctagcaaagtcctgggcgtttcttaaactgatggcaactgcgtgtgccctggtggtgaaatggtgttgcagtatgcctgggcactgccctgtgaaaaaggacacacagaggggagactcacagttttgttttcattgctgacatggtttaaaaatgtacgttgctagctgtgaaaactcagtcattataacaccgtacacctttcttctttcagcaagtattccttgtgaacattagcaagtattctattctctgttagaattaaacaggtaatcgtaatagcatgaaagggtgaaagtatgtcttatgcaaaatagcctcttttatatagggcatctaccaattttcttgtgatttttgttttttcctcttttgaaaaatgattttagtctgctcgtgtttaggtaggtaacttctcttgatccca

SEQ ID NO: 1887396 - DNA, 4001 bp, Homo sapiens
atatttacaggtaaagggatatactctgcgatttgcttgaaaaaaaaaaaatccagcaaaaacaaacaaaaatggatgttgggtgaagagatgaaacaagggctgaacttcaacaatttctgaagctgggtgggtgcgtatacaatggggttcataattccagtatttctcttgtgtacatttatttctgtaaaaaagtttttaaaagtagaattaggtgcactgcattagttttgttaccaaagaggtttttattctatctttaactctaacagataaacaaatgggcctatatataattgtgaataaaagtcaccatttgtttcccacataccagaaactatagaatattaatattaatatttgtatttatatattatttaatatataattatatattatagaatatttatattctacctaaccttcagaaaaactctgtaagacagctactataatttcattttagagttgggggaagaggcgtaaggcagtaaatgtccaaggtcacacagctgggacatggctatgtcagggatggaaatcaagtcatgagaccaataactgtaaaatacctctctgtagcccgcatgttctcaatcataggtgggaactgaacaatgagaacacctggacacaggaaggggaacgtcacacaccggggcctgccgtggggtggggggagggataggattaggagatatacctaaagtaaatgacgagttaatgggtgcagcacaccaacatggcacatgtatgcatatgtaacaaacctgcacgtcgtgcatatgtaccctagaacttaaagtataaaaaataataataaaataaagaaaaaatacctctctgcagcaaaaagaaaaaaaaagaagacataaacgatttctattaagtcaacagtttaaaatgaaggtttaattacttcaatgaccgaaaaagtattaacatattcgtttaaagagtgtaaaataagcatcctttacgtatctatcttcaagtaagtgatgtacagtgccttaaaaacaaaacataaaaacaaaacattcaacttgcaaattctggctcgcaaaaccctttccacctacccgcatgcccggcactttttgttagcatctctctctgcaatgaaccgttattcgaggcacgacgacaatgtacatttttcaatctctcagaacgtcacgtcttacctcccaagttgcattctgggctcaaaggcctgtaatttgtgtgtattccttagtataaaccactacactgcaggtgctcaccaaaatactcgctgccacaccacaggtattctcacacgggtaaggcgagaggcacatttcatcacacaggggacttgaacaaactgcacgggacatttcaggggtcctcttatgggcggagcagagcagcggggcaaaggctttccagccaggtcccttctccatccatttctccccaggtgcccgcgccggttccgcgtgcgggtctggccaaaaaacctccgaagcgcgcgcgcgagccgcagtcggcgcatgcgcggggcgggcttggcggcgaaaggcgcttcctcagcccgcgcgggagacccagaagtagtactgaggtagcgctcgtcctcccgccggtccaccaccaccgagtgtagcccgggcccggcctatttcatcagacacaaccccagagccgggagccacccctaccccgggagcccttcgccaagcacgcagctccagaccagaagcagtcgctccgacccagagctccgggtggggtaaagagattgcttttactcaccgcctccgagattgcctcgggattcgcgaaagcccccgaagggaagcgagcactttctgaggctgtgaaaggacggctgctcgcttttctctttcgcccttttccctcaccagagtgccaaatcctcggtgggaaagccgacccctccggacagcccgcgctttaaggccgggggctgccggccgggctcggaggcggccggacccgccccgcccgggagcccgcgcgacgtcacgcgggagttccacttgcgtcacgccccttcctccagctgcccatcgcggcggcgcacttcgtgccctagctgaggagcgggctcttcggtgcggcccatcccggagggcgatggttggggaggggagcgctacctcggagctgccgggagctacccgaagagtctggcgaccgccacagcatttctgaattgcgctggggaaagctcaagccgttctgttgggggagcatcaagcccttgcggttctgtgaaagttatctgtacactgtgtctagcttaagcattttgcagggaagcatgtgtagagtgacctgtaccgaatgaagagttaaaattaactgatggggggtatggacgcggatccgtctaacatagttttcggccttgtcgctgttatctgcagtttagtgatgtgacctgacagggttgtgcggtaacgccatagatcaaaacgatctgtattttgctgaggttaaacgggaagtttctggcaaatttgaaacgagaaggaatctccttcagcattatttattgggacaacatgctgttagataattttttttaaaaagtccatttttcttgtggctgttcgtttgagattcaaaccgatagtaggtattcctatttctcctgatttgtaaaagaatcgtttttagaccactagaaattctacaaatgaacaaaatagactagaatcaaatatcttttaaaccagtccagtacttttgtgtaattattctaagacctgggaagggataatattaacaggctttaaaagtttagtacttagaaatcataaatacaaagtggaaaggtaatttttccacctgtcccacatcttaagggatgaataaatataacttaaaaagttagtatacagaagaggggtgctaaaccttctattagcctgttacagcaactatcattcacttccccattttataagacttaactccacatttttaaaagaaaatggatgaaattttgactatgtaatttttaacgcaagataggaaacataattgacagagtgaagcttttatgtttatgacagaaataacctgtaataagtttgtcatttaacagagtattgaaagagcagtgtgctgtggtctctactgtggtccaaagaaaaactgagcagaatgacccaacctgttcctatggcctctgcctgtgtctcactctctaatccatttatgcaagtcagaaaccaaagagtcatccttgacactttattcatccctaacttccatatccaagccatcacgcagtccaattttacttactaaacatgtaaatccatccccttctctccatcactacctccataatccaagatactgttatttcttacctagtctactgctaggctcctttccacatccacgctaccaaccacccctcctaaatctttgttttcactggtgttcagaaaaaaatttgaacttctattctccatatatatatttaattttaaattacatacatgtactgttgaaaaatggtacatgatctaatgaagttacaggctctgaagtcagacatctgggtttaaatcctgctctaatacttccttactgagtgactttggactgactgcttaagctcgctgtcccattttacctacctgtaaattgaggataataatagtaccaacctcacagggtattaagattaaatgaatatatgtaaactgcttagtattcagatatatactatgtgcccaaaagctagccataattagtatttcttagctaatatgattataatccattttaaaagcatttttaaaggataaaaaatagaataaaaatacatcttccctcctccaccttaaattgtgtctactttgagaccacttctctatactgcagctactgtgatcttgaaaagtaaatctgttaatgtcactatgctgcttaaaccctttcagtggcttccagttactctgtgaaggaagcccctttgaattgcctct

SEQ ID NO: 1887397 - DNA, 4001 bp, Homo sapiens
gtctctaggaagcccgcttatctatgtacaggctcaagactcccataggagggctggaggtcctcaggctagaggtgggctttccctcccatttgggggccttcagctggatgcacaatatctcctaggtgaatctggaagtaggaggatgtttttggtggtcactatgcctgcccctctccagtgacggccattcagtggcagaggccaggagtcctaaatatcccacattgcattggacacgtccatactattaagagttgtccccaccacatatgctaatagctaggccagctgaccctcaggacccaaggccagacgagtgaaccagccagccctatttatgaggggctttgaagaacactaggaaaactcagataagtcatcccattgtgctctcacaggaccgcaaattcctcaaacaccaaaagtctgtgtttggggatcaagaagcctgtctaccttgtcctaagggtacccatgtgaattgtagatactccaaggagcagtcaagccaggagcattatcagccaggactttaagttttcaactcttgctgataatcagaatttcctacaatgctttaaaaatgcagattctagctggacacagtggcttattaaaaaagcccacaatgaccttcgagagataaaaactacaatgtctgaaatgaaaaatatactgaatgggattaacagtagatttgacactggaataaaatattagtgaacttgaagaaatagcaataaaagctatccaaaatgaaacacagagagtaaagaaagactttaaaaaatcaggcagagctttggtgagccatgggaaaagatgaagaagcatagaatacatacaattggaaccccagggttgagggaaagtaggaggaatcgtggctgaaaattttccaaatttgatgaaactataaacctacagatccaagaaactcaataaatcccaagtgggagaaacatgaagaaaaccaccacaccaaggcacatcataatcaaatagatgaggtcttaactgtatgctctattgtctctcattgataggcccaaggcatgaacagagaagaaacaaaatggcaaaggcaccaggaagagatgaatggatatagataaaatagcaggagaagaatcaggagagaagggaagggtggcacagtggagtgtggtggtaggtcatggtcactggcagcggcagactcagtcactgtggaaggtccactgcttttacacccctgcagcaggcccagtcacactcctgagagcagctagactcctgctgtttccaccaaaagtccagcactataagtatctagagacctggattcactgagtgaatcctctttgtcctggaacctggcctgattccaggaaagaggcccaatcaataaaaaaaagagcaagcatagcagacacctggaggccagcagggcaagtccactgttcaaaagcctaaagacagccccagccacattagaatctcttccaggcctgccagtcccacctgaacacaccacaggacacttcacctgcagagaggtttcaggccaagggacaaaaacttccaagttcactgagttgccagggcatggtctatttcatctctagggcacatcaggcctgccagcagggcctgcagcatcaccgagtaggctgtcacacacacgatcacaatgggacaccctggagaatggcaggtagccagccctgcctattactaccatacaggcggttacactccttgctggaacaagcagccagaaggagtgctttggttaggtcctgtccaggaagaggatcaggactccaggggtgggggtgggctgttagagagcctgcccctgcacctacctgccaggctggaaggaccttctcgatgtcattcaggttgatgccatccccatcttccagcttccctttgccacacctggaccagaaaagacagaaaggcattggaaagatggctcattcatgcctcctgtcccatccggccagcaggagaggagggacagtcagcagatacctggtgctgcccaccctcaagccctgcaggggctgtcccacctagaggaaacagccctagagaagctgtgtgtgtgtggggggggggtcctcccgtaatgcaacagccaacctggagggaggtgggagaggaaccagagttccccttgctccttccaggcagagaagctaagctccttactcatcacaactcctgtcaaagcccatccaccttgccccattacactgaacagaagatcagtggacagagacaccaagcaactttctcaaggtcacataggctggcaggggctagcagaaaacccaatagggcttccttcctttttggcttgactctgggtcagtccagcaagcccactcagatagtctatgctttgtcttcatgtcctctgtgagtgggcgtgccctcgggccagagaggctggccccaactccctggccagaggtctgaatctttggcatatttaagggtgcagattccgaaaccagactcccagggtttgaatccccgctgcatcccttaccaactggggaccctgtacaagttgtttaacctctctgtactcatttcatcaaatgagtttcctcatttgttaaatgaggataatagtgtctaacatcttaaggtggctggaggattaaattaatgaatgtatctggagtgcttagatgcttagaactgtgacagcccacagtaaacggtacatatatacacacatatatagtctagcttatatatatatatatatatatatatatatatatatatatatatatataaatgtttagcttgtttgtttataaatgtgtgtgtgtatatttcttgtgtatgtattattatctgtatttaccattaaatatatcttaaacatacacacatatgtttaatggtaaatactggtaataataacaaaattaaaataaataatgaagtaaatatattgctactactatgactactttcattaccactaatattgttgctgttgtttaggcaaagaggcaggagggtgattaattaaggacacagattctggagccaacccagcctcatgcaaattactcaatttctgggtctcctagttgcttcatctattgaagagaagatggtaacagttcctccctctctgggtggtggcgagttttaaataaatgaggcaaacacttagaacagaggctggagcatggccggtgcatagtaagtattgtcagttactattattactggtattgactgaggaatggtgagagatgtcccatgagttgggtcattttccagctgcagagttcatacgaatctcacctttcagagtaactagttcattgtttaaacatttaccaagcatctcttctgttttgggccttgtgaaccaaaaaaaaaatcagttttggttcctgccctcagacagtggatggcccttagaacaaatcctaaactcctctaacagggctgggtgccggagcaccactgggggcagcacgagatcggtgtcataaaagtcctatggccagaggcgccctggaacccagaggaggagaaactagctgcaaacaccagcaaaggcctgggtggaagagaacagggggctaacccaagccccatttgatggctcatttctccattcaccaaacacttctgtgcccggctctggacagggtctgggacccaggtgtaaacagtgcacacaactgcccctctcggtgtctggcgggataatcaccccccacagtagagcagcaagtgccccgctggggacaagggatcgttgcaggaaccccaaggagcagcgtctagaactgtcttgggcgaggggcaggaggaaggtgagaggtgagctggccaagcacagggaatttgggaggatgtcccaggctgacacggcgcaggcaaaggcctagagttaggagcatgtgtggtgccagtttgctgtggctagagcatgttaggggtcagggtgcaaggggtaggcaagg

SEQ ID NO: 1887398 - DNA, 4001 bp, Homo sapiens
tcaggtgtctaagaggtaccaacacgatgatgttcttttctgtgaaaaatctgcatttgtagcaagaggggggcaacaagtagctcccaccgacccgcgctccccatacatcatgccgtctgaagctcccacggcatcctggtcagtcaccaaatgtcccgctgaggccagtgccaaccccatgaagagaaggtaactcggagctcagagaggctaagtgctcggttgcaaggtcatgcagcctgctggagtggagtcaggtttaaagcctgggtctgactgtgtgcaaagttagtttgaaaagtgacatcagagttctggccaccctaatgctttatccttaaatttgattctcttaggctccacgaaacccttctgggtgtgaggtacagagctcagcacgctgctggtccttaaaaaaagaaccacatgagggcaataatcacgagaggactgtggtgctatgtgaagaagaaatgaaactcatccatgataatggagatgaaaatcctagttcttaggacggcctcaaactttagaaaacctcacacggactcagggagaagagaggggctaggtgggtgtgcagagtcccccagtggcttgttttcattggaataataacatcttacatttcgatgtggtaatgtcgctgttaaaacgcacttctcattgttagaaataaaaatgactcaaagatgtgaaagcttttctccattcagtgacttacatgggggttttcccatgaaggccttaggagaggctgtgaggcagcttatgcaaggctgctttccgcatctctaaggagggtggaatgggaaataaaaccaataaactgtaaactgctctcagaagaattccttccagctgaattacagaaacttaggcaaggctgctactaagtttatgggctagcagtaagttttcctgccctcatggctttggggaaactctgatgactattccgctagaaggagtaatgagtcaaagactgcccttaaatcctgcaaaagaggatctggaaaaaatacctggcacccccatgactatccttcccaccacctggtacaaccagaagtgaaaatgcctcaagttgatgttgaaacaataactcatctcaccctccacaaaggcacaggacatctctcagcaacagagatctttcctctaatcggaaagtacactctttggctggtagtaactatggctttcaaatgttgcaaacaaaatctcaggaacatccagtatatagcatatgatagtacacaaaaatggtataaaatagtataaactttatctgtcaagagaagacgtgtagattttattatgaagttattcttcaagctgatcattatttccatagaagttctccataaaaataataaattctgagattatacctagcatttatagctaatacaattgattacctattatatggcaggcatattcaaagaatttacatatagttactcatttcatctttgaaacaactacaaaaagcaactccaaaggcaggcagataatttgagtttcagtcccatcttttcccattcattcactcagtaaatacttactgagggcctagtgtatagtaagcacaggactaaaaatacagccactaggacacatggggtcccagccttcaagagctaaaaggccagtccttattagctgagtgaccttggactagtctcacatccttgctcagatcaggctcttaaggtttactatactctgaggcttggaatgtaaccatccttcctacttcacagagttgtactgacaatcggatgagataagccacgtgaagggcttggtatagtacccaccacagagtaagtacttaatgaatgttggctattattactgacattaaaatgacatgcaagtataagggatgctcttataatgttctgtaatcaaacctaaagactagacatactatgatgtttactatggcctggtcatagcgaagtctagtctttagatgtgattacagagcccatttctcttacaagcccatttctcttatgcacccaaatggatacttctcacttggcaactgactcttaataatagaaataagcctccctgcatgaaaaccagacacaagtgctgacaaatggcttaaaggcactgagctcatcttcatcaacatttttaaagaacaaagctgtttcagtaagagaaggcaggtgctgaagaactgccttctttctctgtctcagagtcaggctcaactggaggggagaagattggccctggagtgggtttatggttatgataaggtggacagagaggtaacttcctttttttttttttttttttttttaagatggagtttcactcttgttgcccaggctggagtgcaatggcgcgatctcggctcactgcaacctccgcctcccgggttcaagcaattgtcctgcctcggcctccctagtagctgggattacaggcatgtgccaccatgcccggctagtttttttttgtatttttagtagagacggggtttctccatgttggtcaggatggtcttgaactcccgacctcaggtgatctgcctgcctcggcctcccaaagtgctaggattacaggcatgagccaccgcacccagtccagaggggtaacttctacagtgtatgtgacattaggcttttgcaatctaatggggtaactaagaagggtttaccatctatgaaggggtaacttctgcaatgtatgtgacctaggtgtttaccatcttcctgtaagatcgtgcagcacgttcaacaacatccagcatggcagctaactccctgagccacacggggctgcgggggctgtggttgaccaggaatgaagccttctgcttgaagttcacagacagcccagtaggaagctcagtggaaatgactctgactagagctgccatgtaccaggcacttcctgcttcactaatgaccaccctataaaaaacaaaagtggcctctctcggctcactggcttattgccttcacaacactcagtgcaattggtgcttctcttatttgttgacttgtgcaccatttgtttccccaactagaacaaacatcggttctaagaaggcagggaccttatgagcatctggcatgtcactgacatcttaaggcacgtttgctgaatgaggaattaaataaatgaacgaatgacgtaaaatctgcacaaaaatcctgtgacacaggtattattcactccattatagagatttaaaaaaccaagaccccaaaagaataagtcacatgaaaaagaggccacagcagtgagtggtagagccagaagctgaaagaagctcaggcctttcctctggagcctccccagggtcaaaagggacctgagtgtgcccttagaatgtctgtggccaacgtggacactaggttttcatgtctttcaagtaataataatgagcttcagatgtttcttcaatatcctcctaaccaacaactcacttaaccttttgtggccgtgtttcctcactgtgagtgatggggttgatcaccaggtgagcccaggctggggacaggaggccttggctctgtcttggctcagcaggtggcaagctgggcagtttggggcaagtcatagcatttctcaggactcagttttctagccttgtgaaaaatgaaggacctttgagctccttccaattctgactaggtgtggttttatgtttagaccagtaaggtctaaaggtgtattccctgccatgcctctaggctctgcagggttcacttgaagaaagggttgaatgggttgggcctgggttcagctgcaaccctgaagttaagcatttgttgatttctacttagacagactttgcattggagatggtatctgaatgtcctggaggttgacaatagacatttttaaaggctaaggctcccaactgctgaaaacaaagacaagcttgaagctgctgttgagctgctctgtggcctgggagctcccagctaagtgggctgaggttccaggcgctgccc

SEQ ID NO: 1887399 - DNA, 4001 bp, Homo sapiens
actctgcctcaaaaaaaaaagtaacatgctggcaaggatgtggagaaaaagcaagtcttgtgttttgtacactgttaatggaaatgcaaattagttcagtaattatggaaaatagtatggaagttcctcaaaaaactaaaaataaaaccaccatatgatatagcaatcccattactaggtatttacccaaagaaaataaatcaattatagaagacgtatctgtatctccatatttattgcagcactattcgtgatagccaagataaggaatcaagctaaatgttctttaaaagatgaacagttgaggaaattgtggcatatatatacaatacaataatatccagtcatgaaaaataaaattctgtcattctgccattcacagataaacctggaaggtattatgttaggtgagataagtcaggcacagaaagataaacactgcatgttctctcatatgtgggagttaaaaaatgagcttatagaagtatagagtagaattatggtaatcacagtttgataatgttattaaagacagagaaaggttgattaatggatacaaagtcacagctagacaggaggaataagttctagtgttctatagcactatagggtaagcatagttaataataatttatagtgtatattaaaaaaactagaagagatttggaatattccaaacatgaagaaatgataaatgtttgaggtgatgtttatcctaattactctgatttgatcattacacttcatatacatttatcaaaatatcactctgcagattataaatacatacaattaatatgtgtaaactaaaatgcaaaggaagaaaaacccaacaaagcaatttctccacacgttacctaatccacaacaaatggcttctgaagtttacctcaagtaaaggccataaatatgactctttaaggtagaaatcttagaagtaagagttacttagcttaatgccctctaggtttatccatatgtatttcattgtagtgttagtagcaataaagtatagaaacgacctaattgctcattgaatggtgactgatagtgttacatatacagccatgcactgtgtattgcatcagtcaacaaaaaaccacatatataaatgtggtccaataagattacgatactgtgtttttagtgtaatttttctttgttttggtatgtttagatgtacggatgctattgtgttacaattgcctatagcattcagtataataataagctatacagagttgtagcctaggagatacagtctatgtcatattgtctaagtgtgtagtacgttacactgctgtgggacaggcaaggccccaaactggggcttagccagggaggatttcttgcttaaccccggaaaaaattcaaggatgagctaggagtcttagcaatcgtttattgaatggtactgctccttgcagagcagggctaaatcataggcagtgcaatcagagtcagcaacatatggtctcttggcaacggtatttatactcagcgagacccacattcaattgcatgcaaattgaggggtgagccaatgcaaattgaggggcaggttgtttagaactttctaaggcaggtcaaatgcatgcaaattgaggggtgagccaatgcaaattgaggggcaggttgtttagaactttctaaggcaggggcagtaacttttaggttgttgccatggaaagaggtggtaacttctgggttgtgttgccaggctgctcatattgctcattagcataagacactaccaccagcaccatgacaattaaattgcaatgagtagttagagattgcttttgttgacatctgccacttcctatcagtttcttcacttcatgctctctggccagatcctgttttggttagcagggttgtgaccaaaaaaaagtcctgctgaaagatgaatggatagtgttatatatacagccatgcactgtgtacccaaactacagagtgcatggctgtatatataacagcatccactcaataccatctaggtttggataaggacactccatgatgttcaaacaatgataaaattgccttaaggtacatttccctgttaagcaatgcatgactgtgtgtgtgtatatatgtatatgaccatgaaatattattcagccttaaaatagaaggggattctgccatatgaggcaacatgaaagaaataagttctattgttgggggtgaatagccatgagagtggagaaggccatcagttaatccatggtttgtggcattggccaagcatgacaagcagtgaaaccatattcaaatatggaatcaacttttctgacgatgacaacaaacaactgttggctttactatacaagtcagaggcaattgtaaggctctttgttgtttaatgccccacaggtaaaacttttctgtccagggaatattctagagcaatactgtgcaagagaccattgtgtgataacacgtgttctacccttgcatagtccaatatagtagcctgtagccacatgtgcctttgagtatttcaaatacagctaacacaatggagggactgactttttaattattttaatgtttagttaattaaacattaaaattaactttaaatagccaagtgtagctccaagaaacatctggagctaccaggaactggaagagataagaaagaattgtctcctagaatcctggattaaatgcaatcctgccgacacccgagtttgaactggcttctagaactgggggagaatacatttctgttcttttagccatttgttttatgctaatctgttatggcagcctgaggaaactaaaacagatggcttcggggagaaatttgaaacagaagcaagaagtaaaaacagtaagaaacaaacaagtatgtattcatcacagaggtacagaaattaaccatcaaatatcccaggccctaggggaggaagtgccacggtggcagcagcgctatctcatcagactgttcctgtggggggattttactgccattctggaacctggtttccatggggctgccctgttctgagcctgtttctttagccttccaataattatatgatttatccaatataatctattacctggtttaggtcaattggaatggatttcagtcatctacaaccaagaacactgacaggtatactaacacctgtcagatagtattgtgaattgtggggaaagtgttcctaaacatgacaaaacacaagaaagcattaaaaaatggtgacagatatgagtatttatgagttagttaataaacatatatgacaatttatatggaaaacaaagtatgtgatgcatgatggattaggaaaacatacaatatatgtaacgaaatgatatacaatgtcaatatttatttttaagaagcaatactaaattacaaaataaaatatatacaattctataggaatagaatgcaaattaccaatacatacatgaaaattagaaaacttttgcaattagaaaaatataaatcaaaacaatagtgttatactacttttttctgaaattaaattgcaaaattaatatatccaaagatactcaacatgatccatattagacatggatgtgtgaagaaggcactccaatctaggtttttaaggatataaatttgtaaagccgtgtctcaagaatgtgtgacaataattcatgagtggcaatttagtatacgttaagctttgatccaggtaatttaattaagatctatctacaaagataaacacacttgcacacaagtttctaagggtcagatggcttactgtacaattttcaggatgttattgtatcattggtcacatcttaatttcttaattgtccatgcccatggttttatcagagaaaatgagctaagaaccccagagacaatggagagtttgcaatgtagtttttctttaatttttcattttaagttcaagacgtccgaaggtgtatctactggctagaaaaaattgatatgtttccaattacatttctatacatacatggatgtgtttgtgtgtata

SEQ ID NO: 1887400 - DNA, 4001 bp, Homo sapiens
ggctactcccttgcaaccctgccccctcccactttttctgtgtggcagatgaaaaattgaaagtacctctgactggacccctcccacaaccaatcaggctggtcaggggccaagtcttgcataggagtataactttgtaacttcactttagcctctgattggtcactttctgcaaccaatcagacatttgcatagggtgtaactttgtaactttgcttcagcctctgattggccccttcctgcaaccaatcagactgatcaaaggccactagttaatttacatagggtgtacaccaagtaaccaatgggaaaccgctagagagtctttaaagcggagaaaattctgtaaccgggctcaggagccgcttgctagggcatgctaccaccctgtggagtgtactttcgttttcaataaatctctgcttttgttgctttattctttccttgctttgtttgtgtgttttgtctgattatttgttcaagatgccaaggaccaggacaccctcaaccagtaacacacactctccttcttcaatgacgtttgtgttcctagaatccattttcctcagtcaggtacgtgtccccatccccacgtcttcctcgctcttcttgacctttgtttactatgtcctcctacttccccctggttcccccagactctcaaaacccatgcagtccccaaggctatcggtcctcctcaggccctggccacgaagacccctgcctaccgatcttctgtactagcccagcacgcgtggacacattcatctgcacgacagacatcatggggcaccttctgtgagcaggcgctggggagacaaggccagcccgcctcagttcccacggtactcaagagacagcaagccaggccaccccagcatggtgaggtgggcactgtgttcaccaacaataaaggcggacaaaggttggtgcagtgggggctgcagaagggccccggccatgcagacggcagcatggcaggctgttccaggcacacagagggcggcatggcaggcagttccaggcagagctgcctactacaccccagtgggctgattcatttggtgttggaagaaaaggggagaacaattttatttttattttgctcttcagcaaaatctataattttgtgtttatcttaggaagtttataatagtatatgtatataatattaaaataattaaatacacatataatagggattatccccaaaatattttaccaaagagagacacatgttccaaaaactcaggaggtatgaactgtctgccttaaataccctcatcactaattgtccttttttggtctctctcaacagcactaccttctcatcagatatgaagaattttctttttctttactcagcaccaaatctcttagaaaatacaaaacagacacatggcttcgtcagatgacatgggtccactctaatggactgctctaaaactatcagttaaggacgggtgcatggctcatgcctgtaatcccagcactttgggaggctgaggcaggaggactgcttgtgcccggagttccagctcagcctgggcaaaacggtgagaccccatctctacaaaaaacacaaaaattagccaggcatggtggcgtgtgcctgtagttccagctactcaggaggctgagacagaaggatcccttgagcccagaagttcaaagatgcagtgaattgtgatagcgccactgcactcaagcctaggcaagagagtgaggccctgtctcttaaaaaaaacaaaataaaagctatgaatttaggaaaataatgttcattaactactagtttcaaacatgtccctattcttataatatactgtatccttgcaaagcacctctcctttgtgttcctcttcaaaaggaagctggagaaactgcagtgaaatgacaatgaccatggcgtgacgacgtgggggcagtggccctggctccagctcagtcactggctgtggaacattaaccatgtgacagggctggagccagggtatgaccttgagcggaaacttagggtatgcttaccttgagtttatgcacctctaacgatgagactaggctacgattcatatacttgctgctgatgtaaatatcctgcacgtgctccttaaagcgcaagcactgcctgagaaaatgtagacctggaagggttttcttctttttatttaagcaatatctttctatagacaaagccatatgtatctcttccctattgctgctataacaagctatacaaactcagtggcttaaaacaccgaatttgaccgggtgcggtggctcacagctgtaatcccagcactttgggaggctgaggtgggcagattacctgaggccaggagtttgagaccagcctggccaacatggtgaaaccccatctctacaaaaaatacaaaaatgagccgggcgtggttgcgggcacctataattccagctacttgggagactgaggcaagagaatggcttgaatccaggaggtggaggttgcagtgagctgagatcacacactgcactccagcctgggcgacagagtaagactccatctcaggaaaacaaaaacaaaaagaaaaaaaaaacaccaaatgttattttttaatttttctttctttttcagactaagtctcagtctgttaccaggctggagtgcagtggcacaatcatagctcactgtaacctcaagctcctaggctcaagtgatcctcctgcctcagcctccggagtagctggcaccacaagcataacctaccatgcctggcttttttttttttttttttttttttttttttttggtgtagagatggagtctcactatgttgcccaagctggtttcgaactcctggcctcaaatgattctcccacctcggccttccaaaaccaaagtgctgagattacaggcgtgagccaccacacctggccttaaaacacaaatttgttactttacagttctacaggttgggaatccaaaactaatttcactgggtgaaaatcaaggaggtggcagagctgtgttccttcccagagctctaggggagaatatttgtttgccttttccatcttctagaagctgcccacattccttggcttgaggccccttcatcatctggaaagccagcaatggcaagtcaagtccttttcacatggcatggctctgatctctctttggtggtcacctctggttctgagcacagctgggaaagagtctctgtttttagaggactcatgtctccaggcctgcctggatggtccaggataatttctgcaactcaaggtccttagccttagtcatatctgtaaagtcccttttgctagtaaggtaacatattcacaggttccagggattaagaagtggacaccttttgttggggggcattattctgcctaccacatctttcatgcaattagacaaaacaaacaaaacaaagcagtgaatgtttcaaaataggcgcagagttgctcacatgaataaataatgcataattttcacctgggcacatgcttcaacctggccctggctcacaagtctggtcaggcaggacacccaggatggtgcttgtggaaagatttacgcacagaagactcattccccttcctcagccacagaagcaaagtcaggtgtgtaccacacctgctaacacatagtgcttctaaagcagcgcgccgctctacttcttagttgctaaatttgttttgcgtgaatggcattttgaatcctcatcacgcagagtcagcagagtggtgtagacccctccacggctcctgctcagcatcagcagcaggctcctcatccgtgcttccccatgcccaggccctgcgcgttctgcaggctgtagtcttggtccagttaggagacttgcctttaccacacttttcagcaagaaatgaattggcctaccgaactcaccattaggaaaagcaaagaagtcatgagaacacgtatgaatgaccaccaccatggtgctgggatacatcattttccaagaccattcatggacctgttcact

SEQ ID NO: 1887401 - DNA, 4001 bp, Homo sapiens
cctgggcaacaagagcgaaactccctcaaaacaaaaaaagaaaaaagaaagaaagaaaacaaaattcgtgggagatctaggagaaataaactaaagttttccccttgagtatttaacatgtgagccacaagtttcaactaatgagagcacggtacacacagaagactatgtcagtaataataggtatttgagaagaacaggaaatgaatcatgcactttaggctcagatgggttgagaaggcacaattttacaattgaggtagaaggagagacgaaaaaccatcctttctttggacattgcgagtggaaaaacatttcaaacaacatggagaagatgaattttaaaatcatgtatcagttaatggtgaaacgcgggtgatatatatagtattatcccttaattaaatttcttaatataaccgtactaaaattacttgcaatatgtgatgtaattaaagttataatctcaacactttgtagaaggtgtatcagcaccgtgcttatataactgatacacaagtagtaatttaatatttacagagtacctgaacccaggccacacattttctctagcactctgctctcttgatttttaagtagaaaggttgaaggaaataaattccaaggtcttttctaatctaaggaaaacatatatcaataatggaaatatatctaggaccccatgtgttccaatctcagatgtactctatttaaaacatagtccggcgattagccgataaataaatataaacacacttaagtactcttcttttctccacctctccaggaaacaagatgaggaagacacctttcttccttttcatgtttgtttgtttgtttgtttctttttgagatggagtctcgctctgtggcccaggctggagtgcaatggcatgatctcggctcactgcaacctccgcctcctgggttcaagtgattctcctgcctcagcctcccgagtagctgggactacaggcacatgccaccacgaccggctaatttttctgtatttttagtagagacagggtttcaccgtgttagccacgatggtctccatctcctgacctcgtgatccgccggcttcaacttcccaaagtgccgggattacaggcgtgagccaccgtgcccggccggaagacactctttctttatgggaaacttcttaaaaatcttccttttcctttgccactgctttcaatattctctgcacagatgggagctaatcctggaaattttctctcccactctcagcttttctcctgaacacccacctagaccaaacaagatttctgtctctcttcattcctcatccctcctcctgagcccactattatacagataaggtaagccaagtcatggactggccagaaaagtgagagatggaagaaatcaccttcacatgaatatcttgattattcaaaaatatcaatacattgataattttctttttctttttttttttttttttgagacagggtcttgctctattgcccaggctggagtgcagtggcatgatctcagctcactgcaacctctacctcccggattcaagcaattctctcgcctcagtctcccgagtagctgggattacaggcgcctgccaccacgcccgactaatttttttgtatttttagtagagacagagtttcaccatgttggccaggttggtctcaaactcctgacctaaggtgatccacccgcctcagcctcccaaagtgctgggattacaagcatgagtcaccgcaccttgtcacacattggtaattttctcagtgctgtgattctctgtgattttcaagtttttaaattcatttcttgaaaaatatgcctcaagaataaatgtgattatgctccttaccttttccatttaagagcctctgctagggctgaaatgagaatattttgagtcagtagtataaacagaacattcaggttggtgcaaaagtaactgcagttttgccattaaaggtaaaggtgatggcaaatccgcaagtacttttgcaccaagtcatagttaaaaagacaacacatactgacctaaattttttcaatcttttatttttatgtggaaaaaaaaatcgaagtccttcttttagctggatgtggtggctcacgcctgtgatcctagcatttggggggctgaggtgggcggatcacttgaggccaggagttcaagactggtctggccaacatggtgaaatcccatctctaccaaaaatataaaaatcagccatgcgtggagttgcatgcctggaatcccagctactcaggagactgaggcacgagaatcactgaaacccggaggcagaggttgcagtgagccaagatcgcaccactgcacgccagcctgagcaacagagtgagatgtcaaaaaaaaaaaaaagaaaaaagtcttcttttaatctcagcctttaaaactttctaatttttcatatttttgtgcaaaatttaaatgaaactttagttgttgaataaataatacgaagatttttttctttcttaccagagcacctatcagaactctgattatctagctaagaaaatttagaaactttcgaaatggttaatacatatatattcacgtttctgatccaaagaggaaaaatattgcaccgaatatttgaaataacattgaatccatgacaatattttattttaataatatatttcatttaatatgcatagaaatccgtttaaaacactccatttaaatcactgcagtgcagtgtatttctccctttgcctttgaagtccatcaaagcatgcagcttgagaggtggctaggagttgggcaaaaagtccctaaaacactttgagctccccagatgaaaggtgctatttaagtacaaaatatcgtaataatttcaatatatttaacaactccactcacttcaatgtcaatgcctaactcagtcctcacctatttggtactttgaggtctattccttaatttcaatttctccagtgggatgtgtgtaactttgttccttaaaactagtacaggaaaactatcattgaaaaggaaaagtccataaacatcccattctatgtctgtaaatgacagaaaatctccccacaaggaagtaaattataagaccaacaaaagatacctgtcattaaagagactggaagggccaccttctccaggagcagagcatctgaatgatctgggtcatgccagtggaatgaggagtacagtagatactgttacattttcttccttacattttcaagtgcaaagaaaatttaggcaaggcagttggctgcagggaagtgttatattctgctcaaaaggcattcttagtttgagtaaaaaagtctgtgaaatatggaaagtggtattccctcttctaaaaattcattaaatattatcaagtatagtcttttctatttttttgttttttgatgttaaataatttatacaagtaataccaaaatatcttattctttcaaaaattaaagcattatcaataaagttgagtcaatttttactccatcttggcctctaaaatcctccttattcccctcttcctgctatcccttatctgaggtaaccgttattgttttaaattgcttttatcacaacatattttctagtcatttgattttatataccaaacttgatttaaaacttgtttaaagactctttttaaatgagaaaacaatataattctaatacaataaacacttttgatatgtcttctattttttattaaattgtttgagttatcaaatattccatggcgtaacttttaacattcttggtgattctgcacttatttctttttctgaactgggatagcatattgcagaggagaggctcagtacacagaaagaagagaactcttcagggcatcatccacagggtgctcacaaggctctgcgccccctggcccttctacaagcctcactcttatcctttgaagacccaggatttgaaccagctgatttctccttgattactgctcaatctcacaatccttcttatgcatgctagacta

SEQ ID NO: 1887402 - DNA, 4001 bp, Homo sapiens
cccagctactcaggaggctgaggcaggagaatcgcttgtacccgggaggcagaggttgtagtgagccaagactgcgccactgcactccagcctgggcaacagtgtaagacaccatctcaaaaaaaaaaaaaaaatacagaaaagattagtatggcccctgtccaaggatgacacagaaatttgtgaagtattccatagttttagccaagatatggaatcaaactaagtgttcatcagcagatgaatagataaagaaaatgaggtatatgtacacaatggaatactagtcatacaaaagaatgaaattcagtcatttgcagcaatatggatgagcatggaagatattatgttaagtaaaataattcaggcacagaaaggtaaatatcacatgttttccctcacaaacagaagcttaaaaagttggtttcatagaagtagagtatagaataatggttatttatttatttatttattttttgagacagagtctcactctgtcacccaggctggagtgcagtggtgcaatctcagctcactgcaacctccgcctcctgggttcaagcagttctcctgcctcagcctcccgggtagctgggattacaggcaagcaccaccacatctggctaattttcatatttttagtagagatggggtttcatcatgctggccaggctggtctcgaactccttaccttgtgatccacctgcctcggcctcccaaagtgctgggattacaggcatgagccactgctcctggcccagagtctagaatgatggttattaaaagctaggaagggttgggtcaggagatatggagaggttggttaatggaaacaaaatttcagctagacaggggaaataagttctagtcttctaaaacatggtagggtgactaacaatttattatatatatatatatattttttttttttttttttttttttttttttttactgtagagacggagtctcactctgtcacccaggctggaatgcagtggcgcaatctcgactcctgcaacatccgcctcccaggttcaagcaattcttctgcctcggcctcctgagtagctgggactacaggcacatgctgccatgcctggctaatttcttttgtatatatatttttaatagttagaagagaggattttgagtgttcccaacaccaagaaaagataaatgttttaggtgggggataggctaattactctaatttgatcattacacattgtatatatcaaaatatctctctgtacaccataaacatatataactattaagtgtccatttaaaaatggtacaaccactttggacaataatttggcagtttcttataaaattaaacctatagttatcatatggcctagagattcctgtcttatgtatttacacaagagaaatgaaaacatgcccacaaacacatttatatataagaatgtttattgcagttttgttcataaccaaacataaaaaaattacaaatattcatgaaccagtgaatagttccaagttgtggtatgacgatgcaatatgtactctctaataaaaaaaaggaacaagctactgatacatagcctaacatggattcagaaatgttatgttgtgtgaaggaagccagacataaaagagaacacagaacatactttatggttctctttatatgacattacagaaatcaaaacagcagttgcctcagagatggtatggagtgggatatagtggtaaagggtgggaagggaatgctctagggtgatgaatacattatgtatcttcattggggacttattatgtgggtgtatacatttctcaaaattcattgaactatatacttaattgaactgtacactgtattttattggatgtaaattatacctcaatttaaaagataatatacaattcaaaaaacagaaggatctatggaatagatctacaatgtagagctaaccaaactaatatacccatattctgatgatcacctagccagaatatgggtatattagtttggttagctccacgtcatagatctattccatatttgtgcaaaagttatatttcgaagggtctcatgtttaatgatttagactagaaatgtgttggggtgcataatctatagatatctctatggtaggttggtttagaaaatgaagcattttaaaaggtaaatgacttctctaattaaccatgtagtaaatattgtccataagatatatacacattatatatatatataatatacatatgtgtatatatgcccatataatacattaaaaatatatttttttgaccaaagacaagcaaaacaaaataaaagaaaacatacccccctacctggtgagggctctcacattctcacattttggatctggctggtggtcctggtattgctgattttttagatggtccctgaaagcagatgcctctgtctgtatttccttaggaaactccagaataggataagctcagaaaacgaccactgtaccctggaagcataaattagcttcggaatagggatagggctcagttatctcctttaaaagggggcctgccaacctcgtctaactgttttaagaattctttgaatggtaagagcattgcataaacaggagcattcattgcaatatcggctttgacctcaactcaaccctcttcccctttcaaaaccactgaagaacattttactccatttataaaatatgaaagggaacttttaaggttgttactttctaattttcccaactcattctcttcatcctgttcctggtggctcaggacaacttcctacctcgcattgcctctcattcacctctaaccatccccttagatgttagctgataattacataatacctttgctgtttctctcaggcttgttttcagttttaaattaattatgaaagtccctcaagtagcatttcacctcctaaatgtggccctgccatcctgggatctcctgaagaaagtggctgatggctttgcccactcagaaacttggccatgccgaagggacaccccatctctgacaggacagcagttctctttgggctgagccgagggtgggacatgacagaagtcaaggctgatttctgtttcccttgaaaacactggtcagaatggagaggctgccccatttagtgagcttgggaggatgactcatccctgggaaaactcattactttctcagaaccttgatctgttcccaagttctccttttttatggcaaatataaagtggttagaactcccacacatttttccttcagtgtctctgaaaatcattcagccctgttcagggtttcgccagtgatgaaaagcttatcctacatattttcagatagcaaatgtcatagaacacacataatgtgactacctattgcactgacattcgtatttagtactcaaaggcgagccatttctgagggagggagcccggtttgctctataatgccctgagacagtcctgtatctcctgctgcggctcctgacagatcttataaaagatcgtaaattactatctgttgaaatatatgaatttaatgaattccattaacgcacacctgcacagaagagatttcaggaacccaaagatatgatcagtcaaacagctttaatagttattaattacagaagcagactatttatcccctgcctacatagaaatctgaaagtagtgtaatactcacacttcaagggtttttgggtgggagagaaaatgggctttggttgaaaggatcaaatacttattttagctaatgcacttacatgctgggagttttatatttatatatgagagagcagtcactacttttatgtgtagattttaagaaatttaatgtcatgagagtttatttttttttaagaattataaaaaaggctttggccagtatttaaaataggccacttatttttgcttctacatgcatgaacatccaaatgtttagatgaaaacctaaaccaaccatttaggaaagtccaaatcaaagtctcctatgtagtcttcataatatg

SEQ ID NO: 1887403 - DNA, 4001 bp, Homo sapiens
aggttttcatctaaacatttggatgttcatgcatgtagaagcaaaaataagtggcctattttaaatactggccaaagccttttttataattcttaaaaaaaaataaactctcatgacattaaatttcttaaaatctacacataaaagtagtgactgctctctcatatataaatataaaactcccagcatgtaagtgcattagctaaaataagtatttgatcctttcaaccaaagcccattttctctcccacccaaaaacccttgaagtgtgagtattacactactttcagatttctatgtaggcaggggataaatagtctgcttctgtaattaataactattaaagctgtttgactgatcatatctttgggttcctgaaatctcttctgtgcaggtgtgcgttaatggaattcattaaattcatatatttcaacagatagtaatttacgatcttttataagatctgtcaggagccgcagcaggagatacaggactgtctcagggcattatagagcaaaccgggctccctccctcagaaatggctcgcctttgagtactaaatacgaatgtcagtgcaataggtagtcacattatgtgtgttctatgacatttgctatctgaaaatatgtaggataagcttttcatcactggcgaaaccctgaacagggctgaatgattttcagagacactgaaggaaaaatgtgtgggagttctaaccactttatatttgccataaaaaaggagaacttgggaacagatcaaggttctgagaaagtaatgagttttcccagggatgagtcatcctcccaagctcactaaatggggcagcctctccattctgaccagtgttttcaagggaaacagaaatcagccttgacttctgtcatgtcccaccctcggctcagcccaaagagaactgctgtcctgtcagagatggggtgtcccttcggcatggccaagtttctgagtgggcaaagccatcagccactttcttcaggagatcccaggatggcagggccacatttaggaggtgaaatgctacttgagggactttcataattaatttaaaactgaaaacaagcctgagagaaacagcaaaggtattatgtaattatcagctaacatctaaggggatggttagaggtgaatgagaggcaatgcgaggtaggaagttgtcctgagccaccaggaacaggatgaagagaatgagttgggaaaattagaaagtaacaaccttaaaagttccctttcatattttataaatggagtaaaatgttcttcagtggttttgaaaggggaagagggttgagttgaggtcaaagccgatattgcaatgaatgctcctgtttatgcaatgctcttaccattcaaagaattcttaaaacagttagacgaggttggcaggcccccttttaaaggagataactgagccctatccctattccgaagctaatttatgcttccagggtacagtggtcgttttctgagcttatcctattctggagtttcctaaggaaatacagacagaggcatctgctttcagggaccatctaaaaaatcagcaataccaggaccaccagccagatccaaaatgtgagaatgtgagagccctcaccaggtaggggggtatgttttcttttattttgttttgcttgtctttggtcaaaaaaatatatttttaatgtattatatgggcatatatacacatatgtatattatatatatatataatgtgtatatatcttatggacaatatttactacatggttaattagagaagtcatttaccttttaaaatgcttcattttctaaaccaacctaccatagagatatctatagattatgcaccccaacacatttctagtctaaatcattaaacatgagacccttcgaaatataacttttgcacaaatatggaatagatctatgacgtggagctaaccaaactaatatacccatattctggctaggtgatcatcagaatatgggtatattagtttggttagctctacattgtagatctattccatagatccttctgttttttgaattgtatattatcttttaaattgaggtataatttacatccaataaaatacagtgtacagttcaattaagtatatagttcaatgaattttgagaaatgtatacacccacataataagtccccaatgaagatacataatgtattcatcaccctagagcattcccttcccaccctttaccactatatcccactccataccatctctgaggcaactgctgttttgatttctgtaatgtcatataaagagaaccataaagtatgttctgtgttctcttttatgtctggcttccttcacacaacataacatttctgaatccatgttaggctatgtatcagtagcttgttccttttttttattagagagtacatattgcatcgtcataccacaacttggaactattcactggttcatgaatatttgtaatttttttatgtttggttatgaacaaaactgcaataaacattcttatatataaatgtgtttgtgggcatgttttcatttctcttgtgtaaatacataagacaggaatctctaggccatatgataactataggtttaattttataagaaactgccaaattattgtccaaagtggttgtaccatttttaaatggacacttaatagttatatatgtttatggtgtacagagagatattttgatatatacaatgtgtaatgatcaaattagagtaattagcctatcccccacctaaaacatttatcttttcttggtgttgggaacactcaaaatcctctcttctaactattaaaaatatatatacaaaagaaattagccaggcatggcagcatgtgcctgtagtcccagctactcaggaggccgaggcagaagaattgcttgaacctgggaggcggatgttgcaggagtcgagattgcgccactgcattccagcctgggtgacagagtgagactccgtctctacagtaaaaaaaaaaaaaaaaaaaaaaaaaaaaaaaatatatatatatatataataaattgttagtcaccctaccatgttttagaagactagaacttatttcccctgtctagctgaaattttgtttccattaaccaacctctccatatctcctgacccaacccttcctagcttttaataaccatcattctagactctgggccaggagcagtggctcatgcctgtaatcccagcactttgggaggccgaggcaggtggatcacaaggtaaggagttcgagaccagcctggccagcatgatgaaaccccatctctactaaaaatatgaaaattagccagatgtggtggtgcttgcctgtaatcccagctacccgggaggctgaggcaggagaactgcttgaacccaggaggcggaggttgcagtgagctgagattgcaccactgcactccagcctgggtgacagagtgagactctgtctcaaaaaataaataaataaataaataaccattattctatactctacttctatgaaaccaactttttaagcttctgtttgtgagggaaaacatgtgatatttacctttctgtgcctgaattattttacttaacataatatcttccatgctcatccatattgctgcaaatgactgaatttcattcttttgtatgactagtattccattgtgtacatatacctcattttctttatctattcatctgctgatgaacacttagtttgattccatatcttggctaaaactatggaatacttcacaaatttctgtgtcatccttggacaggggccatactaatcttttctgtattttttttttttttttgagatggtgtcttacactgttgcccaggctggagtgcagtggcgcagtcttggctcactacaacctctgcctcccgggtacaagcgattctcctgcctcagcctcctgagtagctgggattacaggtacccaccaccacaccggctaatttttgtatttttagtagagatggggt

SEQ ID NO: 1887404 - DNA, 4001 bp, Homo sapiens
ccaccacctgcaaatacagtgctgcatcctgacatagcttcaccaagggtctcatgattttgccctgactacctgtctcacttaggaacaggtgcaggtgcaaggttcagtacacaaaattacagaaagcaaaataaccgcgagctattttgtctcctctctccacacagactccctctgcagagcccttggctaaagttgtcacgtggttcaatagcaagggactctggcttcctatggggccagcgcaggcccttcctttacttgataagataaggaaacaagataaaggtctatttttctctcgactaaacaaaatgcagaggtgcacatccagggcggatatggcactccgctgtaggtcagaacctttatcttttgtttctctaatcctcaaactgtaacttccacctcatgggaaagatcactattcacccagcccccacagctgcgttccagccagagaaggggtaaagaagcgtatgcccctcactttagagatgttttccagaaatcacacatgccgtttcaagttatgttccattggccagcatagtcacccaggcacatctagggagaatggaaaatgtagtcattgttcagggctgcttgtacttttcaacaagaaaatcttttctttctctttagtggtatgttataacctggcatggacaagcttctggcaggtggagggatgccaaaaagttgacttgagagatagagagttagaaggatgatcatttagaggctgggaagggtagttgagaggtgttgctaaggtgggagagtgaggatgattaatgggtacaaaaaaaatagatgcaagtccgaatgaatgataagatctagtatttgatagcacaatagggtgactatagtcaataataatctaatcgcacttttaaaaataactataagagtataattgcattgtttgtaacaaaaaggataaatatttgacgtgatggatattccatttaccttgatgtgattattaaacattatatgcctgtatcaaaatatctcatgtaccccagaaatatatacatgactaggtacccacaaaaattcaaaaaagaaatttttaggacagcttgaccctgaaaagattcatggagatttcctcttcctgatgtctcctcaaacaagaacacagtgcccctgttctcctgggcagggtccaccactttctttctaaagtaagtcgcaattgcctgcctgtccatcctcatggggtaagacagaggagggccttcagtatgctcttatttctgcatgtaaagaaaaatcaagaaaagcagctctaaataaagacatgcacaaaaatcaaaatggaataaggacttgccagctttgcaagactatttcccctttgtcagcatcttctaatatgtggtgtgtttgtgttttccttgggtctaataaattacctaccttgaaaatttcctttacagtgctggattattcttgttttggtcatcatctggacagtgataattctgctccaggtgttggaactctggaaaaactgtgcatctcacactctgagcttgtctcatggctgcaaacagagtcaacaaattatccaagcaaaaaaatcaggagacatggtacaatggtaaaattgaacttagaaggacaataaaacagaatgttgaagtcacagcgaacaagaagaaattagagctaatcactggtagtcacagaaaccctcatgaagacatgctgaccacagtccccatccttgctcaaagaacaaggcctgaaaggcaatttccctctctatttccagcaattgttatcattacttaaaatctaattgagaggctagcatcctcttttttcaagaatgcatagaagaatgagaattgttatttatctcttttcatgtttttttgtggctaggtcatgaagtgcatacattgaatccctagtggccaaaaggcttatgacatggctctcacaatatatcataagccctctgaccactagggattcactgtaggcatttggtcgtctttgcagcagcaggcaaggaagctttctaatgatgctcttggtcacaccacaggtggcagcaagtggtacccatggatacaacttataaacattaattaggagaggggggaaaaaagaagtgacagagataaatgtgctggaaagggagtttaagagtaaggcaagaggaaaatgaagaatgagagaaggaagagcaggacctccatagtaggtgccaccagcaattgtctacccattgccaatggccttaggattttagatcatttgcccttgctcaccaagaagtcacagaatgtgttttcttttataatcacaaattgacctattttcattttaaaatgacaagacgatagaagagagtgtaagatttgttacagaaagggccatggtattaagttgtttatttggccttgaccagaaagatagatttagcatttagaaatgtttattgccattttttatgaccttcttttcccacatcatagagaaaaaagatcaagatctcaatatctcttttacaaatacaagtaaggaaggaggaatgttagcttatttattctggatgcaatttgttaccctccaagaaaatagaggtgcttgtcctgtgctgaaaatagcccagttaaattttagtaaaaaacacactgtgtatgattaatttacagaaattatcattggttacatcatttaacttaaatcatcattagtggccttaaacagctcttcgtttgctctgcttgtcctcaggtaacgtcatcttgcatggaatgttgctcacatattaaagataattaaatactgaatacctgattaaaataatcttgtatattttggagtaaacatgtataattcatgttttcagctcttgccagtttcacattttatttagcagaaaatatctacccaagattcaaactgcttgagaaggaaagttcgaaacattattccacatcattttatatattgagattctactatatgtgatcataaaagttagtatgtgtctataatcctaatagaatcttgtttttgctttttataagtctgtatttgaaaggcaaaaatgtcctcagtggaacctgatttgtagagagagactttcttatgcaatggatttttgcatctaagttagtttgtgccacagttttgctaaaaacacatacttaaccctcttacattcttccttgccacagcctacttttaggaccataacttcatacaaagcaatcccaaggttttctgtttcattagtctgtcaccagtggacacgttttttacctatcggttcttccttatccacaggtatcataagtcctgaattccttttttgtcccttcaagagtcagtttctctctctcttccaggcggattgccctctgtctaagcatcctgtagtcagcaggttaggcaaactccccagactttacttccagacaggtagaacggcagaaggtacgatattgcccagtgagttgcagagttagaagtcaaaggtatataggtcagaaggagtgttcaccagtctgcttcctgccttgctctgaagactggtctttggaatggtcaccctgatggaatggtccccccaactattgggcatctttccttggccttgcccagcctggcctttgccacacagtcatgttttcattaaacagatgctacttgaatcacactatgaaccactttgggaaattttgcattaatgcattaagtaattgagtaaatattctactaacttaattcccactatccactaggatagcactttgccaaatactaggtgggtgaaacatagtccctacccttaaggacgtcacaatttagtagactaacaaattttgagtgactgtactgattaaaacctttcatcattattcctgaatggtcaatccagaaactgggagacaggaggaagaaaggagcttcacaaagcatggatagagattgccaacattgtcatgagcgctcccagatgcagt

SEQ ID NO: 1887405 - DNA, 4001 bp, Homo sapiens
cagaggagggataagagatgagcaggaggaccctccactggagagctggtattactggcacaagtcagttttggtatgaagaagaggaggagaactgaggccataaagaggcggtttacattgacaaaagcaggtgcagtgctataattcagaggctcagcctccaggctgctgaaccacattgtccagcatttattaacttcagtgtatacaattcagcagatctgtttcccaagtatagcagagaaagtatagaggagcaatgtaatggaaatgcacacatcaaagtggcttttagcaaatgtgaagctcttgttacctgcagtgaataaaatctggcacagggttatgttggctgaaggaggccgcatcaaggttcatgcagatctcgacattgtcacctgccatgattcgcactgcagccttgttctcatcctcaaaaatctgccgttgtaaggaggcacacagaagcagcatgaagtcatctaacaagacagaggtgagatcattaagccgcctcatcctcttctgatttacataatgcaacacacagtcatcacacagcaacagccattccccagctcctaagtgagttgtgttcccaaagttcatagtaaaattcatcctggagtccaatgtcggggccaagtcacaccttctccaccttgcagggcatagagtgaccacagacactccaggagcttacgtggggagtctctgaattttgtttgcacatcggtgagagaaatattaggtgctacttactagtcttcatgagtctcttagagggtaacatttttgtgtgtgtgtgtgtgagacagagtctcgctctgtcgcccaggctggagtgcagtggtgcgatcttggctcactgcaagccccacctcctgggttcacaccattctcctgcctcagcctcccaagtagctgggaatacaagtgcccgccaccatgcctggctaattttttttacctcccaccagttttaaggaggccacttgagcaatttccccatctttatctttttatgtgtggtggatgcagacattcatttttctttatcctttccatcctcctttgcatttgtaaccaaagactgtccccaaagcagaagccacactgcaagtgtggtgagagcaggtggaggtggtggactgtgctggacagcacagcgcagcctgagagagctgtcctcccagcaactgcccacaaagggctgaggccaagcctgcctggaagcctgaacacaagctgcttccttgcttttaaaattaaacctaaacttgtttaggcagggcagtcatttgcattttctgtaaaacccagcactctggtcttggaggagctgctctgacctttggatcaccagctgccatgggaaggccttggggctgcagcccaattctagagcaactaaaatctgggaagcatctcccagcatccactgtcccatgttcagggtttatttatctgcactgggagccagaaaccaccaagtcagaaaacacaaaagccttcctctctggtctgtcttttgaaaggtggctgtgtaaatgtgtgtgtgtgtgtgtgtgtgtgtttgtgtgtgtgtgttgggggaagtgaaattatgcaagtgaatatggcatttccaacactgatttattaattttgcaaatgtaatagggtgagtagaagccattaatgacttgtgatattaatgcataagacaagcctttacatgattacgaagtctagtggaagacaaaaggcactaatgcatagcacgtgaacaatgattaacagtaaacccggataccagcactctgtggccctgcagtggaaacacttacagacgagaaacacagggttgggccgcacaatgaaatctgggaagtacagccactttatgatgttgtcattgaagctggcacccttgaatctccacgggtaatctgcagggagggaagtggcgaacagcacaatcaatactcttcttcaccactcttctcccagccgtccgctcagtaatggcttcttctaaaagtagacggctcaagggaagggcaggctcacctcggcaaggagcaggtgggatgccaatgcagatgaaatactggaaggtgatgatgcatgccaggaagcagcagtacttgggccagatctctgcgatggctttccttctgcgtctatataagacagcgatcagccagcaggcgtggatcatggcatagaaatccattcgctggccaatgacgttaactgacattaggaaacaggtctgtgtaaagatgaaaagaggcaaaaaaaaaaaatcaggcatatgggaaaggggactggtgataggtgtcaggtctgtgtagatggcggagacccatgtccctcagggcaagtctgtctgcacagattcacaaatgcttgctcttttgagtgtctcagcgtgaagacagaaatactgtacagattactcccagggaaaaactgactaagtagctgttatcataaccacttcagacaataaagagaacagccattttgatctcctcatgaaacatcaccattcctacttcattctatgaaggcacaggcactatcacaatcgttttaggttaaaacagttcattttggctgcagcttatggtttcagaatgcacaaaaagaaagaagattaatactttattatttatttattttgagatggaatcttgccctgtcacccaggctagagtgcagtggtgcaaacttggctcactgcaacctctgcctcctgggttcaggcaattctcctgcctcagcctctcaagtagctgtgattacaggcgtgcaccaccacgcctggataatttttgtatttttagaagagatggggttccaccatgttgcccaggctggtctcaaagtcctgacctcagaagatctgcctgccttggcctcccaaagtgctgggattacaggcgtgagccaccgtgcccaggcagaagattaatactttattcttaataagaaacctgttaacacggcaactgatggccatgcatttagatggctctggagatccagagaggccaaggcactgctgtggaggggggtgttcagcacccaaacttggaaaactttcagtcaagccagttaaccatcagtacaaatactttctgttcttctcaaggggacagctatcatgcctgcagatgtatcacaaagttccagtggccaattggccagaagcagttctttgaattttcatggaaaagagaaataaaacatatcagcaaggaaactcacctccagaccaaacttgtaaaagaagtaattaatgaaatatttggcacaattaataagtccatcatctagatgtagtcttgtaatgtcatgaaagatagttctagacacaggggccgtcaggttatttcgacctcgatagtattcctgatggcggtaaatggtgacttcaaaggccaggatagccagcatcaggaggttattctacaaagcaaggaaacacaaatgtgtcagccagaggctttatgatttggtaatttcaagcaatccccacattctgcacagctacaaggacaatgttttataaaagctcacctctcttaagcagttttgagctcaatattcgttttctctgtcttatttattgtggcattatctatattagaaaatcaggctaacttccaaagtcataggatctagaatctccaaacataagatgctgctgctcattcctacttctcacaactacacatctcacaccaaggaagcaatttccagttatccaaggagggcagttcagccttgtttgcagccagaagtgcaaaaacagtacagagacatcctgggacgcactgagctaaatgaacgggaagctgcttagggggaagcttttgaacactcctgaaatctggctacagacagcaatagattgaaaagcatgctgacaacagtaaaataataatagtgatgatataactattattcaagataatgaaaatagttaacatttatggaaccatagg

SEQ ID NO: 1887406 - DNA, 4001 bp, Homo sapiens
ctgcaccaccaggaaagaaatttaaagtataccacaatcaaaaaaatgaattaacaaccttattttattcttaataaataagacgagaggattttttaaaaatccacctacactcctaccacagtgatagttggttttattttcctcacgttttttccaggttttactcaaaagtatttgattttacacggttaaaatcaaacacacaagttttattctttgctcgcttaatggtacatcttacagatttttcatgttattccacagactttacgtgtatcattattacagatgtatgacagtcccttcagtttcttcaaaaatttatacatttctcactttccagccagatgtgcaaagaaaatgtgggttctttatcctttataaacacttggatattctcatgagcccactccaccgggagtaaggaaggacacataaactttgaacttgaaactttatgttaccacagtccctgcccaatttcacgagctcttgggtgacttctgaggcgggtaaataacgtttcctgcttcttccactctcttgctcttctccaagaggatgtgggcctggagtggtgcccatgccttcgcagcgctggaggcctgtgctccttccatgggtccccaccttggatcctgtcctgggtgcacattggctggttccacttaagtgagagtgaaatggaatccagctgagaaatgtgactttccctttagtacgggcatccctcccaaagagcctggctgtctcccactgctggcgaaccccacctcagctcctgctgtgcggtggggcctcttggcgtccacttgttacattgcaatcccacctgcccccagtccaggcagctcacctggccgctctcatctgcagggcccctccaaccccaccttggcagacttctagggcaagctccccagcaagtagctcagatctaccctgcatccctaggacgtcggggtcccttcccacgccacacagcagctgatgctgctctggcactcaagcttgtgcttcatttccatttgtaatctagggaaggcccttgcccctgtgctctcttcgcaggaattctgaaatgagcaaggccaaatgccctcttccacaggccttctagccaacccgtctaaagcacctccctgctgtgcttctgcatccctgcacctgcctcttctgctcccgtggtggcaggatggggagcaaaaccgaaaaacatctgggaaagaacgcaaaggaagacaaaaagcaagcaggacccttaccacaggaaataagcagctgaaatgaagggggaaaccaggagcattgatcgagagcatggggaatggtctagtgccccaaacaaaaagtgttaggtgcccactggcttcagcaacatgcaggtactgggggaccttgaaatgatgccgtttcggtggagtggagatgaggaagtcagccagcctgcagtggcttcgggaacaagtcgaggcaagaaaggaagacagtggatgtagacactgctttcaagaaatttgactgtgaagggaaggaaagatatgagatatggaatgcaggtggcaaatgcagcatccagtattttggctttttggttggggcaaaggtaaattcaacactgatgagagccagccagtagtgaggggaaggctagcaattcagacagcgtcttttctgcaggagggaggtagggttttctgctaagagagtaagcagcaggggcaggaggatcaaaggacccgggtaccaagaagtttggaaagagcttccatgcttaatgcaggaaaagcggaatgaagacatacaagaattaccaaggagtgctggatgcgcagacggcctcagccagcacgaattgactggggcagtgacctggaaggagatgggtgcacctgtgtgcttcccagcaaatcccgacttcagggtccggtcacagaagtggtaaaccgtccatggtgtggatgacttcgaccacctaccacatttgtcagttctcaccacaccgagcacaggagctcgagtaaacacgctagctggaatgtaagctccaggaaggcaggacggtgctgcccaccatgacacagctgaagggtccttagaaatcacctagtcaaaccactccattgacaaggaaacccccagtttggagaaggaggccggagtcaaaggcagacctcctgagctccactcccagacctttcgccagcacggggtgacctccaactccctcagagaacacagccctccccctttggcttccagctggagcgtgaattcccgaaggacagcttcactagatgcccagatttaggaaaactgtaaagcagaaatatcattccatttttaaagcaacacaacctccccacgtgatagctattagtaaatagctcacagctgcgaggaggggctccaaaggacacaacaccctgtgccatggggtttccacgaagatacattcctaggtgtgggcacggtactcctcccctccctgcggcaacgcgacgggatggcaccggcgcgctctggggttcggaacgaggccagcagggggcggtctacaccactgagtgttttcccagctcggtttgttgtttggaaggaaattcacgtgtgatcaatcacaccttaaatatcttctgtagctataaatatcaaacatatgttttctaaatggtttacactccttatctccccttttataagttcaatagtagagaggtcgtggtgagggacagagaaggaacaccagacctgggtccgctgaagaaacaagcccaacaggaaactgccaggcgagaccgctcagttgcctcccaaacacagatggaagacaggattttctggaatcacagcaaaagaaaaaaaaaagcctcagctttgaacatctcgacagcaaattcaatgtctagtctttattattgagcaagttccctaaaacttcaaagaggtaagcacatcaaaaaagtactaagtatgaaaccctgggaatataaacacataagagacatcctcctgtctttgaggaactgataacaaaggggaaagaagatactatctcaggagtgctctgagcgtggttaagggcgtgattcatccctatttaatcaatatagctagggaagaagattccaactaagcatgaaagaatagatgggactccaaccagattgtggagcactggaaaccaagatagtacatgtagccatttttaagtttgaatagcaattatctttctagtacgtaatcagggtgcaaagcttatacccctcataaaagagtttactgaagttcagctacaacttccaggtcaacacttctccccaaccaacccaccttttactttgtccctcccccaaggggctcaggcccactactgggggtaactcagcaggacataagccaaaattaggccatcagtatcgtgctttggaacggatttcattctcgatttttgaatcccttgaatctctgtggtattgttaggaaggatggtgtcctttatatagctttccataaaaagtgtctgatttgtctggatgtccagcacattttaacaaactcaagcctctagacctgggagctggaccattgcttctacaacaaaggcaagtcagacacagggatggagccagttcctctggtctcatgtgtgtgggggccttcctgtgccaatgaatctacctctaccactcaccccaccctagctgcatcccaatcaacagacagagcttggtgtggtggcaccacctgtaggcccaactactcgggaggctgaggtgcgaggatcacttgagtgcaggagttggaggctaaaatgagctatgatcatgccccccctgcactctagcctgggcaacatggaaagaccccatctctaaaaaatagatacaatacaaaacagacaccaaaaaagaagcaccagaatttactttgttctaagggatataggctttgtcacttcaacagtcaggtcatgggagttctcagaaagtgttttg

SEQ ID NO: 1887407 - DNA, 4001 bp, Homo sapiens
aaataaacttgaaaagggttatcaaagacatcacaacaatgctttcaaagtatcttggctactgtggtagttactatcaatggcctagccgttggccactctcctttctttcttgctaacagaaccccatttttattcagatatctggtggctgtgtgcatcaaggaaggttagacccctccctagccccagtgggtcaaccttgactggtataagcacagcatggtgattccatcccctgccagaaatgagcacacaaggcaattctggccagtgagagagaaagggaagtttactgggagactactattatatgtgtctgctgataaagggatgcatgggaagaaacagcatcttctctgacttcatgaagtcataactacatgtgatacccagattattggcagccaccttgtgagcacaaggggagtcgatctgagaaggcagaactgaaaggaggtaatgcttctgttgttaagttgccaaattagtgaatcctggaacagccctatctctgtacttcataagtgaatgcgttattttattttattttatttattttatttttgagacagtcttactgtgtcgcccaggctggagtgcagtggcatgatctcagctcactgcaacctctgcctcctgggttcaagcagttctcctgcctcagcttcctgagtagctggggttacaggcacatggcaccacacctggctcattttttttttttcactttagtagagatggggtttcaccgtgttggccaagctggtctcaaactcctgatctcaaatgatctgcctgccttggctacccaaaatgctgggattacaggcatgagccaccgtgcccggctgtgaatgcattttgctcatttattagaaatgtattagaccatttctgagtctgttattattagtggcccaaagcatcctaagcaaattgtgacttatattgccctatctatttagaaaggtcgctgatcaagcgataccttaaaacgtatggttgttttgttttagcaaggcttctcttagaaaatataaacttaaccaggccttcttttctgcttgtgtggtacagttttacctgctgaaaaatgaatagctatttgcacagcaatgttaaaaggttacatgatgcaactgcaaatattcacttatttaggctattgtttacgttccattatggatgaaaactgcctatatgcatttttggtatttctaactccagaaatctggatgtattatacacatgaagtatcacattttatcttgtgttcaagagattctggctaggtcctacatggtatctcttacagggactaattttaaataaaaactaataatttttttctaaaggtttccatgcctaatagtcctgatggtgaaccccaaatcattgctgcttgtttgacacaccaggaatgcttattacttattatatacactaaggagaatatgaagatcagtggttcagattagataatgtatatgaaaatcactgaatttttttttcaattgagtcagggtcttgctctgttgctcaggctggagtgcagtggtgcaattatagcttgaactcctggcctcaagccatcctcctgcctcagcctcccatgcagctgaaactacaagtacataccactacaccagctaattattattattttttccatagagacagggtctcaccttgttgtccaggctggtctcaaactcctggctccaagcagtcctcctgccttggcctaccaaagcgttgggattacaggcatgtgccaccatgcagggcctgaaaatactttaaataactaaattattttcaatctcctttactcatcttttaaggataatttcatcctttcaggaagggttactgagatacaagataaagcatgttgctcaaggtctcccgactactactactactaataatttaaaaaggccctgagctgggattgaaccgcaagtccatcttactacagagccacatcccaaattcttttcaaggtgcagggatttccccaaggccttcaccatggccaccttcctgcagaaattgcaatacgtactaaactgctcaaaaggtgtgcaaaaggagagggtggaagcaacagacctccatactgtacatacacagagtaagctgtacaaattttctagttacccttaagtcctgcctaaggcaatcaaataaacaatcttgggacactaaattatctaattcgaaccaccgaactttatattcctcttggtgtatataataaataaattagcactcctggtgtgtcaaacaaaccagccatgatttggagtttaccatcaggactgttagacatggaagcatttttaaaaaatcagtttttgtgtaaaattagtccctgtaagagatacaatgtgggacctagccagaatctattgaacacatgatacaatactatttttaacattagagcataaatcatgcactgtctagttactgtgtaagtaactacaactactagttactttgttagtctagtaacaacttctgacacctgggcatattcatgaaagtctttaccatgtgtaataaaggctcatacagagcttcgtcactacaaattatgagaattaaggtctcagttcccatctcttaagagtagaattgtctaattcttaaaaccatacttgaaaaaaatcccttatgatacaaaaagttagaaacagtttttttctttaccagaaaaataatttaaataatctttcaaattatgtagttcttctgcagtgaagtgtaagaagatgacagtgaaatggcaacatatgctttgctgagaaaatcaggaaaaagaggaaaaactcagaattctgcagtcgctttgggattgttcatttacaatagttccatggctaccatcaccaagctgtggggtctgtgcccatcattccatgtcctccaatctctagttctccccacagcatctgttcaggggtttctaccttgcatgcatactcacctctattcagccccgcctagtaaaccatcacagtcgatgctgatggcccatccaacatgagccctatatgttcttgcccttctctactccaaagatcttgacttccatccagttcagcaacccacccccatgaccacatccttgactttgtcttcagtgggaagtgctccagctctgaaaacttaagcattataatcccctttgctctgtaaccttccattttctacctttcttatgtccctggaagcagctaatctaatggggaaatgggggcaagttttagaagcagagatctgggtttaaaagttggctctgccacttgctggctgtgtgacctcaggtaaattatatttctgagccttatattctttgtctgtgacatagtattttgcaggattgtaaggtgggctgcatatgactgaaagcacctagcaacacagctgatgctcagtgaagctaatttctccccttccctcccgcttcctcacacctattaactttattgttcaatctcacagagaatgctggtctctccagtctctcgtccccctctgggcttcaaggtcagtcatttcatttctctgatgttccaccacatggctcaggttaacaccaagcttgggacaatgcaccacttccatgcttcactcttgctcttggactgcccagaacatttagcttggccagggaggccctgcacatttctgtttctgaagcttctcataagggaggaggaggaggaagacaaggaggaggaggagcaatatgaggagaaggaagaggaggaggaagaggaggaggaagaggaggaagaggaggaggaggaagaggaggaggaggaagaggaggaggaagaagaggaggaggaagatgaggaggagaaggaagaagatgaggaggaggaggaagacaaggaggatgaggaggaagacaaggagaaggaggaggaagaagacaaggaggaggaggaagatgaggaggaggaagaagacaaggagaagga

SEQ ID NO: 1887408 - DNA, 4001 bp, Homo sapiens
caggtgatggaagtcttgtctaggctctgtctatgggggcattgtgtcaaatatctgcactgatcacccaggtgatgtaactcttgtctaggctctgtctacagggatttttgtgacatatcactgcactgatcacctaggtgatgtaaaccttgtatgggctttgcctacagaaggctttgtgacatatctatgcactgatctctgaggtgattcaactcttgtctaggcactgcctacagggcacattggtacatatctctgcactgatcacccaggtgatggacccttgtcttagatctgcctacatggacattgtgacacatctctgaactgatcaaccaagtgatgaaactcttgtctaggctctgcctacaggggctttgtgacacatctctgcactgatcaccctggggagggaactcttgtctacgctctgcctacaggggctttgtgacacatctctgcactgatcaccctggggagggaactcttgtctacgctctgcctacaggaggctttatgactaatacttacactgataacctaggtgatgtaacacttgtctaggctctgcctacacgggaattctcacatatctctgcactgataacctaggtgatgtaacacttgtctaggctctgcctacaagggaattctcacatatctctgcactgatcccccaggtgatgtaactcctgtctaggttcagcctacaggagcgttttgacatatctctgcactgatcacccaggtgatgtaacacttgtccaagctctgcctacaggggcattgtgacagatctctccaatgctcactcaggagatgtaaaaattgtctgggctttgcttacagggggctttgtgatatatatttccactgatcaaacaggtgatgtaacccttgtcaaggttctgcttaaagcggctttgtgagatatctctgcactgatcagcccagggagggaacacttgtctacactctgcctacaggaggctttatgacttatccctgcactgatcactaggtgatgtaacaattgtctaggctctgtctacacgggaattttcacatacctctacactgatcacctaagtgatgtaacccttgtctaggttcagcctactagggagatctgacacacatctgcactgatcaccgaggtgatgtaaatcatttccaggctttttctacaggggacattgtgacatatctctgcactgatcacccaaatggtgcaaatcttctctaggatccacagggagggggcattgtgacatatctctgaactgatcatccaggagatgcaactctactccaggctttgcctagacagcgtcggaaggtggggggagagactcagccagaatttcacggacaaacaagggcacagagaggccagcgagctcccttgcacgtcagccggggtgcgcactgcgcgcaggtctagccaggaggccggcaaagacagccagaggtgtgccttcgaccgccaggcgctccgtgctggcagccgggaggccgcaggggcccgggcgggcgggcgacggtggcgcgcaggcgcagaggaggcgagccgccggagggtgtcaggcctggacgctgcgcgggcccggcgtttcgcgggacgggggtctccacccagcgcaggggacgacgcgttctccgggggtggggggtgggggtggggaggggcccaggggacgacgcgttttccgggggcggggggtgggggtggggagggggcggtcaggcggcggggtggggcggtggagaggcgggagagctctgtcccggctgctcccacagcccaggcggctgcccgcaaacccgcgcgtgcgcagtaggcggcccacctgctggtacctgggccggctctgggatccccgggatgcccaggaaagaatggcagttctccgctgtgtggagtctctcaccgggcctagacctagaaggcaggaatcccaggccggtcagcccggtggagggggcggggcggagacacgcccctccgtagccagccaggtgttccccgcgaaagagaggccaccgccctgccccgaaccacccgaccccgtcccaaccccgcgtcctaaagctcctccagcagagcccggtattcttcctcgctgaggggtgcttccagcgaggcggcctcttccgaggcctccagctcccccggggcctccgtttctgggaaagggttagacacagagtaagttgcctttgattgaattttaaaggggttgagagctaacttttgataattatttttagacttaaaatttattttatattttgtgttacttcagcactgttacctacttttctgtttttcttaagcataaatgttgacattatattaaatcttcagcaaaatgtgagaaggaaaaatgtatatacttatttcatgtatttggaagacaacttttttagttcaagtgtttagtagtttgagttcagagagcatttcaaaaagtatagtcagctgtgtatcagtgggttccatatccacaactgtggatagaaaatatttgaaagagggccgggtgcggtgactcacacctgtaaccccagcactttgggaggtcgaagcaggtggatcacctgaggtcaggaattcaagaccagcctggccaacatggtgaaaccccgtctctactaaaaatccaaaaattagctgggcgtggtggcaggcgcctgtagtcccagctactcagaaggctgaggcaggagaatcacttgaacctgggaggcagaggttgcagtgagccgagattgcgccactgcactccggcctgggccacaagagcgaaactctgtctcaaaaaaaaaaaaaatatatatatatatatataaaatattatatatatatattttataactattaatagaaatttctttaaaaaatacagtataacaactgtttacatcgcatttatactgtattatgtcttatgagtaatacagacatgattttaaagcatacaggaggatgtgcctaggttatatgcaaataccacaccattttatataagagccttgagcatacttggactttgatatttttggagttcctggaatcaattccctgtggatataaaagaacaactgtgtaggattctttggtcattattaaggggaaatataaatatatctgttcttttgtaatgataggtcaaagaggcctataatatggtattttttcttatattcattctaaaatcttttcttaagtattgctgcttatattatcatagattatgtagtatgtataaagatgagtaaattccatcattaaggaccttaccgactagtaggagaaaaggcagaacatattcaacaaaatatatattcaaagtcaagtctggtaactgctttttaaaagaaatatatatataaaataaagtattatcatccctttgaaattaagtatttgtggagctggttatagttagaatgtaaaaagaattaagcaagttctagagaatactcttactttattttctatttttttaataaacagctttagttgtcaaaatttaaattatcagcttaagtgaaataatacataaacactagtatgaaagatactatctttcaactaagttaaatactttttagattgatgagagatttctttcctctctttattaaggtataatttcccacaataaagttcatagatcttaagtgttctcttcagtaactttttacagttgtaaacactcatataatcactcaagacaagattttaaaaaatcgtatttctttagaaaactcacttgtggctgggcacagtggttatgcctctaatcccagcactttgggagaccaaggtgggcggttggcctgagttcaatttgagaccagcctgggcaacatagcgagaccctgtctctgaaaaaagaattttttttttttttaaatttatgaagagagctcacttgggccagttgtggtggctcacacctgtaatcccagcactttggaaggctgag

SEQ ID NO: 1887409 - DNA, 4001 bp, Homo sapiens
gtatcacgagaacagcaagaggaaagtcctctcccatgatccagtcatctctccccaggctcctcctccaacagtggaggttacaatttggcatgagatttgtgtgggtgcactaatctaaactatatcatatagccactgtgaccacaaagtcaatcatagtataagcatatttaagtcacacattcattatagatcttgtcttcacaggccctccctgggtcacaacttcaagattttagataaagaggtcaagctggcttgggtgtgcatgcaattcataagggtcagaagaaaagacagttggctctgccctttcctgaactataaaaccagccatagtcctctgaaggaggtgtgtgcttgagattttgatccattgtgctgtaattaatgacttagggggaaaggcattaagatgtaggtttgaaactgcaaattactagaacaactgcctgtttcatattctgctatttacaaactgtggtgggggaaaacagtaacaacctataaggaatcttgaaaaaagaaactgcgtgacagaggagatcattgttctctgtattgcaacacacattcagaggcccttgaagtgaaataacttagatatttttttcttttttgtttgttttctgtttttccctttgggccgtctacaagtgaaccagtctaaattggtttaatcaatcaataggaatttgcaattctatgctaagtgcaacaacagatagtaaaagactataaaatacaaagaggtattctgtgaaattggggcatacaagagacaggcttcccctgctcctttgatcagtctctcagatatctcctagggcttgaataccagacatgtcaccacttccaaatacttcaatattggctaccagaggagaaagattcacttctggtctgtcattctaatatggtctttagacccatggggctaagtgataaaggttcacaagtcttctgtaatattgaaaacaaacaaacaaacaagaaaacactaaattaaagcctttttcaggtaactaagaaaaacctgctcagacttagatcaatgtcaggcttctttgctttgtgtaaagtaacaactcattggaataactctggttgaagtgatatagcttgtgctgatcaaaaaatttggagagtatatacctatgattagtaaaaatgtcaaaaagcctattgctaaataatttaaaatgtggagtcctcagtggaaaaattatctgtgtgcctattattggggttcagaaaacaatacccaaaaatatgacaatgtgctcttccaaacaaagcacaggatttaggcttttctctgaaatttccttatctactttaagactggacctgccaaaggaacccaactgccctccattccctctctgaaatctcattacctatcacagaaaagaagacaggaatgcaaccatatctggagggacatttttataagataatgtctctcagccttatttgaattccaaagagaatcatttccaagttaatttttgtctgttgagtccattcattccccctaaaaatcatttactacccctcaaaattgctacaaccttgattgccccttctcctgagaaggttatataaatacctggacctcattgagttattgggccatcattctcctgtgattccctcgtactcctgcacattaaataaatgttgtatgcctttttgtattattaatctgcctattttcagtttattttcagcaaacctttagagggcagaggggaagctttctttgctcctacagtatataccaatgagatttacagaggcaaaatgagaactttattttctaaaagcaatctgcagactggggagatgcagccttcagtgcaaaccaaaatacacaccgaagaggagtcaaggagtagaaaattattataaaggcaaaaaccataggatggaagggaatcagttgtagactctaggttggatggcccttaagcaagacatcacaagactctattgactggcttaggtggtctgtgggtggtcagttgaggaattttcaccagcaatctatcttaggataaataacagaaactggtttagtttgattgcagaaagaggtcctgtgacacttttaaaacattttcccaagaatacagagtatgtgatcccttcctcacccagccttggctgcctggttctgttttaaccttgagcacctcagttagccaagagaagtccattttgtccatcagccaagagcatattttaacagtgtgtggaatagaaacccaaaccctaagtgaatccttctttatatgagtctctttgtaccattttctctactctccagctcagacatgaatttaaattttcctttttgccccaatttttatctatagattcctcaaagtagtctgaggaatgtgaggtatgtaacatttttcatgcccagagaaccatgagcatgagacttcactcaccctctcatcccacacatccatgcttggagggtaattgtttaaaggcatttggtttttttctttccttccgtgtagtttccagactagctgataaacttcctaaaatattaccccaagttttacaatgtgactctcacctattttcttcatgttcctgggatttatgatacaaagaataataaatagtcaacagcttattatttcaataaacaatataccttatttaaaaaatttttaggaactgcctctaacttctacttcttcattttttctttgaaaatccacttggaactgctgtaaatgctaacagcagcatatattcaggactacttgaatctatgactcttggacagcagtcctcaaccttggcacaaataaactgttcaattatattaattttgcttcattttcaacctttaggtgcacagaatgttagaataggtagctaggcagacatgagcatggcaggagagggccttctaccccgtgaagggcaaccatagctggtgccaggaaatggcagtctcccaaaagacagaaaacacgcgaaactggtgatcagtagcttcctaagatctcaggagtttggtgagcaggcttaagtatgcacagtaaaaggcaaaatggtagagtttaattggtatatgaccttcctctaggaacactccactggtaagggaaaaatgcctcaaatgagcatgtgcacaattgcagtaaacactgtgcatgcagcccctctcaagtgctgacagaccactgcacgtatgtacagatagccagcccaaaaaaaaatcaagggagatgaaatgcaaaccccagaaccacgccaatgtataaaaccccaagtcaagggtcggatggagagcacgtggatctctcaagtcacccacttggcccttttccatgtttactttacttcttttcattcctactgtaaaactttttaataagctttcactcctgtattcctaggcttactatgactgatcaataaaggtcactgagattcagatcataagatttagatgggtaaatatggcaaatattagggtattttcattctttcctctgggagtcaatgttatctctcacaaatatgaatgttacattaatactaactgacaatattaagactgttaaatgagctttcctctatcccagcatcttgttttgaagcatggtgttctaggtgttaggaagtagaattttacatactcttttctttaaaggtcaatatgacctattatttgatggagaatttcatgttaacacaaacagattgttgtgaggaaaagttaaaaatgcacacagttttaaaatacaacgcaagattcaaagaaactaaatgtttgtaaactattgcttatatccaagtacttgaatccctgatagtacgtttccttttttctgactttaacaaaataatagcattttctgagcccttactatgtgccagtcacatacttaatcccttcatacatccattattttatttaattctcacaacaattctagggtgtaggcattatcactacc

SEQ ID NO: 1887410 - DNA, 4001 bp, Homo sapiens; identical to SEQ ID NO: 1245220

SEQ ID NO: 1887411 - DNA, 4001 bp, Homo sapiens
tttaaggaggatatggtagttgtctctagaagcctttttttttttttttttttttttgagacggagtctcgctgtctcccaagctggagtgcagtggtgggatctcggctcactgcaagcattacaggcgtgagccaccacgcccggcttaagcattaccatttttaaaaaagaaaggtccaaaacacttgacattatccttagctattctgacactgcaagtatacaaaaaataattgggtgaagggattggaagtatgattatgtactctgcagtggtatggatattacaacttagaaaaaaggataaacccttttgtgtatttaagaaattagctgtagtacattagttttgcattagccagctttaatgcatgaataatttatattaatctaatcctcgatttctcaaagtcacctgtacttgaaacagactattcactagtaattatgctttttttttttgagacaggctgtgtccccaggctggagtgcagtggtgtgatcttggttcactgcaataccctggcctcagcctcctgagcagctgggagcacaggcaggcgccaccagcctggttaattttcatatatttttttagagacagggtcttactatgttgcctggctggtctcaaactcctgggctcaagccatctgcccgcctgagcctcccaaattgctgggattacaggcgtgagccactgcgctcggctataacgattatttttaagtatgtctttaagattttttttttaattgagagaaggtaaacaacagttaattttccaagtggcacaaaaaagtaacaatgaaaatgtcctaccctggagctctcctgactttctcataggcgactgtttttttctttgtatttcacatcataaataaccaagttaaatgtaacactattccacctctagccataaggtgctctttttctagtcttgttgaccctaaagatttgtaggtgggagaaatcaggaacccaggaaaggaaaaactcctgatctttaatgcaggtttatgctttacatagtaatttgatgggacctcgccgtccctgtcaggtctgaatgtcacttcatctgctgtgatcacacctgaaccctcagttcatcaagacgttaaaggacagtgtaacataaacttgtaactgcatgcactaagtcataaacagacgctgttgttgcagattaacctctacgtaaataacgcgcccagaagggagtgagtacacgctgctgccacgctgcgacggtcaattttcctccggcacccttcctagtacctgagcagctccctctcaaatccccaacactacgtgtgggagggtgcactgaattcctctttaaaaaggccactggaaggcgtggctgggaggggacgcgctctagaccccctggtgccagggcaggtgcacgctaccgcgctttcggggcggggcccagggccccacctgaggcggggggccgcgggctctgggcgtaggtgcagcttctccggcctggtgcggggccagacggccgccgccggcttagcgggggaacttcgcctagtcctcgggctgcggtcgcagcgtcattttgcctgagttggatcacgctcgtccacccaccccgtgtaaaaataacaggtgaataccctatgtgggggtcctcatcgccgccatttccagaagcttccagtcacagccactgccacggtcgccacaaatgctactgcagagcccgcttgcccagcagcgtcaccggcgcctgccctgcctcttcgcccagcctttgattccccctcctttgtcggatagtgtctgcggcggggaggcggtgacactagtccgagtggggcgtggagaccgaccagcacgaagggcggagttccggcccgcacccctccgccgcctgccgcttggtacgtcccgcttccccgccctgcggctcgcggagcctggctgagcagcaggaggggcgggcgccggggggcggggcggtcacgccgcccgtcccgtgcccgcggtagtcacgtgtccgcgggtgtcacgtgctcgcgtcgcagccaatcgcggggcgacgctgtcctgggagcgaggaggctgtggtgagagacggaccgagaccggagatgttttcaagcccggctccggcggctttacaggcggctgcagcggcgacgaagacaacgacagcgacggctacgccgaagcactcgttccgggggtgaagcctcctgcgccggccttgcctcgggtccgtacgggtgaggggggcgtggcgacaggaaaggaggaaggaggggcgcggtttcgagcttgtccccggcgccagggaggagatcccctcagttctgcgctgctcccgttccccctccccagagcaaggtaggggacgcgccctgcccgccccccccggtcccgacgcgccgcccgcccagcctggcccgagccgtagctcgcctgacagtgacaggccgttagtgccccccggcgcgggtccgccggggccccgcccgccgccgcccctcccggcgtcgcgaggagccgcggcgcaggtgggagccgccaactgggcgggggcgctgcgcggggcggggcgggggccgggcggagggccgcgagctggcctcgtcgcgggcgcccctcaccgcggctggcggggctgggctgccgccgcctcccggaacatggcggggccggaggagcgtgtgcgtgcgagtgtgagtgtgcgcggccgagagggcgccgctggcgtgcggcggtcggacccgcgggggcgggggcgcgcccggcccgccgcgcgttcccgccgccagccgccgagcgtgcgccgacgccggggagtctgccgcggccgctcgggccgggagcgtcggaggtacccgggtcctgggagaggtggatgaaatcaagaaggggaaattgctgctttagtagtgtccggggaaagagcagccactctacagttctgtcttaaatgccagtgtaaaataaccttgccgcattggacaggcagttcccgtcatcgtttttcaagtacccacttgtgatgcttcaagacccctggagcacgtcaggttcttagatctcgttttgaggagtgatgtggagtgacgcatccttacagatcccaaagcgttgaataaacggttgtacaaagaggtatgcgaagcttagctgacagctgttttagtaataacagtaagacgctgtctgggataggaagttactgttgcactcgttgaaaccttaggaaacatttaaagcagtgtagtcaccgggattgtaatttccactggacacccgtggttaaactgcgaactaaggtgaagtgtgttgcagatccagtgctgtgtatgtaatggttcggaattacctctaatcctaaagttgaaatgagcctgcatctgcagtcatgtatttcgttttcattttagaatggtttatgtaaattataaagaaaggctagtgaaatagctattttatcgtaaattaactgtgtattaaaaacatatgcacagccgggcgcggtggctcatgcctataatcccagcactttgggaggccgacgtgggtagatcacctgaggtcaggagttcgagaccagcctgaccaatatagtgaaacccccgtctctactaaatatacaaaattagccaggcgtggtggcgcatgtctgtaatcccagctacttgggaagccgaggcaggggaatcgcttgaacccgggcggcagaggttgcagtgagccgagatcgtgccactgcactccagcctgggccacaagagcgaaactccgtcgcaaaaacataccaaaacaaacaaacaaacaaacaaaaaaacatatgctcaagtaggccgttaaaaatcttgggcactgatctgagtttctttaatcgttatacaaagcctttcctggagattagctcagaactggcagaacatatgctctattggtgccaagtggcttaaaagcaaaatgaggatagtgtccaccgtgtaagatgaagt

SEQ ID NO: 1887412 - DNA, 4001 bp, Homo sapiens
aggaggcagaggttgtggtgagccaaaattgcgccactgcactccagcctggatggcagagtgagactctatctcaaaaaaaaaaaaaaaaaaaaaaaaaaaagtggttgtgcaatattgtaaatgtattaaatgccctgaattttacactaagtggttaattttatgttatgtaaattttaccccaatttttaaaagcaaaaatgagaattttcatgaggattaaatgagatactatttcaacgtgcttaccacagtgcctgacatttctcaaacaattaagaaattttacctgttaatagttcatataaataaacataactttatgaaacatcatgccattttctgaatttttcccatttcactatagtgagaagtcggaacttcatcaagcacctgtaccactctgtgggccagaatttgagaagcactgaaataaacaattttgatgaatacaatcaatgtttaaaaggcctgtgttatagagccatcctaactcatgtaataaacggaagatacagtggagagtctcctgtgacaacagtactgtctagaaatggacaaaggctcagatgaataaatgtgggtcattccgcttttctcattagagtgagaatggtaacacatatgcatacacatatcccaaaacaaacaccacaagccctacagcactgaaaacgtagttcaaccttattacctgatcaggaaaaatgtatcaactccaagatagaagggaccactccaagagtaaacacacagtgggtttctaagcactctgctgttccattcaagcacattatctgtaacaaacattaaaaagcagtgtctttttgtttcatagaagaaaatcatgtgatttctcttttcagaaaaagcaagaggaacaccttcgactttcagttgtgctgggcaggctttaagaatcactataggccaggcacagtggctcacgcctgtaatcccagcactttgggaggccaaggcaggcagatcatgaggtcaggagttcaagaccaacctggccaacatagtgaatccccgtctctactaaaaacacaaaaaattagccagccatggtggtgggcacccataatcccagctacttgggaggctgaggcaggagaatcacttgaacgcaggaggtggaggttgcagtgagccgagatcatgccattgtactccagcctgggggtgacagagtgagattctgtctcaagaaaaaaaaaaaaaaaaaagaagaagaatcaatgtaattcatgtcgaaggagaagttagactgggaataaaaggcagtgactgaggtccctactggtcgttcaggagctttgagctcctttgtgcactcacggtggccacagcccccctggactgtagcaccacctattcatgggctggtgcagaccacccgggaggcttcttcaatctgccctgggctgtgtttactccctatttagagagtaccactattattgataggagcgcttcaggagggtagcagcagggagaaggtggagaaacactgatttgatattagtggaccatgtttatgcttgtctgcttttcaaggaaaaataaatgttaggtcctggcttcactaaccatgatgagagagaattcggctctttggataacgaaaatacaatacccaggtatcactatatacctggcagccaggtacctgatttatacctagagggagtgaaaggagccactagacactggcctggaaagcttactgatgggaggttacacacagtgtgtctaaaacagaaggaagtctgctcgtgggaaggctgccagtctcccatcctttggccaacgtgatcccgccataccaaagaatgtctcttccctgactgctcctagagtaaaggctcatcaactctccgcacccaaagacagccatgcagtcatctgactggtgtgtcccgagatgatccaaagaagactcaagacacgaatgccattcagtgcagagcaggtgccacctggtgcctttgtagtccagatggctggcacattcttctgccaagaaaagcactccagagcatgagccacggctcctagaaaccctgggcaagagcaaagatgttactgtccaccttgactgccagggtatccacacaccaccccgcaacaagaaccaaagcacaatccacagatcttggcagttactcggaggctctcttgctctgaccctgggcttctcagctcagcctccgtggttccatcttcatctatctgtggactttcatacttggtatccctcccttttgaatcttgactttccctaacagacttgacctgagtttggtgccccacatgctttgcacagaatacgctgcccaagctcaggccccagagatgccaacccctgaccccagtcctgcttgacgaagagttgagggaaggagaacgcagacatcagtaagaatcgatgtgatacacaaagcaagactttcacttgaaagaacacccctgcaatcctgaggactagttacttatgaataatgagccaggtgcggtggctcacgtctgtaatcccagcactttgggaggccgaggcaggtggatcacttgaggtcaggagtttgagaccagcctgaccaacatgaaaccccatctctactaaaaatacagttagccgggcatggtggtgcatgcctgtagtcccagctactccggaagctgaggcaggagaatcacttgaacccaggaggtggaggttgcagtgagctgagactgcaccactgcattctagcctgggtgacagagtgagactccgtctcaaaaataataataataataataataataataataataataatgaataacaaccctaacgtaggtcaaagtataggcatgaaaacagaaggaccagtggcacaggagcttagggcacaggccatatagccagatgctcctggctctgattctgtcatttatcagctctgtgacccccggcaagtgaattaacctctctgtgtctaagtttccacatctgcaaaataatcaaagtagattttaaaggattatcatgaagaacaaatgagataatgcttataaatcacattaaatagaggcaacctagtatgtactcgtgagaacacagctactactaccactgttttaagccctatcactttaagaatggttaataccatcttcttaattcattccctttcttaaagaatttaatgtttacctatctgagaacgaagcaagtgtctggaattgcaaaacaggggcctccaagctcaagccggctctgagagactcacatttcctcctggacagagccccgtgccttcaacattgtgggcacaaagaagtctttgcagaattaaaacttattcacaaatgaggtctggctcataaccaaactctggaaatctaaggcaatttcttaaattgaagaatttaactacctaacattttgaagttccagccgtgaatacaagtttttccatttaagtcactttgtgattgcgtctctgtctgaagtcaccacacccacccttttcattcacaggggttttcactcaggaattggccacaactacagcacaaccagcagcctcctagagctgattcacctgctcctcctcagtttcccgagcagtggagagatacaggacccgggctctgccaggtttggccaacttctttagcctccctgagcctcagtttcctcgcttttagaatgggtataatttttggtagggttgtaatggggattctagaacatcaaatatctggtttgatgcctcatgtggcaagctagtgctcaatatgttttgttactatgttttttccatctaaattctgctagtgaatgaacttacccatcagtggtttataaaggtttctgaaaataactggtctagagggaggacaacctccctgaggctcatttagctcatttgtaaatggaaagtgttataaacaataagaacgtggggaggattggctgaaatgatgcatgcaatcaccggttc

SEQ ID NO: 1887413 - DNA, 4001 bp, Homo sapiens
gtgatcaacaaccaatcagatgacccactttttttgaactttgatacttgcacaatctagcagcacctaatttcaacaatgacagcaacaactttatatacaataaattgggtaaatagggttaatccctttttccaactggtagcactgttaaatgggacaccacttatatttttagaggactaaatgcacattcattttagaaaatttttaaaatataaaaacacaacaaaatcactcctagtctcaccacccacataaatacttcatacttgggtcctcctggcaccccattcattccaaatattaattaaaagcaaatcagtactcacttctgggtgtaagcactctagaaatatattttgggctcttagttgacctgtttaccgagatttctgggcacaatcattcttttgcacacatacactgtcctgtttacctatgatttgaaaacgccttatgaccataatatgtgtaacaataaatcattttggaggtctgtgtttgaatggaccttaaaagattgcatggtttgataccgtctgctgaccacacccagggagcattaatttctcaccatgaatgagactggtttacagttgaaaacagaaatgactagagtgttccaatgggagggagagggcaataaggtctgagtgacaagcaagcgtggatatgaaatttaatatccagaagaaaagcacagaataaaaagtcccaggcacaaggcaacaagcctttccaggtaagacgagacctgtgctgatgggacctcagaagcgcttaaagaacgagactgacactgcgcctggagacaaacggagctggtgcagcgggagcagaagtctcagctctcacctggcacctcaggagaggcacagcagccatcacggggtcccggcaaccctgagccaggaggggctggctcttctgtcctctgtcctgggggcccagaggccttgagctgggggagggagaggttcgcgctgccatggcttggatgggcttagagatgtaaacttggagtgagtctgaaataatgtacttgtgaacgcaggcatggctgaaggccgcgtgctccagaaccactggcgtcctcttacccgaaattcagtccccaccctttccgacctctttcagcagcagttccccattccggagccaccgcgcgattctgaaatcacttctgcagcagctttcaaactggatctcgtaattcatttgggcttcaagactgcatctactttgaaatgatctcattttttaactctccttacctttctttaattttctacccttcccagattgaagaacattgctggagaatgtgaaagtcaaatacgagttgaatcactgcctggtttctgtcacctgtggaaatcacagccacgtttcacccccggagtgagggcagcgcccgcgcagctcagcttctcccatctgggatcgctggggagttctgtggggagcaccgagtctcctcaggggcatcccctttcctttctaggagagttgttatcacacggttaaacattttatagcatgttcgtctccgtcctgaggtagcagatgctaggaacggagtccggatccccagcctaatctgcctctcccagcaatggcctcgcgtcctgagaaaagccctttaccctgaggccacaagtactcaccctgaggagacgcggcctgatgcagtccagtacaggactcggaacgatgcaaggcaggtgagcccctaaactggagctcagcctcggagggctcatggctttgcccagatttcttccccgctgcccgtgggcggcagcttctagtcccgctgaagcacaggagcagccacagtgacccgcaaggcagtgcgcccagggcagcagctgaggacaggacagggctgcactcacatttatagccactgttaattatatgcaaaccgacagattatgcagagatttctggaataagggtagtaactttcggccatcagggtgttgccatggaaagggggcggcaacttccgggtgttgccatggcaatggtaaactgacagggcaagagcgggcgggtcttactgaaagctgcttcccccgtcccgcctctacctcaatagcggaatcaaaagatgagcaccccctcaagtgccaaacgtgcaagatacataatcttagaaacaatattctgttgaaacatcaaaagcatcacgcatttctcactgaaactcgccttgttgaaagaagcctcatccgccgtccagccacagcgcagtcctggccgctctcctccctcggctgcctcgtcctagggaggcagagatgcgttcggaggcggcggcccctgcccagggcggacgtccagggggcccgggccgagctgcggccgtgagctcgggggtggccaaggccgcgtggctgctggctgcgctgccattgtagacgtttccagcacgctttaaaacgcacgcacacagcgcagggctccactcttcctgtcgggcttcacaaatgacacgaacgaaacacaaaacccaccaggtttatcgagttgaattaatgattacttagcaacttataccaactaagaaacaagccttctataggataccgttttgctattgaaattatcaagttggccaggcacagtgcctcacacgcgtgtagtcccagcactttgaaaggccgagcccggagaagcgcttgagccccagaggcggaggctacggtgagccgagatcacacacaccactgcactccagcctgggcgacagagtgagaccctgtctcaagaaaaaaatttaatgaaattatcaagttaataaccaatgctatcctttgcagagttcttaaaaactgttaaagattctattcataaatgcacaaacttagttaatcctatttattacaaatcaaagctttagacaggagtcttgaagactttctaactagaattagaattgatgagttttgggggatgttagataaggtatgtttggtttatatctctaatactgctgtaatttaaacactaagatgtagcaatgaagttgccaagatacttgtatttttaattggtctattcaaatatccagatgccagctgaattcacagcagaaaaaaagctatttgatttactatattttcattttgggttatgattgtgtccattagcgcctggcaagtaaatattagaatttaaatatctagggcagttcaggcttttggtcaatagcaatgtaacaccaactcataggagctgtagagaaaatggacaaaatcaacagaaagggcttggaagcaatctaaacagactcaagccagccatacccccaagagcccacagtgatgacagattaatccacctgaactcttctggtccagcgttaatgactgatttcaacaaattttagaaacctatatatatgaaagtagtaatgaagatcacattttacccaaaatgatgtagagtcagagtaacatgctttaatctcaccctttattcttaggttttagatttgtggtactcccctaatctcgtaaacgaaagggtactgcacacctctgctaaggccactgaaacaaagcagacacacagggtcaacttgaaagattcaaatgaactcaatacaaataaaatcataagggacataaccagctcagcagttacttcactgtgttcaacagctgaagcacctcatcgtgtaattttatcagactgcaagttgccctttatatttcattagcatctttcaactactggaaatgttatctaaagtcaatataaactttaataggagataaatgtatgtggtaatataaccagggaaatttggtccaagatactttactgctttaggaagaaaggtctgcagtattagccctatggtaaaatatttatactattgctcatggagtaggtatactctataatcttaaattatatgcacaaacattttaacagtgagaaaacactgttagaagcatataacattgccaaatgtaggtggcagc

SEQ ID NO: 1887414 - DNA, 4001 bp, Homo sapiens
tcctcttggatctttgaactttgcttctgcttaaaatctctcaggatggtttctgtaactctttttggggagcgtttgttccctctgggtatgaggctcatccacaggttcttaaatattgtaaaaccacccatgtcccacaggtatagctgggaagactgttgggtgattctaagaaaggaaaagcaggcgaggagaagaggttaggatattttttatgggaaaaagccataaccaatgtctagatggttgaatatgcaataagctgcctgctattgcccttggttctcagcggatattcatagcacagaatattccaggaaaagtagtagtttggtttcacccttgctctgcttggcagtccagcagtgcatgggtaggggaggcctccccagcagaagacactttcagatgtgacctttcctcactacttacattgagaaggaagagggcagagcagagtaggctggagatctaagagcacagtgctcggaggagagatggtgggagagagaacgcagccccagtcactctcctttatgacttccggagtctgctagtgccacagttctcaagtgtgctttggggggtggaggggggtgctctggaggtcccttatgacttccggagctcactagtgccacagttcacttagggaccctcttagggtatgtgtgaggtcatcccttttccaactgcgtagtcatgtgaagctgaattttctttagctacaccactaaaacaacatattgcaacaaagcgaatgcagaagtggatatgagaacctagctgccttttcttaacataggtgttaaagagacttgcaaaaatgcaaagtaatgttactcttctcataaatttttaattttggaaaatatagtttttaaatggaataaaaatgctgtctatgtgttatgtaccttagcatgtaatgggtttatagttcttttaaaataaatgtctacatgaatatttaaagttttcttacttttaatttctttctctctctccctttccttccttccttccttccttctttccttccttccttctttccttccttcctccctcccttcctccctctctctctctttctctctttctttctttcttgacagagtcttgctctgtcaagcccaggctgcagtgcagtggcacaatctcagctcactgcaacttcttccttccgggttcaagcaattctcctgtctcagcctcctgagaaagtgggattacagccgccagccaccatgcttggctaatttttgtatttttagtagagacagggtttcaccatgttggccaggctgatctcaaactcctgacctcaagttatccgcctgcctcggcttcccaaagtgctggaattacaggtgtgaaccattttaatttctaatatcatcactaataatctacataaataaaagctgtttggggttctcgataatcgctgagtgaagaggctctgagactagagtttgagaacatctgcctaaggaagagcttacgaattccaaaaccatggcaggaatggcgatccttagagaagatggattcatttcagggacatgttaactgtaaaaagatcaactcttcctctctgaaccaacagcctgtgtctactcccaagtgcaagtgtcctgagagaggtatggctgcatgcctgccagggagtttccttcctttacttcatagcactgtttgttcacaacattttcttccttattgacttgaacacaaggacaccacctacctcatgtcttccttcttcccgtggatgtccagatgaagcactccacactcctttgagagagataaacaaggaagatgtgtgcttagtccagaggtttcatcaagaaatgaaagcagagacaataaagttttggtcttggttctcctgttggcttcagaatgaacataattaagatgattaacgatcaactcaggcctgaaaaatgagtaactgtaggtcatgttgccatgaagttacgaagaaaaagaactcttcagaggtgtatacatgttcctggccactctgcttcttagggtggagttagaggactccccgccctccttgcctgcgaaggaggaggcgtggccacacagataaagctggtctgaaaagagcatggctttatttgttctggggccaggtgagcttgcaaatccacaaactcaggatctggctgacttaaccacccagcacaggtgtctctggaaaaagttggccaccacccctgggtagaccctttcaccatttagcagaaagggaggtgctgagtcaccatcaccaaattattttccctgaatttcccaattagatactttagtctttctttactggcaaggagtgagaatgtgcagacaggcaaagcgtgttaatgctggtgcagccccctctgcttagaaggaggttcaggaatcaggtacaagtattattgccaagcacatgccttcatttgttgaagggtcactgagtgcctatctgtggcactgaccgagttacggcttctgaaagaaactgtcttgagcagggagcttcaactgggcactggaggagctgggaggcaaaggaccagcctgttcattggctagagaaatccaaggctgatatcagagatcacatgataaacaccaggcaagagggctcagagatgggcatcaaggtcagccctggagccatgagctctttatatatgtgaggaactagaaaggggtggtgttccagacagttgtcttgctccctggcttccacacttgcaacctacctctgggagccagcagggtgttttgtacacagatgagtaaggtttgctaacaggaccaaggatagagtgatcagagttgtgtttcacaaagataatttgttaggtacctactacacgctagattcaggtactaatccaatattgtacctgggtcgctaagactccaacttcccaagacccctccctttctgggggcagagttagggcatttggtaatcttcctcagcatccatggtagcttggctgctgcccttgcctttggtcgcagctgtggccgaccctaagcttctttgatatgggtgttctgctctgttcttcctgtacttctgtttcttgtgtggttgcctttcctcatggccagtcctcttttaagcaccactattctaggtccagcattctcttttattttttattgagatagagtctggctctgacactcaggctggagtgcagtggtgtgatcttggctcactgcaacctccacctcctgggttcaagcgattctcctgccttagcctcctgagtagctgggattagaggtgcctaccaccatgcccagctaaattttgtattttttagtagagatggggttttaccatgttggtcaggctggtctcaaactcctgacctcaggtgatccacctgcctcagcctcccaaaatgctgggattacaggagtgagccaccacgccaggccatggtctagcattctcaagctggagcgtgtccctcctcattccaactaattgcaactcttgggtgatcaaagagtcttgcttattgtatttggtagtggtttctgccgagacacttagaacggattctctagagtcagagcagctgggtctgtaaagggcagttgttgatggcacagcaacttgctggtggaacagcaagaattcttgaattcttcactcactctgaaccagggtctgaaggtggatcatgtgtagagtgatcacataatttgtggtccaagctgagataattttgagaatgaatggaagtgctatgaataatgacaccagtgcaacaggggtccctgagattgccgttctgttcttcctcacatgtgcctgatctttttaggggtagtgttcattgattagctgacagtttcttcttcctttttctttttttggtttaaagacagagtctcactctgtcacctaggctggattgcagtggcacaatcctagttcactgcagccttgaattcctgggctcaagcaa

SEQ ID NO: 1887415 - DNA, 4001 bp, Homo sapiens; identical to SEQ ID NO: 1245260

SEQ ID NO: 1887416 - DNA, 4001 bp, Homo sapiens
aaaacttactgaggcctagctaccaaaggcagaattagttgttccatatcctaggctagcatttggtacatagtccctattttatcatgattactgagaactgttaagtctaactcaactgtgtagatcaagacagttttgtcttagtgcatccagcggctgaagcacagttggcacgctgtagattttgtgttgttgcggtgagaccaccagttagaataaagagctgatttgggccgggtttggtggctcacacctgtaatcctggtgctttgggagaccaaggccagaggattgcttgaggccaggagttcaagacccacctgggcaacacagtagaaccacgtccctaaaaaattttaaaaataaattggccaggtggagtggcctgtgcctttagttccagttacttgggaggctgagatgggaggatctcttgaggccaggagttcgaggttacagtgagtcatgattgtgccactgcactccagcctgggctacgtaaggcaagactggctctaaaaaaaatttgctttttaatgaaaaaaaaaaaaagagctgatttggctctttcttcccccatttacccagaattgctaaagtggtagatactgacaaggtatcttagcagggcagaagtctcatggtttgagtcagttgggaccaattgctgttgatgtgaatttctaactcctttgtcattctgagtgtgtcagctgaattcacataagggcattcaccaagggaggaagagaaaggcctttagttttaattattttatagttgagaaaattagacacatactcggggttacggggtctattctgatttttattactcctagaaatttcatacagattataatctgtctatcttgttagtaatatctgactgaattttttggaatagctatgtgtagaacccattttattacacagatttaggaatctcagaggatctgattccttagtctcttaaatcttcagtggcattaaatgccaacacattgtccttggtcaagactacaacgtagaaaggaacaagctaattaactacttagaattccctctcctaagagaccacatcgccaaagtggcaccatgacacagcttggtgttttgttggtcactttaggagaacaccattttggaggccttgggtggagctggagatagagccatggaggtagaatcgtgtcggaaaacctgggtttagccccattttgtacttgggcgtttgagctaatcgcttaagtcacgtaaaacaacaagactaataaagtctgggatacagactttaacacctcaagtgctgccaaaagtatttagaagacaaagcgaatcataggcacccttcaccgagcacctcctagacatcaagaaccatgctaggttccctacattcttcatttaatgccaataaccccacgaggcagttatcaccttcattctacaaatgggccccactcctaccaattaactggctgaatcaggatctgaccccgggcctgccaacgctcccgctggtggattgcccgccttgtcagctcgagttggcaggacgtgggagtaaaaacccggcgccccagccttcaccgtgctgcacgaggaagctggctaggcaggcatgactttgtcagtcaaccatcccgcagccgggccctgggctttgttagcagccacttggcgagggccccgggcgggtggggaggcggcgcttcctccaagaggaggtgggaccccggccccgacgacctcggagccgcccccggccccggatcgccgacgacgtacgtgcaggcctggggatggggcgctggctgcgagcggcgcgcccgccgagatggctgcggctggcagggcggtgggcgaggccggtgacccaataaagcggccgggccgcgggaggccccgcccggccgggttccggcactcgccgcagggtcccggccggcggcaggttgcgcgcccccgtccgcagcgctcggcgtgagggcggctcgggaggagggtgtgagcgcgcgtcgccgggccgggacccggcaagcagcgggaaaggcgggaggcgggagcgccggtcgcccgggagccgcgcggaggggcaggcggggcggggcggggcgcggccgggggcccgggcggccgggagccgcgccgcccgcggcaggcccgggccctcggcccgccccgcgcgcgcgcccccgccagcccggccctcctcctccccgccgcccctcccgcgcgcgtccaccggctccccggctcgcgccgctccatgtagccccggctccccgggcggccgcggaggagggggcgaccacaagatggcgggtacgtggccccctgttctccgggcggcggcggctcctcgagcccacccgccctccgccgcagccctgagtggctgccgggccggggccggcgtggggtcccggcgcgggaaggcgcccccggggcgggggggaggcgggcggggggggggcgtcgcgccgggccccggggcgctgaccgggcctttcttctctcccctcggcgcagacctctcgctgcttcaggaggacctgcaggaggacgcagacggatgtgagtggcccggcctcgcggtggcctggcagtccgcggggagcggccggggagggcgggcggcggcgaggcctgggccgggccctggctggctgaggggacggtgggcgagggcggccccaggcgggctggggtggcgatcgggggggaaaatctcgcgtccgtgaggaaacggcgcgcccaggttccgctgggggagggagacgcccggagtaacgcccaagttcgctttccgcccttcgctctcttctcccggcgcccccgaatcgcctgcgggctcagcagtggcgcggctgttttggaaggagaagcggtggggcaggatttgaagtggggtttgggtgtgtttctgcccctggtgtccccttcccccgtcactctaggaaggaagaggctcgcgcgggaggtgtgtttccttagagtcgctcttccaggagcgcccgggggtcagcctgggccccggctagccgtctgggctccccgacccggttttggattgtttgaggatgacatacctgtcattttactttggctggtagcagttttcagatgctcccgatttgattagtggattacgagaaggttagaaggtgtggcctccgcaggaattactaggtttggagagcatatttctttaatgcggatgttcagaaatcacccagccctccttcagtgttaacagtgcagctttcctttgaggtactgaagtttttaaagagttgacgcttttatttttaaaaagacaaagtttctgacatttcctgatggcgacggaattgatatttagaaaggaatttttcgtcttatatgtacttttctaagcctcagaaaataatttgggtcacgatagaaaagacaaaagagttaagcaggtttgtattgaaagaagtgacaaattgcagttaacttaaaatagtttctattcttgctaatcttccaaaatagcgacccatcaaaaaatcaataggttttgagatgcattttaaaaatgcagagtgtgcaaaatatataagcgaagatcatgggatacataagggaccaagaaattgttctgagttgagatgataaccatagtaggattgtggtctgtttagtggaaagcctaccggatgctgagattgactgtctagtacctgtataagtaatttcagagatggctgcagtttgaaattactcttttaaatactctgtagttaatccttagcattgtctaatgtggttcccttactcagagtaaacttaatttttagattcctggttgttttgagtaaagtaagggggatttactatttagatggattatctgaaacgagtaatttatctttaaagtaaatgaaccacatccaaacttttgctaagtctgtgtttttagtgaggtggctcaaaacagctctcttaaagggagcagtactcatgtag

SEQ ID NO: 1887417 - DNA, 4001 bp, Homo sapiens
gaaaatgacttgggacactccccctatattttacacatttcagtggcagaacaggataacaattcagacttcctgtgtgtctgaccacggacaacacacagctctgccatccacgagctgcattgtaagtgaagctgggttaaaggtatgtagaataatgattgctattatttgtttaaatattatttcttagaagaaggggacagagtgcagtttgtaaacactggtttaaaaactcctttcttttagaaaggagagaaagtgaaatgtaaaaaacacatatttgtgctgaaccatgaatgataccgtcactgaaatatctaaaaaccatattgcttaaaggcacttcttgcaatgtgtaattcagctaagatgataatcaaatgcatagctcttgaatacagaaaaatgatacagatcctcctcctttgctgcccttcccacagaatactgagataaaacttactgaggcctagctaccaaaggcagaattagttgttccatatcctaggctagcatttggtacatagtccctattttatcatgattactgagaactgttaagtctaactcaactgtgtagatcaagacagttttgtcttagtgcatccagcggctgaagcacagttggcacgctgtagattttgtgttgttgcggtgagaccaccagttagaataaagagctgatttgggccgggtttggtggctcacacctgtaatcctggtgctttgggagaccaaggccagaggattgcttgaggccaggagttcaagacccacctgggcaacacagtagaaccacgtccctaaaaaattttaaaaataaattggccaggtggagtggcctgtgcctttagttccagttacttgggaggctgagatgggaggatctcttgaggccaggagttcgaggttacagtgagtcatgattgtgccactgcactccagcctgggctacgtaaggcaagactggctctaaaaaaaatttgctttttaatgaaaaaaaaaaaaagagctgatttggctctttcttcccccatttacccagaattgctaaagtggtagatactgacaaggtatcttagcagggcagaagtctcatggtttgagtcagttgggaccaattgctgttgatgtgaatttctaactcctttgtcattctgagtgtgtcagctgaattcacataagggcattcaccaagggaggaagagaaaggcctttagttttaattattttatagttgagaaaattagacacatactcggggttacggggtctattctgatttttattactcctagaaatttcatacagattataatctgtctatcttgttagtaatatctgactgaattttttggaatagctatgtgtagaacccattttattacacagatttaggaatctcagaggatctgattccttagtctcttaaatcttcagtggcattaaatgccaacacattgtccttggtcaagactacaacgtagaaaggaacaagctaattaactacttagaattccctctcctaagagaccacatcgccaaagtggcaccatgacacagcttggtgttttgttggtcactttaggagaacaccattttggaggccttgggtggagctggagatagagccatggaggtagaatcgtgtcggaaaacctgggtttagccccattttgtacttgggcgtttgagctaatcgcttaagtcacgtaaaacaacaagactaataaagtctgggatacagactttaacacctcaagtgctgccaaaagtatttagaagacaaagcgaatcataggcacccttcaccgagcacctcctagacatcaagaaccatgctaggttccctacattcttcatttaatgccaataaccccacgaggcagttatcaccttcattctacaaatgggccccactcctaccaattaactggctgaatcaggatctgaccccgggcctgccaacgctcccgctggtggattgcccgccttgtcagctcgagttggcaggacgtgggagtaaaaacccggcgccccagccttcaccgtgctgcacgaggaagctggctaggcaggcatgactttgtcagtcaaccatcccgcagccgggccctgggctttgttagcagccacttggcgagggccccgggcgggtggggaggcggcgcttcctccaagaggaggtgggaccccggccccgacgacctcggagccgcccccggccccggatcgccgacgacgtacgtgcaggcctggggatggggcgctggctgcgagcggcgcgcccgccgagatggctgcggctggcagggcggtgggcgaggccggtgacccaataaagcggccgggccgcgggaggccccgcccggccgggttccggcactcgccgcagggtcccggccggcggcaggttgcgcgcccccgtccgcagcgctcggcgtgagggcggctcgggaggagggtgtgagcgcgcgtcgccgggccgggacccggcaagcagcgggaaaggcgggaggcgggagcgccggtcgcccgggagccgcgcggaggggcaggcggggcggggcggggcgcggccgggggcccgggcggccgggagccgcgccgcccgcggcaggcccgggccctcggcccgccccgcgcgcgcgcccccgccagcccggccctcctcctccccgccgcccctcccgcgcgcgtccaccggctccccggctcgcgccgctccatgtagccccggctccccgggcggccgcggaggagggggcgaccacaagatggcgggtacgtggccccctgttctccgggcggcggcggctcctcgagcccacccgccctccgccgcagccctgagtggctgccgggccggggccggcgtggggtcccggcgcgggaaggcgcccccggggcgggggggaggcgggcggggggggggcgtcgcgccgggccccggggcgctgaccgggcctttcttctctcccctcggcgcagacctctcgctgcttcaggaggacctgcaggaggacgcagacggatgtgagtggcccggcctcgcggtggcctggcagtccgcggggagcggccggggagggcgggcggcggcgaggcctgggccgggccctggctggctgaggggacggtgggcgagggcggccccaggcgggctggggtggcgatcgggggggaaaatctcgcgtccgtgaggaaacggcgcgcccaggttccgctgggggagggagacgcccggagtaacgcccaagttcgctttccgcccttcgctctcttctcccggcgcccccgaatcgcctgcgggctcagcagtggcgcggctgttttggaaggagaagcggtggggcaggatttgaagtggggtttgggtgtgtttctgcccctggtgtccccttcccccgtcactctaggaaggaagaggctcgcgcgggaggtgtgtttccttagagtcgctcttccaggagcgcccgggggtcagcctgggccccggctagccgtctgggctccccgacccggttttggattgtttgaggatgacatacctgtcattttactttggctggtagcagttttcagatgctcccgatttgattagtggattacgagaaggttagaaggtgtggcctccgcaggaattactaggtttggagagcatatttctttaatgcggatgttcagaaatcacccagccctccttcagtgttaacagtgcagctttcctttgaggtactgaagtttttaaagagttgacgcttttatttttaaaaagacaaagtttctgacatttcctgatggcgacggaattgatatttagaaaggaatttttcgtcttatatgtacttttctaagcctcagaaaataatttgggtcacgatagaaaagacaaaagagttaagcaggtttgtattgaaagaagtgacaaattgcagttaacttaaaatagtttctattcttgctaatcttccaaaatagcgacccatcaaaaaatc

SEQ ID NO: 1887418 - DNA, 4001 bp, Homo sapiens
gaattttgtttaaaaggttcatcttcacaatactgctctggttacaaccgtgacttttcctcattcccattgtgttcccgcagagaatagggtgcagggtaagtccccacaagggtatggctgggtcaaagggcgaatgtgtttgggattccagcagacaccacgggccactcccctagggaggacaccccacccgccagcaatgcagaagggcatgtcacaacaacgctgctttcaaacatgttatttgtcacctctccaatagcagaaaaataactccttttccttttctttcactgtgtccctttctggagcccttgctagttaggaccacatccagtacttgcaccctggggttcatgagctccccgtcctaactgagcctcattctgagctgccagcaaggctaccaaaaatttcaagcagaagagaggatttcagttggtgcaaacaggagcggctgctcattccacagatccagggcagggccatcccaacaggcaacagtgaactcgaagggtaaatctgacttggccaagggcatggggattagagcctaatccagtaagacagtggccacttctgtgatcgagaagcatcagggagaatgatgctaataactaagaaaatgaaagaaaagcagggattagaaactacatttgccacatgtaacttttatagtgatgatacgtccacatttcaacgtctcaccctcattctaccgggagccatactgaggacagagttcttgggagatagaataatatggtgatattttggaatggcatattctaatgaggaggaaaacatttaaatttttgagttttaattaaatgaatatgtatttaataactaatgcctaaggctgcacacctgtcagatctacttactctcctcaatatggaatcttttcttacattacaaaaacaatacctttcttgaaaaattcacactacataaaagtatataaggcagcacctgaacctcctcaacgctacaacctccataatctcatcctcagggagggttctgtgctcctcccagacctttgtgtgcaacaaaaacagccaaagcccaacaggtacatctgagctgcaccctccaggcctgtccgtttgccaacgggcgcatctgagctgggtcctccaggcctgtccatttgccaacgggtgcatctgagctgcgccctccaggcctgtccatttgccaacgggtgcatctgagctgcgccctccaggcctgtccgtttgctcttaccctttggagactgcgttgccatccccagttcacagaggaatggacccccatccacccagctttcacctccaggtagattttgacccacttaactgtagcatatttaagttgtgcaatagaagaaaacagacaagctgttatatttctcttccgagatatccagttttcttatttccagatcctatactacactaagtcaagagttcaaaaaaacaatacaagggaagtatttctcattaaaagattatgtttatataacagtctttaaatggtcgactttcagaattgcagcaagagcagaactggacacccaacaggtcttgtttgttcccacacagttaccaagcttgaaggacggccctggaagggggctgcctaccttggtgggcctcataatcggcctgcagaatcttccaggcatactggtctgcaggcccctgagcaggacctctggggcccccactccaggtcatcgtcttgccctggccgcccttctcggctcaactctccccttcctgccatgcttgccagctccaggggtggtgtcctctgtagcccccaactcctcccatctcccctttctccaggccccagcccttccactcccgggaacacctccttgtctttcactggccactttctgcatggtgtggaacctctgcagacgggcttctgcgccccacacactcaccgtgtgcagcttctcctgctccgagcccccaactgagttctggggcaggaacgtgtgtgcagccaggccccagcacctcctcacccaggcctaggcaggtgagcagccccaacaggcgtcgtgatcctcaatcacagctgcagccttcagtgcctacgcctctctgtcttctctccattttccaaagccatagaggaccatcagaaaacatccaaaaacaaaaagatcaactaaagctctctcccaacactgcccagccttacctgggtgctttcttcaaggcgaaggtcctataccggcctctcctccctccagcaccctcctctgcctgcctggagggctcttagcctcaccctaaattcacacgcaaagcttagttccctttgagccacctcgtgtcctccctgccatcagctctgcatatcttatcgccaggagctgctgagatttgtgaattaattcattaagaagctaagtccctgtagctgctccctatctctaaaaacacagcctcagctctcatgtcctttggggagcaatttgcccagactaaagcagggaagcataaacttctacaagcaatgaagaaactctccctgctgagaaagcccagcttgaggggagcttcagcaccacaggcaggacaggaatcaacagcagacccctcctcaccttgcaagagatggagcggagagaaaagaacccagacagcatgcacccctcatctcctcagcacccacggacacatccccagggcccaggaacctcctgtgtgtccaaggatggccccaccccattcactcccgtctccaggaccttcttcaccaaggctcacagctggatgctgccctggagatatggttaattttaaacacatcactgtattagaaatctcatcttgggtacaggggaaacacagaactgaatgccctgaaaagaatcaagtcctccagaaacttatttttctgctgactgaaactcaggtccgagctcatccctgtacaaggcctcaccagatacaaccagaggggcacacactgcatgggcttccacgagctcacatggcaaggccgaaggctgctggatatagcctcggaggcagagctggccctgacccgggcctccccatcttggttagcagagctctccaccctcccaccctgtgggtgccctcatcggggtcctgctgccccatgagatgcatgtggagcccacccaggaccctgcacactcactcccgggccctcctgaccactgtcctgtggagcagacaagcaggtgggaatgtcaagggccagactgtgctccctgctgcccccaactcttcttggctggccccagcccacgacctctgatctccctcactgcagcccagggacctccgaggctctggtctggccagggtgacctttgacctctggtcctgccagggtgaccctgacgcaggccctgccaggcggcaccctcggaaaagcacaggtcgcaggggagctgaggctccacctgggctctgagaccggctggtcccacagccttttttaggacaaagaacaggatgaggagggtaaaggcggatgcaggaggtgatgccacaatattgcccagatctgattagaaaacgctggaagttttaaaaagcatgcattggggagaagccactcaagttgagaactggctcacttcccgcctgtgtgtgttttcatttcaccaggggagagttttgtgagtaccagtgctcagaaagctttaagaagaagccttctggagaagcaaaactcacagtaatgccgccatcagagttctagaagattaaaccacaaggaacagggagggctcccagagcagggagcagatgtgtggcaaacgtgccttcctcattccttttttctgtgcgtgatgggtgtttatccactgtacttacctcaatgcctaacatgttaaaaattaaaattaaaaaaattgtattattaatttattaatgtattatttgtaatttatattatttataatgtgttgtttataacttactattaacttaattaaaaaatagcct

SEQ ID NO: 1887419 - DNA, 4001 bp, Homo sapiens; identical to SEQ ID NO: 1245282

SEQ ID NO: 1887420 - DNA, 4001 bp, Homo sapiens
gcagttgggcgccaggactgtcccaggagctgggtacacagcagtgaacaaaatggaaaaaaattcctaccttcctaaccttatattctattttgaggtgggaaagggcaagataataaagcataatcaataaagtatatagtgtgctataaatggtaagtgctgtggagacaaggatatttgagtaaaagggaatgttgcaatgttaaatagaggagatagggagagcatcactgacaaggtaacatttgagccaagatttcaaggagatgagcaattgaggtctgtggggaagaccactccaggcagagggaatagcagtggaaggctctccctgaggagttgccagttgccaggcatatttgaggacaggcagggaggcctgtgtggcaggggtgtagggagggaaaggggtctaacagaaggccaggtcatcctgtagtgtctttttttttttttgtttttgtttttgtttttttttaattatactttaagttttagggtacatgtgcacattgtgcaggttagttacatatgtatacatgtgccatgctggtgcgctgcacccactaacgtgtcacctagcattaggtatatctcccaatgctatccctcccccctcccccgaccccaccacagtccccagagtgtgatattccccttcctgtgtccatgtgatctcattgttcaattcccacctatgagtgagaatatgtggtgtttggttttttgttcttgcgatagtttactgagaatgatggtttccaatttcatccatgtccctacaaaggacatgagctcatcattttttatggctgcatagtattccatggtgtacatgtgccacattttcttaatccagtctatcattgttggacatttgggttggttccaagtctttgctattgtgaataatgccgcaataaacatacgtgtgcatgtgtctttatagcagcatgatttatagtcatttgggtatatacccagtattgggatgactgggtcaaatggtatttctagttctagatccctgaggaatcgccacactgacctccacaatggttgaactagtttacagtcccaccaacagtgtaaaagtgttcctatttctccacatcctctccagcacctgttgtttcctgactttttaatgattgccattctaactggtgtgagatgatatctcatagtggttttgattttcatttctctgatggccagtgatgatgagcattttttcatgtgttttttggctgcataaatgtcttcttttgagaagtgtctgttcatatccttcgcccactttttgatggggttgtttgtttttttcttgtaaatttgtttgagttcattgtagattctggatattagccctttgtcagatgagtaggttgcgaaaattttctcccatgttgtaggttgcctgttcactctgatggtagtttcttttgctgtgcagaagctctttagtttaattagatcccatttgtcaattttggcttttgttgccattgcttttggtgttttggacatgaagtccttgcccacgcctatgtcctgaatggtaatgcctaggttttcttctagggtttttatggttttaggtctaacgtttaaatctttaatccatcttgaattgatttttgtataaggtgtaaggaagggatccagtttcagctttctgcatatggctagccagttttcccagcaccatttattaaatacggaatcctttccccattgcttgtttttctcaggtttgtcaaagatcagatagttgtagatatgcggcattatttctgagggctctgttctgttccattgatctatatctctgttttggtaccagtaccatgctgttttggttactgtagccttgtagtatagtttgaagaaaaatatggaacgcttcacgaatttgcgtgtcatccttgcgcaagggccatgctaatcttctctgtatcgttccaattttagtatatgtgctgccgaagcaagcactggagcatgtatttttaaaaggaaaaacaaaaacttgcaagttatttctctgcccctttaaggaataaatattttcccatcttcttgacagttttatatcccagaaatatttattccaaagatctgaaagccatctccttaaaatgtatgtattacaaaagatagtgatcctatttctccctttctctgtggcaaggtagaaatctcacttcaatgggtgccagttagcaaagatagatggccaaatcacagagaataacactggaaaactgaggcgtacctcaaagtgacggatacaacccattgatcaaaactccctaacatcctccagtacttttccaatagcccaccctagtgagaactcaatgactgccaatggacagatggtaggagaacttcaagccacctaatatactgtaaatagagttcctggcaaagaggaggggaagttaaatatttgaaaaatataatgaccagaaattttccaaatataataaaaagtagaaacctgaagagatccaagaatttcaacaaactccaagcataagaaataggaagatcatgtaaatgtacattacaatcaaattgcttaaaccagtgatcaagaaaagtgttaacagccagagaaaaaaagacaatttgatgtgcacatcaatgatgaatctctatgcaggtatgctaagtaacagaagatagaagaaaaaagtaaacactgtaggattccatttttatacaattctagaaaatgcaaactaatctatggtgacagaaaatagatcagttgttgcctggtgggggcacaccatgtgcagacatcacaagtaacaaaagtgattagatgtcttcaggtctatggcaatatgttcctctccaaaattgagacatctttctgaggacagtggggagaatcccagatagattaagtcaaaacctgagattagatttcctgaagtggattagcatgaaggcattcatcataccttaaactgaggtacacaaaaaagaaaagactaaaaataaaaacttcagagtgtaacgatacatgcacaaagttgtttactgaaaaattgtgcacagggacaaaagatggaaaaaaggataatgtgcaccattaggaaaataattcaataaattgtggaatcatcacattgtgaaacattctgaagccattcaacgtcactagtttccttggagttttggccatgagatgttgagtaagaaaatcattcatgtgatccagtacatgaaaattacaaaacactataggtatctgtacatatttgtctttagttatatgtacacatatactatgagtatataactatatagctattcatacatattggcatatggttttgtattgagcattaggaagataaaggaatctgcagtgagtgatacaaggtaagtggaacaggaaagaaagcaaaaatgtatatgcaaaaataaagtctacaataattttttaatgtaggataataggtataaattataaaaatgatttgtgtttatatataaatatatatatttatatatttaaataataaatatatatttatatatagaaataaatatatatatttataatatataaatatatattttatatatataatatataaatatatattatatatataatatataaatatatattatatatatatttatatatttaaataataaatatatatttatatataaaaatatataaatatatttttatatattatataaaaatatataaatatatttttatatattatataaaaatatataaatatatttatatataatatataaaaatatataaatatatttatatataatatataaaaatatataaatatatttatatataatatataaaaatatatttatatattatatattatatataaatatattatttaaaagaaaatagacaaaacaaaataaagaatggatcattatatatactgtatatgtgtgtatatatatagactgtatgtgtgtgtatg

SEQ ID NO: 1887421 - DNA, 4001 bp, Homo sapiens
aacgctcctgtaggctgaacctagacaggagttacatcacctgggggatcagtgcagagatatgtgagaattcccttgtaggcagagcctagacaagtgttacatcacctaggttatcagtgcagagatatgtgagaattcccgtgtaggcagagcctagacaagtgttacatcacctaggttatcagtgtaagtattagtcataaagcctcctgtaggcagagcgtagacaagagttccctccccagggtgatcagtgcagagatgtgtcacaaagcccctgtaggcagagcgtagacaagagttccctccccagggtgatcagtgcagagatgtgtcacaaagcccctgtaggcagagcctagacaagagtttcatcacttggttgatcagttcagagatgtgtcacaatgtccatgtaggcagatctaagacaagggtccatcacctgggtgatcagtgcagagatatgtaccaatgtgccctgtaggcagtgcctagacaagagttgaatcacctcagagatcagtgcatagatatgtcacaaagccttctgtaggcaaagcccatacaaggtttacatcacctaggtgatcagtgcagtgatatgtcacaaaaatccctgtagacagagcctagacaagagttacatcacctgggtgatcagtgcagatatttgacacaatgcccccatagacagagcctagacaagacttccatcacctgggtgatcagtgcagagatatgtcacaaatccccctctaggcagagtatagagaagagtcccatcacctgggtgatcagtgcagagatatttcacaatgccccctgtaggcagagagtggacaaaagttacataacctagatgatctgtgcagagctatgtcaaaacgcccctgtaggcagagcctagatgagtgttacatcacctgggtgatcactgcagagatacgtcacaataccccctgtaggtggggcctagacaagagttacatcacctgggtgatcagtggagatatctgtcacaattcgcctttaggcgcagcttagacaagcgttacatcacatgagtgatcagtgcagagatatgtcactatgcccccataggcagatccaagacaagagtccatcacctgggtgatcagtgcagaaatatgccacaatgccaccagtagacagatatagacaagagttacatcacctgcgtgatcactgcagagatatgtcacaatgcccctgtaggcagagcctagacaagagtcccatcacctgggtgatcagtgcagagttatgtcacaatgcccccttttggcagagcctagacaagggttacatcacctgggtgatcagtgcagagatatgtcacaatgtccctgtagccatatccttgacaaaagtgacatcacctgggtgatcagtgcggagatatgtcacaatgtctccagtaggcagagcctaaacaagagttacatcacctctgtgatcagtgcagagatacgtcacaatgcccctgtaggcagagcctagacaagagttacataacccaggtgatccgtgcagagtgatgtcacaacgccctctgtaggcagagactagaaaagagttacattacctgggtgatctgtgcagagatatgtcacaatgtaccctgtaggcagagcacagagaagagttgcatcacctgggtgatcagtgcagagatatgtcacaatgtcccctgtaggcaaagcctaggcaagagttacatcacctttgtcatcagttcagggatatgtgaaaacgcccctgcaggcagagcttagacaagagttacatcacctagttgatcagtgcagagatatttcacaatacctcctgtaggcagatcctagtcaagagttgcatcacctgggtgatcagtgcagagatatttcacaacgccccctgtaggcagagggtagacaagagttacatcacctaggtgatcagtgcagagatttgtcgaaattccctgtaggcagtgcttataaaagtgttacatcacctaagtgatcagtgcagagatatgtcacaaagctcctgtaggcagagcttagatgagttacatcacctgggtgatcagagcaaaggtatgtcacaaagccccctgtaggccaaagcctagacaatagttacatcacttgggtgatcagtggcgagatctctcacaattcccctgtaggcagagcttatacaacagttacatcacctgggtgatcagtgcagatatatgtcacaatgcccccataggcagatccaagacaagagtccgtctcctgggtgatcagtgcagaaatacgtcacaatgcccccttaggcagagcctagacaaaagccccatcacctggatgattagtgcagagttatgtcacaaagtccctttaggcagatcctagacaagagtcccattacttgggtgatcagtgcagagatatgtcacaatgccactgtaggcagagcctagacaagagttacatgacctaggtgatcagtgcagagatacatcgcaatgcccctgtaggcagagccttgacaagtggtacatcacctgggtgatcattgcagggatatgtcacaaagcaccctgtaggcagatcctagagaagagttatatcacctgggtgatcagtgcagagatatgtcacaagccccctgtaggcagagcctagacaagagttatatcacctgggtgatcagtgcagtcatatgtcacaatgctgtgtagccagagcctagacaaaagttacagcacctgggagatcagtgcagagatatgtcacaatgtccccagtaggcagagaccaggcaagagttggatcacctcgggatcagtgcagagatatgtctcaatccccctgtgggcacagcctagacaagagttacatcacctcggttaacagtgcagagatatgtcaaaatgcccctgtaggcagagcctacacaagtattacatcacttaggtgatcagtgcagagatatgtcacaataccccctgtaagcagagcctagacaagagttacatcacctgggtgatcagtgcagacatatgtgacaaggcccctttaagcagagcctagacaatagttacatcacctgagtgatcagtgcagagatctgtcacaatgcccctttaggcagagcttagaccagagttacatcacctgggtgatcagtgcagaggtatgtcacattgcccccataggcaaatccaagacaagagtcagtcacctgggtgatcactgcagaaatatgtgacaatgcccccagtaggcagaacctagagaagagtcccttcacctgggtgatcagtgcagagttatgccacaatgccccctgtaggcagagcctagacaagagttacatcatctggttgatcagtaaagagatatttctcaatgcccctgcaggcagagcgtaagcaagagttacatcacctagatgatcagtgcagagatacgtcacaaggccccctataggcagagcctggacaagagttacatcacctcggtgatcaatgcagtgatatgtcactgtgccccgtaggcagagcctagtcaagcgttacatcacctgggtgatcagtgcagagatatgtcagaaagcccccatacacagagcctagacaagagtcccatcacctgggtgatcagtgcagaaatatgtcacaatgcccctataggcagatccaacacaagtgttacatcacctgggtgatcagtgcagaaatatgtctcaatgcccccataggcagatccaacacaagagttacatcacctgggtgatcagtgtagagatatgtcacaatgcccccgtagacagagcctagacaaaagtcccatcacctgggtgatcagtgcagagatatgtcacaaagcccctgtaggcagagcctagacaagagttacatcactttgttgatcagttcagagatgtgtcacaatgcccatgtaggcagagcctagacaagtgttccatcacctggg

SEQ ID NO: 1887422 - DNA, 4001 bp, Homo sapiens
caagctcatgattcttcacccccatatatttcagtatgtatttccttagaacaaaggacaatcttctacataactacaatataattatcatgatcaggaaacttaatgtcaatattaccatgtcatctataatttatatgtttctccagttgtcccaatactgtcttttagagtatttttttaacccaggttttaattaaggatctcatacaatatgtgtcacatatctagtctcctttaatgtgatactattcctattttagccattttttgtttttcaccacactgatgtttttaaagagttcaggtcagttgttctgtggaatgtacctccatgtggatttgtctcattgtttccttataattagattcaggccagatgttttcagcagaaattctacgcaagtgagattgtgttgtcgctgtagcaaggggagcgcatgacgtcagtctgtccctttattggtgatgggacaccattacttcataatttggtgaagtaatacccgcaagatttatccattgtaaaggtaccctttcctcttcatgagacttggagactatgtcaatattctctcatatatttacgtgttttaatatatgtaaacctttcactgaatggtgttagaatccactcattagtgacatttccaattagagaaaacacagtacatctataaagacctactgatggtgatctgcagtgggaagttgtgatacttaacctttcttaaatatgtagaggcaaactgaatagaaaactgtgtacaaaaatgaacactctatacatgagcattttttttttttttttttttgagacggagtcttgctctgtcacccaggctggagtgcagtggcacgatctcggctcactgcaagctccgcctcccaggttcacaccattctcctgcctcagcctccccagcagctgggactacaggcgcccgccaccacgcccagctaatttttttgtatttttagtagagatgaggtttcaccgtgttagccaggatggtctcgatctcctgacctcgtgatccgcccacctcggcctcccaaagtgctgggattacaggcgtgagccacggcgcccggcctatacatgagcatttgtgaagcttgtctaagatttgtacatttgattgcgtggatattttgccttaaaaagaactgtaaatgaataatgtgtgctgatgtgttcatgggtgtagagtactaaggtctgcattaaaaagataagatggtttgatggaagaacaggtggatagcaatatagcaaaatgttaacaattgggtcgatatgtgtccactgtacaagtcttcccacttttctgtaagtttgtaagttttcataatacaaatttggatttaaaaacaccccaacattgcaagagtgtcaccaaagtgtttgaaaagcaggattctagggggggcattcgctgacgactcagagaaaccgtccatgccacccaccacccctacgcactcaaaagaagccctcgctaggcagcccggccctccgagccctggtatcgaggggctctccgcctctcccctgccgcggccgcctcctgcttgcccggcctcagtctgttctcagaacatactccatcacctggttcccagaactcagattgcgcagtggtctcgtcatcatcggccaggactcacagtgcccgcggcagaggcctccctagacctccctcccgtccagcctcacccgctgcctactctcctcacgcccctgctccaggtcccctggccccatttcgctcgccacgttttcataatcctctcaggctccgggcaagcggcgccgcccgcaatgggacctgatcatataaggaaaatactgcgggctcatccgggggctgcaatggggacccgaaagcgccctagcctactacaatcaccgcaccccaactgccgcccacctctctgccctgcccccagtacagtacccaaaaccggtccgggtccagctcggcggcccaagcctctgcccagcggactgcgcacccgcccgccccagccaatcccgccgccgccgccgcgccccgcccacaggacgttcggtcccgcccccagctggcggccgcggccgcccgcgcgccaagttcctcagcccttggctcctgcccagtgtttagggtgttggcggagacaaaggggaagagtcatcgcctgtcggggctaggatatgatgggtgagaggtgtcaaaccaaattctctcggtttggaaacggagaaaatctaaaaatgaggatgtgaggaaagagtccgctctcaaggcgcgttgtggtctatccgagccccgtcccctgggctccctcgggctggggtgaggcgggcagcgctacgcgtggggtaggaccatcttacgctgggaccccgccaaggagccccaggaagtaggtgaaagggcaggggcgtggctctcggggcgccacccacgctcttgaaatctgggtgattgcgagcggccgctcagcgtcccccacaccacagacccgcgccgccgacgacccagcagccgccatggctctgctccgaggtgagcgcagccccctcctcctctcctcgcccctcggggtcctgccctccccaggccaggcctccgcttccggccgccgcggagagtcggggtcgtggggtgaagttcactcaacctcctcggttttggagcggacgtgataaaaacccagcccgaaaggcttgtttgggttaaggagaaaacccttacttgtaaggcgctagcgacagcgatttcggtgcaatttcctgtttagttgagaccaaagtttgcttgcatgtgaccttggaggtcattcctttcttcgcctaacagtgaccccactagttcgagtccaagtattagaaaaaatggggcggcgccataggccgcgggcgcctgctgcggggcagctgcgcacaggagcccgccgctcggcctcggtggtcagggctccccgggtgaatcgatggagaggcctgcagaaatggtagctggtgttctgctggaagacctgccctgctcccatttcccttctgttgctttagattagagcggtcactctatacctaagttctagggttatgaacttgtttaaaacaactgtgtaataaactcccttttcaaaacaagtgggcacagtcaatggaatcttactttaaggatgtacgagtcgaagaacattgaggtggaatacatatcgaggccctgagacaggaaaaagcttggcaggatctaagaaccaagcattttggtgctccagggccctgtgggctctgtaagaaggtggggttttgttccaaattcagtggaaggcaatacagggatttaaagcggggtaatgacaggatctgatttccactctgtccgaatttggggcggtctgtgtaatggcgaagagaccatttaaggatctattgtagaggtccagggagcagcaaatgatggctttgactcgtgtggggcagtgtaattggggagaaaaggggagggatgagttgagatagatttggaggtggatttgatagaaagtggattggatgtggtggagtaaatataagaaggaaatgtcgagaatgatgaaaagtgtctggtttgatgaaccgtgttcatgatgatgccactttacagagtgaggaaaattgggaaaggaatagatgtggaaagaaggattgagaattcagttttaggcagaaaactttttggtgcctgtgaagcagccaagtggagatgccagctaagcattggttagggggatctgaaagtgagaagaaccaaagtggcatgggaacaaatcaagggaaaaatccgtattctgggaccaaatgcagtgtttacagtttcctgcaacgtggatttcatttgccagtgcccttcctgactgaatttactacatttacttcataaagcagcgtggtgaattttttttagacgaggcatttacacttcatttaaaaggtgcattgtcatgagctatcttctaaaaaa

SEQ ID NO: 1887423 - DNA, 4001 bp, Homo sapiens
gctagaaagaaagagagttaggaaaagaaaaataaaagtaaagtgactctaggatcaaagggaaatgaggacctatgatgagtaaacagcaaagcaaatcggaaagaaacaattttatgagggattagaagtacagcaggctagggagaggctgtttggatagtccagtgtgcatccagtgtcttacatgcctcaccaccaccaccaccaagggcagacagggagatggggcagggattgtccctctgtcctcctaccccctgccacatccttgtgacagcctttgacagtctttttccaccaagactgcctgctatccatgtaaattcattttcctttcataacgacgttgaagaatatgggaaaatggaaccaaaaaagagggaagacggagtgggtgaggagcccacagggtaatattccctgagaatgctcctgggtttcttgcttcctatgggacccagcaggaacaatcactctttcacaactttctgagttttccctgcatccccacatacctcaccccagaaacagccaatgtgctaattgcaaggtcaggccagtgtcttacgtggcatctgggacatggtataatgcaaacagatttccatatgtggtcccttccagtagtcctcggccccccgagcacccacaccacgtgagaactcagcttctcaggagacgctgacattttaattggaagcatctgttgccttttctgttatttttggccaggtttggtttatttgtatgagccgatgtttgtgtacagacccgcctacacgtttcacaaagcctagccttgcctcctctctcatcttcttctcaagtagctgactgggatgtgtgacggggccacttgccttcaccctgtccattctgatgtggatttctctccgcagaactagggtggggaggaagggccaagctgaaaacttcagagaagcaccttcttgaaaaagatgttctgagggagggaggctcaccgcttcctgcttactgcaaagtgtctgctagcctcccagcaggagattctgcttccagcttcaaggctgcagccagctttgaggctgcagggggaccttgaaggtgtcaggtccagtcctgtacccctcccagctctgactcacacactaactgaggccccgtcctcaagtctctcaggagtcctgctcccactagcctttgagacctgcccttcactttatcctcacttagaaaacccaaccttcttctccccatcaaacccaaccacctccacagagccttcttctagttgtccagttagcctgatcacacaccagcagagccactatctgtcagtaatccagtggcaactgggtgtttgctgaattccgagctgtagtgggttgaatcgtgccccatcaaaaaaatagttctacacagaaccttggaatgtgaatttatttggaataagagttttttgcagacaagttaaggctctccaaatgatataatcctagatagggcggacccaaaaatccaataatggaagagacagaaaaagacatgagagagagaaacaaagggcatgtgaagacaggcagaaattggagtgatgccaccacaagccaaggaatgccaggagccaccagaagtcagaagtggccagaaaattttttctctagtgcctccacagggagcatggccctgccaacaccttagttgtggatttctagcttcagaactgtgaaagaatgaatttctcttatgctgaagtaccgagtttattggtaatttgtcacagcagtcctaagaaactgatattcaagccctgggctagggtaccatggtgtacaaaatcctaggaatgaaggggaactggaatctgcccagacgtaaagtgagaggacctgactttcctcccctgaggggaacctgacttaccccctcctcaaggggatatcaccactcaccagctatataccctggaggaggtcacttgagctccctgtcttcactgtcctttcctgtacattgaaggagatggacaggacaaggtctacgaatccctacagctccagtgttgtcttttttgtgtaagaaagggagattataactacacaaggtgatgacatcataaccccgggtccccactgtgagaggcacactgaaatgagcactacagaccctaggaggggagggttcaagtagagtcagggaaggtcctaggggaggtggtctctgaactcaagggcaggttgccaaagaggaggagttgggagagcattgatgaccggcagagaagtcaatgcgcagaggtcagatgagagagtgacaaggaggaaacaaggcaggctggagcagagaggaccacaggagcaccatgtcatgcttcacccagaaatcagtctttggtaagctctgccccataaccagggtctagcattgagggaagtgctttcctccatgggagagaccaggctgaccctcaggtcacacacatccacattaaataaatatggattgaacactcactgtcaccctgcagtcctgggcactaaagaatctgtggggacacagactctgtcctcagtgggcatacaatctgatggtggaggcagcctattgagcatgtaactgtgttcagggaggtaggtatcttaggcagaaaaatgcagaggagcttctgctgccgtttggggagcggacatcttcctggaagaagggacttttaagctacttgagaaatgaataaaattggccagttgacaagaatggtgagagtgtccctgtaactctccctcatgtgagtcccatcagactctctttgcttactgcaaagtaaaataaggaagcagaaacatacaacaggaataaataggaactgtgagaaaaggtaagaagaaccaactagaaaaacatggcaatctggggccatctggcaatggggcaaatatccctgaacaaacaagagcctgccaggtaccactccaatcctataatgcaagcttaaaatagattccatgtactctgcttatctcaaaggtaagaaagactggaatacttagaaacatcatcatccaacatgctcaacagaggcatctcagaactctgaaaaattgttctgcgtagatctcatgttctagctggggctgacctcctgagtcttcctgtgttgacttgtttacaggctagtcttcacttgggttcttgctgtgactcttctcttcctctattagtatttggaagagggcagggcctttgatacggtttgattgtatccccatccaaatctcatcttgaattcccatgtgttgtgggacggaacccagtgggagatcattaaatcatgagagcaggtctttcccatgctgttcttgtgatagtgaataagtctcatgagatctgatgattttaaaaaggggagtttccctacacaagctctcttctcttgtctaccgccatgtgacatgtgcctttcaccttctgccatgatcgtgaggcttccttagccatgtggaactgtaactccattaaacctctttgttatgtaaattgcccagtctcaggtatgtctttatcgtcagtgtgaaaacagactaatacagccttcatcttttctttgcttgccagcctactaatgggtgctcaactttctacaagatgtttctgcagaatggccagtgtcctttagatgggtcacccaatcttctggaatcctccattctgatgggccactggaagctgtctgacacaggcccagtccctcaactggactttatcaaagggctactaggttcaaggcatcatgcacacacaaaaatgcctactccagggaattaacaaactggtcttgcaaatgagacaaaaatatgtaaacatgtaaacagaattacaaattatcaagatattggggggtgacagatgacctttgagttgatttcatggataacaatgccagcatcccccaaaccttcagatccatctgaggcaaaatgctaggatagaggacccatggccccaaactcagggacttc

SEQ ID NO: 1887424 - DNA, 4001 bp, Homo sapiens; identical to SEQ ID NO: 1887422

SEQ ID NO: 1887425 - DNA, 4001 bp, Homo sapiens
cttcctattagaacttggcagtttcaaaacagcacccaaaaaacatactaccaaaatttgaggctttctcgatgagcttaatttcagtccaattaataagtgcctgccacaccctacattaacaggcacagatttgtttaaattaatctccccaggggcaggctaattcaagggttagtattattagaatctgtgtgaacaattgggtgcaggtgttcacattaccaacaggagaattaactcttaacccacttttagcagatagtgggtgtttggtgaactaatggaatttttaaatatggggacactaatatgtaaagcagtgacactgtaagctgaaaaataatttgtcttcctttacaataagtgactgccatcattcatcacagaaagctacagtcacaagtcaaattaactactgtatcacaattatcatattacgctacatacaccttactgactcagaatgtaacgtttcagaagaaaaacaagactggttgttaacaatcctgcaaagtaacggaacctctgtagacagttaataaacagcagacaatgctccttttggccctgaatgaaacaggtttggcacaaatctgttcaatgtgtccttcccattttacataaacaagtaaaaggcaaatcatgctgcaatgtcccagaaaaagactttcattttagagagcaattaccactatagtggcttacgacttgccttaagatgaatttgtttagaaagtttgttttaaattgatcatatcggggccgggcgcgatggctcacacctgtaatcccagcactttgggaggccaaggcgggtggatcacgaggtcaggagatcgagaccatcctggctaacacggtaaaaccctgtctctactaaaagatacaaaaaattagctgggcgtggtggtgggcacctgtagtcccagctactcgggaggctgaggcaggagaatggcgtgaacccaggaggcagggcttgtagtgagccaagatcacaccactgcactccagcctgggcaacagagcaagactccgtctcaaaaaaaaaaaaaaattattaagtttgtatttaaaaatttaatggccaggcctggtggctcacacctgtaatcccagcactggccgaggcaggtggatcacaaggtcaggagttcgacaccagcctggccaatatggtgaaaccccatctctactaaaaatacaaaaattagccgggcatggtggcaggcacctgtagtcccagctacttgggaggctgaagaatcacttgaacccgagaggcggaggatgcactgagccgagatcgcaccactgcactccagcctgggcgacagagctagactccatctcaaaaaaaataaaataaatttaacatcagaaaatttacacaacatccaagaaaatgttaagtggccacaaatccaaatgagcactacaacaatctgacttcttgaaataacttttccaactacaaggaaaaccaacaaacaaaaagctctgcaatacccaaagtcagtctgaacaaaaacatcatcccaaaaccaaacaaaccatatcccaggagaactgccacagagtaaaattcaaagtttaagatgttctactgagaatagcctagtcatctattcctcaaggagttcaatcacagatacagaataatcttgtcaaatataattgcctacaagacatcagcacatagttcacagaaggttatgcagacagcctgcttagaaagaaaacagaatgctctgttaatgaaagaatactagaaaacgaacaattgtgaacggcactaaatgaaactaatgaacttgagaaaactaatctttttttaaccacaataacctttttttttaatcagaagaaattgtcccattgaatgacagctgccactggcacagtcccagggcaaggatgccaacaaaggttttctctcagcaccagctaccaaatcctggccccacagcctgagggaggacctgtgaaagtgctcacaataactttcttaccattaaatcaaatatttaatgatgaggaaatacaaaccaagactatcacactttttcttttttttctttaaagagatggggtttcactctattgcccaggcacaatcataggtcattgcagcctcgaactcctggactcaagagattctctcgccccagccccgtaactgggaccacaggtgattactaccttcttatgtttaaaagaagttctccattttatcatatgaggtttcaagatgagggtccagatcaagtggaagactaagttctatgaaacatcacttttattttttagttgaggtgaagtgaacttactacaactactcatccatatatagcaaccatcaggaatgtgttcgtatttacatgctgcaccagcagtgatcacattcttgtgtgtgcatatgtatgtatatatgtgtatgtacatttctttaaccttttcaatctagttaaaagtatttttagttcataagcatggtatgtgtacagacacattttcccagagctacttgaagaggacaggaaatcctttataacattattacaatagctaaatgacaattgtctccaatacccatatacattccctgaaaaatgcttcagtcagtccacaaacacgtacctccaaactactgaatacaagtttatattatcttctatcaatagcatggcttattacaaaatttagtaaatgtgtattaagtccacggatgtcaattgccataggcactttcttgagcttactgggtcacacaaactgaagacatcagcagcatgaccacgggattgcaagattacactaaggtgaaaaaccttgaatcatttaaaacaggatgtctcaacctcagcacaggtgacaatttgggccagatcattctttgttgtggcagctttcctttgtattatcgaatatgtagcagcatctctggcctctacccactagatgccagtatcacaccctccccaggtgtgagaaccgaaaatgtctccagacattgacaaatgttccctggggagcaaattttggtctaggagtctaaaaacttagtacagtgtgtcagtttcaaaagagtatattctgcaataccaagaagttccaaaaaaacttcaggcattccaaatagctgctttatacaaaactttcttggatgaagtaaatgaaaccttgttactgtagatagctcattcttccacatgtgcatgcttaacacttgtgatgatgaatctgggacaggctgggacaggagccaacagtgactgggttttatagtttcgatgaattacacctccttttaacccttcagtggactaaccatccctgccaggctaaccctttcttcgcaaaccatcttccccgacgccttccacataagatgccctcctgcgggccctcaccttttgacactgcctcccaccgcactggggtcaactctcacccaagggttccgccaccttccaccaccaaaccagcctgtccctgccacatgccccccgggccccagcgctcatcctctgcccaggcccgctcttgacccctgaccccggcctgaccccgccaccccctccccgcccccagggaggtacctgaagtagtagacatcgctcttgccagcacttagcccagattttcggatcacttcctccttcttccatccgggggggagggccgggcaatccatcctcttcccgctctccgtggcccggggtcccctgggccccggccccgcgctccccgacgggaaagggaccggctcccgccggggggcgccgccgccaccgctgccgccgccgccgcagccgccgccgtcgccgccaaggccgctgccgccactcgggggacggccgcggccccggccccggccccgtccccgtccccggccacggccccggccccggccacggccacagacgccgccgccccggcccgcctgcttccaccgcccccggccacggccgccgccccgagcgccttccctgcgc

SEQ ID NO: 1887426 - DNA, 4001 bp, Homo sapiens
tacttatttacctttttcttctgggcaacctcctcttctggtttaggaacaatctgttccttttccgtaaggatcatctcaatgtggcagggagagctcatgtatgggttaatccgaccatgagctctgtaggtccggcggcgcatcttaggtgctttgttcacttggatatgctcaatgaccagagaatctacatctaaaccctggggaagaaaggaaggagaatgaaaccaggaacatccttaattagtaaaacaccacaaactatcattgctaaatatgaattcccaggcttgctccagagtcctgcctcaatgaaatcatttttaaaaggcaatccttttattctgcaaatagcatttttttaaccagttgtctgccttcacctttacatgtctaaattgccaccaaactcagtgtgctatacattttgtctatgagtggccttcccaaagatccttagacgggtggagagctgaggggtaaggaagaacccaattcgaagtcttgatgataaaatttctcagcatggcttagaaggtttggagccatacagacctaaactaattccagttctggcccagaccttcaaatgcaaaaggctaatgggtaatatacaaaatggagaaatttgtgttttgtcaacacaagtttgtcattgtttaaactttttgaaattttaaacaatttctttctgaaatgcaacatgactctccattatgaaggtaggccacaaaccacattaatcactgctaaggcaatcattttgataattaatcatactaccaaaggtgtatgtcacaaaaaggggtaaaagcccctggtaaagtacctccagtgtaaaaagacagcagaaaactagaaatactaagtgttaggcttaaagagaccacagagcacgcttctggatcttcacagaattttgccataaagggactcaaaaaaaataaaaggaaatagtttcattctgtggaaactgcaggtagaaatttaaaaaatcctaagagttaattactgaaaacaagaaaatcaaggacataaatctgaacagccaacattaattaaacaaccacccaagttgcacaggatgttagtggtttgggtaccttaagttcagcattactctctgcgtttttaagcatgtgcagcaaaaattcagcactctttttgggccaccgaccttgtgtccagccccattgcttggcctgaaagaaaatggagatgatgagtcattttccttgatttaaattaacattacagccaagatgaatttatctgatatcacggtttcttaggatatggtttatttcaccatcaatccaaggtgtcctgtcattacagcaaccagaaataggttcatcagcacagatcttagccattcttatcctatcccatcacttttccattaaaatctgtcttttcaaatggcaactaagaattctcacctgcgcacacctgccaactccaccattgtaacgtcggaatggtacacactgtttctgtaaagtgacatctttcagatacttcgtggcttttcgtatatgcatacccttgatggcctgagcagtttcacgagtgttctaagtatgaagaataaagtgttggttaactagatcaaagctttaatttttaaagtaaacgttaaattttcaattttcagcttttcaaaatgtcgagttatttctattctttgggggcaaggcaattaaaaaaacttgtgactaaaagccaggtaaacttcgttgaagctagagaaaactccaaaactccatttattcactataaaacgtttaaattccatcatcatgtaattacaattaaaatgccccatcttgatctgcacactaggttttcaaatggttttctggtactacttctcaatttcacaaacgctacatccttacaccctgatcatcaatgcctaaatataaggtggctgctcagaatttattaattttcacggtaaatccaaaggtgtcctaagaaagtcatcactgcagctaccttttttgagtggaacatgaggaactgttggatcacaactatgaatcgcataccttaaagtgaacacgaagattggaacctcttgatttgcatgctagaaaataaaacgttttggttaatttttggtatcttatgccaagccccaagtaggaaatgggtatctacctcctgtccacttacatttcgtggggttctccgggtcaagtgaatagcgaaccattttcacagatcacctagaggaaagtacagtgtaattctgtcaatacgtacttacagtaactcattcagtataaatatcagatgattcgaacagctgctcagagagtagttgttttcattattaatccaaaggtgtcctaagaaatgccatcatcgcagccatactttcccccaccaagggcttgctttcccttttatcttccagtaactacagcactgcttccacagaagtagccacacgggcctcaccaatccagtcaaccctttggaagaaaatacagcctgtttcaatccaatgctggatcttccaggcgtaaaatgactcgacgcatccgcagggcacaactcaaccgtaaccctctacacctcctccctcccgctctacagaaacccctttgctgtcagggctgcaggtagtgagtgccgtctctctcaacaccttcgggctatgacccactttaagagccctcctgtacgcaacactcttgtagtaacgtgttacgcctccacccgacttttctttcccccaaaactttttcctcgttgcggccaccactcaccactagacaccggacctccggagtccgcacggaccccaggcggcccgcaccccacggcgggccggcgcccccaccagtggaggagcccggtagtccccattcccgcccatcacgtccctctgcggacctcagaggccgactgaccccggctcccaaagtcaggccctccgccacgtcctcccgcataagaagccaccgcctccagcgaggatttagtagccctaggagttctcctcccgggggcctggaggccggcgcccccgaagccaggatggcggcgatggcaggaggattgggccctcggagcaacgcaggagaaacactcacctcaggctgcttagggaaagaggaagagcggtggattttgggagaactcatgagaacttgacttctcgcgagattcgtagccgaagaaacgagatctgaggaggcaggaaggcggaaagcgaagggagtgtagaatatgttttaagaacgtgtgaaaacgaattgcctacttagggactgtctcaaagttctcttttttgtatacagaaataaaaattcagggttttaaatgtcagtcaattaaaaacagggttgtagttctaggacaggctacgtattattagatatgaaagaaacattttatttattcgtcaacattagttaggtttgattatgtggccctgtactcctgaaagtggtttgtaaatggccaattaaaaagatgaaaggatgagacgtaattatggtaatcaggaaattctcaggatgggaatgtcatccaatcaattgtattataacctgtgtgaaaaatgcgctaactgaagggtctggttcaatatcctcgttttccccgctgcttctagatcttcatctggaggagaaaaccttttggcattttcttcccttttttccttccccaggtcatctctctggttattccctcatagtcagtgatgcacttagcttttgttagggcttctatttcatggcaccacccttctaggcagctcaaactctaggagagtagactccaggctaggctcacttgcttccttgacctcagtgtaggagacctcagccctaagtctctcccctcgactccacttccattgctgatgctggattccatggtgtttcctcggtaattccctcccctcacatgagctttcaactgcatgctaactcccagattaataccccagcgccacatctgtctcctgagctagaccc

SEQ ID NO: 1887427 - DNA, 4001 bp, Homo sapiens
tcacctttacatgtctaaattgccaccaaactcagtgtgctatacattttgtctatgagtggccttcccaaagatccttagacgggtggagagctgaggggtaaggaagaacccaattcgaagtcttgatgataaaatttctcagcatggcttagaaggtttggagccatacagacctaaactaattccagttctggcccagaccttcaaatgcaaaaggctaatgggtaatatacaaaatggagaaatttgtgttttgtcaacacaagtttgtcattgtttaaactttttgaaattttaaacaatttctttctgaaatgcaacatgactctccattatgaaggtaggccacaaaccacattaatcactgctaaggcaatcattttgataattaatcatactaccaaaggtgtatgtcacaaaaaggggtaaaagcccctggtaaagtacctccagtgtaaaaagacagcagaaaactagaaatactaagtgttaggcttaaagagaccacagagcacgcttctggatcttcacagaattttgccataaagggactcaaaaaaaataaaaggaaatagtttcattctgtggaaactgcaggtagaaatttaaaaaatcctaagagttaattactgaaaacaagaaaatcaaggacataaatctgaacagccaacattaattaaacaaccacccaagttgcacaggatgttagtggtttgggtaccttaagttcagcattactctctgcgtttttaagcatgtgcagcaaaaattcagcactctttttgggccaccgaccttgtgtccagccccattgcttggcctgaaagaaaatggagatgatgagtcattttccttgatttaaattaacattacagccaagatgaatttatctgatatcacggtttcttaggatatggtttatttcaccatcaatccaaggtgtcctgtcattacagcaaccagaaataggttcatcagcacagatcttagccattcttatcctatcccatcacttttccattaaaatctgtcttttcaaatggcaactaagaattctcacctgcgcacacctgccaactccaccattgtaacgtcggaatggtacacactgtttctgtaaagtgacatctttcagatacttcgtggcttttcgtatatgcatacccttgatggcctgagcagtttcacgagtgttctaagtatgaagaataaagtgttggttaactagatcaaagctttaatttttaaagtaaacgttaaattttcaattttcagcttttcaaaatgtcgagttatttctattctttgggggcaaggcaattaaaaaaacttgtgactaaaagccaggtaaacttcgttgaagctagagaaaactccaaaactccatttattcactataaaacgtttaaattccatcatcatgtaattacaattaaaatgccccatcttgatctgcacactaggttttcaaatggttttctggtactacttctcaatttcacaaacgctacatccttacaccctgatcatcaatgcctaaatataaggtggctgctcagaatttattaattttcacggtaaatccaaaggtgtcctaagaaagtcatcactgcagctaccttttttgagtggaacatgaggaactgttggatcacaactatgaatcgcataccttaaagtgaacacgaagattggaacctcttgatttgcatgctagaaaataaaacgttttggttaatttttggtatcttatgccaagccccaagtaggaaatgggtatctacctcctgtccacttacatttcgtggggttctccgggtcaagtgaatagcgaaccattttcacagatcacctagaggaaagtacagtgtaattctgtcaatacgtacttacagtaactcattcagtataaatatcagatgattcgaacagctgctcagagagtagttgttttcattattaatccaaaggtgtcctaagaaatgccatcatcgcagccatactttcccccaccaagggcttgctttcccttttatcttccagtaactacagcactgcttccacagaagtagccacacgggcctcaccaatccagtcaaccctttggaagaaaatacagcctgtttcaatccaatgctggatcttccaggcgtaaaatgactcgacgcatccgcagggcacaactcaaccgtaaccctctacacctcctccctcccgctctacagaaacccctttgctgtcagggctgcaggtagtgagtgccgtctctctcaacaccttcgggctatgacccactttaagagccctcctgtacgcaacactcttgtagtaacgtgttacgcctccacccgacttttctttcccccaaaactttttcctcgttgcggccaccactcaccactagacaccggacctccggagtccgcacggaccccaggcggcccgcaccccacggcgggccggcgcccccaccagtggaggagcccggtagtccccattcccgcccatcacgtccctctgcggacctcagaggccgactgaccccggctcccaaagtcaggccctccgccacgtcctcccgcataagaagccaccgcctccagcgaggatttagtagccctaggagttctcctcccgggggcctggaggccggcgcccccgaagccaggatggcggcgatggcaggaggattgggccctcggagcaacgcaggagaaacactcacctcaggctgcttagggaaagaggaagagcggtggattttgggagaactcatgagaacttgacttctcgcgagattcgtagccgaagaaacgagatctgaggaggcaggaaggcggaaagcgaagggagtgtagaatatgttttaagaacgtgtgaaaacgaattgcctacttagggactgtctcaaagttctcttttttgtatacagaaataaaaattcagggttttaaatgtcagtcaattaaaaacagggttgtagttctaggacaggctacgtattattagatatgaaagaaacattttatttattcgtcaacattagttaggtttgattatgtggccctgtactcctgaaagtggtttgtaaatggccaattaaaaagatgaaaggatgagacgtaattatggtaatcaggaaattctcaggatgggaatgtcatccaatcaattgtattataacctgtgtgaaaaatgcgctaactgaagggtctggttcaatatcctcgttttccccgctgcttctagatcttcatctggaggagaaaaccttttggcattttcttcccttttttccttccccaggtcatctctctggttattccctcatagtcagtgatgcacttagcttttgttagggcttctatttcatggcaccacccttctaggcagctcaaactctaggagagtagactccaggctaggctcacttgcttccttgacctcagtgtaggagacctcagccctaagtctctcccctcgactccacttccattgctgatgctggattccatggtgtttcctcggtaattccctcccctcacatgagctttcaactgcatgctaactcccagattaataccccagcgccacatctgtctcctgagctagaccctgatagcaaactactccctggacatcctttctgggaggtccctgaagacctgaggttatttgaaacctaacatgcccttaaacagaactctttgtcttctcctccgggttcctcttttatgttgcatggtgacaagagtaacagacaatgggccgggcgcggtggctcacgcctgtaatcccagcactttgggaggccgaggcgggcggatcacgaggtcaggagatcgagaccatcccggctaaaacggtgaaaccccgtctctactaaaaatacaaaaaattagccgggcgtagtggcgggcgcctgtagtcccagctactcgggaggctgaggcaggagaatggcgtgaacccgggaggcggagcttgcagtgagccga

SEQ ID NO: 1887428 - DNA, 4001 bp, Homo sapiens
gtcgcacagcacgcagcagtgttgcccaaggggcgcggcgaggcttccggctctgcggcctgcaggtagcgcgaaagtcctgcgcgtcccagatgcccaactaaaagcttcgctgcgggaagaaagcctgacctgactacacccagacccagaacgcaggatctcggtaaaggatgatgcctgtgcaaacggcgcggcacccacacggaaggtggcagctaggccgttgaggcaactgtggataagctattagttttgctggtttcttaaattcaagggcagagcaaactaacattaaggccaactttacaaacgtcagttgcttaaaagaagcagttacatcactttataaacgaaaagtactgacgctcgctaggatgtcagtacgtgttggcgaagttgtgtgaaaactgggaccctcataaaccgttggtggaaatgtagcgtgcagcctttttggaaatatttggaagttcctcagatgtttactcaggtaaccttatgatctagcaattccactctagtatatactcaataaatgaaaacacaaaaatctgcacacaaacgttcacagtaccatcgttcctaatagcaaaaacaaaacccctttatcaattgacgaaatgatacaggttgagcatcaacctaaaaagcttcaaaacctgagcctgagtgctgttatcatactcaaaggcaatgctcaatggagccatttccaactggggatgatcaactggtatattcacatactggattgttctgcaaagaaaaccactgcaaattccttttgggataatgaaactttttttgagacagggtcttgttctgtcttgcccacgctggggtgcagtagtgctcactgcagcctcccacctcagccccccaattagctgggactacatgcaagtgacaccacacttacttttttttaacagacagggttctgacatgttgccctggctgggcttaagcagtcagcctccacctcccaaagtgctgggactacagaaatgagccactgtgcccagccatgaaaatggtttttaatggtgcagggtaaacaatcttgtgtttctagttctaatcctaaaaaatcctcatttgatccatcttgtaaggacacttgaaatatgttcactaataaagacaaccaacattcttttccttttaattacatttattttaatgctgaatttactcccgtgccataagtttttgtttcttcagtttcttctgggatatctggggaaagaaaaatgtgttaagtttcttagagaaaaccacagtacatcttggaggacttcagcttattctggaggcaggaaacctagtcgttaaggactaagggggaaaaatacttaaatggtagaaatcaacagaacttaagttcattagatgtaaaaagaagtgtacagaatcactcaggttcttgacttaaaagaactaaatgtgatcaattactgaaaacaagcttcttagatttggggagagggcccattttgaagtggctatgtacatctaagtggggccatcagcagataatcatacgggcctgaggtactgaatataaaactaccagtttttttttttttgagacagcgtctcgctctgtcacccaggctggagtgcagtggcgcgatctcggctcactcctagttcctcctcccgggttcatgccattctcctgcctcagcctcctgagtagctgggactacagatacccgccaccacgcccagctaatttttttttgcatttttagtagagacggggtttcactgtgttagccaggatggtctcgatctcctgaccttgtgatccacccacctcagcctcccaaagtgctgggattacagaaaacttaccatttattattagtcaagaaacaaacttacaaaagccaaaataagacaggtgaaagggttgctcagaatagttttctttcatagttattccaaaggtgtcctaagatagtcatcacagcaaccacaaatctttctactatcacaaacaaaaccgagcaactacttatttacctttttcttctgggcaacctcctcttctggtttaggaacaatctgttccttttccgtaaggatcatctcaatgtggcagggagagctcatgtatgggttaatccgaccatgagctctgtaggtccggcggcgcatcttaggtgctttgttcacttggatatgctcaatgaccagagaatctacatctaaaccctggggaagaaaggaaggagaatgaaaccaggaacatccttaattagtaaaacaccacaaactatcattgctaaatatgaattcccaggcttgctccagagtcctgcctcaatgaaatcatttttaaaaggcaatccttttattctgcaaatagcatttttttaaccagttgtctgccttcacctttacatgtctaaattgccaccaaactcagtgtgctatacattttgtctatgagtggccttcccaaagatccttagacgggtggagagctgaggggtaaggaagaacccaattcgaagtcttgatgataaaatttctcagcatggcttagaaggtttggagccatacagacctaaactaattccagttctggcccagaccttcaaatgcaaaaggctaatgggtaatatacaaaatggagaaatttgtgttttgtcaacacaagtttgtcattgtttaaactttttgaaattttaaacaatttctttctgaaatgcaacatgactctccattatgaaggtaggccacaaaccacattaatcactgctaaggcaatcattttgataattaatcatactaccaaaggtgtatgtcacaaaaaggggtaaaagcccctggtaaagtacctccagtgtaaaaagacagcagaaaactagaaatactaagtgttaggcttaaagagaccacagagcacgcttctggatcttcacagaattttgccataaagggactcaaaaaaaataaaaggaaatagtttcattctgtggaaactgcaggtagaaatttaaaaaatcctaagagttaattactgaaaacaagaaaatcaaggacataaatctgaacagccaacattaattaaacaaccacccaagttgcacaggatgttagtggtttgggtaccttaagttcagcattactctctgcgtttttaagcatgtgcagcaaaaattcagcactctttttgggccaccgaccttgtgtccagccccattgcttggcctgaaagaaaatggagatgatgagtcattttccttgatttaaattaacattacagccaagatgaatttatctgatatcacggtttcttaggatatggtttatttcaccatcaatccaaggtgtcctgtcattacagcaaccagaaataggttcatcagcacagatcttagccattcttatcctatcccatcacttttccattaaaatctgtcttttcaaatggcaactaagaattctcacctgcgcacacctgccaactccaccattgtaacgtcggaatggtacacactgtttctgtaaagtgacatctttcagatacttcgtggcttttcgtatatgcatacccttgatggcctgagcagtttcacgagtgttctaagtatgaagaataaagtgttggttaactagatcaaagctttaatttttaaagtaaacgttaaattttcaattttcagcttttcaaaatgtcgagttatttctattctttgggggcaaggcaattaaaaaaacttgtgactaaaagccaggtaaacttcgttgaagctagagaaaactccaaaactccatttattcactataaaacgtttaaattccatcatcatgtaattacaattaaaatgccccatcttgatctgcacactaggttttcaaatggttttctggtactacttctcaatttcacaaacgctacatccttacaccctgatcatcaatgcctaaatataaggtggctgctcagaatttattaattttcacggtaaatccaaaggtgt

SEQ ID NO: 1887429 - DNA, 4001 bp, Homo sapiens; identical to SEQ ID NO: 1245337

SEQ ID NO: 1887430 - DNA, 4001 bp, Homo sapiens
attttgcatttttctgtaataacttattatattggtcccatgataatggatgacataatgtttaaaattcaggagttatttctaaacctgaggattgctttcatttaaaaaaaattctgttataaatgtttcagcaaagtttcttcaagttgaaattaataaactacactctaaaaacgacagcgactcaaggaaggttgtccaatttggcattagagcataatcttgattgcaacactacattaagggattttgctaaattagagaaaaataaatttgtggaaaaaacataaagatgatttatgaattgcttgtctctagaatattaggcatccagatatcaccagcccatcatcagaacagtgagacttctgtgataatggttaaattcagtcacttttgatgttttgctgacatttggtcatatgaacgccaaagctttgcaagaataattggcagtgtgagaatagaacacactttggcagctgaatttataacttttaaatatttgggcacatggcatataggcctccatttctcctcctgccccactgcgcaaatgttggtggcgggctggagtgggtggtaccgggatccgaggggctctgccttgcagtcccgcagcgcggggctccggggagctgcggggcaggtgccagagaccccgcccccgccgcccacctcctcgggaattggctgccctggtcctagggggcggccccagggtcgggatgaagtctggggtcgcgggcgcgggctgcgtggggtttcagttactcgtggagtttcagttactcgtggacaaagcgccgcgcgctagcatagcggcccgggcggagttccccttccctttccctttccttccacatccgcacgctcgttctccctccgcgccttgccctcctcccgactcctgggtccggccccttcgggggagggtggggcgctcgggtctccgggtctcgcgtgcgtgtgtccgagcagtcctgggcggtgggcgaaggcgcggcttggggacccgggaggggccggggcgcgggggctgcaggaagtggaggcggccgccgctcggggaccggcttggcggggtgagagacacccggaaacggattccgcttcggggcccgcgcgagttgggtgcttcggagggcgcgagaggagcgggcgggtgctgctgagtaatccccgcggcggcggccggacgcccacctcccacgccgcgccgcagccgggccgcggctcctccctccgcggtccttccctcctcttccctcccgtcttctcccctcccctcccctcccctcccggctccgcttggctccgggcaggtagagccgggctccgggcgcgcgcggggccgcagcagctgctcccgatctcgcctcggcccagcgcagggcctcgcacgcccatggccggctcggagcagcagcggccgcggcggcgggacgacggagactcggacgcggcagcggcggcggcggcgcccctgcaggacgcggagctggccctggccggcatcaacatgctgctcaacaacggcttcagggagtcggaccagcttttcaaacaatacaggtgacccacgcgtccccgattccccaaccctgcagcgcgcacctcgtgtccggctcacgcgcctcgacctgcggcccccgggagccccctccccctcctgtcggtcaccgattccggtcctcaggtctcctccctggcaagatcagccagagggaatgcgcctctgccacatctcctcgtccaccccctacccccggctccgttgtcctttccctcccgggacccgccgcgcgcccgccccgcgcgcccgcagtccccctctcactttctcccagcctcgccctcccacagacgtgcccggtgccggtaggctcctctctgcagggcagctggctttgggaccggatgagatttgaggcagcagcgagcctgggacccgggcttgtcgtgactctggctcgcgtgctgccccggcagcctttgtgacacggagccctccggctgcctgctcctcgcgcctcgcatggctctgcaacattgtgcaattccagacgcttttattgtttgaaaacagatacgcacaattgctttgccgtgcaggaatttaaaaatttcagctcaactctgcccactcatctctctgccttgtcttctgcaaactcagtcctcaaaatgagttcctgatgtctttcaagcaggcgttatttattaagaatttttccaacgtaaataaaggaaggaagaaaatggagggatttttaaaaagtatgagaatggtaggaaaacacgtgtgttcagttaattttttatttgtcttttaaaaaataaagcgaaagaactgaaacctggtagttttcctgtgggagtggaaggaaccttcatttctttggggacctggagtgtttgttctcgggttgaggaagcaagtttgtgatttgccgtctgattgttgacgagccttaaggacgttgattagcagctttccccaacacgtttaaggaccacatgcttcacgctatggagaccctgtagtttggttggaatgagaggaccaatgtacaactgtgaccgggagacagagtctgtaagaatgagaatgcctaaagtctcagacctcagagaatggtggtttctacccagcagagcttccaccttcttaatggcgaagcaagtatctcacaactgtgaacttttcactaaagcccttttacttttaaatcggtgattttttcccccctttggtctgaaagtaaaaacaacttcgctttacttagaacatttcatttttaaagcatacaggtctggtttcaagatggagtttcatcaaaggctgttgatgggggatttaaaaggtttacttgtcacacaatttctcttttgtagtttttaagaagccctcaggaaaaaaggtgtgaatatttcctgtaccgtgctatgattccttttttagactaccagtttgtgtcgtatgagagaaggatggagatagttgtagagtcaaatttaccctttttagttgatgatttaggtacttgcatgtttaagtacttcttgctttgaagtctcctgtgatatttattttaatggtcttttttaacccttctttagtaggcgaaaatactacctttacattgaaagcatgaaatttttgcactatctaagaaattttatgcactgttaatagaaggcagtatatgagtggttggaaaactctctcccagcaacagcagagagatgccccttcaaagatacttctctgtgggtgagtgcgttggaggtgtccagggaatatttaccttgtatagctaggtgctgtctgcttgtattttgaaatgggaactgaagataaggcagggaaaactgtagtacctcttttctgccaagcacagtgctagacacattcccttatatattctcactattctcatgacaacaaaagagtgaggtgtatcttatcatgacagttttgtaacgagggacatgagacttagtttttactgtggaccaggacacaaacactatagttctaaatcaaggactcttttcattttaccattctgcttccctcactaaatttatgataatttgtcatctgctctgagaccttattttccagcaatgttaaaaagccttttttagagatggtgggagggaaaaagacaggtagacagagatggtatcatcctatcagctttccttggctccatctgatttgtttgtggtgtggacaatcattgcgttcttcccccctcccaaaaggtgcttctgatgtatgttttggaaagcacggttgcatacaggtgtgatcatggaccagagtcctgcaacctgggttccagtcttttgccattttgtggctgctgactttggtttctcaaaatttgcttccttatctataaaataggagtaacagtaagagtacccacattatcgtgtggtggttagaatgaaaagaaataatccatggccccgactaagtgtaa

SEQ ID NO: 1887431 - DNA, 4001 bp, Homo sapiens; identical to SEQ ID NO: 1245377

SEQ ID NO: 1887432 - DNA, 4001 bp, Homo sapiens
gactttctttgggaagcagcagtagcccttttattctcccgacgtactctcaatgcactgggcacaaatcgagtaatctctgccttgggattagtgatctgtggtttggcagtgacggttgctgtggctttcttctcaacggtggctgcacttgtattatctaccttggatcgctgaatcaagccgggtggggcacttaaaatctcagggttcagcaagggagctggtgggaaaagcccaggggggcagatcccaaggggaggtaccaaagctgggtgcatcgtgccaggacaaaatatcttgcattagcaagtatatttgctcttgtatttggtatttggactaaaagccaaaatgagcttatggtgaagcctacaaactccaggaatacctggaggtgcagggggaggtatccttggtgggggttcccgaggagggggaccagggggcagacttggaggtagacgtgggggaggtagtaaaagtcggtggtcgtggaggtaaaagtcagggtaaaggccgagtcctggcattccaggtggtctcaggaggagctcctggaggtggtccagggggaaggttcataggtggcctaggaggccgtaatggtgaagcatgggaggtgcttgtacctgagaaggaggaacagactgccggggagcctgctgctgtgaagaagcagtggatgtgccatcagaatgcagttcctcttgattgtgtttttgtgattgtttttctgctttagagtcatcagaatcatcttcatcattgtcctctgaaaattcctctacttcccgtccctcctcagggatttcttgacctgccatacgaagcatcgtggcttgaagaggagtcagttccttcatggtttttttcttccttgattttccaggcatatctgcaaaccgtacactcagacctgacttctttttttcattgttgtctctcccaccatcatcatggcgcacactttctcaatctgatccgtcggtgtcactgtcatcagtactgtcatcatgcttatcttgatccacgtcctcaggatagccatcatcttcactggtgctaaaaacatcatcatcatgacctcgctgggcaatttcaggactatgtaccatgccttcatctcacctaggagggggaagatctagggcaacacccactttacggccatacatctgcacgacttgaggagggggtggaccagggggagggccaagaggttttctgccaggaggcaaatgtggaacaccacgtcccaagaagagaaggatagaaactgcctgagttggaggtccacaggctgagggtttcttaaggatggagggtggctgggcaccaggaagtggaatttcctggatcaaaatgttagaagaagcatgtggcatatctggtaaaggaatactctccacttccacgtgctgggcattctcgacagcattcaaatattggttgagtcctcttctgttcatactctatttctagctttctcaattctttctaaatatctggatcctctttttcatagagtcatagaatatgttcaaaggtttcacacagctatttttacgcttgtctttcagtactttctcatttaattgtggctgttgcactgggttaaactccatttcatccaatttctccatgtctcggatcatctgtttgggatccttcatctttaaaacttcagctcaaaccatcatgagctgttttttgttcttctgttccgggcttcctttcgggcttggtctgtggggttcataaattttccactcttggtggatgatgcagatctccttcccatgttgacaatttgtatggtttacttgttcatttaaaaaaaaagaaaaagaaaagaaaagaaaaacacttctgctgtgctcccaggactgcgagcagccaagaggtgcgattcctgccctctttcactttgtaagggccttcaattcagcctggcggtcaacccttcagccccgccatcttgaaacctcacgcccctctgcaatccttacgtcatttcccattcctccgtcccgctgtctctccagtctttgcatttttaatagagatagggtctcgccattttggccaggctgatttcaaactgctggcctcaagtgatctgcccacctcggcctcccaaagtgctgagatttcaggtgtgagccactgcatccggccgaacataaacttcttaataaatggtgcaatcaaatatgcctggttgcatgatataagtctgcagtgggttcagtgagagcacaaaacttccattctacccaaagaggtggtgtcataaagaacctaactgtattagtcatcgtcccagcaagagagaaatagcacactcaaaggctacatgacaagggtttactggaaggactatttaacgagacaggtcagggttaaaggagctcacagggatggtgaaggtcccaaggatgaacaggaaggggaataagttaacacccccaggctgaaaaggatgcggaggtttgtttccagtgtcaagcgaaagctgtagccatgggagctgtggcgttggtcaaaggagcaaagccactgctaaaccacagtccagcagggatgaaggtgtgaggaggtggaggccaagtggttcagttagatggtgagggcattttagggagatagcactacaaaaacaaaaatacagaggtgtgggagaaaaccatgtcacattgctggaattggagtgtaggatgaagtagaagtcagatcatgaagggcctagtatatcacgccaaggcatttggaccatatcctatataaccaataagagcctgtgccccataaatgactaaaatactctgttgctaattaagtccctgtgtttgtcttgtgggttgggttggcggagccgggagaggggggaggttgagagatcattttgagtagtttgtgtctgtttcccagcttaagacttttctgaaccaaggctgctaatacaaatcacatatgttatggaggacactgtaccattcctaattattttagggtaatgtatttagttacacactaaattaacactaattgaagttggaagaggttcagaaagcaattaaatattatttggaattgaacagtggagtaggttatgttgctctttcaatacagaattcatgctgaatgattgcactgggctaaattgacatttttcccctgaattccagcaagcaatccagtcttcttcacttttgtccagatcacatgaaaataagacaaaagatgctagtgcaagtatatttgctcttatattcagtatttcgactaaaagccaatatgagcttatggtgaagcctacaaactccaagtcacataagatgaataatctgttctgcttctttcctactcttgcccattgaagtacaagggaggaactcagaagcttctccaaagagaaaattgaaaaatcattattaaaaagagctcttagacactgtatctattgttttttggtcctgtttatgtttttttgtataaaaagagatagaaaagatatgctaattttctttgtatccgaacacacatattataatttgcagcacttttttatataaaaagcagacattcattttgcagcagatatttttgtggcacagtctggggccacagagcagcatggctcatacaaaccaattataagaaaccctcaattctagctctattggctactataacctgaactaaaaattaagcctatttgtggaggttttttttttctgtatgtatattaggttttatagcataaaagagtatcaatttatacttgctgcctacctatattttggcctaagtcagttattgctttctatccagttttagagtgttaaaagcagcagactagcttaactcgtggacaatatatgatggtatgcacggttctatttgcttatcttgtatacattctggattttgatcaaattaatttttaattaatttgttgcatcttaaaataagtgtgggcttaaaaccctaatctg

SEQ ID NO: 1887433 - DNA, 4001 bp, Homo sapiens; identical to SEQ ID NO: 1245391

SEQ ID NO: 1887434 - DNA, 4001 bp, Homo sapiens
ttgttgcccaggctggtcctcaactcctggcttcaagcattcctcctgccttggcctcccaaagtgttgggattacaggtgtgagccactgcacctggcctgttatagtattagtgtaccccagtgaatcctatctcccagtacccatatccctgtgtagtttccttctataatgactttagaactggtcatatgacctgctttcatcaatgagacattaacagatgaaacacattaacagatgaaacacaaacataggtatgaaaagagcttgccttctctgactggaaacaagctgtcctgtgaaaaagtccagcgtcacctgctgaagacatgaggactcaagccatagccggcactaacagtttgacattgagacaacgtgattgaaaccatcttagaccctggccccagtagagtcagccttgagatgactgcaaaatgaccccagaaaagaccaagagaaaaaaaaatgcccaggtgaacccagctcaagttgatgacctacagaatcataagaaataatgtggtttaagaagtctgatgttttaggtcactaaattttggggttctttattctggagtaatacatagatacaaatctcaaaataacttcaaggtatgaagtactatgcacttgaaaagtgaggaaacagaatcgtaaaatatatgagtaacttactggagccagttaagtgacaaaactactgtttgaatctaggttgtcagactccagaacttttaactatgcccctacagtagataagaaaaatgaccaaaactgacagattagcaatgaggtcattatacagggaaaaatgaatgactttggggtcttaaaaaagtggagagagctgcatgagaatttgatcgccagattttgaaataaagtcatgtgactatgcttggtacactaaagaggtaatactgcctaacagagttaagggggatcatttgaagacactagcatagagtgacaccccctcatcctccccaccccgccaaagccactaagaaagatataataccctgcctctcacctgacagaaggtggtgttcctgagattcataattgaactggatctccatgggctgcaactggacacctcagtgtgcaagtggagaattaccatttcctctgtaagcttttcttgtccacataaaggtctgggacctggaggcaactgggcaccactgggcttggaagggaatcattgtgctgactacagatgtaatctctgagactagaccaccagaaaaatcctcaagatataaaagaaggagaaaacaaaaaatctcatttgacttccagttgcttttctctcagaatgtattaggcttcctccccatcatccaagagccagggattaacccacttaagacacacattccccattccaagtctagagatgttcaaacaaaattaggggttaatgctaccaaaaaaaggtataactggaaagataacgcagagaggggaattttacagtgaattctagtggttaacactatgttattcgctgcccttcctatccaaaaatgacactactgatcatttttcttccttttgcttttacaacattcacaaattcaggtggctctttcccagtacggtaggctgattcgtatggatgcaccacggttggtgactccccccaccccacagagtttctggcgttcattcggttgaacccaaggccagcaagggctgactgggaacaaaccgaacactaggccgtgaaccaatcgtctctccgtgcccgggagcgaccccgggggccttcactctccaaggactcgagaaaccatgcacagtttcctgctcgttaggcaagatcacccggaactcctctgctatccgcgagccgacatcacccttacctcgacttggtcaccggaccgctgtgaagcctcacacccggcgaacctgccatcgccctgtccgctctaggaatctgggaggagtgctcagctctatggcgcttcaccgcgcaggcgcagggcgggggtggggcaccgggtgacggagggctgccgagaattaacccccgaaccgccgcgagctgtccctagcagtgccttagccagggacctgcttggccagcgacagatcctttgctgctctgtctgccggttcttgaggtgaatgtcggaatccattatctttcgggaaagctctctggggcagggtaggttttcttactacatacaagttcttaattagttatcgttttttaaataaccacccctccccctatcgcttatctgattcgtaggtatgctttaattctaactttcttcctgtcctctctggtttttcacacccccagaagagtagcgcgcatcagaatcacctggaggccttgttaaaatactgacttctgccccacaactccggagttgctgatttagtagtgggggagggggcggtggcagcccaggttctcaggtgatcctgaagctgttggtcctgggaccacattttgagaaccactgcccaagaaataagtgatgctcagtaattaatccctgaattaacggaaagttggatttttatctactttgcaatctagaaagggtacgaggtctatttaaggtttgcttgctagaacaattctcactgatcagggtgagaaggacccgaaatggagggtgcggggtaatcagggtaggaaaggatattgctgtgttcatggaaatatcttgggaaatgaggagttgggacctcatttctgttgagaccaatgagacgtgtgacttggtttaagctgtccggtggggaaaggaagaggtttgagaaaatggtgggtggctaagtggtagttgaggtggaggaagagggcttcctgtcccagcccaagtccctgttgggatatatgaaatttagggatgtatgactaagcccttaatataaccgtaagaggaaagagatgtgggaacttgagtccaaccctcccaagtagggagtgcagatagttttaaaaaaacagctttctttttggccaggcgcagcttaggcctgtaatcctaaaactttgggaggttgaggcaggtggatcacctgagatcaggagttggagaccagcctggccaacaaggtgaaaccctgtctctactacaaatacaaaaattagctgggcatggtggtgtgcgcctttaatcccagctacttgggaggccgagtcaggagaatcgcgtgaacccatgaacccaggaggcggaggttgcagtgagccgagattgcgccactgcactccagcctgggtgacaaagcgagactttgtctcaaaacaaaacaaaacaaaacaaaacaaaacagctttattgaggtataactgacataaacagcaaatatttaaaggatataatttgataaggcttgttaaatgaatacagctgtggaactatcactgcaatcaaaataatatgtttattacatctaaaccccaaaagtttcctcctgcccgttggtaagcctctctcccaatgccccctccactggtcagctgttactagagattagtttgcattttctagatatttatttaaatggaatcatacagaatgtccttgtttttgtcagagttgtttcactaagcttttattttgagatttatctttattgctgtgtgtatcaatagttaatttttgttgctgaataatattccattgtatgtatataccacagtttgtttatccaatcaccagttcatgggcatttgggttattccaggtttttactgttacaagtaaagctgagaacattcatgtacacacgtctttatatggacatatgcttttttccccctctctcatggtagatgtacatttaatgtttaaaaaaacccacactacttttcagagtggctgtatcattttgcattcctaacatgagtacatgagagttccggttcctccacatccttaccaactcactgtgtatctcactgtggtttcaatttgcatttccatactgactaataatatttagcattttgtaa

SEQ ID NO: 1887435 - DNA, 4001 bp, Homo sapiens; identical to SEQ ID NO: 1245398

SEQ ID NO: 1887436 - DNA, 4001 bp, Homo sapiens
agaatgaaccagtgatggagaaggaaccacagtcctcaggaagagtgagggtgcacctccagacagcccatgtgagggcaaccgcagaaagtctgaaaagaggtgaaccccacctttggtgtcacatgtgcagtgtggtgtgacagggaggggctcgctgggcttcagccccggcactctccacttgacctcagcagctccaggtagagtggggagaactcagcgtctccttctagaacaggttctaggatccatcactgaaatgaggatgaggtggttttaacatcattttatcactcttgatttagtttattaatcatacatgattattgattataattgttgctgggcatcctgaggcctcagaagttcaccctttgccctgaccccatgggggccctgcccccgccttccgggaaggacaaacacgggaagaggtcagtgcccgagccaccccaccgccctcccttggggcctcattgctgcagacgctcaccccagacactcactgcaccggagtgagcgcgaccatcatgtccatgctcgtggtctttctcttgctgtggggtgaggcctcctggggtctgggtccctggggcgggagggggcgggaacaggagccttacgggggctgtctccgcaggtgtcacctggggcccagtgacagaagcagccatatgtgagtgcaggggtgaggtctgggaatggtgggcccaggccgggggggagccctgtctctgtggcactgagctgatcccagccaccccttgcagtttatgagacgcagcccagcctgtgggcagagtccgaatcactgctgaaacccttggccaatgtgacgctgacgtgccaggcccacctggagactccagacttccagctgttcaagaatggggtggcccaggagcctgtgcaccttgactcacctgccatcaagcaccagttcctgctgacgggtgacacccagggccgctaccgctgccgctcgggcttgtccacaggatggacccagctgagcaagctcctggagctgacagggccaagtgagccggggcatgaattgggggccaggaggcagtgggtaggttgttgactggggggtctcccttcctccaagtcacccgatgtctctgagccccaagccccaatcttcccatctgtcaaatggggatgatgtctgtgttgtaaggaatacatggttgtgtccccagcaggcccggcatgccgtacagctcccacacactctttttctcttgccgtatgccttgtttccactggtgcctgcctgccttttcccagcaatgccctccatccctgtctccttcacagtcttatgagtgtggggcccaggttctgctgggcttcccacgtctcctgttatgcagaagcactcttcaactccaccccacccacagagtccttgcctgctccctggctctcgatggcgccagtgtcctggatcacccccggcctgaaaacaacagcagtgtgccgaggtgtgctgcggggtgtgacttttctgctgaggcgggagggcgaccatgagtttctggaggtgcctgaggcccaggaggatgtggaggccacctttccagtccatcagcctggcaactacagctgcagctaccggaccgatggggaaggcgccctctctgagcccagcgctactgtgaccattgaggagctcggtgactgtgggaaccatctctgggggctgctgggggaggaggatacagggggcatgaccacattcatcctgacctccatgctgaatgtccttgcccaggaccaggtccaggaagctggccacacggttgcctgggtctgatggttgcaaaggagtttgggcagaggatgcccaaagaatggaagggtgaggccgggtgcggtggctcacgcctataatcccagcactttgggaggctgaggccagcggatcatgaggtcaagagatcgagaccagtctacccaacatgacgaaaccccgtctctactaaaaatacaaaaattagccaggtgtggtggcaggtgcctgtagtaccagctactcaggaggctgaggcaggagaatcccttgaacctgggaggcagagcttgcagtgagctgagtggcgccactgcactccagcctgggcaacaagagcgaaactccgtttcaaaaaaaaaaaaaaaaaagaatggaagggtgttcctgggattgccacccggagggcagaggtctggggactgggcagagggcagctccagggatggggcagcctagtaatgctgcctgcattgcagctgcaccaccaccgcctgtgctgatgcaccatggagagtcctcccaggtcctgcaccctggcaacaaggtgaccctcacctgcgtggctcccctgagtggagtggacttccagctacggcgcggggagaaagagctgctggtacccaggagcagcaccagcccagatcgcatcttctttcacctgaacgcggtggccctgggggatggaggtcactacacctgccgctaccggctgcatgacaaccaaaacggctggtccggggacagcgcgccggtcgagctgattctgagcgatggtgagccggggccagcagggacagggacgcggctgggtccctggggagcaggagcagtaccaggtgtagagtctggggaagtgcagtgctctgggccagggtccaataccaactttatccgcccacccgccgattcagggtcctaaactgcaaatatgatgatgagcgtgacaaccttcaggccccacagggaataactgggtgaacaggtctggcccaggccacagggggcaccacctggcaggtcccatcccagctgccaggtctaggtgagcactgagggcctctgctgaggcagctcctccgctcgcttgccttggacctgatggtatttagcaaactctgagcaccggacagcgaaccccatgcccagcggaccacaggggcccctccgtggggcgggcattggggcggtgctcagaagacgctcgtggagcaaatccactactgagcggcatcgtgcaccaggcatcaagccatgcacaaaacatgtccccgtccccgcttcccgtctgtgtctgtagacaaacaaattactaagaaacagtgaaagggtgcgtgtgagatatccaaggactgggatgcaaaggtggggcgggcccggaggaggcgagggaggaagctggccaggtcattgcgggcagaagactcagccaaggcaaagagcgcgaggccagaccacgcgttagggccgagccagccgctgggcgcccgggtcagcccgtgtgctgctccgcagagacgctgcccgcgccggagttctccccggagccggagtccggcagggccttgcggctgcggtgcctggcgcccctggagggcgcgcgcttcgccctggtgcgcgaggacaggggcgggcgccgcgtgcaccgtttccagagccccgctgggaccgaggcgctcttcgagctgcacaacatttccgtggctgactccgccaactacagctgcgtctacgtggacctgaagccgcctttcgggggctccgcgcccagcgagcgcttggagctgcacgtggacggtgagctggcggggcaccagcgagggcgggcgcgggttcagtgcccctcggggcctcctgtctttcccctctttccttgggcgtccgacggcggcgctctgggccttggttcagcccccatcgcctaccccggcggggagcaggcgatcggtggtcgagggtctggggacgcctggaatttcggcttatttcccacggacgcaagcccgtaggtcacgtgtagcgtggtggtcggcagcagggaggctggccccaggttttcttgttcagatccctgcagctctgtggctgccttgttttattactggccatgtcagtcgtcatactggaccccccgccccggccccggtcccgcaggcgcacggctgatgtgtccttctccccatccccgccgtcccca

SEQ ID NO: 1887437 - DNA, 4001 bp, Homo sapiens; identical to SEQ ID NO: 1559954

SEQ ID NO: 1887438 - DNA, 4001 bp, Homo sapiens; identical to SEQ ID NO: 1559964

SEQ ID NO: 1887439 - DNA, 4001 bp, Homo sapiens; identical to SEQ ID NO: 1559966

SEQ ID NO: 1887440 - DNA, 4001 bp, Homo sapiens
aggcgggtggatcacaaggtcaggagttcaagaccagcttggccaagatggtgaaaccccatctctactaaaaatacaaaaaaattagccgggcgtggtggtgggcgcctgtaatcctagctactcaggagactgaggcagagaattgcttgaactggggaggcagaggttgcagtgagccgagatggcgccactgcactccagcctgggcaacagagcgagactctgtctcaaaaaaaaaaaaaaaaaaatagagacaggatctcgccatgttagccaggctggtctcaaactcctaggctccagcaatcctcccacagtgctgggattacaggtgtgagccaccgtacctaagcaaaaccatcttttttttttttcttttgtgacggaatgttgctttgttgcccaggctggagtgcagtggtgcaatcttggctcactgtaacccccaccttactggtgcaagcaattcccctgcctcagcctcccgagtagctgggattacaggtgcacacccccatgtcaggctaattttttgtacttttagtagagacagggtttcaccatgttggccaggctggtcttgaactcctgatctcaggcaatccgcccgcctaggcctcccaaagtgttaggattataggtgtgagccacggcgcccagcccaagaccatcttttaaaatgtggcctggatgggagtccgggaaactgtccctgacgtctgagatccttgagatctagctgtgtgaccagaaggatgctgtcagcctctctgggacttgttttttttttcaatctgttcatcttggacatcctccagggctccacacaaacacaccccagccctcccgtgccctgggaagggttctaaccacatcttggcaggaagttcactctgtgtgatgcggttgatgaattcccgagtgtagtcctccagggtctttcctaactcctccaggccatcaaaggggttggagacttctggagccccctaggctggggctgggcctgccaggaagatgaggcaggggtgcaaaatttggttgttgttgttgttgttgttgtagttttgagacggagacttgctgtgtcaaatggtgcgatctcggcttactgcaacctccgcctcctaggttcaagcagttctcctgtctcagcctcccaagtagccaagcgcgcaccacaacgcctggctgttttgtatttttagtagagatggggtttcaccatgtaggccaggctggtttcgaactcctgacctcaagtgatctgcccgcctcggcctcccaaagtgctgggattacaggcattagccgccacgccccaccaaaaatttgttattggaacccccttggggtgggatcccggggatagataaggagatccttggggatcatgtggttagaatggggaggatactgaagtgaccgcgtggggctcaagccgctgggaattgccttactcagcactgacctcctcccacagcccatcgccccatcacccactttcaaggctataaaaggaggacagccaatcccagaggtgtggagatccatacgtcatcggttactagggctctcctgggcagatttggcgcctgccggactgagcctgggcgaacctggagacccactcgaccacaatggggcaaccacgaccaagaaggggccccagagctctcagaggtcctctaagccgggaccccaggcctgtagccaccttcactcttccaaatctccaactccgcaattctcccatcccacttttaccttccaagacgatcgacagaaccaccaccaggaccgggagcgacaggaagagcctcatggcgaggccggaggggcaccctggaggcggaggcaggggttcaggggatcagtggcaccctcctccctccctcccacgatcccctcatctccctttatgagttcttgcagagtggaggcgggtgtccctcccaagcactcaacaacctgaatccttgctggagggcttggttgggaggtcctgtcctgcccgcaggacctttatcaggctggggagggggcggggcaggttgatgttgatctccctcctcctgagccttcccctggaagattgcctccttctgcccacccaggtttttctcctctgcccctggcccgtgggcgttggggtcaggtggggtcctgaccatttcccttagctccgaagccctttaccattcagcaccctcacctcccaatctccctgactctggggggtcctcagactaccatagctcctttccccactcagaggacagcctcgtcctgtccctgtggccatcttccctcaggggtctcccagtaataaccctgtgatctcatccccccctcattcacaccgtgtccctagatcacctctttccctcacttcccctctctcagcaagcctcctcagccccaacaacttttcctttatgttgctggggcctcccagttggccccgcaaccctgccctgcgtgccacctccaatttctttcagaccagcccttgaaacatcccagaccaccctgatattctctgggctcttaacttgatgattttcagtctcccttttttgcaaagggaaggggtcgccttagctggacactaaaaacctcacctgcattggccaggcatggtggctcatgcctgtaatcccagcgctttgggaagctgaggaaggaggatcacttgagcccaggagttaagagaccagcctgggcaatatagggagacctcatctctacaaaaaagttcaaaaattagctgagcgtggtggcgcacacctgtagtcccagctattcaagaggctgaggtaggaagattgcttgagcccaggagttcgaggctgcagtgagctgtgattgcgccactgcactccagcctggtgagacagagtgagaccccatctcaaaaaattaaaaccttcagctgcaaagctctgagtgtatgccccttcttcccttccaccgggcctcaccccctttggctggctacctcccccaaacactctatctgctcttattcaccctctgatgcccctcctggcaccaagcctgcttcccaccatcaccacatccgtcccccagggctggagtccaattccttccccaccagctgcctttgaccgccagtgaccctggcagctgatggggagggtgtcctcagcccagcctcagactctagttcggctggccttgtgcccccacaaccacgtgtcagcctggcggtagggggatggttgtgaaagggacagcatagacaagaccctggcaggattgcaacatccctctggccagctcagagcttccagtccctgtaagccccaggggcccccctacttcctcaactgagcccagcattccccaaacatccacccagatgtctgcttccccgatcccacaagaatagaataacaatgctcctgattttccaacctcatcctcccctctgctataggggtttctgtttaatagatggggaaactgtcacacaaccaagaacatccagtagggctcagtgaggggcaaagagggggctactgactgggcgcagtggctcacacctataatcccaccactttgggaagctgaggcaggaggatctgcttgagcccaggagtttgacaccagcctgggcaacacagtaagaccctatctctagaaaaaaattaaaaatttggccaggtgcggtggcccacgcctgtaatctgtgcactttgggaggcctaggtgggtggatcatttgaggtcaggagttctagaccagcctgaccaacatggtgaaaccccgtccctgtcaaaaatagaaaaaattagccgggtgtggtggcacaggcctgtaatcccagttacttgggaggctgaggctgaccaacatggagaaacccgtctctactaaaaatagaaaattagccaggtgtggtggcacatgcttgtaatcccagctacttgggaggctgaggcaggggaaggttgtggtgagatgagattgt

SEQ ID NO: 1887441 - DNA, 4001 bp, Homo sapiens; identical to SEQ ID NO: 1559982

SEQ ID NO: 1887442 - DNA, 4001 bp, Homo sapiens; identical to SEQ ID NO: 1560005

SEQ ID NO: 1887443 - DNA, 4001 bp, Homo sapiens; identical to SEQ ID NO: 1560012

SEQ ID NO: 1887444 - DNA, 4001 bp, Homo sapiens; identical to SEQ ID NO: 1560014

SEQ ID NO: 1887445 - DNA, 4001 bp, Homo sapiens; identical to SEQ ID NO: 1560024

SEQ ID NO: 1887446 - DNA, 4001 bp, Homo sapiens; identical to SEQ ID NO: 1560030

SEQ ID NO: 1887447 - DNA, 4001 bp, Homo sapiens; identical to SEQ ID NO: 1560059

SEQ ID NO: 1887448 - DNA, 4001 bp, Homo sapiens; identical to SEQ ID NO: 1560076

SEQ ID NO: 1887449 - DNA, 4001 bp, Homo sapiens
atccctatgcatctgtcattcacatcaatccatatggaatcagccaccaactcagggtcttggcttgctcctctgggaagtaaataaaaggccagaatgcggaaggagggcagcatcgctgaagtcacatcaataatggctgatgtgtagacactcccctggctttttgactgatgtttggcactcacggtctggcccttactcaggaccttgaagacaagggaggtcaaggatgagaagggagggccagtctttctctgaatctgtcccatcccacaatggaggctcatagtctcttttcttcagcctctagatctgagcccactcaagattgttgccaccttcacatcttttttcatagtttctccaactcagcaagccaaggtttttccaaggaaagaattccttgactcagaccctggtcctagctcctcaccaggatggtgaagtgagtaatcttgtccttggttttagggtcctgatgccttgtgttgaggctcagctggatgctgctgccaacctctgtgcccaatgtctttacttcgatgtgtaggaagtttcctgacccatcctgagtcaagtaaggccaagctgtcatcttggctgaagcctgctcctctggctgaagagattcctcagttttcacctagggaggatgatgggcaagtaaaccccaacccttccaactcacacagctctaatcccaccctccttgccttgtcaagttggtacctcgatggggagcttgtccagatttgcatctgtgttgatggtcagagtggccaacccctcagctgaggtgtacactttttggtcttgggagtggacaaggactctggaagctggggacccatcaggatttgagatgaagacctgaggtggaatctggggtaaggtgaaggaaaagcctgcagtggcctggtgtgagaggtgagactggaatatgatctgaataggactgctttgtacaactttatacatggtgcactaaacaacaccgggggcaccattcatattggagtttttatgaatggcacctcctagagctttgcagtgtacaaccacatgtggttatcctgggtgttgcagagctgatggtgagtgggaagactgagagtggagagggaaggaggacacatgagagcctataggagacttggagtaggattggtgccaaaggatatccctgactttcctaatgcccatccaaattaatatatgtgaaaaggccatgctttgatgtgcaaatgcagcctctagataaactttcaaacaccaacttccagcctgattgtggcctctaagtccccacagagaaattctggagccatcactgtgctttagggttaaggtttggggggactctgggattagtctggggaacatgatagactcaaccttcagatgagttggatgcaggtgagtccagtgtgggtttttgtctctttgtgggaagtctgctttggggagggggccctgagtccctgggtgtagtgagtccagactctgacccgaaagtggaagggcattcctggcttgaaatactggggtgtcctggtgaacttgatgttgtatgggctctggatgatcttcacccctgaggtctcagcttgcaccatctcaccccctgtagagacagtgagaacacagagtttgtgagggagttcaatttcttaagtgagtggcaggactagtatgagagccccatcttggtgaaggcagagaacgacaataacactatttcagctccttccacccatttctctaatgaggaaactgaggctgggaggtggcccaaggtcacatgggtggagtgtctgcattgggcaagaacaccatgtcctgacctcagtcaggggccggggtgagggtggcacctgaggagaacatggtgacattgacaaagattgagcctccaatgaagtcctctcctgggccttggaatgcggccatgagcgtgtccttctggagggagacgtggcccaggccttcagagatctgttcttagggtaagatagaggagaggatatggttttttggggagcgttagagagtggagtggattggaggttggggaggagctgggattcagtcacctccaccctctgcagggagctttggatagggatccggcaggagtccaatttcaccccaaagatgaccaaagcatgtccgtccactggcttgttaaatatatacgtgggggatggaggacaattccactgtctctgaagcacccacatacctcatgctgcttcagagatggctgtgcaaaattgggaggggcagaggtggcccttggaaacttagatggtttcattgatgacccacacaactctgggaggtgacgaatatatcccataaagccttgatgggttgcagatgtggtctaggcaatctctcaagatggtggaggtggacttcaaactatataaagccacaaagaagtctgggcaacctatgaagtggcctgtgcagcctcaccagggaaactaggtggcctgtgtagcatgttagagctgcaggaatgattcatataatgtccagaagtggcagacatagcccatacaatctcaggtggacagcattgcctgcacaacctcatagcaatgcagatggtctgtaaaacacaaggcagcaaatgtgtcatttaccatcacatagagctgcagagatggtctggacaatctcatgatggcaaacataacctgtactacctcatagactttcagagatggtctaaactgtgaagtggcagatgagatgagatgcagtacaacaccactgggtagacaaggtggcctgtacaacttcatagacttgaagaaatggtttatacaacctcacaggtggcagacatggtctgtacaacctcacaggacaacataggtagcccagaatatctcatgggtgggagaagagtatgtctaccaccctaaatgctacagaagtggcttgcttctctctttctcttttttgagatggggtctcactctgtcacccaggctgcagtgcagtggcacaatcttggctcactgcaacctctacctcctgggttcaagcgatcctcccacctcagccttcctagtaactgggacaacaggcatgtgccaccactcctggctatttttttttttttttgagacagagtctcactctgtcacccaggctagagtgcagtgacacaatctcggctcactgcaacctccgcctcctgggttcaagcgattctcccacctcagtagtccctgagtacctgggactacaggcatgcaccaacatgcctggctatttttgtctttttagtagagacagggttttgccatgttggccaggctggtcttgaactcctgacctcaggcgatccacccacctcaacctcccaaagtgctgggattacaggtgtgagccaccatgcccagccagcttggctaattttttttttttttttggtagagaaggggttttgccatgttgtccaggctggtctagaactcctggcctcaagtgatcctcctgccttggtctcccaaagcactgggattacagatgtgagccatagcacctggtgcttgtttctctgtactcaatctttgtgtccctggtcttctggcagagctgggaggaagggggctcaccgagcctggatgtcaacgcccagagcctcatccttgaggtaaaagaaagtcttatttgggaccagctggacctcaaaagatgggaggactgggagaaaaaaaaaagccatggtcaccctcagtattctacctgctccctcgtcccctcccagtcctgctccttccttggtggctctgtcaagcccgaagggctgcaacaccagcacccaacacttagcatccagctcaggccctgggttacagcagaggttccccttgagacctcctttctattccaagtcctgtccctggcgtattcatcttgctcaccccacccacacctttctcaccatattccttcacatcaaaggcagcctcgaactt

SEQ ID NO: 1887450 - DNA, 4001 bp, Homo sapiens
agccgcttggtgcacgccttccacagccccaggtgggccgcttcgcacacggcgctgccgttggccttgtaggtgttgagctccacccagaactcggtgcccacggacagcaccgccagcgtggcgcccacggcggccagcagcagcgccagcttcaccttcccctcgcgctcgggcgtcagccccgacctgccctgcccgtgcgcccgccgccggcccgcggccccccgccgccggttctcctcttgcaggaagaagttggaccacatcatcttatggccggtggggtcgggaagggggaggaggcagagccggcgaagggcctcgaggggcgggagcgaggagcggcctggggtcttgaagggggtgagggactcagtttcccctgggtatgaaagagggagagccgagtcctgtctggaatctcaaatgcgaaagtcgagattgcttctggggttcagaagagaaaaatgatccccagggctggggaagcctctggggttcagaggagggtctaggttgccctcaagaacttggcaaagaagacggggcccagaggaaaaacaaggcccccaccctgaggtttagagatagaattcggcttcccaggagggagtccccccaagagctccagaggaatgagaactggtgcccgctgaagctccctgcagctccaaggggctgctttggggtccccgctggggggttaacaaaagggaaactggttttcctgagagatctgagcaccccactagggctaagagtttggggtacccaggaagggacctgaggtcctgtgtgtgtttggaggagatgtggccggggttcccttgggctcagagtttgagaacagaggacttggggaccctctgggattcggaaaaggaagacctggggtcccgggaagctcccaaggggaggtcggaattcaatccgggtctcaagagaggcagtaggaccccggcatccacagaaggagaagaacagagccctggctggggctcagaagaggactgggcctcgctggaattcaggaaaaggggataggggtctcccctgccattcagaaaagatccgaggtctctactgagcctggaaaaggggccggtggccggaagacagagtggagtccagaggcgggaggctacggggcctccccgagggctggggcagatgggaccgggggccctcctggggctcacactatggggctgtggtccgcactgcggctcggaaaaccaggactgagtccccccagggttcaaaggccaaccgcgacccgcaagagacgctgcgccccttcgggatcagtccgtctccctcccccgggctcccagggccttcccggtcgggttcgcgccaggctcagccccaggccagggccccccctcggggctcccacccccgactcccgagcaggggcccctctcgctctcctgcctcggccccgcgccgaccccagctccgcgctgcctccgaagcgtccggctgtgcccgccaccgccaccggcctggcctccgcccgcgcccggcctcgtccccacccgcccaccccccaccctccaccctccaccctcggggctatttcgggcttgacccgtaaataacacccgcacctgtcgcccggcgcctgttgccatagggatcccgggtgttttaaggggacgaggaaggggggagggaggccgcccggggaggaaggggccgagcctgatgggactttcatttcactaaggggcaagagcggcgccgagagtcccagctccgcagtctcccgggcagcaggagacgggcggggcagcaagtctgactggggttaccagggaggaggggcgggaggcagggccccgggtctcagggaggagggcctgaggccaggagtcttgggtccctaagggagaagaagcctcggtaccccacttctgagtggtagaggaagaaggcctgggtacccagaatcttggatctgagaggagaggaacctggtctcctaggtcctgggctcctgagtctgagggaggaggggctgggggcctgaactcctgggtctgagggaggaggggctggggtctggactcctgggtctgagggaggaggggctgggcctgggctcctgagtctgagggaggagggactggggcctggacttctgggtctgagggaggagggactggggcctgaactcctgggtctgaaggaggaggggctgggggcctggactcctgggtctgagggaggaggggctgggggcctggactcctgggtctgagggaggaggggttgggggcctgggctcctgggtctgagggaggaggggctgggggtctggactcctgggtctgagggaggaggggctggggcctggactcctgggtctgagggaggaggggctgggggcctgggctcctgagtctgagggaggaggggctgggggcctggacttctgggtctgagggaggagggactggggcctgaactcctgggtctgaaggaggaggggctgggggcctggactcctgggtctgagggaggaggggctgggggcctgggctcctgggtctgagggaggaggggctgggggcctgggctcctgggtctgagggaggaggggctgggggcctgggctcctgggtctgagggaggaaggcctgggcctggactcctgggtctgagggaggagggggcagggggcctggactcctggatctgagggaggaggggctgggcctggactcctgggtctgagggaggaggagggccggggagcctggactcctggtcaaggcgttggcagacccagagtcctgggcctcagggaggagactggggccagaaccctgggtcttgaaggatggaaggcctgatttccatgttggagaaagcgcaggcctcagggcagggccggctgtcaggggcacagaatgaaagcagcactcctcttcatcgagtttattagacggggcacccctgggggaccttccatgcagtttcagctcccccaggagcagggacagaggacagccgtgtggcatggcggcagggcctgatcttcaacccctcaccccctacccctcagcccttctgtggacggcccaggtgggacccacctttcaccaactccttcttctcccacagttggctgctccaggcaggcctggcgctgacctgagcgaggctctggtgcacgctgggcctctctgcccaccccctgctctggacttttccgatggagcacgtgtttccccgcagtgtgattgtctgtgtctggttcttccagcagactggggccggggccaggcacaggaggaattcaccttggcatcctcagctctacccggcacagggccaggtcacaggcagtcttggaaaatgtgcatggggtgacttgaatgaatggatggatgaatgggcaaaggaatgaccagatggagtgagatgatggcacacagacatccccgccccagctaggggaggggcctgctgcgtttcctcaatgcccgcgtggccccgtcagaacacagccccctctgtattctaattgtctggactacctgtccccccctctgaaggcagagatgggacagaagtggcctgagattgcagggccttgtacttggaagtcctcaggaaatatttttttttctttttattgatcattccttgatgctgtgcttgcttctgagtctccacgttgctttctatgcgaatctctgggtctttctccggcttacgtctccctatctctgtggttgtgtttttgttatctctgggacttctctgatttgtgtacctgtcagtctctctcctcctccttttctgtcttctctgtatcaccttcttgtctttgactttatttctttgactttctttctttctgttttctgagacagggtcttgctctgtggcccagcctgaagtgcaatggtgcaatcatagctcactgcaaccttaaactcctggactcaagcaatcctcccgcctcagcctcccgagtatctagg

SEQ ID NO: 1887451 - DNA, 4001 bp, Homo sapiens
acggctgccttgcagaggacagggcagcaggtgtgcccagggcagggggcacacagggctcaggccaagctaaggagccagatcctaggggagctgggcaccagggagctacggagggcgcgtgagctggggagggcctccgagctgggtgtcgagaccctgcaggcagactggaggtgggggccaggggtaggctctgcacaccacccccccatctaccccatgactctccaccatggcccgaggtccacctggtgtcctggaagctgcccccgcccccacccagcttcctgactttggctgtgtccagagctaagaatagacgctccctgcccggcccccgccggaaaccgcagccacgggggtacatcctgagcctggcctctgttcccaccatctgccccccagcccctcacaactcctcccaccagagcctcctgtgctcccattgaacccgaagtgctggcggggggtggggggcggggggcgggccaagaccgggagaccagcaaccagccccagatgacagggaagcccagtgctcatgttccaatcccacacatgggcgtggcattgttccccctttgtgcctcagtttccccatctctaaaatttaagagtatctttaccccctgccttgcagagatgtggtgaggcttaagctaaatgcaagtgtccttctctgaactctgcccaggctgtttcccagaagagtcattgtccttgttatctcagggccgaggacagaggaagtggggacaggacagccttcctccgtctctcactgccccctcatctggagccccagccccacatcctcctcccccaacatctgccctccttgcagttagtgtagcaagggcctcatgctctctcttgcctccaaagctttatacatgcaattcctgtcactgccacgtagcccagacctggggagctcctattcatcctacaaaaccccacttcccatgccctctcctcacaagatgtcttcctagctcacctctgggcttccctaggccctgtctcttcctttggcccagccctgaccccagggggctggaacagcctgtgtccagttcattctccagcctagggcatcctgaagggcaggcctggtttcaggtctcacttggagctcataattgtcccactgtataagctgaacacagagaggggttggggagagtaagacttggagattaggtcggcttcacgggaaagcagccttggagccagggttttgccacatccataggagttggatagcctccttgccaggaaagagagaagttgtgttaaatggctggtgacttaatgggatagagctttgggagggaggttgggtgtggccgaaggccaggaggaggaaggatagtgggcggggtagccggggaaggggcttccggactgggctgacgagagggccgggccaggctgggaatacccctcactcacagcctggactagcagccctcccgggcccaggggacggggtggggtgcagtcagggcaaggtcagcttgtccggtcccactccaggtccctaactcaaggttctgtccggctcgggtgtacaaacaaggccaaggaagcccaaggtcccccctctgcaaagagacggtcccagtccctgcgtccggcaccttctcagccattcctgttgggctccatccctccttccccagcccgagctggggggtggccaggaaagagtgcccatcccccactgcagcctcccggctccagactgttcctcctctggctccaaagccacctccgagcctcctcaagagaccctcccatgcgatgccatcaccccagccctcccggctcacctgctctgggaccacctttctcagtctggctgtgtcgtctggtgcaccccccatccctctgtcctcccaccccacccctggaaggggcctcaaatatgtcctgtatgtattaagcagggcatactactactgtgtgccgcgttccagcgcacccagtgaatttggagccctggagtctgggcgacccccgggagccgatccgcctggacctgccccgccccctccaggccttgggtgctgcccagatggtgaataatgcgggcctggcggcgggagcgccgggaagaggcctggcagggcgctgggcggctggaggggctgaggctcccgaggaagcgcccctgccacccctacgcgggccattgcatccctgccaccggtggcctgggggtcccaagggcgccgccttccccagaaggctgtagggtgtcccggcgtgcggggggcacccactgactccaagtcagccaggcccgggcccgaggggcgtggccagcgcagggtgggcggggctgatgagagacagcgggagacagagactggacggagagagcgagccgcgggctgccagcggcccccacccgtcccagctcggcttagcccccgcggacccctccaggccgcgaccccagggcgtcctgtgccgccacgccctccatctgtgtgggtcctctgctgggcccgcccctggtcacagccagactgactcagtttccctgggaggtcccgctcgagcccgtccttcccctccctctgcccgcccccagccctcgccccaccctcggcgcccgcacatctgcctgctcagctccagacggcgcccggacccccgggcgcgggatccagccaggtgggagccccgcagatgaggtctctgaaggtgaggtcgccccgctggcttagggcgggatgcactgctctggtgtgagcccgggctgctgggcgcatccggcgctggccctgccctgctgtgggtgtgtcgcaaagcccgcggtgacagcggccaggtgccaggtgtcccctgtgtggcccggcgggtggcatggtgccctgaggcctgccctgggcgcccaggcggctgggtctgggtgcggcccaggctgattctgtccggggggctctctggtctctgtggggccacatggctgtgaatgggggtcccagactcagggggctgcagccggggagggggcccaggccctgggtgtggcagggatcgagtgtggttgtgcggctgtgtgtgtgatcttgtctctgggagtgaaccatgcatggccctggttgtgtgtctgtgtctgtgcgtgtgtggtggttttgtgtgtgtgaccgtgtgtttgtttctgccgagagtctgtgactgttaaatactgtgtgttcttctgtgtgtctttctgtgtctgtctgtatctatgtacctgttgtgtttctgcctgtgtgtctgtgtttttctgtctgtgtctgtcacatttctgcctgtgtgcctatgtgtgtatctgtgtgtgtctatgtctgtcgtgtttctgcctgtatgtgtctgtgtgtggctgtgtgtctgttgtgtttctgcttgtgtgtgtctatctgcgtgtgtctgtgtgtctgttgtgtttctgcttgtgtgtgtctgtgtctgtcatgtttccatctgtgtgtgtctatctgtatgtgtctatgtatttgccatgtttctgtatgtgtgtctgtgcatgcctgtgcgtctgtctactgtgtttctgtctgtcacatttctgcctgtgtgtctgtcatgtttctgtctgggtgtgtctgtggtgtttctgtgtgtgtctatctgtgtgtgtctgtgtatctgccatgtttctgtatgtgtgtctgtgcatgtctgtgcatctgtctgctgtgtttctgtcacatttctgcctgtgtgtctgtcatgtttctatctgtgtgtgtgtctgtgtgtctgccatgtttctgtgtgtgtgtctgtgcacgtctgtgcgtctgcctgctgtgtttctgtctgtcacatttctgcctgtgtgtctgctgtgtttctgcctgtgtgtgtctggctgtgtctgtgtgtctcgagtgtgcacacacggtggtggcctgaggtgcatgttggtggaatcactgtaacttgtggtccaccattaaccaccagctgcacctcccggg

SEQ ID NO: 1887452 - DNA, 4001 bp, Homo sapiens; identical to SEQ ID NO: 1560100

SEQ ID NO: 1887453 - DNA, 4001 bp, Homo sapiens
agcagactatgtgaatttattaccctttataaagtaaacaaatggtttaaaaacctccacctaaaattttcacacgcaaaattttatatatatatactatactttcatgacactatgttattgtatatatatatatatatatatacacacacacacaatgcttccatttgttttgatgtcacacaagcaaaattaaattacactaaattttaaattttaacattaaaatacacatgatttttaccatttgtgatacacattgtatcatatgtattctcaattgaaatttcaattaaaattcagttaccactcatcaaattttactatgactatttcaactgaaaacattttcatattgcatttaaaaagttttgacggtttacttttattttagaaatcaaattatttcatgaaaaccaaatactcttcaccttaaattgtcttttttactcccatgaaaatctgtattcatcttcacaagaaaaaaatgcaaaattacattctttaaagttcaaatactaaaattcttgtatagtattttatgtgacattggaaattttaaaaaacatgtaataaaaatcccagtcacgcatgaagttatagccttgcctgcacgtattgcctgtagccccagccacccggaggccgaggtgggaggatcacttgggtccaaatggctgagaccagtctgtgccacacagcgaagccctgtcatttaaaaaaaattcctaaacttccaaaaattggaataaaattcattattccttgacatattgaagaaacaaacaacagagaaatgaattaatgatataaataaggaatcaaaaggataaaacacaaatgtcctgaaaagatgttaaaattcactagtaatcaggggaatgtgcatgacaaccactatcagttatcattctcacccacaatactgatggaaataagaaaagctgacaaaatcaagtgtgaatatgaatgtgtagcaatggaaactcgtaaaccagtagtggagatgactgaaaacacagccgctttggagaataaactggctgtatctagacttcaagacacacctacccttgaaattatgtgtggacaagaaaatgcatataaaaagtccattgtattatggtttgctatcagaaaacagggtaacaaactgaatgtccatcatcaaagaatggatacattgattataatatcatcattgcattaatactgtagcgcagttaacataaattattaaaaccacatgtaaacatggataaatatttaaaatgtactattgggccgggcacggtggctcacgcctgtaatcccaacactttgggaggccgaggcgggcggatcacctgagatcaggagttcgaagccagactggcaacatagtgaaactccgtctctactaaaaatacaaaaattagtcgtgcgtggtggcgggcgcctgtcaccccagctactcgggaggctgaggcagaagaatcgcttgaacccgagaggtggaggttgcagtgagccgagatcacaccactggactccagcctggatgacagaacgagactccgtctcaaaaaaaaaaaaaagtaatattgattaaaaatcaaattgcatgagactgcacagcacgataccaagcaaatacaagttttaaatattacagaaaataatatttaaaatacaaaccaaatacataaatcatgcagggggattaagacgtttctggatagtggcaacagccgagagtggctggatgaatttcagagaaatttcatatattgcttcaattttatttaaaatatattattacctatgttttagatattttattgtaaataatgggcaaggatattataaactctgcagaagtaagtgtagtcgtgttttttcctactcacattgaagatggcccagatgcttgcactaaccgcgtttaccgcccacagccatcatggcgaccggaagtcctgagagcttgtttccctcgaatctcagacagccctccttctctatgaacattatttcaaaagaagttgagaactagagaaaccgaagcttaaggggattctcccatttggcctgtcctcccctaaagtcaccacctgctgcgtttctgcagcgcttaccatgtgagtttcaggagccccagggtgcaggaaggaggagcggaggcttgttgcttggacactgccaggctgctctgtgttctgttcctcttggtcacttgagaagaaagggagaagttcctatgaggctgtcggaaagggaaatggggccctccgcttgttgaaaacaaaacaaaaccctcaggaagctttgcatcctgttagtcatagcttaaatttatgacttcaatgacttggctgggacagtcttaatctctccatactcaagttgttttaatttctgtaataataatttttataccaatgtttgtgttgttaatactaataattttacattgtaactgtaatcctttaattattacaagtgttaacctaaataacaaacatatgaaagcttcctaaaggaaacagtgtttatttgggaatagagcattgcaattgggaatagatatgccatattaaactatgtatatattcaggaagataaaggaagacagaaatggggaggattgcatattgttttgacaggattttccttggccacaggatcaggcacaaaggtgacattagtctgaggttggacaggcagttgctgggcagcattccttgcagaaatattttttgtttaaggttgcaatgacctttatgcaaggttgtgggttttgtagagtctttttcattttcaagcatacaaggataagaccccccctcttcatggctttcctggctttatttgtcagggtcatcttaacattagtggctccattttgttctgacaactttcagatttctccttgtgatcaagaactttctctaaaagcattattgatcaatcattctgtaattaagatttgatgtcccctgatgccagcatggacctctcccagtttgctggtctcatcccatgttgtggggagtgactggtgactaggaatcgatgtcaaaagcacatttgagcaacaaaagagatttgaaggatgtggctctcaggctaagtctccctggagtccattagtaagttcaattttgtctgttctacagtcttttgctatccctttaaagtgctgattcagtattattttgttaggagctgcacctctgaaaaaatttaacaagtaacacatacaaagtttaaaaaggagaaatacaaagtaaggggaaatacaaattaagagcaatatgagattttcagtttgcatatggttttgagccataaacctaggtttaaagacaactaattgaagaactcaaacagttattcgagacagcagggagttaggtgagacctggggtaaccacatggcctgctttcttattttgtgtataggagcctcaacttttctcagaggaatttattcaggtatagcatgtcgtattagcaacatcacagacaatttcttgcttaaccaatggatactaaagaattttgtaggttgggttctgttaagttataagcagaaggaattgatcataaaatttaagttacaccattattctgctaagtagaaaaggtcgaattaagtgagatgaaagtctcattatgatatagagtcttgtttcagcatcttgcagaaagttatacagtgtgaaaacaccaactttttctcctggtttgtagtgtgaacgtctctggttatgatattgggcagtttggtaaactattgtgtgatccgcatatcagccttgaggtttgttccctctttcattttcctctggatcaccaacatgctaatctacgttcacatcactgaaaccgtagaggccaataccaatttcaccatttctggtcctggatatttgcaagactgttgtcaaactaggccatacatacaataatttaatatacatttggggcttggattatatttctgttaaattgcactg

SEQ ID NO: 1887454 - DNA, 4001 bp, Homo sapiens
gtctcctcctcagcctcccaagtagctgggattacaggcatgtgccaccatgcctggctaattttttttgtatttttagtagagatggggtttcaccatgttggacatgctggtcttgaactcctgacctcaggtgatctgcctgcctcaggttcccaagtgctgggattataggcttgagccattgcgcctggccagaagaatcttaatgtacaaaaatgaataggtttttaatacaacagactatcccaattccttgaaagaagaaaatacacccattaaaacagaaactatggtgcctagaattaaactgcacaaaaaactacatgacccatataatttttttatgttgaaataattttaaacatgcaaaattagcaaagattcatataaatcctcaaccagcctatcctgatgttagctatatatataattgtattatatgtataatagttgttatatataaaactgtatatatacatttattgtattataatcatatatatacatttattgtattatatataatatacaactgtatatgtaattgtaatataataattatatacataatagtatatgtaatacaagtatccaaccaggaaattgatgtcaacgtatcttaccattacctaatgtgcagaccttatttgaattttgtcaatatttctcttaacgtcctctttcttctccaagatcgaatcgaggatctcacattgcactcagttgttatgtccttagattcctccaggctgtgaccgtttcttattcttcccttgtcttttgtgattgtgacacttttgctgagcatggccaattattttacagaatgtttatcaatttggatttctttgatgttttctcacgattaggctgaggtcatgcatgtttgtcttctgtgttcagtcaatatgccccatcctttttcaaatatttcttcatgttctggcgtcagaatttgttccaatgttatcttatatattcctgccccagccctcgaagtaaccatttctccacagatacttcaaaatagtatttagaaaccaaggccgggcacagtggctcacgcctgtaatcccagcactttgggaggccgaggcgggctgatctcgaggtcaagagacggagaccatcctgaccaacatggtgaaactccgtctttactaaaaatacaaaaaattagccgagcgtggtggcatgcacctataattccagctactcgggaggctgaggcaagagaatcgcttgaacctgggaggcagaggttgcagtgagccgagattgctccattacactccagcctgggtgacagacggagacttcatctcaaaaaaaaaaaaaagtaatattgattaaaaatcaaattgcatgagaatgcatagcaggataccaagcaaatacaacttttaaatattacagaaaatgatatttaaaatacaaaccaaatacataaatcatgcaggcggattaagacgtttctggatagtggtaacagctgagagtggctggatgaattccagagaaatttcatatattgcttcaattttatttaaaatatactattacctatgtcttagatattttattttaaataatgaacaaggatattataaactctgcagaagtaagtgtaatcgtgtttttttcctgcccacattaaagatggcccagatgcttgcactgaccccattgactgcccacagccatcatggcgaccggaagtcctgagagcttacttccctcagttctcagaaagcccacctcctctgcgagcgttatttcaaaagaagttgagaaccagagaaaccgacctaaggggattctcccatttggcccgtcctaccctaaagtcaccacctgctgcttttctggagcgcttaccaggtgagtttcaggagccctagtgtacaggaaggagaaacggaggcttgttggtaggacaccgccaggctgctctgtgttctgttcctcttagtcagcaaggaaggagtacgacaaagtgagaagttcatatgagcgtgtcagaaggggaaatagggcccctcccttgttaaaaacaaaaccctctggaagctcggcatcctgtcataacttaaatttatgacttcagtgacttggcttggacagtcttaataatctctctcacactcaatttgttttaatttctgtaataataatttttataccaatgtttatgttgttaatactaataattttacactgtaactgtataactttaattattagaagtgttaacctaactaacaaacatatgaaagcttcctaagggaaacaatttttttttctttttgagatggagtctcgctctgtggctaggctggagtacagtggcatgatcttggctcactgcaacctctgcctcccaggttcaagcgattctcgtgcctcagtctcccaagtagctgggactacaggcgtgcaccaccacatccagctaattttttattttttagtagagacggggtttcaccatgttggccaggatggtctccgtctcttgacctcgagatcagcccgccttggcctcccaaagtgttgggattacaggcgtgagccactgcgcccagccggaaacaatgtttatttgggaatagagcattgcaattgggaatagacatgccgtattaaactatgtgtatattcagggagataaaggaagacagaaatggggaggattgcatattgttttaacagaattttccttggctacaaagatcagtaacaagggtgacattagtcctaggttggaccagcagttgctgggcagcattccttgcagaaatatatatttttttaaggttgtgaagacctttatgtaaggttgtgggttttgtagagtctttttcatcttcaggcatgcaaggataagagccctctcttcatggccttcctggctctatttgtcagggttatcttaacataagtgactccattttgttctgacaactttcagatttccccttgtgatcaagaagtttctctgaaagcactctcctgcctcagcctcccgagtagctgcgactacaggtgcccaccaccacacccagctaattgtttttgtgtttttagtagagacggggtttcactatgttggccaggctggtctcgaacccctgacttgtgatctgcccacttcggcctcccaaagtgctgggattacagggatgagccaccgcaccaggcctgcatttcttttttcaaagaattactgtggcattttttccaatgtcattgtgttctgtggttcttatctagtcttcacatttatttacataatgaactttcaatgatggatttctacagaatttttgtcactaagtggttgcctagaagtatatatcctaagattgaacatattgaaatatgagctaacttttctcattcaattattgattacttagttagtttatttattatttgggggatgggatcttgcaatgctgcccagaccagactcaaactcctgggctcaaactcctacctcagcctcccaagtaggtgggattacaggcatgtactacttcacctggctcaattatttattatttataactcattgtacatatattcagataacttaatctgtgcattaaactcttccactttgttgatagtcatttctgtgtttgctatgtggctacatatgtatgctatgtgtttcctctatgcttgagataggatgatggggattcttcaatggctgtgtgagttgttattctagggcacttaagtcaagaatatgaattgctttggtcaattttttatatctttactgatactctgttattctgttaattgctgaaagactattgaacagatttcccacaagagtggaggattattctatatctgtttatcattctacccgtgtatactatatacatattgaaagtgtgaatatgtatacacaaaattaaaattgttattcttattgaagtgatctactttatacttagtaatgctgtttaggtaaaatatat

SEQ ID NO: 1887455 - DNA, 4001 bp, Homo sapiens; identical to SEQ ID NO: 1560128

SEQ ID NO: 1887456 - DNA, 4001 bp, Homo sapiens
gcgtggtaatcaggattctaaatatagtccttccagatttctgttcctgattgttcaatcaaatgctaatctaggtattgctttgaagggattttgtaattaaagctcaaagtcagctgatcttaaaatacagatcatctgggtgggcctgacctgatcaggtgactcttttaaaagcagatcagatgagaaagtcagagaatcaaaacacaaggaggattcaatgcatccttgctgtctttgaagatgcaggggtcaatgtgtgagcagggtagagtggcctgcaagagcttagagcacccgcagatgacagccagcaaggaaacagacctcagtcctacaactgtaagaacctggattctggccaggcacagtggctcattcctgtaatcccagcactttgggaggccgaggcagatggatcacgaggtcagtagatcgagaccatcctggctaacatggtgaaaccccgtctctactaaaaatacaaaaaattagccaggcatgctggtgggtgccggagcttgcagtgagccgagatcgccccactgcactccagcctgggcgacagagcgagactccatctcaaaaaaaaaaaaaaaaaaaaaaagaaccaggattctgccaccatctgaatgagcttggatatgggttctttcccaaagcctacaggtaaaccccagccaactcacatcacaccttgattttgacctggtgagagaacccagttgaggacacttggacatcgaggtacagaaactgaaatagtaaatgttattcactctcttagttcacccagaatcagactctgcactagaatgtaagtgcaattagtttattatttatttatttacttttttggagatggagtctcgcactgtcgcctgccaccacgccaggctaattttttgtatttttagtagagacagggtttcaccatgttagccaggatggtctcgatctactcacctcgtgatccacctgcctcagcctcccaaagtgctgggattacaggcgtgagccaccacaccttagtgcaattagtttattttggagaaagcattggcagaggtgtgggaaagtaagtaagggaaaagaaggaagccatatagaaaaattagctctatagaaaactggagctcacctctgaaaactggtacaaaacacacctctgagggccgggcgcagtggctcacgcctgtaatctcagcactttaggaggctgaggcaggcagatcacctgaggtcgggagtttgagaccagcctgaccaacatggagaaaccccctctctactaaaaatacaaaattagcccggcgtgctgtcacatgcctgtaatcccagctactcaggaggctgaggtgggagaatcacttgaacctgggaggcggaggttgcggtgagccaagatcgtgccattgcattccaacttgggcaacaagaacgaaactccatctcaaaacaaaacaacaacaacaaaaaataaaaccacctctgagttgttccccctaagttcaggggaatatatctaccaattccttcttggtgttagttaatggtcactcccaggatgttaatttctctgacattttcagcctgccctcagttggggcttgcatcctcttgtactcagagaaatcagagaggcacagacactcatggaaggggttgcggaagtactcaccactctctttcagtcatttcgagaatttctcttctttcatcattcagtcgtcctaaaagtcctgtgtgtcaataataaattacacccactgaaaggaagacgtatatttacatttcatggcctttcattttctattagtgtccccttcattccactccatcttattattagaatgattctaccagtgtctttctggaaaataggtgtaggaataaatttattctaaaaaataaaacaacatctacgcaaagaggtcttaaaaccttcataattagctctataaaacaattaactccaagaagtaatgctgaatgctttccaaatgcatactgacagtaagaaaacattatcaaatacccacatttgcattttttctagacatggttacagacctaaatccctcagttgatcagcttgagggaccaaataaatctctgttatcggtatagcaacagcacttacttgttttgtagcagtcagggcataccaaagtaagatcaaagaaaaaatagaatctcacgaaatatattttctcaaggtaaaccctcaccaaattataattgaatgattagtctggtataattttagtagaaaaattataggaaaaaaaagacaggacaaaatatgataattgagttggcaaagatcaactcctaagcagctaatttagtgttcaataaaacccaaaaatgcagaagcatgattttcccatttatagtatgttcacatactataaatgagttattttaaccaatttagaagtaagacctggccaggcatggtggcttacacctgtaatcccatcactttgggcggcaagacaggtggattgcttgaggccaggagttcgagaccagcctggccgacatggccaaaccccgtctcttactaaaaatatcaaaattagctgggcggggtggtgcatacctgtaatttcacctcctcagaaggctgaagcatgaaaatcatttgagcctggaggcagaggttgcagtgagctgagattgcaccactgcactccagcctaggcaacagagggagactctctcaaaaaaaaaaaaataggctgggcacggtggctcacgcctgtaatcccagcactttgagaggtcaaggcgggtaaggtgggtagatcacaaggtcaggagttcgagaccagcctggccaatatagtgaaacccgtctctactaaaaataaaaaaatcagtcaggcatggtggtgtgtgcctgtaatcccagctactcagtaggctgaggcaagaaaattgcttgaacccgggaggcggaggttgtagtgagcagagatcctgccactgcactccagcctgagcgacagagcaagactctatctcaaaaaaaaaaaaggaagtgagacataagtattgtattgtatcatgataaagcaattatttggcattacaccttaatgaattttatccagtcaatttgcctttgtagacacagagtgattcatgtaatatgatatgtagcataatcaagtttaatctctgtaataatggttgtttatctgtaggctatagttgtaaaagaagaataaataaataaagcaatctatcaatcttgatcaaacaatgtagcccacagttgattcagatgttacaataatgtagttggtacaactcactgggcagcatataccatgagcactaatgaaaaataaaaatcatggcaaggcgcgatggctcatgcctgtaatcccagcacattgagaggcagaggtgggcggatcacctgaggtcaggagttcgagaccaagctggccaacatggcgaaatcccatctctactaaaaaatacaaaaattagccaggcacagtggctcatgcctgtaatcccagctacaggggaggctgaggcagaagagtcgcttgaacccaggaggcaaaggctgcagtgagccgagatcatgccactgcactccagcctgggcagtagattgagactctgtctcaaaaaaaaaaatgaaaaatgaaaaatgaaaagcaactgcatgaaagtcaattcagtttatgcctagccttcattaaagaccaacaagaaaaaataacaaaaaaaaacaaaaaataaatgtttcagtgaaaatctcatttgggctctcatctacaggacagagtgtagatggaaaatacatgtttgatgtaataactgatcttgtgatatacctttatgattgtaaatagttgatatattaagaaataatagtaaaataaatgttattttaagcctccaaatttgtgataattttgttaggcagcaataaataataaaaaaaaaaactaatacacccaaacagaata

SEQ ID NO: 1887457 - DNA, 4001 bp, Homo sapiens; identical to SEQ ID NO: 1560150

SEQ ID NO: 1887458 - DNA, 4001 bp, Homo sapiens
ccttgattcccatttgtgcctcgtgtgcatttgatgaatgaatgaagtcccatcccctactccttctgtctcctccttcctcccagcagcctctgtgtgacaacttatccgtctctcccactgtcccagttcccagaggcaggagccaccctctcatgcatccctgggctctcggcaccctgcacagggcaggcccgggtgggtgaattctggttcaattgtaggaggacctgtggcccctggggttggcgaaccccgggccgggagtcccactccttgccattgtcgcccccacacattcatcagccccctattggacaaagtcttattcccattactgaggtttcttccagtcctacggggcagagttcccgatctctgggcaggcaacagcagctgtgcaaaaaaggccagacatcgccttcctcccacaactccacaggccgggaaccgtgcatgtacagtggcgtttctttgttcctaggtaggaaaagccattagttttagcaccgcagaaaaaaacgcaaatcgctcttggtgctttttgatttccgtccaggtctccctccacaggtgaatgctatatgaatgggtcctgcatttggctcagcaagcagctctccggctcacatcgggatatttatttaacgtatctggtttttactccctcccgtccaaaagcgtcaagctaaaaatatcttgtttatgagctctggaccgaaaacgaagcagttgggctattaatcactgggactatgttgaataggaacttgattaaagcgcagtgtgcgttgcccagatgaaactgcttctttactgcgatcgtcgtggaagctcggggctctccagcggtgtttttagctgtgccccctccggggctcctgggcgggtcgtggcgccttgccaggcctaaggccactgtcggtgaagggggtcttccctcacctgtaggcaagcgcgcctctagccgggacgcaggcggcgtcaggcctcagcgccagtggcgaggggcggcgcgggcaaggacaggagacacttgagggctcccaagactccatctgggcccagctgacggtccgtagccgccaccccggccccggtaaagaatgcgagggacgcacgtggctgggggtctcggtggcaagctccttcccccgccgcggtgagagcattagctgccgcactcaaggggccccagggcctggccgcctcggtccctaggatcccggggactacagcgcccggcgaaccactgggcagagttctccctgtgcgtgctcggacctggcagcccggcggcctggacaccctcgctcccgccgttggcgcccacctgaatggggaggcgggggaggaagcggtggcttcgggcctcgagggctgcggcccccgcctcggaatcccggccccagagttaagtttgtctcctccctcggtgcgcccctccccgtgctcgccccggcgtccagctccgctagtctggggggccccgcggtcccgcaggaaaaaaaatcggcgactccacgccgggtaacagcgccggccccgcgcgcctagcaagccgcgcgctccgacctggagaagtaattataaagaaagttttccagcccgggcggatcgaccggccaggtcctccaggctcccgggccgaggccgcctccgctccccgcggggtcctagcgccctgcgcggcgccgcccatgggaccccggcgtcctccgagaggtacctctgcgcggaatcacaggggtagcctggagatcagagctaggagacgcagagccaccgcgctcaggacctctccgcgcgtcccaaacggccccccaccggccccagccccgctgctctgcgctgcagcctccccgggacgcgggtccgggacaggcctggttctggctttgaaagagaatccgcgccccagcagctcaagaccaagactcgccctccgccccccacccctaccccgtgcagcctcgggatactcctgggctcccggccgtggctggatacgggcgcctagggcaggcaggaggagggggcccccgctaccgaccacgtgggcgcgggggcgacggccgggccgggggcggagcttggagcgagcgccgcggctctgctgggcgcgctggaggcggtgggcgttgcgccgcggcctgcctggggagcgcggcgctgtgccgcgctggttcgccgccccatgccggccgcgcgctaggacccagcaggcgccgcgccgccgcagcccggggacagaggccgcctcggactctagggggcgacgcggcctgccgggtataaaagctgggccggcgcgggccgggccattcgcgacccggaggtgcgcgggcgcgggcgagcagggtctccgggtgggcggcggcgacgccccgcgcaggctggaggccgccgaggctcgccatgccgggagaactctaactcccccatggagtcggccgacttctacgaggcggagccgcggcccccgatgagcagccacctgcagagccccccgcacgcgcccagcagcgccgccttcggctttccccggggcgcgggccccgcgcagcctcccgccccacctgccgccccggagccgctgggcggcatctgcgagcacgagacgtccatcgacatcagcgcctacatcgacccggccgccttcaacgacgagttcctggccgacctgttccagcacagccggcagcaggagaaggccaaggcggccgtgggccccacgggcggcggcggcggcggcgactttgactacccgggcgcgcccgcgggccccggcggcgccgtcatgcccgggggagcgcacgggcccccgcccggctacggctgcgcggccgccggctacctggacggcaggctggagcccctgtacgagcgcgtcggggcgccggcgctgcggccgctggtgatcaagcaggagccccgcgaggaggatgaagccaagcagctggcgctggccggcctcttcccttaccagccgccgccgccgccgccgccctcgcacccgcacccgcacccgccgcccgcgcacctggccgccccgcacctgcagttccagatcgcgcactgcggccagaccaccatgcacctgcagcccggtcaccccacgccgccgcccacgcccgtgcccagcccgcaccccgcgcccgcgctcggtgccgccggcctgccgggccctggcagcgcgctcaaggggctgggcgccgcgcaccccgacctccgcgcgagtggcggcagcggcgcgggcaaggccaagaagtcggtggacaagaacagcaacgagtaccgggtgcggcgcgagcgcaacaacatcgcggtgcgcaagagccgcgacaaggccaagcagcgcaacgtggagacgcagcagaaggtgctggagctgaccagtgacaatgaccgcctgcgcaagcgggtggaacagctgagccgcgaactggacacgctgcggggcatcttccgccagctgccagagagctccttggtcaaggccatgggcaactgcgcgtgaggcgcgcggctgtgggaccgccctgggccagcctccggcggggacccagggagtggtttggggtcgccggatctcgaggcttgcccgagccgtgcgagccaggactaggagattccggtgcctcctgaaagcctggcctgctccgcgtgtcccctcccttcctctgcgccggacttggtgcgtctaagatgagggggccaggcggtggcttctccctgcgaggaggggagaattcttggggctgagctgggagcccggcaactctagtatttaggataaccttgtgccttggaaatgcaaactcaccgctccaatgcctactgagtagggggagcaaatcgtgccttgtcattttatttggaggtttcctgcctccttcccgaggctacagcagacccccatgagagaaggaggggagcaggcccgtggcaggaggagggctcagggagctgagatcccgacaagcccgccagccccagcc

SEQ ID NO: 1887459 - DNA, 4001 bp, Homo sapiens
tccaggcctggggtccatatccccaaggccctgccactctgaacaggcacactaaaccacgccagggctcccagaaacagccctaataaggtcatgttggtggcaggtgtctgaactcactcctctccccaaaaatcctgacttcccattcaccattccacctcccttcagccaaggcccagagagggcccagagaggggcagtcactagccagaagtcacacagctgagccccaaacgcaaacctggatcacagatgctgattctgaagacacccccccaccccttcgtgccaagcacctgcaggcaaagaccaggtgaagtccagccaggccccacgcaggtggggattcacttccccgagggtactggacccattttcgacacgaggtgaagcccctgtatctcacacacagacggacctgggacccctaaaaagtggagggtgattgccggctgtcgtgcacacggcttctcaattctcaccctccaaggaaagcccgcaaatgggaaatacccccgaggtaccccagggaccccaacattctccaacctgtaaaaaaagaactggggatgcgtcatggtcctgctctgttgacagcagggaaactgaggctcagggccaggtgaaaacccagccccagcccctccttcacccctcacttctcccgtgcccaggtttcccagagatttaaaaataagaaggaaaaaaaaaaaaagatgaagaagagtcaccaggatgctccagtccctgcacccccacctgtctctccgacctagagctcaaccagcggcctttcaatgcaaccgtttggggggccatgtggactcccccattcccacgggaatctttctagaaatgggtgctttgggtgtacccaggggtgggggcgtgtgggaaaagcccacctatcacctctggactccagatattgacttatgggggccgcatgggagcccctctgccctcctaggccacatggaggagttagatttttcaggcccaattttgtgtgtgtgtgtgtgtgtgtgtgtgtgtgtgtgtgatggttggttttgaaaagagatggggaatggggaggggtttctttcctccctcaagataaccagctggagggtctagctgaagtgacaggcctgggccccatctcaccagaccctccctagggccttcttgaaccccttcattcattcattcattcattcattcattcattcaattcattcattcaataaacatgcattcatgcttaccgggcacgcagcgctggggaaaaagtgggtgtaaaataggtcatgggccccggtccttccccaaggcctctccagggtcttcctggaggatgggagggggagggccgggggtgtccagcacaaggcctttgaagtggcacccccagtccccaacacctgaccggaaggctgtcaaagccaccccaattcagacgctgggcccatgatgggaaccaagggctggggatacaattgccggacacccccacccgggatgccatcggagggagaatccagtgggagggaggcagacaggcctgaggccgcccacgcctccctcctcctccctgtccaccccagaatttgggctctgcccagatggacacgtccaagctcattgtcttgggcctgagaccccaacacattgctaagaggctcggccagtttcaacttgagcccaaggtggaggcgggggagggggagggcagagaaatggaggagagaatgctgatccacgcggaggtggtggggccagggggtgggcagcgacgggagcctctccgccacccgaggcaggcgaggcgggcgcgtccccccgagccgggcgcccccaacccgtcttcctttgtagttaccgattagcctggggtcctgggcatccgtgtcccccgcggccggacctgccccgccggcctggctttgtgaaaataaccaaagcaatggagtccgcaggtgcaaacttccccgacggggcctggggaggctgaatgaatgggggtgggggggcagggaggggtgccggcgttcccgaggctcccctggcaaacgggcaggaaagagtggggtgagggagggaggaaggggtgggggtctgggggatggaagggtgagggagggagggagggagagagagggtgctgtggggggaaggatgagaggtcgagggagatgggagagaagagaaagggagagagagagggagagagagagggagagagagaggagatgccggaaggtggggagggagggagagggggcggaggaggggagggggcccgctcggatctgtcagctgcacccccagagaggggaggaggggtgggtgggagggagggggtaagaaccgatgctccggcagaggcaggcagaggagggaggtgagcagaggagggatggtgatgggggagagaagatgccggaaggtggggtgggaggcggagggagggggagaggggggagggggccgggcgcccacctttgtgcatccccgtgtaggggtctttgagcaccgtgagctcgtagatgcggccgaactgctcgaagagcggcttgaggtccttctcgtccaggtgccgcgggatctggcccacgaagagtttgatggcgtccaggtccttcatgccgtcgggctgccccccggggggctcgggcccgctgctgcccacgggcgagggccgcggctgcaggagctgctgctgctgccggcgcgcctcgctctccgtcaggcgggccatggcgggcgcgggaccgagccggcggcggcggcggcgggcggcgggcggactcgcagctggagcggcggccgcgcctcccgcctccctcccgggcccccgcgccctcctcccgcccgcgcccgccccggcatcgggaccacaaaggcggctccgcagcggcccctggcggccgcgccgcgcggggcagccggcgcctccccgcatccccgggccgcggggggaaactgaggccggaaggccccgggccccgcctacgggtgggcgagggcggagctgcgggcgggacgggccttagccggcttcccaggggtccccgccggctcccgcggagggcatcggccggaagaatgtcaaaagttgctgggataatgtagggggcttgtcgttgaaagcgcccgtgatccttaaagtaggtaactcatcaataatattaataacactaataatatggctgggcgcggtggctcacgcctgtcatctcagcactttgggaggccgaggtgggtggatcacttgaggtcaggagttcgagaccagactggctaacacggtgaaaccccgtctctactaaagaatacaaaaattagctgggctcggtggcggggggtgcctgtaatcccagctactcgggaggctgaggcaggataatcacttgaacccaggaggcggaggttgcagtgagccaagattgtgccattgtactccagcctgggcaacaagagcaaaactccgtcttggtaaaaaaaaaaaaaaaaaacacctaataataacaacactaataataattaatcaagagcaagacaaagtgctcccactaatcacgacagcacaggagaaatggtaaaagtatcttccagttctatagggtgcttacacatagaaagtgtccttggccctttaagtatgtaactcatcaataatgtcatcaacaaggagggagactggctcgcactgataatgacaggataggagaaatactgaagtatctcccagctctaaagtgcccgtgatcctttacgtatgaaactcatcaataatattaataaaaataataatacgtgctggccgtggtggctcacacctgtaatcccagcactttgagaagcagagtcaggaggaccacttgagcccaggagttggagaccagcctgagcaacatagtgagacgccattgctgtaaaaaataagaaaacaggccaggcacgatggctcacacctgtaatcccagcactttgggaggctgaggcaggtggat

SEQ ID NO: 1887460 - DNA, 4001 bp, Homo sapiens
ggggccgtcccccaccgttatttatttatttattgtgcgtctgtctcaccttgtctcttttacactttgaaccatgtgaatgtaacacctggtcaaaacagtaaaaattttttttaaaaactgtgcttgtgaaaaacaggaacaggccaggcacagtggctcacgcctgtaatcccagcactttgggaggtggaggcaggcggatcacgaggtcaggagttccagaccagcctggccaacatggcgaaaccatgtctgtattaaaaatacaaaaattagccaggcatggtagtgggtgcctgtaatcccagctactcgggaggctgaggcaggagaattgcttgaaccagggaggcgaggcagaggctgcagcgagccaagattctgccactgcactccagcctgggcgacaagagcaagacttcgtctcaaaaaaaatagtaataataataatacaaaaattatccgggcatggtggcgtgcgcctgtaattccagctacttgggaggctgaggcaggagaatcgcttgaaccagggaggcagaggctgcagtgaggccagatcctgccattgcactccagcctgggcgacaagagcaagactccatctcaaaaaaataataataaataataataataataataataatcagttgggcatggtggcgtgtgcctgtaatcccagctactcggtggggctgaggcaggagaattggttgaacccgggaggcggaggttgcagtgagccgagattgcgccactgcactccagcctgggcgacagagcaagactcccatctcaaaaaaaaaaaaaaaaaaaagatagaagaaaggaagggaaggaaaggaaggaaggaaggaaggagggagggaaggaaagaaggaaaaaagacaggaacgaaggaaggaaaggaaggaagggaggaaaggaggaagggaggaaaggaggaagggagggaggaaggaagagagggaggaaggaaggaaggaagagagggaggaagggagggagggaagaagggagggagggagggagggagggagggagggaggaaggaaggaaaaaaggaacaaatgccgcctgaccgttctttgtggaatgactacacctatgatgagtacctccatggaccatgcacctgccttgaaacaaggaggcacagcacacagggccctcagctagagtgacagggaaaggcgggtggacatggggaaggctcaaactcaagctttgaaatcggggaaagccccgaaatctgaaccactcttgggcccatccttctctctcccacattcacaccttcgcctgcgctcccataattgcaaattaattcatccacacattcacacattctctccctcccactctcaacaggcagccccaagcccgggggcctcacgaagtctgggtggatgaccaagctcctccctcgagactacatttccaagacagaggagggaaggggaacgaacagcggacacgcgctgtgaggccgagaaggcccgcaagggaccttagggccgggcgaacacgcctccacgcagatctgggccaaagaactcctcgacccaggagggacccagactcagatcagcacctgcgcagtatggtcttaggcgggtaccgtcccgtgtagcgggtctacatttcccagagagccgtggggccgccgaaggctccgattggcccactcgggtgcgtgccagctgcggacacagtggcctcatatcccagttccccgaccgaaccaagaggaggggctgcagctcctgccccgaagccggggccccagcgcggccgatcaacctcaccttcgggtcgcagtgcgagccgtctgctttagctgggctggcggggcttcggcccttccccatcgccccgcctcacagtgcagttttccggaggacgccgagcccagggtccatctcggccgcgaagggggaaggttgcctggcgacggccgggcagggaggaggctgcgtcaggcccgccccttgcgacgctctccgctctgcgcccggcgtcccgggtactgccggaaaatgtagtttggcaacgaggccgcaccgcacagagtccagccaggggcgccagaagctgcttctgaccaaaggctggctttctcgccgcctaatgtctttgtcttacatcaccctcccttcctccttcctttcctgggtatgtgtcactattttctttttttttttttttttttttttttttgagacggagtctcgctctgtcgcccaggctggagtgcagtggcgggatctcggctcactgcaagctccgcctcccgggttcacgccattctcctgcctcagcctcccaagtagctgggactacaggcgcccgccactacgcccggctaattttttgtatttttagtagagacggggtttcaccgttttagccgggatggtctcgatctcctgacctcgtgatccgcccgcctcggcctcccaaagtgctaggattacaggcgtgagccaccgcgcccggccactattttctttttccctgtttgtcccctagcccggagaacaggttcccttcagactgccaaatataatttcaaaacagttaaaaacatgactctcagtgagcatgtgtcaaaagatttatttaccgtactgagggaagcagcaagatgattctaggaagacaggaaaggaagaataaacactggccggccgcggtggctcacacctgtaattccagcaatttgggaggccgaggtgggcggatcaccagaggtctggaggtcaagaccagtctggccaacatggtaaaaccccatctctactaaaaatacaaaaatcagccgggtgtggtggagcagcctgcagtcccagctactcgggaggctgaggcaggagaatcgcttgaacctgggagacggaggttgcagtgagccgagatcgtgccactgcactccagtctggcaacagcgagactccgtcaaaaaaaaaaaaaaaaaaaagaaagaaagaaaaagaaaaacactgaaataaaagcacaaagttggatacaaaactgcttagtgagctacaaagcgatacactggacagaaagcatttgcaacctatcaacctgtacagggtagcatataactggacagcatctggactcctaagttttcctaacagttttacctcggattctccctgtctctcttcgtgctgtcatctttctctaggtcttcgaaaactgtcaatccatcttactgtatctctaatttctgtcccttttctcccttcttgtttctgtccctctcccttcttgtctacctcttgagtctggatatctgcatttcttgtctctgtgaacccattctgcgtttccttctttgtgtctctttcatctgcatccctttctgatctgcctctctcttgctaactgttctgacacctgtttgcccggccctgaccctctgatccactcagccctcttataacttggacccgtgtctctatgtttgttcacttattttcactgtctctcctcgcgtcgagtctccggtcctcccagtctgtgagtctgtctctctgtctctctctctcttcctcccgccggtccttcgtctctctttgcccttgagtctctggtctctctccgtctctcctcgctgtttctatcgatcggcatctctctgccccagtacccttccccacctcttcatcccacatgccccattgcattttcaacgcccgccgcgtctccgggttacccaggcgatgtcgagtcgtgtccccaggttaccatggagacgttcagggcccgcccctcgcccatgatcacagaggaacgtcatcgcgccgcgcgcgcacgtacacacgaagggcctgctgactacatctgccggaaagcatcgggccaagcctttctccattttgcggtctaggaagtagcagaggccccttcctgtagggagttgccatggagacgcggtggggcaccgacggagttctaatgacggccgtgattggtgcaggatcctg

SEQ ID NO: 1887461 - DNA, 4001 bp, Homo sapiens; identical to SEQ ID NO: 1560181

SEQ ID NO: 1887462 - DNA, 4001 bp, Homo sapiens
ggccatagagggccccccagaggctttggggccgccgaagagtagtgagtgagggtccttgtaaagctggttctccagatggcggcggctttaagactcccctccgccaaccaggctcagtaggggaggcctgtggaaggagagaaaaggcctgggtggaggagcagagtgggcctggccccgcgtggggagcgagtgcgccgttgctgtgcagcacggtgggaggggaggccgagggccgggcggagtgctggggtgcagtggggactcggggtgtccgcctgcacccgacagcagggacgcacaacactatccggccaggcgagtgtgggggtgtgggccacgcacccagccgtgataatcgcggttccagtgggagttaggcttgggtgcgggttggagtttgtaggcaaactgggttgcgtaaagttggggtgcaccaaagtgtggcgatgtaggaagaattgggattgcgaatattggggttcgcatgaatggggttgtctctgttggggttttggtgggcatggggttgatggcaggaatggagtgctggggtgctgggaaaactgggacgtcggttgtattggcaagaatatcacgacaggtgtcggggttcagatgaagttgggatgtctgacagccgggtcttggttgggtaggggatctgggctaggttgttatgtcgggactgctggagcacaggcaaagtcggggtcccagtgacacccagaagtccccatgaggcctgaggcctgggaatcggggctagaggcccatttgttccccgccgcaggccagggagcaggcacgcgtaactgggtcagccccgccccgccccgccgcgcgctggtcacgccccctcgagcgcgggtggaggactgcggactgcaaacgtctcggccaatagtcgagcccgacaccagtccgcgggagggggcggaaccgagatagactcggcccccagctcatgaatataagacgcaggcgcgccctctgattggcccaggatgtgtagggggcggggcccggcggaagcgtatataaggccgggctcggggacgcccccccctcactcgcgcgttaggaggctcgggtcgttgtggtgcgctgtcttcccgcttgcgtcagggacctgcccgactcagtggtgagggccctggctgcaccggctccgaggagctcggggcggcgggcggcctgcggcggccaggcgaggcggggccgcagcggcacgcccctgggagggggcgggcccggggtggagtccgccccgccggcggcgagggacagcgggagattgggccgagtagcggccagagggcctctccccgccggtccgggccgccggcgacccggttgccgccgcaaaatggcggccgcgagctcgaggctgtgcccagcgaaatggcgggagcgccgagttcccggatggagtggcgcagggtgcgcgcggggcgcatgcgcacgcggcgggggcggggccacgtggcgcccccggtctccagggccgctttcccggccttggggctggaggtatccacacaccaacgcttttgcttaccgagccttagtttcctccttttcccattgcgattgcatgagggaaaggacggcctcgtaaatcttgggtaggcgtggcccgttctagtgtggttcctcgtctgccacgtcgtgctttgcgcccaaagtttggtccaagttggcacagctcccagtgccagacttccaagtctagttctcagagccactgggtggcggccattcccagccagtgaatgctttgtctgtgtcagcactgaccgcccccttaaatagccagttctcctaaatgccacttcccctgcctggaaatcctgccttatcacttccggggccatcccttcccgattcccggcctaggtcctggctatggaagtcagtacctgccctgaggtgccccccaggacggggcggcctccctgacagccagccccccccccagtctcaggaggcattttacagtgagcagaagcacgttctggtccagcaacaagtagatgtcagttggttagggtaggagttggcacccgttcggaaataggagaacctgagagtgcagtcctgcccagggcacaactggaaggctgtgggggaagggagacacccattgtggaaatgggtgcggcctgccttcagtcttgggggtggatggagtaaattatttgaattaagaagtcctaggtggctgggtgcggtggctcacacctgtaatcccaaaactttgggtggccaaggtgggaggattgcttgagcccaggagtttcagaccagcctgggcaacagagcaagaccccatctctactaaaacaaatttaaaaaaattatccaggcgtggtggtgtacacctacagtcccagtttcttgggaggctgaggtaggaggattgcttgagcccaggaggtggaggctgcagtgacccctgcactccagtctgggtgacagttagacacactgcccccgaccccaaaaaaataagtcctaggtatgagtttgagataatgaaaaataaaaatctgattttctaatatttcccctaaaaaacacatgtcatttacataaaataggaagcggggagaggtggtgagagatgacccctgttgaggatttcattggtgtctgccacaggccgccatggcatcagatgaaggcaaactttttgttggagggctgagttttgacaccaatgagcagtcgctggagcaggtcttctcaaagtacggacagatctctgaaggtgaggctgctgctgggcccgcggccctgggcgggggggcttgtgctcctcctacctggaagtacagctgggtgctgactgcagacctctctcccctgcacagtggtggttgtgaaagacagggagacccagagatctcggggatttgggtttgtcacctttgagaacattgacgacgctaaggatgccatgatggccatgaatgggaaggtgaggatcagggtgctgagcaggagtcccgtctcgaggatggggcacccacctgctaacccgtcccgccctctgtctccagtctgtagatggacggcagatccgagtagaccaggcaggcaagtcgtcagacaaccgatcccgtgggtaccgtggtggctctgccgggggccggggcttcttccgtgggggccgaggacggggccgtgggttctctagaggtgagtgccatgagtgggtcccttggggatgctgtgaggtactgctggtgggagctggtactcactttttcctgtatgtgcaggaggaggggaccgaggctatggggggaaccggttcgagtccaggagtgggggctacggaggctccagagactactatagcaggtgagggggaggccggcccaagcacaggggtggttgcgggatggccagcttccgtcccgggtcccaggtccctgggggagctgagatgagactggctgggcaaggagcagaggcaggtggggacccaggccaagaggagaggagactgctcaggacattcgcagaagcgggagggcctgggggacaggctggtggagattttgaacaatttccaagatgctgccctgctggggtccttgttgtgtccccagaagggacggctggcatgggggctggcggctcagcctgttgtggcagagcagaagtagacgggtaccttccggtactcaacgtttgtctgtcttgcagccggagtcagagtggtggctacagtgaccggagctcgggcgggtcctacagagacagttatgacagttacggtaagtcacactccgagggcgccacgctgctgtggcctgcggtgggagctcggttcaccttggtgccctctccaagcactttaggctggacactcagaccttgtcactgtgcttgcccagaagaggcgcatctgtcctctcagagccatttctatcgcaggacgcaaaagccaaatgagactgaccaaaaaggcaagggagagcgagggc

SEQ ID NO: 1887463 - DNA, 4001 bp, Homo sapiens; identical to SEQ ID NO: 1560184

SEQ ID NO: 1887464 - DNA, 4001 bp, Homo sapiens; identical to SEQ ID NO: 1560188

SEQ ID NO: 1887465 - DNA, 4001 bp, Homo sapiens
caagggtcagagaggtcgagtgcttccagggagagcgcaccaagaggatgcagggggtaggggtttggccccacgggctcaggggtggagccacaggaccaggccaaggtcaaagagggggtccggcgacgcacacgggcagggtccacttacaccgcaccccctcctaccccccctcaccctcactgttctgcagcctcacggcctccagcgcccggtacagctcggtgctgacgtcctcgcggtccctgccggcttcagccaagccatgggtcactgcggggtcaagggaatggggattttggttgggctcaaggtcaggactagctaaaggtcaggacccctgtccgtggtcattgtaccctcggtgccagccaccaggatggcacagggtcaaggacggttacacctgggcagggtccgggtgtggccggcgctaggagtggcagtcaaggtcagagtgcagcgtcagggtcaggacggggtgcatgatcagtgtcaggggtcagcactcaggacggggtcggggtcggggtcgggggacgcggccagggctcagggctggggtcgcgtcgggccctcaccgcgctcacgcagttcccgcagggctctctcctgctccatcagcttcgcctgcgcctccccaagctccgcgctcgtggtctgcagcagcgcctgcgtccccgagcctgggagccgcggggtgagaggggcgagggaggcgaggatggggcgggacttcggagaccagccccccgccgccccactcgccgcaggcctcgcctccggcccccctcccatcccggccacaagaccccacccttgcgcccatagtctgggccgcgccccctcacagcagctgtggcaggctcccacctcctcctccagggcacccagcgccgccgtctgcttcgaggctggaacgacccccatcccaaaacgcatgcccgccgggtcacttgggaggactcaggggactcccttccacaccccgtggccagactcagggaccacagggcccccacgcacccaggactccatctctggggtctcagacgctcccgccgcacacgccccgggcgcccaggcgcccggctctgcacacaccgtttgtcctcagcaggtcctggcagccgagcagcgccgcgcgctccgtggaggctgcggagagaggctcctgcaggcaaggccagggactcggaaatccttcccttgcccggggggtgcggggtcccccgactcgggaccacagagcgggcgggcaggcaggcatatagcgcacactatgtgcacacacgccgatgggagacaaacgcgtggggactcgcacacatacgtgcacgccatgtgcacacgcgtgactgcaaacggcccaaagatgtacacacactctgctcacgctcagacgcgagcaagacgccagggcgcagttggtgcgccatgcagtgggggttttgtgtccccaggggggccagacgcaacccctccccattgagggtcactcacccttggacaataggatactcagaatcacagcccacagtactggcgaccaggacagccatggccaggaagaggggtctcgggctccagtgcacccagcgtccccagtgccctggcagaacaaggacggcatgctgggtcccccaggactgagccctagaggcctgggttcctctcaggaaactgagtttcagagaggttaagtaacttgcctatggtcacacagcttctaagtggcagagttggaattggcccctggtccaactggctctgtgttgttttttttgcacccacgactctggcccgtcttggctcttccctcccctcccccatcaaaccccagacaccggggcagggatggggcagtctccttgctcatacctccggggacctcctcgtagctcccgccccagttgctgtacctggtggtgtctatggcggtgcaggcaccgagacctgggcagagatataaatttcaccctcgtcctcactggacctacgcactcccttccttccttctcattttcttggcctggattcctggcaacagggacccaaggacaaatcacagggttggaccaatcacagggttgggccctttctgggctgggctgggctgagctgggctcggggtgaggtagttccagcttcccggtcctcgtcgctgcagctccatccccaggctggtgctggaggcttctctttggagcttggacccctctcttatgggcctggggctgggtttccgcctgagagggacacactggacccgaccaaattgtaacccctgctggctcctgagaaagcccccaaggcgtagctccccaggccagttcaggtccctcctcagaggctgggtctgaacctgaccttgattcactccctctgtgccagaagagagcaaacagaggttttgttgaggaggtggtctgctgagctgcaggactctaccacttggtgggtggcggatggggctgtgcagtgtgtagcttcaggaagcctcaactttctttttctttttttcttttgagacagagtctccctttgttgtccaggctggagtgcagtgatgcaatctcggctcactgcaacctccgcctcccaagttcaagcgattctcctgcctcagcctcccaagtagctgggattacaggtgcgtgccaccacgcttggctaatttttgtatttttagtagagatggggtttcaccgtgttggacaggctggtctcgaattcgtgacctcagatgatccgccttccttgacctcccaaagtgctgggattacaggtgtgagccacggcggccagcctagaagccccagttttcttttaccaaccctgaaaagagtacagtgacggggcttctctcaaagaaacaccgagaaacaatgaagttacgcatgtctacccagaaccatctcaggttcatcaaaaactctcaatgttcatgcattctttcaacaaacattgaatacctgccatgtgccaggtattttaaaatattataaccagccgggcgcggtggctgacgcctgtaatcccagcactttgggaggctgaggtgggcggatcacgaggtcaggagatcgagaccatcctggctaacaaggtgaaaccccgtctctactaaaaatacaaaatattagccgggcatggtggcgggcgactgtagtcccagctacacgggaagctgaggcaggagaatggcgtgaacccgggaggcggagcttgcagtgagccaagatcgcgccactgcactccagcctcggggacacagcgagactccacctcaaaaaaaaaaaaatattatcacctacatagaggaataaatgtaaagattgcaactacgaagagcatttgcacagagtgattacattactaaaattaatagaaacaacaaactagaaagttaatgaaaaataaagcctctaaaatagcaactcaaattatcgtgtatctaagaatcaataaagaatgcaccagaggccaggtgcggtggctcatgcctgtaatcccggccttttgggaggctgaggcgggtagatcgcttgggcccaagagttcaagaccagcctgggcaacatggtgaggccctcctctctacaaaaaatacaaaaattagtcaaatgtagtggcatgcgcctgtagtcccagctactctgaagactgaggtgggaggatcacttgagcccaggagttcgaggctccaggctgtagtgagctatgatagtgccactgcactctagctgggtaatagaggaagactgtaaaataaaaataaaaaaaatgcacaggacatatctgcagagaaaaaaatttaaattcaattagagaatactgtaaaaaggatttggataaagatagctaatgtttccagaggtcagaagaattaacataaaagggccagccaggcgcagtggcccacatgtgtaatcccagcactttgggaggctgaggcaggtggatcacctgaggtcaggagttcgagaccagcctgg

SEQ ID NO: 1887466 - DNA, 4001 bp, Homo sapiens; identical to SEQ ID NO: 1560190

SEQ ID NO: 1887467 - DNA, 4001 bp, Homo sapiens; identical to SEQ ID NO: 1560210

SEQ ID NO: 1887468 - DNA, 4001 bp, Homo sapiens
ctgacctcaagtgatcttcccacctcggcctcccaaagtgtacgtatctttttagtaacgatatatttgacgatgattaaaaaaacccgatccttgaaggcccttgatagatgctgaggtgagtacaggcctgactctgagggtcatgcgcctagcaggcgtcgcccggtgcacagggccaggagctgagtcgtgcgggactggatggaggccaggggatatagaagacctgggcagctccccaggaccaagccctctcgcctagggctccccggggagttaggccgaaccctgctgtgcccttcactctgcagccctcgtggggatcatcacagaggcaggagctggcaaccgaggtgactgccttcgagtggagggaaaccggggcgggatgtcgcccggcggctcccacacgatgaggggaaaaggcactccagtctgggtggcagagcgagactccgtctgaaaaaaaaaacaaaggaaatgtagaaacgcagcccacccaggttttccacggccgttcatggttacgcttctggaaggacccgtgtcctctcagatgtagcaggattccgatgggagccaccccgggtcccactcgcccccgggacctgccgtgggagctttctttcctggtggggtgcctgactctgcctgcacgttccccccgctgtctgtggcaccacttgggaccggggacccctgcccccctggcaagaccaggtcagctctgcccccgggccacggagcaggaagcagagctgaggctgctgaggtggcgcagggttgctgtgggggcctgtgcgccatgggggcctgggtgggggtgttctcacttcccccggagtctggaaggccgtctttgtgatggatttgatgcagatgtgtccactttgcttttgttgatggcgtctgaggctctggagtccatggcagccttgcctccgtttgcataatctgaattttgggaaaattgcccctatgtggactagttgcagggacagtgccctccgccaaggctgccggtggtgtttgccttatgtgtccggtgctgggtgagtgccagcttttccctggtcagctctgcccgtggccctcacctgtggtctgtgccatcaccagggcgaggctgacctgtgggacggggtccctgcacagcctcgccgtcccccacatccccccaacagggtctggtcccagctgccattgtgcagccttgccccctccccccgcatcagggtccggtcctggccgctgtaccgcgatcacctgtggccctcctgtgttctttacctggactcttgcctttgctgatggcgacctgtgacggctcagctgcgttctcagaggccggctgtcctcgtgggcgtctccggtgcagtcggcgcggtgaggttggcttctgccatggacggggccttctcgtggtgatgacagtcgcccttggtctggtgtctgcagtgctccgaggaccggccctgcccatccctggcgttcactcctcagcttcctcccatggggtgggcggcttccctcctctccctgatttgtggggtgtttctcttttgcacctgatgcgttaaacccattaccggcctaggtcagcctgaggttggtttgtcctggccgcggcagctcctgcgcccctccattgtggagggcgcccttccgtctgccctgcgtcactgggctgggcctggccccgctctgctgtggccctggcactggaagtatgtgctgccctggtgttcgggggctcttgggtcctggggcgctgcaacccctcattttctttccttggggtgcagatgaattggggtggcagggaaccgagcccacagtggccagcccctgcggccccaggtcagagggcagggccggcctggacagagctgcccagaacggtctgcggccgggtccacatgagtctaggtgcctctgagggcactgggacggcggtggcctgcacctgcccagcccagtgaggtccctggcctcccttcagctttgccctgggctctgggctgagggctgtgtggtgatgtcagcccagggactgtgacatcactcagtggagacagtcagagaagggggctcccggggccctccccagggaactggccctgggcccagaccagatggaggaccccgaaaagaacagggcaggtagcagcctgaggctagggctggggaaggggatgggagctgacggggagagagcagccccttgtgggatggctgcaatcccctcgttggcgcccgggagccatccttggcgtgtgacccggagccggcactcgccccctgggacggaatcgtggctgcgtgggttgggtggaggctgggtgaggatcagcgtcccttcgtccctccctggggttgttgcttttcgctgtggccctcaggcaacagggcaggcccccaacccccaggcctgcgtgggcactgtgggtgcccagcctttacgtcctcgcttccttccaggccccggccttgtctggcttcccttgggcaccccctggggttcggagagccccagaagaggccgggctcttcctccttggtgatggacgggtgctgggccctgaccgagtggtgaccgcctccagggagtgatctgcgccctcggaagctgctgagtcttggagtggcggctcttgtttgtgggggcagggggagctgggcacccgccctgtgcccacggaacacagcccagggtggcggccctgcctgtcctctgactgccctcctgctgctgctgctgctgctgcgagggcctcaggcgcaggcggtgactctcggggccactcctgaggtgggggatgtgggctagcggccaccgtgggcggcaggtgtgcaagcagtgctcccgttttccactgggctgcccttcaccggctgtgggtcagcgccccccactgaggctcaggctgaggcgaggctccgcggggtgggcgtgtgccagggtgaggctccgcggggtgggcgtgtgcctgggcgaggctccgcgagtcgggggcagcgcccaggtcaggggcttctccgtccatgtcaggcttagggtgggtgtggctgggccctccctctgctgtccgcccacgaccccctcagaggggctgtcgtgagatgcttggaggcgggatccagccctgagggtgcagggagtgctcagcggacccccgtgccactgctgtcaccggaggaggctgctgctcggctccgggctccatctgcaaagccgggtgtgcatctgtgtggctcagctctgcagggcacagtggggtttgctcccggccggccctgaggccgggcacagggaggccagtgctcatccagggggccagagagaaagtagcaaccccaacctgcctgggccacaacagccaagaccactgtatcagaacagacgccagcggggcagcctgctcgttggccgggcggagcagggtcggcacacagcccgggctggccttcaccccagctcccgacagcgttgggtccctgagtgcagggcctgcccctttctcatcctcctgcctccaggtcatggggcaggggtgccgagaggccctgcgggagccaggacctgagaggtgatggtcaccacccagacgaggggccgggggtcgcacaaggaggcttccagggggatgccaggagcagtggggccctagacccagcagtgggtagacccagcagggcagcgctcacgtcacaggttctgggggttggggcttgtcatctgtgcaggtgcagctgggatggggatttggtgctttttgttctgcaaaagccagaacgcatgtagctgagccaagatcagacggcatggtgcctcatgcctgtggtcccagctacctgggaggatgaggcgggaaaattgcttgaactcgggaggcggaggttgtaatgagccgagatcctgccactgcactccagcctgggtgatggagctagatcctgtctcaaaaaacaaaagaccacgcatcctagccggcaag

SEQ ID NO: 1887469 - DNA, 4001 bp, Homo sapiens
gggcctccccagccatgtggaactgtgagtcagttacatcccttttccttataaattacccagtgtcaagtatttctttataactgtgagaatggactaatacagcaagcctatcacaaggttttctactcttaatgtttcttctagtgggtctccaaggtactatgacatgtgttaccaggtgaactacaaaaacaaatgcctctgtaaatcaagttattttatagcaagctctagtccttaatcaccattgtgctctgaacaaagtatatgaccaattggactctaatactattgaactatctttattgcctgagctttgaattattcgattttgatcagtttggttcatggagactcccggtaaggtacagacttcattttctttgtattaccctcctgagagccatcataacagtctccctgatgtgttgtattttcttgagagtcttggccgggtgcaatggctcacacctgtgcaatggctagcactttgggaggccgaggcaggtggattgcttgagcccaggagtttgagaccagtctgggcaacatggtaaaaccctgtctctacaaaaaatacaaaaagtagctgggcgtggtggcatgcacctatagttccagctactcggggggctgaggcggaggatcacctgagccttgggaggtaaaggctgcagtgagacatgatcatgccacagcactccagcctgggtgacagagtgagaccctgtctcaaaaaaaaaaaaaaaagagagagagtcttaaatgctcatatgcagccattctttgtacatccaatggcttcattacagtatgaataacaaaaacatgaagaaaacaaagaatcactcaactactttgacattgtccattgtgaattccatactgagagcaaacaagtccattatgatggtgacagaagtaatgttgatgcccaaggttttggtcaatctcaaaattttgaggctcatcaaaaggggagaattgtttaattaaattaaatttgacataaagttctctctgcatagagtgaactgcaacctaacttgggagggagtatattcttcttttttttatttttatttttttgagatggactcttgctctgtcgcccaggctggagtgcagtggcaccatctctgctcactgcaaccttcgcctcctggattcaagtgattctcctgcctcagcctcctgggtagctgggattacaggcacacaccaccatgcccagctaatttttgtatttttaatagagacacagtttccccatgatggcgaggctggtctcaaactcccgacctcaggtgatccaccgccttggcctcccaaagtgctgggattacaggcgtgagccactgcacccggcccagatgaatagattcttgcgacaagtagccaaatgttggctaatcagagcagctgggctttcagtccaccacaggctgctagctcctcagactgtgaccaagtaaggcaagctgtgatctgtggccagccaggctgtttctgtatgtcacctcctttttctgcctgtgaatactgcttgcccatactgccgtgtggtgtctctcctggtttagggagttgtccgattcatgagtcacttctttgctcaaataaactctgctaaatttaatttgactgatgtttttctcctaatactaccacccatcatgcttcactatgctctgtactcaccaaccatccccgtgccacccctgactctggaagtctgcctcattctgtttggtgaaggatccccaagtacagagacaagaagcagcccaccctcagaccccattcgtctgtgtcttaccctcagaaaggatttgagtaggcctcttctgtccatctgcagaaggttccccaaaaggggcagagggcggggccctggtgggagggtgccatgggagttagggtgacgctgaaccaggagtagcaagaggcctgtgaggagtgcaaggaagaggaggacgctgagctccatggttccagtctgactgccctgcaccccactgcagcctctaactgggccttttatcctgaacctgcctcttcactcagttatgaaacttcatccattccccgcctcctttctcattatcgtcaaggagcattagcttagaaaaaggtgttagggaacccagacttcctgcttaggcaacccagcgacctaatgcctatcccttatccactctctagatgttggcagggatacagtggtagagatatcaaagtccacctaagcatgtgaacgtgtgggtgtttgtgtatgagtatgtgtatttttgtaagcacaggtgagcatgcacacttttttacttagctttgtctgtttgtttatgcttccgtgcatttctccatgcttgcttgcatccgtgtatgtgcttatatgatttttatatgtaaagtggtgtttgtatttatgcaaatgtgcaggcgtgtgtttctgtggttgaatctgggggtgcttatgtgtatatccttgcacgtgtggagcttccttgtatttatacagtttcatatatgaaagtgcatttacatttgtgtgttgtggaggtggtggtagtgtgtgttcaaaattgggaggctggctgggtgcagtggctcacacctgtaatcccagcactttgggaagctaaggtgggcagatcacttgaggttaggagttcgagaccagcctggccaacatggcaaaaccccgtctctactaaaaatacaaaaattagccgggcgtggtggtgggcacctttaattccagctactcgggaggctgaggcaagagagtcacttgaacctgggaggtggaggctgcagtgagccaggattatgccactgcacactagcctgggtgacagagcaatactctgtctcaaaaaaaaaattgagaagctgatgaaaagaaggaattgttcaattcaatcaaatctggtccactgcctttgtcgcatagcaaactgtaacctagcaatatgtgaaccaattgtgtgtatctgtgtgtgctggtgtatttgtgcttctgtgttggtgcatctcctagcccctctctttggaagcctgcagacgcttgtggggaaaagaaagagagatcagattgttactgtgtctatgtagaaaaggaagatataagaaactccattttgatctgtactaagaaaaattgtttctgctttgagatgcgttaagctgtaactttagccccaaccctgtgctcacagaaacatgtgctgtattgaatcaaggtttaatggatttaggaatgtgtgggatgtgccttgttaacaatatgtttgcagtatgcctggtaaaagtcatcaccattctccattctcgattaaccagggacagaatgcactgcggaaagccacagggacctctgcccaagaaagcctgggtattgtccaaggtttccccccactgagacagcctgagatatggcctcatgggaagggaaagacctgactgtcccccagcccaatacccataaagggtctgtgctgaggaggagtagtgaaagagggaggcctctttgcagttgggataagaggaaggcttctgtctcctgctcatccctgggaatgcaatgtcttggtgtaaagctgaccattcccattcattctattgagataagagaaaaccacccggtggctggaagcgagatatgctggcagcaatactgctctgttactctttgctaaactaagatgtttgggtaaagagaaacataaatctagcctgtgtgcacatctgggcacagtacgtttccttgaacttattcatgatacagattcctttgctcacatgtttctgtgctgaccttctcccaacctgttgccctgctacactcccctcactaagatagtaaaaataatgatcaataaatactgagtgaactcagaggccggcgtcagtgcaggtcctccgtatgctgagcgctagtcccctgggcccactgttctttctctatactttgtctctgtgtcttatttcttttc

SEQ ID NO: 1887470 - DNA, 4001 bp, Homo sapiens
ttgcactccagcctgggtaacaagagtgaaactgtctcaaaaaaaaaaaaaaaaaaaaatatatatatatatatatatatatatctcactaatccattaaaaataggagcagaaataacacagaaaacagtttggagtcagatggcataggctcaaaataaaattatcctaccacttactgtgtgacattatctaacctttatcttagctttttctttttttttttgagacagagtttcactcttgttgcccaagctggagtacaatggtgcaatctcagctcactataacctccgcctccagggttcaagtgattctcctgcctcagcctcctgagcagctaggattacaggtgcccaccactatgcccagctaatttttttttaaatttttagtagaaacggggtttcaccacgttggccaggctggtatcaaactcctgacttcaggtgatctgcccgcctcaacctcccaaagtgctgggattacaggcatgagccaccatgcctggcctatcttagctttttcattgacaacattagtataatgttaacagctctcctaagggagtcaatacagtaagtcatgtggactacttaccaaagaacctggcatatagggagtgcattgcagtcatttccggttttattgtttttgttgttgttgctacctaccatgaccttggaagttttgctttattgaagccagttctccacggccactgaactcatccgcttggtctatcaaggcttccttcactgcttcgtgtccacataaaaccaccactggccgggacccatgtacacagtgaacacagggctgtatttctccctgagcttggagtgaaggaaaacacaagaggaggggctgactggagtaccaagcataggccagttgaggattttagaggatggcgattttagagggatataaacatggtactaaggaaccaaggtaaatctgggcttggaaggaatactgggaaagaggcacggaagtcttggcttctgtcattctcggcaaaagctcatcccttcccacaagagttactgtctgcatctccaaaataagggacctggattcgataaattccaagattcatacttctctctctgaaatgttaaatttctagaatcttaagacttcatgataccaagtctcaaagtgctaagacaagctgagtcaaagaatcctgtgtttaaaaatataatgtactgtgattccaaagtcctgagatcatgaaaatcttatttcaatgcactgagaatgtgtgtttccaacattttaggattctggaatttcagaattctaagatttgcaaagtctgtgtttctgagagtctatcttttagaagtcataagtttctatgtgaatctggctataggattagttgcttttagccctattaaaggagacagacagactcaccttcatgaaagactgaaacgtagcatcagttcgaacttgcagcaggtgccccaggaaaagaattggtgtaggacctgggggcagctttcctgccttatccattcgtttccaggcaatgaggatgagcaggcaagacaagcggagtgccagaaagatggtgacagcccctcccagctccatggtgccaggtcaacaggttctgtcctgggcaccagatcctgcctaagtaggtcctgggagatcagcttataccaaaatctgaacaccctgggattcaagttttccgggtttgagtgtcatcggggaagagattgctttatattgggggtggttatataacctataatctcccacctgaataaaggtaaattgaattcacacagggaaatcctctggggccattcccctttcttcatatttccagtctccctgttcttccctctcagctcaacagaattgaacagaatttcttggtggggtgtaagaggcaaattattatctttttaggctattgattttaggatccagacaatctgggtacaagtggcagctctgtcttttcttcactgggaaagtcacttaacctctgggacttgtttccccatctatcaaacagggaaaccatgttgttttatttttttttattgttttattttttgagacagattctcactctgtcacccaggctggagtgtagtggtataatctcatttcaacttctgcctccagggttcaagcgattctcatgcctcagcctcccaagtagctagaactacaggcgcacaccaccatgtccagctaatttttgtatttttgtagagatgtggtttcaccatgttggccatgctggcctcgaactcctggcctcaagtgatccaccacccgcccccccgttagcctcccaaagtgctggaattacaggcgtgagccaccacagctggcagaccatgttgttttagaaagtcttgatagacaacaaggaaaactctttgttcgttacttaattaagtataaccctaattaaacagttattaaatttttttaattgacataataattgtacatatttgtggggtacagtgtgatgtttttatacatgtatgcgatgtataacaatcaaattcgggtaattattatatccattactgagacatttatcatttctttgtggtaagaacattcaaaatcctctcttctaactattttgaaatatgcaatgtattatcgttaactacagctaccctactgtgtaatggaacactagaatgttaataaggaaagtaagctgaagatttagaaaacaagagaaataaatcaattgaacaggttttgttcaaaaagttcttgttttctactcaagatgttaaataacaataatcaaagattacttgtgttggtgtatcagaactttgctgtatcaaatttaaaaaagaaaaaaagaactttgctgtattgtgtgttggtgtgtgtgcgtgtgtgtgttttaaaactctaaggtgtagggatcacctctgaaccccagtctctggaggagaacatctcctccagcgcaattagtgattgtgttccttaataatctaaaaagtgattcactaccttttccgcaccaaatattttcaaagccttattggcctgaaatgaacttcctggatattatatcctacccacatatactatttatcaaaattcaatgtccttttcacacgactgtattctcagacttggaaactgaatccctcaaggtatctgtaagttttgggaatggggtttggctggctgagctgaggcatcctgtgtccagaagcagtggaaattctacgaaaactgagtgactcacacacagtgccacgttctgtctcttggatctgctgctagaatgtctttcttggagtagagactcagctcagcccatctcctttgactctcttagatttcacctccccatcccattctgatcctcacaccccagcatttaacacccattcagggtggtggcatgtgtgtggtgatggtgagtctggttttcctactcagacgggaagggagagagcaaatactcttagaacagctcccttcaccattccacctccagataggaagccaggagtggaggaacttgaactaaaaagtagaagcaagctaaagaggaaaaataattgcagaggacttgaggcagagaaattcagagcatggcagattatgccaggtattatgtgatggagacagaaatcaagattgagacaaaatcgaggtgcatagaaacagaaccagagtgagatcaaaatagagatgaggacaggcacagtgactcacacctgtaatcccagcactttgggaggccaaagcaggtggatcacctgaggtcaagagttcgagatcagcctggccaacatggtgaaaccctgtctctactaaaaatacatgcacacacacacacacacacacacacacacacacacaattagccagtcatggtggcgggcgcctgtaatcccagctactcaggaggctgaggcaggagaactgcttgaacccgggaggtggaggttgcagtgagccaagatcgcaccact

SEQ ID NO: 1887471 - DNA, 4001 bp, Homo sapiens; identical to SEQ ID NO: 1560227

SEQ ID NO: 1887472 - DNA, 4001 bp, Homo sapiens
ggagagccctgctctgtgccccacagtactgcaggagccccttggaggtgcactattgtaggaaagacaggcagcaaaaggatccagacaggctggggtgggaggacaggtaggtgagaaaggcttgggatggaactacagaggaatgagtgagtgaggagaggagtgagtgagtgaggagaggagtgagtgagtgaggaggggagtgagtgagtgaggaggggagtgagtgagtgaggaggggagtgagtgagtgaggaggggagtgagtgagtgaggaggggagtgagtgagtgaggaggggagtgagtgagtgaggaggggagtcagtgagtgaggaggggagtcagtgagtgaggaggggagtcagtgagtgaggacgggagtgagtgaggaggggagtgagtgaggaggggagtgagtgaggaggggagtgagtgaggaggggagggagtgagtgaggaggggagggagtgagtgaggaggggagggagtgagtgaggaggggagggagtgagtgaggaggggagtgagtgaggaggggagtgagtgagtgaggaggggagtgagtgagtgaggaggggagggagtgagtgaggaggggagtgagtgaggaggggagtgagtgagtgaggaggggagtgagtgagtgaggaggggagtgagtgagtgaggaggggagtacgtgagtgaggaggggagtgcgtgagtgaggaggggagtgagtgagtgcatgggtagaggagtgagtgagtgcatgggtagaggagtgagtgagtgaggagaggagtgagtgagtgcatgggtagaggagtgcgtgagtgaggagaggagtgagtgagtgcatgggtagaggagtgagtgagtgcatgggtagaggagtgagtgagtgaggagaggagtgagtgagtgaggagaggagtgagtgagtgaggagaggagtgcgtgagtgaggaggggagtgagtgagtgcatgggtagaggagtgagtgagtgcatgggtagaggagtgagtgaggagaggagtgagtgagtgaggaggggagtgagtgagtgaggaggggagtgagtgagtgaggaggggagtgagtgagtgaggaggggagtgagtgagtgagtgaggaggggagtgcgtgagtgaggagaggagtgagtgagtgcatgggtagaggagtgagtgagtgaggagaggagtgagtgagtgaggagaggagtgagtgagtgaggagaggagtgagtgagtgaggagaggagtgagtgagtgaggagaggagtgcgtgagtgaggagaggagtgagtgagtgcatgggtagaggagtgagtgagtgcatgggtagaggagtgagtgagtgcatgggtagaggagtgagtgagtgaggagaggagtgagtgagtgaggagaggagtgagtgagtgaggaggggagtgagtgagtgaggaggggagtgagtgaggaggggagtgagtgagtgaggaggggagtgagtgagtgaggaggggagtgagtgagtgaggaggggagtgagtgcatgggtagaggagtgagtgagtgaggagaggagtgagtgcatgggtagaggagtgagtgaatgagccgcctccctcgcttctctgccggcccacacctcagccaccctctaaacccagctccttgatcccccttcctgccctttgggaattccatccaccctgagatcccagagtcatcctgctgccacactcacgaggtcctggttgaccccaaaaccatttctgttttgggggttgtggaaagtactgaaggcggcggcagttgtcatagaaggcataggtccaggccaggaagccggccaggagccgggaggccccagccagcagcaggagcagccacgggaatgctgccacctgcccgaggcccagccaggacaggctcagctgcggcatcctgcagggcagacaggatggagggtgagatcctgaggcccagggaaagtctcagggagctccagggacagtggagagaagcagggaaggggtgggtggaggcaggaaagggagggctctgggatgaataaacaaggactgagagctaaattccagaaagccccagccaaatccaatagccaagtggcctctagttgcctagtaaccacccagaaaggagaagagagagagagactgattagagtccagaaaggcccagcctgaatcactgggaggttgccaggggtccggttaccaggaaaccaccagtctcccaggccagcagcctggagacaccccagccttgggcagtgcccctccccatcccaggccaggaggctccagtctgaccacccccagcctggcaccttctgtcaggagcagcttgtaccacacaacctcctctcctcttctgctgggagttctttgcctctggcccctgatttagggaaaggtcgtgggaggctgggctgcgctgggctgggccagtcaatctccacagcctgggtgcatctcccttgcctgggagatgccggccaaaacctggggtttggccagctgggtgcagaggaaccagctcagggtgccccagtatggggactggatcctcaggtctcagcatctccctcacagtttagaggggaagttggggagtggttaaaggggactctgagccccaagtttacagccaccctgccctttcaaggcaaggatgtggcaggtaaaagcatgaacttgagagttcacagccacctgagctgggccaggccaacccttgtcccagatcatctgggctcctctccaaacatgggcggggaggatgtcaggtgctgcatcttggtacagacttaggagattcagagacagaagcctctcatctctggcttcacagcctggcaagagttcaagtcctgcctccaggcagcccagggcctgagctgagacctgactgcttgaagcaggaagaaagaatccagtcccaaccctgctgaggattacctgggtcagagtctggggataaagagcccagctggaggagcaaatctagaggctgggctcagcttagaggacagagcagaggcataggggatgaggctgagaggggctgtgagcagacggggtccaggcaggggagggcagagcgaggggaccccgagtgtagtccttgttctgacctgtcctttctctgactgtgggcaatgtggccatcctgggctcaggcttcccatctgggaaatgggatgtcagatgaggccttagagggcgacagaggaaggctcctaagaagagagagctccaaaaagagggactgaagggaaggggatgacaactagcacttgagctgctgtgtgcctgtctctactccatgcgaaagactgtatggaaaacactactgtgtgtacctactgcgtgccagtctcactatataaagtgcacctactgtgtatcaggtactctacataaattctgtctactatgtgccaggtacaccacataaacctcacctactgtgtgcagcatgctctacataatgtaagcttactttgtgcagagtactttatacaaagcgtgcctactctgtgccacatgccatatataaagcatacctactgtgtgccaggtgctccacataaagagtgtctactgtatgctgggcgcccttcacaaatcctgtatcttgagtccctggtcctttatataaaccatgcctgctgtgtgccaggtgttctaaataaagcacacctattgtgtgccagatgtcctacataaaatgttcctcctgtatgttgggccccgtacataaaataaaactgctctgtgcaacatacttgacataaagcacacatactatgtgccaggtacactacataaagaccacctactgtgtgccaggtatgccacataaagtgtgcctactatgtgttaggtactccacgtaaagtacacctactgtgtgccaggtgctctacataaagtgcacctactgtgtgtcaggtgctctacgtaaaccacacctgcttgtatcagatgcccagctg

SEQ ID NO: 1887473 - DNA, 4001 bp, Homo sapiens
aggtcacttcgtgcacggggaatcataaaagagggaatttcttgtatgatcttctgggccttggcttttagggagccaaggtctgtctgagagatgagtatgaatattagagctaggtcttggaagttggtagaggcaggctcggcgtagtgatacagattggccgcctgagggtgccccagccctgcttgcggagcctggagagacagcaggaagccttggaaacgaatgtcaggctcagactcctaggaccagagaacgttgagaatagagcatcatagaaggctgagaacaaagccccttagaacgtagaacaaaggcccctggaatggaagaatgatgagcacacatcctcctagcacctgggagacaaaagctgcttagactctcttctggtcaaagcatagaatcttccacccagggtcttataattccagaatttggaatgcaatcgatcttagactcttagcagcaagaccggctacatatttggcctagtgcaaagtgaaaataaggggccccttgctcaaaaactaaaaatttcaagacagaaattgcagaacattcaaccaagcgcgaagacccttctaagtggattccaagccggtgaagccggccctaagtagaaacaatttcatcggaggacgtccgtctggttttacagctgagtgtctgggaaggcttcttggaagaggaggcgaagtcagggctcgaccccctaacccttttctccccctgcgcagcctcagaagctgaaggttgggcggggtggaggggtaggagcagctgccaaactgtcacgtgtacccattccctatttatagatcacccttcccctcgcgccggacagtccaatggtagccagcgctcgcccgcaagagggtggaacctgctgcaggaccggccaggcacagaccaatggcattgaagcaagggcgggcttgtttcattgtgacgcgtgggggggcgtggccagggccccgaggcagttgcacggagggggcgtggcgagcggagtgagtaggcagttgcgagcatgcgtcgtgttgggcggtgcggttgcacgcccgagagtcttcgtcaggaagcttattcgccaataggcggctgttgctcggtcgccgggggcgtggccatgcagataaggcgcgggtgggcggcccaatgggcgggcgcctatgcagatgagacggtgacagcccggccagcgggcgggcgggcaggctgctggggcggggaggtgggaccgggagaggggtggccgcggggcccggccgggctggggcggggggccgcagccatgatccgggccttctcgttcccggtgagccctgagcggggccggctgcggggctggctggagggtagcctggccgggctctgcgagttacattggctccgggagaggcaggagtaccgcgtgcagcaggcgctgcggctggcccagcccggaatggggggcgccgaggccgaggacgaggaggacgccgatgaggatgaagatgcggcggcggcgcgccgggccgcagcggccctggaggagcagctggtaaggggctgcctgtccgtccgtccctccacccccgtctgtgtctgtctgtctcggttggatgctcagacaccgggcgggggttggggacccgggtaggcagggagtgagaaaggacagggggtggggctggcgaccccggagttccggcggcgggccggacctggcctccccgcccccaaatcgggggagggggaactgcatcgcccccactggggcctcgtgagaaacacaggccctgtctcttacaccccttccccaaagaaaatccttgtgggcgccaagtatgtgtcaaacccgagaccgggtactttgcaggcgttgtcttcttgcggcttgggaaacggggtgatagtccccatttaacagagaaacaaattgaggctcagagagagcaagcgactcacccaaggtgacacagccaggctccaaacatgcccttctctgggccccgccaccagggctccatcttccctaagtcctggtgtgcttggagatctctggagggggcggggtgggaggaggggaatctcagggcctccagagggagggaccactgctgagaggaagctcacagtccctgaggaccccccactgggatcttgaccctttggtgacacttcccctgcttcctacctggccccagctctccttgacccaaggggaggcaggtcgaggcagcgcctgggggagacttctggactctgggtgttctcatggtggaagatgggcagaggtctccggaatgacttgaggacgccccatgcctctcccctttctatgtcattccttgagtctcccgatctcgtcctgggttctgtcactctctccgtcctgccacatccctgtgactttctgtgtctgcttctctttcttcatcctgtctctctgtctctgtgatctctgtgtccctctgcatctgtctccttggccttcccttcctgcctgtctgcacctcgctctcttcttcttgcccgacgtcccaggctcagtctgtcttcccctccccccagcccgcacaccctggctccacggcagatccccatccccaagcctgtgtgtggccagagcttcccgtttcgggaaacctgagccgaggtggcagtggagggggctctccccgccgctgacctcgaccgccccctccccagatggggagtggggaggaagactgaagccaggctcccggggctgcacgcccggcccctccccctctcaggagtgggacccccctgcacattcttttctggaaacagaaacagctgtgggaggccccaccccctcccaaagttagagacggattgtgggggccttcgctagctccccccaccccaagctggctcggcttggaaggcgccttccatcctgacaaggagaatgcgaggcatgaggttggggtagctgtgggtagctgtgtcctctccccctctgccctcggtctctccccttttcacccttcaccttccccatctctgcccttcagtctccctctcctcggtccctctgtcccctcctccccctcagccctctgtcctcccggcacgagctgatagtggagaggcctgtccccccaccccccagtctctaggcaaagcttgtcccagcatcagggaggaggcggtggcaggcggggggaggaggaggagcagagaagcgctaaatataaacttctctagtgctgggggttcctgggtccctctgaagagtggattagggcttcttctgatcccccaacccttgtcttatgacttatccccccacccccagcccctgccaggaatacacttccttcaaggcaagaaagactgaagccagacttgattactttctaataggaatgatggggataccaggtaaagatcaggggtgtggcagagaagagaggcaggaatcctgggtgagggcaggggctccctgggtcctgcttgctctcaagaaggaaaaaggttcctttcatcaagaataacttaagttagacttgcagaatgacttcctaatagagataaatgggcactggataccaacgaggggcacgtgaggggagaaacaaggtaagggaagtttgggcaaaggggtctccaggggtcctaaccacactcttattaagcctgcagaggaaggatgaggggcaccgtgaggaggcagagagccagactcaggccaaggactttctaatcttttaaagattcatccttttgcaactggaaggaatgaggccagacttgcaaatagaggggtgtagacttggaatatttttggggggcgtctaggtgctggagaggaggaggcatctcctgtctgtctccctaatttctgctcttccttgtaatggaagaaccggaattagacttggcagaacttaccaaaaagtctatcctttcacgtttatttatgtatttttaaatgatatatttatttattcatttatttttggagacaaagtctctcaggc

SEQ ID NO: 1887474 - DNA, 4001 bp, Homo sapiens
tgggaacctcttcccatccctaccatctataaatcaaggtctatgagcttctgcaacttcattaacagcccctgcatgggactcagtctctgtaatcacaatttttttttttttttttaaagattgggtcttgctctgtcacccaggctggagtgcaatggtgcaatcatggctcactgtagcctcagcctcccaggctcaagtgatcctcctgcctcagcctcctgagtagctcgcactacaggtacatgccaccatatccagtttgtgtgccatgtttggaagcaactgttgcttgttgattctccagacatctatctttctttctctctctctttctttttctttctttctttctctctctctctctctcaatttctttctttctttctttttttgagacggagtctccctctgttacccaggctggagtgcagtgccacagtctcggtgtgtgccatcatgcccagctaatttttgtatttttagtacagatggggtttcgccatgttggccaggctgatctgaactcctgaactcaggtgatctgcccgcctcagcctcccaaagtactgggattacagacgtgagccactgcgcctggctgattctccagaaatcttttggcatcatcattaataaaagcatcaagaagtcaaaaaggaaatcaagtgatcctcccgcctcagcctcccaagtagctggggctacaggtgtgcaccaccacacccgactaattttctaagtctattttgaacaagaggaagactgaataaaggttgtctctaataaatttcaagacatttccccccggaaacttactagattagtttttaaacttatttgtcaaacccttctgtggctcttaatccatggaagacactgctccaagtacctaatacatttcattgaatcctcagaacaactgtatgaggcagccagtattatgatcccgtgatcagatgaagaaacggtggcacagagaggttaagtaagttttccaaggtcacacagctggaaagtgacagatctgtgactcaccccgaggaagtctggctcctggagactttgctgtctatcgccactatcaatttctctccatctcaccaccagaaggtcacttcgtgcacggggaatcataaaagagggaatttcttgtatgatcttctgggccttggcttttagggagccaaggtctgtctgagagatgagtatgaatattagagctaggtcttggaagttggtagaggcaggctcggcgtagtgatacagattggccgcctgagggtgccccagccctgcttgcggagcctggagagacagcaggaagccttggaaacgaatgtcaggctcagactcctaggaccagagaacgttgagaatagagcatcatagaaggctgagaacaaagccccttagaacgtagaacaaaggcccctggaatggaagaatgatgagcacacatcctcctagcacctgggagacaaaagctgcttagactctcttctggtcaaagcatagaatcttccacccagggtcttataattccagaatttggaatgcaatcgatcttagactcttagcagcaagaccggctacatatttggcctagtgcaaagtgaaaataaggggccccttgctcaaaaactaaaaatttcaagacagaaattgcagaacattcaaccaagcgcgaagacccttctaagtggattccaagccggtgaagccggccctaagtagaaacaatttcatcggaggacgtccgtctggttttacagctgagtgtctgggaaggcttcttggaagaggaggcgaagtcagggctcgaccccctaacccttttctccccctgcgcagcctcagaagctgaaggttgggcggggtggaggggtaggagcagctgccaaactgtcacgtgtacccattccctatttatagatcacccttcccctcgcgccggacagtccaatggtagccagcgctcgcccgcaagagggtggaacctgctgcaggaccggccaggcacagaccaatggcattgaagcaagggcgggcttgtttcattgtgacgcgtgggggggcgtggccagggccccgaggcagttgcacggagggggcgtggcgagcggagtgagtaggcagttgcgagcatgcgtcgtgttgggcggtgcggttgcacgcccgagagtcttcgtcaggaagcttattcgccaataggcggctgttgctcggtcgccgggggcgtggccatgcagataaggcgcgggtgggcggcccaatgggcgggcgcctatgcagatgagacggtgacagcccggccagcgggcgggcgggcaggctgctggggcggggaggtgggaccgggagaggggtggccgcggggcccggccgggctggggcggggggccgcagccatgatccgggccttctcgttcccggtgagccctgagcggggccggctgcggggctggctggagggtagcctggccgggctctgcgagttacattggctccgggagaggcaggagtaccgcgtgcagcaggcgctgcggctggcccagcccggaatggggggcgccgaggccgaggacgaggaggacgccgatgaggatgaagatgcggcggcggcgcgccgggccgcagcggccctggaggagcagctggtaaggggctgcctgtccgtccgtccctccacccccgtctgtgtctgtctgtctcggttggatgctcagacaccgggcgggggttggggacccgggtaggcagggagtgagaaaggacagggggtggggctggcgaccccggagttccggcggcgggccggacctggcctccccgcccccaaatcgggggagggggaactgcatcgcccccactggggcctcgtgagaaacacaggccctgtctcttacaccccttccccaaagaaaatccttgtgggcgccaagtatgtgtcaaacccgagaccgggtactttgcaggcgttgtcttcttgcggcttgggaaacggggtgatagtccccatttaacagagaaacaaattgaggctcagagagagcaagcgactcacccaaggtgacacagccaggctccaaacatgcccttctctgggccccgccaccagggctccatcttccctaagtcctggtgtgcttggagatctctggagggggcggggtgggaggaggggaatctcagggcctccagagggagggaccactgctgagaggaagctcacagtccctgaggaccccccactgggatcttgaccctttggtgacacttcccctgcttcctacctggccccagctctccttgacccaaggggaggcaggtcgaggcagcgcctgggggagacttctggactctgggtgttctcatggtggaagatgggcagaggtctccggaatgacttgaggacgccccatgcctctcccctttctatgtcattccttgagtctcccgatctcgtcctgggttctgtcactctctccgtcctgccacatccctgtgactttctgtgtctgcttctctttcttcatcctgtctctctgtctctgtgatctctgtgtccctctgcatctgtctccttggccttcccttcctgcctgtctgcacctcgctctcttcttcttgcccgacgtcccaggctcagtctgtcttcccctccccccagcccgcacaccctggctccacggcagatccccatccccaagcctgtgtgtggccagagcttcccgtttcgggaaacctgagccgaggtggcagtggagggggctctccccgccgctgacctcgaccgccccctccccagatggggagtggggaggaagactgaagccaggctcccggggctgcacgcccggcccctccccctctcaggagtgggacccccctgcacattcttttctggaaacagaaacagctgtgggaggccccaccccctcccaaagttagagacggattgtgggggccttcgctagctccccccaccccaagct

SEQ ID NO: 1887475 - DNA, 4001 bp, Homo sapiens; identical to SEQ ID NO: 1560241

SEQ ID NO: 1887476 - DNA, 4001 bp, Homo sapiens; identical to SEQ ID NO: 1560242

SEQ ID NO: 1887477 - DNA, 4001 bp, Homo sapiens; identical to SEQ ID NO: 1560244

SEQ ID NO: 1887478 - DNA, 4001 bp, Homo sapiens; identical to SEQ ID NO: 1560243

SEQ ID NO: 1887479 - DNA, 4001 bp, Homo sapiens; identical to SEQ ID NO: 1560248

SEQ ID NO: 1887480 - DNA, 4001 bp, Homo sapiens
gcacgcaccttccccaggggaagagcagaccctgcttccagcaccatctccctgtcttctccattggcctccatgccttgttgctgtggggtagagtgttgttttccaggacacagattaggacgtgctgataacatggaaaaccatcagttgggcataagcaatgttattttttaattgaaaaaaaaaatggattaagaaatgggacagtgtgccctaaccagaatgctgtgctagattgtttatgacactcttattggaactgtgtgtattccacgtaatggtagaatatcattctatcattcgatcatattatactattgtacaatagaagtagggaagctgctgacagcaggaaatgccaagtcctcagaggtttcacattccaggaaccaaaatctgccagcctggcccgagaacctgggtatcattcaggagtgtctgtgaacagggcctgtcttcctttctcagagagaccaggcctggggagttgggaagcccatgggtgagaggtcaggagacctgggttcttgcctggcctgcgtcactgaccagcagcagtacctcagcccgtgtcttgcttggatccaggaagcggggtgagagaacaggcagggctggcagatcttggcttctggaatgtgaaacccggaatgtgaaaccccggaggacgttggcatttccagctgtcagcagctcccccactgcttgcccttttatgccaggaaaaaatagaaggaatctccctcctggcagatttggagtggcctttccatctgccctcagggaagccctgctaggaaacaggcaggaatgaggtggaatttcaggtgtgcaggtatgtcaggtatgtagaaggaaggccgggtttccccaggccagaggcctgtccgctgctggctgacaaggaggagtctgtgtgagtcattttctccaaacactatgttgggatttcagaagctccctgcaaggtggcttctgttgaccaaagcctaatccctgctctggcaggatccttcgtatgatgcagaccagtgaattaagagcctccatgtcataggagaggctggaggagaggccccagggtttgccaaccaggaatgaagctagaacaatctgctgagctgagactcaagattcaggtgccatttctgtgtctggaacagcctttcagccattcagagctattgcttggatgtgagatgttactgtggatacacccagagacacaatgactgtgctaccagagattcaaatgtatccagaaccccacctgcaaggccctctgggaaggaaagtgtgaagcttccagcctctgcagaccagaaagtcctgaagaagttggctggatgccaagtgtccacctccacatcatgcacaccctctgtgatggttagtactgagtgtcaacttgattggattgaaggatgcaaagtattgatcctgggtgtgtctgtaggggtgttgccaaaggagattaacttttgcattagtgggctgggaaaggcagacccacccttaacgtgggtggacactgtctaatcagctgccagcagagccagaatataaagcaggaagaaaaacgtgaaaaggctagactggcttagcttccagcctacgtctttctcccgtgctggatgcttccttccctcgaacatcagactccacgttcttcagctttgggacatggactggcttccttgctcctcagcttgcagatggcctattgtgggaccttgtgattgtgtgagttaatactacttaataaactcatatatatatataaattgtgtccctctaaagaaccctattaattgtgtccctctagagaaccctgattaatacaccttccctggctctcactgccctcgacttagcacagttccttggaagaaccacaatgtctctctggcttctgcctccaattctcccatccctcttcatttttcatttttcccttaaatgtcacccaccttctggaatcttcttgaacaccaaggctgaggtcagtcacctgtcacctcccgatagcaccgtggatgttatctgccacgctcttaccatgtttctttgtggcttttctgttaaggcagacacttgagaattagttcctgctaaggtttctgatcatcaacaagaagggaacaagtccttccagtgaccaaactgataaagggctttatttttagctgaaccagagcagaatatttaccaccagatgtctggatgtttctttccgctccccccctgcagcccccacaattaagtatatgcgtttacttaagttttcatgtgtatgtgtgtgttttcaagtgtgcaattcaatggcatttcacaatgtttggcaatcatctgtgatattttgagcaaaaaaatccacagtcattactggactctcaaatacattatggcccaggatagttaagaccaaaggaccagtggaaggttttccttcttcttctttgcaggaatttaatcccttcctgtgtgaatgtgtttgttctgaggagaggggagaggtttcctctgaaataagtcatttgggatcaaagttgaagaagccactcccctgagggaagctgacatattcttgacaatttttgctttcgctttttgtgtgtgtgtgtgactgtgtgtaacccagtaataatgtcacacctatttttcttagtagttgcagtgaaaggattaataaacttaggaatctagaaggctcttctgagtaccagccatccctaccctcttctagcaggatgctgatgctgttgacagcctgggctcctgcagccctggacatggtgtgtcctatgttgggagggctaaggggacaaaaggtgggctgtggagaagagccttagttcttccccagtgcatctgaccccatagggcacagctgagaagcagctccatgcggaagccctggaagggagagagctttaaagaccttcaggcaacaattctcaccaagtcaccatgacaggacagacaggttgagtgagacacaccctgaacacagggctttcatcatgctttcacttttctttcattcatttagcacacactatgcacttactctgtgtcagtggatgctggggacacgactgtgacttagctccaggccctgcttttctgggtcttatagtctggggaggacacagacccctccaaaaacggtgatgacccagggtgagcaaggctgggagcagcgcccagggcaccaggaatggcttcctggaggagggcaccagaagacaagcattggatggctctggctttcccgcctctcttcttgcccacagttcccagaatcactgtagaatacagtagaaatgtgtattagtccattttcacactgctaaaaaaaactacctgagactgggtaatttataaaggaaagaggtttaattgactcatagttctgcacgccaaggtggcctcaggaaatgtacaatcatgctggagggtgaaggaaaagcaaggcacgccttccatggtggcaggagagaaagagagcgagccgggaacttctacacacttttaaaccatcagatctcctgagaactcccccactatcaggagaacagcatggaaaaaactgcccccatgatccaatcacctaccagatccttcccctgacacatggggattacaatgtgagatgagatttgtgtggcaagacagagccaaattatataagaatgcaccatcctgagtaaggaggaactgcctgaaagtgcccaagcttggtttctattcctccgagagaatgcaacaccttgagctaaagagaaactgcccaggacagccctggcctcattcccatccctcctagagggggtgtcctgccacactagcccagggcgtgtccaccacatctaaaacccagagctcactgctgagtcctcagctgtggtgcaagtggggcaggcatgggagactctatctgccctgggcagtgctcctgagccccgggagaccagtttgaatgtccttctgctgcc

SEQ ID NO: 1887481 - DNA, 4001 bp, Homo sapiens
cccagaaactccccaaaatactaaggtatttacaagaggcattttaaatcagtggttgaagtgattgaatacatgggaatgggaatatcagtgaagtattttgggggaaaattttagttctagctcatcaatttcctcctctctgtttttaaccagttttcccctcataaaggaggacacagctcggatacaaagcgtagggtaagtctggttagatggaggggtgggactagacagcatataggaaaacaaagtccagatgcatcccagttaaactgaaaaagtgaaattgcaggagtatgcatagtgctagaagaaaattaccttaaagcggtacaccaagagcaaaaaccatagaggaaaagatggctgctttttgactacttatatacttaaaactgaggtatattaaaaaactagaaaagtccgagtgcagtagctcatgcctgtaatcccagcactttgagaggcagaggcggacagatcacctgagatcaggagtttgagaccagcctggccaacatggtgaaaccccatctctactaaaaatacaaaaaaaaattagccagaggtggtggctggcgtctgtaatcccagctactcgggaggctgaggtaagagaatcgcttgaacccaggaggtggagtttccagtgagctcagatcgcaccactgccctccagcctgggtaacagagcgggactccatctcaaaaaggaaaaaaacacaaactagaaagagggttacaaatgggaagaaatttttttttaaaaaaaccagtttgttcccataaaaggttagtatccctcatagattatctaaaaagagatgtctctactcagccccagcacctccggtctggccttgcccctggccacgtgggtcctttcccaccaacgcctcacccaggagcttgttagcaacgcggctaacaggctcagccccacccagccctgttagagcaacctgcactttcacaagatctccgtgacactaactctcagcaccacaggtgctgacataaagcccacatttccagcataactggggggaatgtttttccaaagcactctgaatcccccagagttcaccacagtctgttccccggctggatagaggacatttaagacaattgtgcttctaaaaggaccggtttacatggaatttctcccagccccatctgtggtataaggtgaggtatatcacagcaagatttgcaattaattagtactttggaaatcgttagcatttttaggagtgcatttggtttcttctgccgaaatagtcagttccctgcagacaaggcaggagggggttgagcagagttgagttaggaggagtgggcacagtcctgggcaggaactgcagtccccaggagacttaagagactttggctctcacctgaatcccagattccccgctcccgcgggcttcattccctggcttttcacactgccggggagagaaaggggagactttccctcagtcccctcccagaccagtcccagccccaaaatggcagcattttaaccctggggcgagccgcttccgctccacctccgcggccatccagccccatctccgcggagccttggctccccgatcctgcgagtgaaaccagctgctctccttttccttcccgcggttggtgggagattcacgccagccactcaccccgggtttatgtccatttcctccgccgctcccaccgtggttgccggaggaggagccggtgctggatccctgcaggggaaagcaagatttcaaacgctgtcctaaaggacctaaaggggacccagtcgttcccagcggtgttacagatttgttggaaccccaatcagattccagtcctctttccaacctccagaccttccccctctttagcctgttggtcgctgcaggaagttattccgagcatggagaaggccaggtgtggccgagggtattcggaactacgcaatgatttggagaacctgagctgctgcccaccgcaggccgggggtgggaacccctggagcccggccgcgcagtagccgcgatcctgccaccagggggcagcaagtggaagggaccctagagccctcacctgggagcggccgtagctgccttggtcaccattcccagaactgccctagatgggggagaggaggatcatacggggagcggcgcatgagagcagctcaggttattcggcttattgtgtccacgcacctcctcctgtctgacacttttcccgacccccgaggaagccagatgtggctccctctccagctcgactccaagacacgggatgggagaggccgtcagccaaggggttggacaggccattgaccaggaggctggagagactgccggctctggagtcagtgaggcccggggccctggggtggcagctgcggggtcacagcgccccttcctgccctcacacccatcgtgcaggggccccatgtgtgaatgtcgtctgcaccgtcgctctgtcagcgtccgtaggtctcccggatcacagtcctgcccccattctcctgggagcttcccagacaagtgtcatattctcccatgtccccctctttctccgccaccccacggtctcctgagacttgccaagtggacttgactgcaagagcttagacaggcgggataacgtccccaccatcacagagtggaaaatagggatacagagtcagaagcagtggggtggctctggcagaaacgatagtgcgcgcatcaggggcacagcatgggtggggaacaggaggctgagggagcctcagggtgacgactatcagcgaggccgcccatcctcgggcagcggcagctttcagagaaacttggagccctctcccggcagggaccactagggcctcaccccatctcagccttccacagaggtgccaaactcacccaggaggactcactgccgctgtcacctctgctgccaccactgttgccactgctgccaccactgctgccgccactgctgccgccactgctgctgccactgctgctgccaccactgctgctgccattgttgttgtcaccattgctgccactgccactgctgcccgactgtgagccgctgcctccctgaggggcaggaagggagcagggctgggattaaagacagagcaccaagacgggcccctcctccctccctctccacccaggccatattccatgatgcccagtctaaggggagcagaacttctccatttcctcctggtgcacaactcctgggttgcccctctccactcaccccagagttgctggagcctccacctgagccagatggtgggggattcgtgcactgtcgagggaaagggatggtgagtttggggacggtgagtttggagacgttggcctcggccatggacacaggccaggcctctcccattctttggggcttggcttcctttctcctaatgtgtttctcccacctccccttcccatctgcctcctccccaggcccaggcccgtctcttcctccttttttttttttttttttttttgagacagggtctcactctgttgctcaggctggagtgcagtgatgcgatctcggctcactgcaacctccatctcccaggttcaagtgattctcctgcctccgcctcccaagtggctgcaattacaggcgcatgccactatgaccggctgatttttgtatttttagtgaagacagggtttcaccatgttgaccaggctggtcttgaactcctgacctcaggtgatccacgtgccttggcctcccaaagtgctgggattacaggtgtgagccacctcgcccagccccatctcttcctctcaccccaatccctccactcccccatcttgctttcctctttgtctttccccagctctctgtagcctgcacccagtggcttcttcatttgttcccagccccttcctcttaccccttcattctggttgctggctctcactgaaccatagccaggctgggccacagctccctgcagagagggtgagactgagagtaggatccag

SEQ ID NO: 1887482 - DNA, 4001 bp, Homo sapiens; identical to SEQ ID NO: 1560304

SEQ ID NO: 1887483 - DNA, 4001 bp, Homo sapiens
agagaggaggggatcattcagacggggatcccctggactctgcgtggctgaagactaggtgagttaggggcaactaaccctaactctttgcccagtcacacgtgcaagcttcaccatagcatcttccaggcaggttacaaacacaagagtcacagatttggacatcacatccttctgaagtatgagaagtgcatctgattgcagctgtgtttcccaatttcagaaaactcagcagcaaattcagcttcttctctacatcctagcaccaaaagaccaagttggcaatctcctttccatattcaacagtttattttaatatcagtccagacctcgaaccacacactgtccgagaaaaatataatggaaaccccataggtccttttaaattttccattaccgacaattttttgtcttttgagacagagttttgctctgtcgcccaggctgcagtgcagtggcacgatctcagctcactgtaacctccgcctcctgggttcaagcaattctcccacctcagcctcccaagtagctgggattacaggcacccaccaccatgaccggctaatttttgtatttttagtagagatggggtttcaccatgttggccaggctggtctccaactcccgaccttgtgatccgcccacctcggcctcccaaagtgctgggattacagctgtgagccaccacgcctggctgacatggacatttttatgacctaaaacactcaacaccaattttcctgtgaataattttttttcagagagaaatatcacttgattcccatagggtaggggacagcaaactggacttatgagttgaggtgacttttatattttttacataaaacattttaaatggttggaaaaaaacaaaagaagaagaatacttaatggccatgaaaaccatgtgaattttagctgcctatgtctgtaaataaagttttactgacacgcagccacatccattcatttacatgaggtctatggatgctttagggctggaatagctgagttgagtagttaagacagagaccatacgggccacaaagctgaaattcaaattacctgtccctttacagaaaaaaatatgcttgccccttacatagagtatggaacatcacttacctgtaaggtctcttaacaaaccttccatccttaaactgcatctgatgcctcctatggagatttctttttctcatctctaagaccctaaagcccagaggacagggtgggaaggtctaggttgtaacttactgagctatgacgctccaagtgcggacccatttggtgtcaatccatgtagcagatactcgaagtgaccctttagcctaccccagagagggttcctataaatgcagatgactttctttttcgttctttctttctttctttctttttttttttttttttgagacagagtctcactctgtcatccagggctggagtgcagtggcggaatcttggctcactgcaacctctgccttccaggttcaagtgattctcctgcctcagcctccagagtagctaggattatgggcgtctgccaccacgcccggctaactttttttttatttttagtagagacgaggtttcaccatgttggccaggctggtttcaaactcctgaccttaagtgatccacccgtcttggcctcctaaagtgctcttcactctttcttgcgtggcctccccacaccctcctttcctgggatcccctcccaaaaaaactatttacacacatgagtccttgttttcgttctgctttggggcagcccagcctaactgactcaagaggagagtttctactaggacaggcacacgcagttattgctggagaaaatgccaaatttgaggaagcaaatcaagcgaggacaccaggggcatgaggagaaggaaagggagttctttgctccacttacctgagagcaggaccaggaggaacctgctccccatagcactgagacgccgggaacaatctctctgaagcaggacgtggtcagaatgcctggaacaaataaacctcatgaaatccaatttctgatggtcccaagttcagaagccccgtggccagtgcttatcaaaatgtaaggctgaggcaggagaattgcttgaaaccaggaggcagaggtagcagtgagccgagatcgcatcaccgcactccagcccgggcgacagagcaagactccatctcgaaaccaacaaaccaacaaaccaaccaacaaacaaaaaaaaccctttaatctctccctctcgtttgacccaataattctgcctctgggtaactctctcaaggaaaacaccctgcgaggatgatcttagcgtatttggttatagggaacaagtttatcacccaacaaatgctaaaaaaaacggatgcatctgaggaaatataaggctggaatttaaaatcctgttctatcgcagtcggcaagatcaagactgcaaaactccacaggacaaactactcactttttatttatttattattattttttttttacattgctgtcattgatttgtttatatttaatttttaaattcataaataattatatatgcttatgggctataatatgttttgacattgtggaatgattttttttttttttttgagattgagtctggctctgtcgcccaggctggagggcagtggcgcgatctcggctcactgcaagctccgcctcccgggttcacaccattctcctgcctcagcctcccgagtagctgggactacaggcgcccgccaccacgcccggctaattttttgtatttttagtagagacagggtttcaccatgttagccaggatggtctcgatctcctgaccttgtgatccacccgcctcggcctcccaaagtgctgggattacaggcgtgagccaccgcccccggctgacattgtggaatgattatatcaagacaattaacgtatgtatcacctcacatacctatcatttttcggtatgagaacttttaaaatctactctttcagccattttgaaatacacaatataggccgggaacagtggctcacacctttaatcccagcactttgggagaacgaggtgggcggatcacctgaggtcaggagttaaagaccagcctggtcaacatggtgaaaataatataatatataatatattattaatatataatatattattaatatataataaaattaatatattaatataatatgttaatgtaatacatcaatatattaatatactaaatcaatataatacattgatatattaatataatacattaatatattgatatattaatataatacattaatatattgatatattaatataatacattaatacattgatatattaatataatacattaatacattaatatattaatataatacattaatacattaatatattaataaatattaaatatatatttaatatatatttatataaaaggttactatctgttttaggaaaatgttagcattctatatacaattatccatatatgcatgtatgtgtatttatatgtgtatatacaaaatcatacatacaaatgtacaaacatataaatgcatcaaatgcatgtatatatgtatgataattttgtatttgcataaaatattcctggaaggtacctaagaaactcatagcatcggttgcttttgaaaacaaatgtatgcgaggcttaatacctaggtgatggattgataggtgcagcaaaccaccatggcacatgtttacctatgtaacaaactcgcacgtcctgcacatatatcttggaacttaaaataaagtaaaatttatttatttatttatttatttattttgagacggagtctcactctgtcgcccagactggagtgcaatggccctatctcggctcactgcaacctccgcctcccgggttcaagcggttctcctacctcagcctccccagcagctgggataacaggcacctgccaccacgcctggctaattttttgtgtttttagtagagacagggtttcgccatgt

SEQ ID NO: 1887484 - DNA, 4001 bp, Homo sapiens; identical to SEQ ID NO: 1560314

SEQ ID NO: 1887485 - DNA, 4001 bp, Homo sapiens; identical to SEQ ID NO: 1560315

SEQ ID NO: 1887486 - DNA, 4001 bp, Homo sapiens; identical to SEQ ID NO: 1879289

SEQ ID NO: 1887487 - DNA, 4001 bp, Homo sapiens; identical to SEQ ID NO: 1879289

SEQ ID NO: 1887488 - DNA, 4001 bp, Homo sapiens; identical to SEQ ID NO: 1879289

SEQ ID NO: 1887489 - DNA, 4001 bp, Homo sapiens
catggcaggctggagagcaccatgggaggacatgtcaggcctgttggctggcagcctggcactgagagtgggggtctggtgggagctcttcagaacagggagcagggaggcagtaacgtccctgccatgtcctttggtgggtccacaggtgctcagttgaggtgaatcgttgtgacccgaagggcagagtaatctcatctcgggtttgttgacaggcggtggacctgtggacacagggcccaggacagatctcttcttggtggtgtggacaggcagtggcatggtaggatgctacgggagaaaacatcccacatgagacagctcagcagtagaatttccaaactctgaagcagggaactcacatgcaaaaccacatcacaacagacactgtgtgaagatgagaagcaagctaggacagaggaaaatggacaggctgacatgagaaacagagaataacaggcactgggactgcgtctaaatcaggatcaaatatagggaagaccctccaaaagagacaggacgtaggaaattaaacgtcacagaaaaggatgtacacatggtcactgaatatatgcagaattgtcacttcaggaatagtgttggggaaagatagccaaccattctgtttgctgcgactatcacatatgaaaattaaaactctttatgttctctattgttaatatcaagggaatatcaattccccacacaatgtggagactggaaatggcacagctccttttgaaagcagatgtaagatcatgtacaaaaatgaaggagacgccttatctgcagccagtatcccgaaggcatctgatcagtcactccccacgggcactgaaatgcgcccagcagcatttgctggccaacttgcaaataaaggtacagaaaccaactttcaaataaagaacctgaggccgggcgcggtggctcacgcctgtaatcccagcactttggaaggccgaggcaggtggatcacgaggtcaggagatcgagaccatcctggctaacacggtgaaaccccgtctctaccaaaaatacaaaaaattagccgagcgtggtggcgggcacctgtagtcccagctactcaggaggctgaggcaggagaatggcatgaacccgggaggcggagcttgcagtgagccgagatcgcaccactgcactccagcctgggtgacagagcgagactccgtctcaaaaaaaaaaagagaagaagaaaaagaagctggaaactggagtatgggaagtcctcgggtagcgcagttctcctgcagggcagcctaggtcttaacatgacccccatccatgaggggcacagagtgaaggaatcaggggacctagaggagaaacagagcaggggccgggggaatacgcaccctcaggaacaaacaatcttctgctggctccttccaggcttcctgcattttctcttggggagttctgggaaatgtctgcgtcggagcttcgctctgctgctgctggggactgcagaagaaatcacgttcactgtctggacccgcctgatcctccaactcacaccagtgactgggaaccaagcaccctcccggaacccagccctagcccttgctttgggtgagggaggcgttcaggcctctgtgaactttgccaagacagccccttctctcatctcagaagcagccccacttccaggaagctccgccccccacccccaccatggccccaggttctctaagttcattcaggccctggaactgctctgcctgcctcgggtaacatccccaggtctcccacagcccctgccctctagagactctcagcgctggaataagctcggagtgcggaccctggaaggcaggggcctccatccacctccatttggagctttccttgtgtgcttagagaaggctgcacagaaagactaggggagacaccagctcctgaggcgccgacctcacggatcttccttgaccctgcaaaatccttaccttggacttcgctccttttctctgtcattcgtcgtaaagggccctggagtcgtaaagggtagctgggcctttgctggtttcaggttctccttctccttgtgtgagcccagggcctgcagaggaagggccccactccacctcttaatggggcaggtcttgctcctggctgagtgcccaaaggccccgcagttcttgcatttcacctgcaggtggaggaggacacagagcagtgagtcaacagcaatcacaggcacctgcaaggttcacacaaggcctgggttttggagatggattattttaggagggggacatacgcccatgggctgttggttgccaggaaattcaagatattatcgtcctccccagagcccgtttaacagggatcccaggaggaaggacgcttgtgtctgagagtgaagataatgaaccggtgttgaggactcggcaaacaccaggctggacatgacactggacagagaatgaggctgctcctcagagactccgaatgggccaatctgccaagacaggaggctgaccgatgtggtcagactgagaccagtgggaactcttaagtcataatcacgagtcccatgttcaagcccactctctggtgtccataggttaccaacattttcaagcccccactgaccctggattcctcctgctctgctgggagagtcgtctgccccatgggtctcctctgctgctcctgtgggtttttggctctggggggcctctgagcctgatgatggacggaatgacgggccatctgtggcaggtccttgaacttccgatcattcttcttcattaaatgatggttggatttcctagtcataagaaaaagagaaaacattacacagacaccagacggaagtccctcctacccctatttacccaagtagggatggagggatgcactggccactgagtcacgcccactgtaacttggtcctctctgaacccaggtcccagttgtgctattttgtgactctctcccagcctgacctactcccagaacaggacacagattttataaaccaaaggctgcttgatttctagagggcgaagtgagatttgcagccttgcataaaagttttctgggctctcggtttgtgtgcagtcagtgcctcagagctgaaaccctctgacaatacttgtcaaagccaagagatgaacagccaacaactattgatatttttccagctagttccagaaaacccactattttcatagaatagcttctcactcagaaaaccaaccagaagctcaaagctttgcaaagttttcatattcaacctatggacactcgtgacgtttcacgtgagacccctgtgaccacacgccactcttcacacagaggcaggcacaaagccaagcgaggaccagccctctgaggatcctgcgatgctgacacatatgtgcgtgttcacgccaggcttcgcacacatcactggccgtgtcatggggggacacgcaagacggaagcctccaggcgtgttcagcagaaaccttgagcccacaacaggaatacaacaggaaaacagtgcttggggagtcccccaggctgtccctagcttattccctaatacttgtcttaccacttctcttggtatccacgtctctgtgaaattgtggtgggccagtccactgaaggttggcattttttatttgagacatagcgggcggtcggatcctctcctggcttcagaggaaatcgcagaagaacctccacagaggcgagaacaacccatttctctgtcatcaagtcaatctaatgcagagaaaggagaatggagacgcaacctgagttctgcaggcaggaggaagccttggcagaggagaggaggaactcccatcttcctgagattttaaagggaatgctgggcaggctcacattttggtgttttggttttttttttcttttcttttttttaaagaagtcattatgtgaaaaagatacttgtacacgcgtgtttacagcagcacaattcgcaattgcaaaaatatggaaccagcccaaatgcccatcaatcaacc

SEQ ID NO: 1887490 - DNA, 4001 bp, Homo sapiens; identical to SEQ ID NO: 1560346

SEQ ID NO: 1887491 - DNA, 4001 bp, Homo sapiens
tttttagtagagaccaggtttctccatgttgatcaggctagtcacgaacgcccaacctcaggtgatccacccaccttggcttcccaaagtgctgagattacaggcgtgagccaccgtgcccggcaatggctgggctttcattgggtgtgaagtctacaaacagcatcttcaatttaaactgtcagttaaagttcttaagatttaggaaatgatggagcttggaaagttatgagattacaaaattccggaaagtccattagaaaaaccacaggatggaaaaaaaaataagccaggcaacaaagcttcagaggtccctgctggcccagggagagatacctgcagtgtccagcatctcagtgaacatgatctactttcaaaggcaggggcttaaagcgagggaagggggggaactggtggaagcaaaggctctccccatcaccaccttggttttaggtagggattttaatttaactgaaggacatctctcaacttggacaataattaatccctcaacagcacctcatatctgctatgactttgcagcgcagcagaaagaatgtttagtatctaatagataaaaatttcatcgaaaaaattaaaatattcttgcaacacccccccaacaccaattcctattctaaagtgaatctatcacttgtgctgttgatacttgaccatgtacttaattggaaacctagatgcaaaagactgaaactgaatcttcaccccaaaatgaaaacaaaataaaatgagtaacttgaggtttatggcatatagtttaggtaaacacacacacaaggagaagggggaagaggaaatggaaggtgtcggaagcaaagctgagtgacagaacacattcagtcagggcagatgtctatacagagtgtagtggaacctcaggaaaagcttcatatggattcatgcgcacgcgtctggaggcaccagatccctccatggcagatccaagaacagggagctgagggagaaggccattcccttcattccagttttaggagctccacatcgaagacgagagtggcgtgtggtgggatgatgcctgggtgcccagtggcaccgtaggcagaatctggagatatagtcagttgggctgtctgacccacactcatctaagcaaccctttcttcccagcctcggatcacctcctgctaaaaattaaggggcttgtttctgtcccgggaggaatcaaatttctttccatcttcaagcatcccggtgtagtgcaccacgcaggtctggccgtgcctcgggaaggtgcactcctctcctggggagatggtttccacctgcactcccatggcggcggccgatgctgggtgggcgggtagcgcgacgggcggtgtggaccaacagcgacctggcggcggttccacagctctggctagacccttggcttttatttatttatttatttatttattttttgatacagagcctctctttgtcacccaggctggagtgcagtggcacgatcttggctcacagcaacctctgcctcccggattcaagcgattctcctgcctcagcctccccagtagctgggattcatgcccagctaatttttgtatttttagtagagacggggtttcaccatgttggccaggatagtctgtagctcttaacctcgtgatcccctcacctctgcccagagtgctggggttacaggcgtgagccactgggcccggactttttttttttttttggccaggcgcggtggctcacacctgtaatcccagcactttgggagggcgaggcgggcggatcacgaggtcaggagatcgagaccatcctgactaacatggtgaaaccctgtctctactaaaaatacaaaaaattagccgggcgtggtggcgggcacctgtagtcccagctactcgggagggtgaggcaggagaatggcgtgaacccaggaggtggagcttgcagtgagccgagatcatgccactgcactccagcctgggcgacagagcaagactcaaatcaaaaaaaagaaaaatcgacccctgacctaatcagtaatgttatacagattacaaacattatatagaaaagcattgtgaaaatccctgtcctgttctgttccgttctaattaccagtgcatgcagcccccagtcatgtaccccctgcttgctcaatcgatcacgaccctctcacacagacccccttagagttgtgagcccgtaaaaggtacgagaattgctcacctggggagctcagttgttggagatgtgagtcttgccgaagctcccagctgaataaagcccttccttctttaactcggtgtctgaggggtttagtctgcagcttgtcctgctatacctacgatttcatctccaacccaaccaatcaggactgcccacttcatggccccctatctaccaaattatccttaaaaaaccccagtctcatgaggtggaggttgcagtgaaccgagatcatgaccttgcactccagcctgggcaacaggagcaaaactccatctcaaaaaaacaaacaaacaaataaacaacaacaaaaaaacccagtctccaagttttcaggaagactgatttgagtaatattaataagactccagtctgctgttcatccaactctgtgtgaatcaaactctttcttttacaattctcctgtcctgataaattggctctatctgggcagtgggcaaaatgaacccgctgggtgtttacacattcattttaacaatacaataatggttattaacctttgcattaatctctgcttccagtggaagaattttgcatcaaaggaccacttgaaatgataggtgaatttagatctatagcctttgggagcacctacactaactctgaaataatatttttccatacactagggtaatcagctacagctaataattgcaagaaatctcaataggagttttaaggaaaggcaggatgatcctctgcccagtagaaagatctgcaatcttttatttatttatttatttaattttatttttttccaatacagagtcttgctctgtcgcccaggctagagtgcagtggcacaatctcagctcaccgcaacctctgactcctgggttcaggagattctcctgcctcagcctcctgagtagctgggattatatgcatatgccatcatgccaagctaatttttgtatttttagtagaggcggggtttcaccatgttggccagactggacttgaactcctgacctcaggtgatccacccgcctcagcctcccaaagtgctgggattacaggcgtgagccacccacacccagcccttatttttattttttagagaagaggtcttgctctgttgcccaggctggagtgcagtggcacgatctcggcttaccgcagcttcaaactcctgagctcaagcgattctccctccttcaggctccctaaccctaaccccaaccttggggcagctgggaccactggcctgcctgacctcaccccactaatattttttattttttgcagagacaggatatggggaaaagaaatcagattgttactgtgtctatgtagaaaaggaagccataagaaactccattttgatctgtattaagaaaaattgttctgctttgagatgctgttaatctgtaactttagccccaaccctgtgctcacagaaacgtactgtattgaatcaaggtttaatggatttagggctgtgcagcatgtgccttgttaacaatatgtttgcaggcagtatgcttggtaaaagtcatcgccattctccattctctattaaccagggacacaatgcactgcggaaagctgcagggacctctgcctgagaaagcctgggtattgtccaaggtttcccccactgagacagcctgagatatggcctcatgggaaaggaaagaccttacatcccccagccggacacccttaaagggtctgtgctgaggaggaggagtgaaagagggaggcctctttgcagttgagataagagtaaggcttctgtctcctgctcattcctg

SEQ ID NO: 1887492 - DNA, 4001 bp, Homo sapiens
ataccataaattattcggattataagagggtaaatttatttcatgttatatgtgtgggattacagagccacgcagtttttactgcgtctcctttctccccctagtggagacaaatgataccacagggataacagaacggcaagtgcagtttgatgatagtaagaaaaatccctgttgtggaggtcacagctttacctacttaccttaaacacaggagttttctggccaggcgcggtggctcacgcctgtaatcccaacactttaggagaccgaggcgggtggatcacctgaggtcgagagtttgaggccagcctgaccaaaatggagaatctccgtctctactaaaaatacagaattagccaggcatggtggcgcatgcccgtaatcccagctacctgggaggctgaagcaggagaatcgcttgaacccgggaggcaaaggttgcagtgagccaagatcgtgccactgcactctagcctgaatgacagaaccagactctgtcaaaaaaaaaaaaaaggaaacagagttggctaaggcgactatatcttatttatttatttattgacctttttccagtacaagtttaatattcattagaggagtttttttcatgtgatgggggagaatggcggcaagtagtaggatctgctgaaggcaggagcttcactgtgatgatggcgccccacacctcgggtttcctgcagcccaggatctgatagccggccatggtatcatcacatattttttcaacaacgatgggacatggtctgcctcatctcccggggacaccaggagcgctttccagactccgggtgatcggggagcagctcccagtatggccttagttagcgtctcctcctggcccatgttaatccataggcgccccatgatgagggctagtgagggcctctccctggagtcaacggccagaattgtgtttatgaggcattctcgttctatggaaacaaggaatgggatcgcctgtcaccattcacacagtattagtgtcgtcctcagccccacaaaagtctgcccaacagatggcagtcctcggccaccatggtgtagacagtggctcccaggctccacacgcccaccagggtacatcgtacttttgtcccggggaacagttctgaggctgtataagaggagctcccaccgaaggggatcagctttcagcctacggtgaatctggtatcaaagccagcgtctgttgtttccatgtcgtgctgagcctcctcagggaagttctctgacttcagatccctgtggataatttccttctggaagcctcactgcatggaatatcctatttgctggaacttgcctcaggcctcttcccccttcaagaagaattcgagggtgaagtcggatagctctcccgagctggcttaatccatgactaggaacagcctgttctcggtgccagccacgtgggtctgatgatcttcgggtgattaagggccttcatcatatggtccctgcagtacagaccctgggggctgcaggagccctgctgccctgttggggtgacctccacagccatcttggtcccagtgagaatgtgctgggccagctgccttgacttctgcaaagctgccctggctgatgaccttgaggagcctatgatcatcagtaagggactcctcggaggcagaagtggttccaaggccctgcagcgtggtgacctcccggctacacatctcagctaggaatgccaactgagaatactacccctacaaactttgctaaccaggaacacgaatgacacggctggaggtgtctgctgacatgtgagggtggcctctggtcacctccatgccagggacaacgttcgaggccaactctaccatggctgcacccaggaaccggatgatgtcatcaggaatcatctctcccggcctcttggccctgctgacttccctctgagttgatgtcattctcaggtgggctcttcctccaacgtggcaagatggcacccacagctccagcagcctaacggaaatagatcttctccgcccagatgtttccaagacaatgacctgacctttggcactgagtgtgtcacatgagcaggccttagccaatcactgtggacaaagaagatgggatcagcccattggccaggttgaggtcatgtggccactgtctctatggaaacttgggagatgcttaactgttttcagttgggagactctgtggtggctgagagagcaggttcaggctcgaaaggtcactacaactggatatgcaactgcagaagaatgactttggacgcctacctcacaggatatataaaaaatgaatgaaacaacagctaacaaggggccagaaagtgctagtctcctggagtgtatgatacacaaaaatcagatcaaaatcgatcagtgttataaatggaaacgttgaaactagaaagctattagaagcaaacaaagggtaattttttataaccccatctaaggtcatgaaaacccatagtgattttagagatgacaccaaattacaagcaaaaaaacaaaaagtagatacatttcagttcactattttgtacactctatgagttttaacaaatgtgtaataacctgtacccatcattatgtgtcatacagaatggtttcgctgccctgaaaatcccctgtactccacggccttagaggtctggcggtgtgagcctcgtcattgatgttttgggtggtggggaatgtaggtgtttttcagttactatcctccgctttagggcagaaaagagaggaattccccacctagccccaggttttcataaaaccataagtaatgaaggaacccaatactgcaggtgaagaaatgaatcgtcaggatatattgatccgtgggattatcatagtaaaaatagctaagaaataaggaaggagatcacattttagaacccaacaatgcagcttgaattctgcatggatcttgagctactcatttggactttgtgaattcagtgtgaatgttgcttcccaggcaatgggggacgcatgcacttgccggtgctcgtgcacacgggattggcgtgcagatgtgtgcgggccgcacaggggatgttctgcagctgccctgggccctgggtgtgtgaggctgcccccctgccatgttgaactttaaagggtgtgatgccggaatgttgttggctgagtccggactggcatgagcccttctgatcctgttacctcacaccttgcctggcatcatcccaaaaggcgtttgtgcaaatggcttattgacacgggcttgggaccaaatccacccaaggggagggggtccctggggccttgctatctgtggacttggatgaaatcatagtgcctgggggtggagaggatgaccctcagatatgttttccaactcgtgtttttcttctagatgcaggaccccagatgcagagccccagggcatagaggattccagattcttgcaggggactggaggaggctcggctgaaaggagtcagggctgcgagggtaggggacagattcgagtagtttctccatttcacagcaataattactgccccccaccacacacacacacacacacacacacacacatgcacacacatgatatatgcatacacctgtctgtgctgcaagttccccttttgctcagacttagggttttgcagacacttctaaggaaacaaagatgttcccttttatttttgtctacttgctcctgaagcttcccctccatgtgtgcaatatgactgatgccaactgctttctttctttcttttttcttttcttctctctctctctctctttttttttttgagacggaatttcactcttgttgcccaggctggagtgcagtggtgtggtctcggctcactgccacctctgcctcccgggttcaagcgattctcctgcctcagcctcctgagtagctgggattacaggtgcccaccaccacaccaggctaatttttgtatttttagtagagacagggtttcaccatgttggccaagctggtctcga

SEQ ID NO: 1887493 - DNA, 4001 bp, Homo sapiens
cttccaggttcaagtgattcccctgcctcagcctcctgagtaactgggattacaggcgcccgccaccacgcctggctaattttgtctttttagtagagacggggtttcaccatgtttcccaggctggtctcgaactcctggccttaagtgatccactcgccttggcctcccaaagtgctgggattgcaggtgtgagccaccacacccagcctacttcacagcacttataatttccaatcatgtctcatggttactgcctgccctctgtctttccccgctgtatccctagcgtctgcccagtatacagtaaggttctcagcaaacatcaccaactgactgactgatttacttcctcaaaggctgaagacattcctctccctaccagcagggtaggagaacggcagtttcctcacaccctcgttgagacttttaattttggccagatctatagatatagtatattttcccttctcttcctggcgacctcctgctcatccctcaaagcctttttcaaaggccgcctcatgggacaggagcagtggctcatgcctataatcccagcacttgagggggaggcaggtggatcacctgaggtcaggagttggcgaccagccttgggcagcatggtgaaacccctactgttgggaacgaggtttttggtgtcgcaaaaaaaaaaaaaaaaaaaaaagaattaatgcgggaacaaatgatctctcagcaaggtgagctttacttcctgcagaaagggtgctactcaatagctgtccagccacgagaccccgccaaactaaggagacagagttattataacctgatgtgtctaccctactgctgtgtccagtttccattggctggaataggacctcacattttacactttacccgattggctattagtttaaaacttttttaactgggtaaggggaacagaacaaagaaaaggaagttgcccaggggatagttaaggatgcttccttaactatgcactatgtcctggggcttgtctagttctgtccaggcatgccggagcaagctaggacagctgatttggaatatataatagtggatagcaatcttatactaagaaattgtgactttttataatctttgaagaataactttcccatttttcacactactaaaaatacaaaagattatccaggcatggtggcgggcgcctgtaatcccagccactcgggaggctgaggcaggagaatcgcttgaacccggaaggcggaggttgcagtgagccgagatcgtgccactgtgctccagcctgggcaacagagcgagaccccgtcttgaaaaaataaaagtaaaaaacaaacaaacaataaaaaaatagtctccctttgagaaatcttccctcacatcaactatttcagtcccacccagcccggtttttccttccttgtgctctaatattcgttttccaccaagttttacgacccgatcacgctgtttgtccagcacccatactgcttacgggctccggtaatgggcagctccagcctgcggcgtagacagttgccatggagaaagacaggcgtttccagagttgacggttgccgtggagacaaaagccgcccgcacgcagtgggggcggggcttacagaacgtattttgcgattgatccacaggaaatagacgcagctgcgtggatcgccttctccaccccacatactgaagccagaataagccacgacttcgtgtgctccacgcgagggccgcctgacgccagagtttctcccgcatctgccatcagaggaccgtcgccctcaggagcccgagctcccgcggtactctgggaagggtagttcatcagggagtctgacaggcgcggaagtatccgtggggccggggcagcgtcgccaccaacgtggggatgctggtggggagcaagcttcgcgtgggaggccgatccgaggtccaagcccccatttgccaggtccttgagggccccactgtctagtgacattcatcacttgccctccccattttgggcccattttggcctgaaaagtggccccgagcagttggggatttaggccaccgagaggaataggggcttgagaatctgacggcagcctgtgaggctgcaggggtggggacgggtttagaggcagcgggggtggggttagggcgtggccaggagccgagtcagcacaaggattggctggagtaggcggggaagggaggtggttattagagaactgaacccaggaggccggcgtgggcggaacctgctgatgctcgttttgagaatccttacactgagtatcattcttgagtccactgaagaaactgaggctcagagagggcagtggacccttaagttcagtaattcattagaagggctcacaaaactcagcaaagctgttatacttgattgcatttactacagctaaagaatagagattaaaaccagcaatgggaaaaggtgcataggatggagtctaggagagaccaagcgtgagcttccaggtgtcctctgccagtaaagtcatatggaaagcatttaacgcactcagcaatgatgtgtgaccgcacacaaagtgttgccagagaagctcacccacgccgtggtacccagggttatggggttggttatgttgacagggctgatcaccctgactgaccttagtctccagcccttccagaagtcaagctggaatttagctggggtatcagttccgacaaggggtccccatctctgaaatgttgggggagaccttggccctagagaagactttgctgctgctttataccttgacctcgtttgagcttgtctttgcatcagcctcagaggtgttgggttttgccatcttagccttgcttggtttaggctcctgtagctcatttctttttccaatcacatctttttcctttattcagagacagggtcttgttctgtcgcccaagctggagtgcagtggcatgatcacagcctactgtagcctcaacctcccaggctcacgattctcccacttcagcctccctagtagcttgactgcaggcgtgtaccaccacacccggctgtttgtattctttgtagacacaggatttcaccatgctgcccaggctggtctcaaactcctgagctcaagcaatccacccacctcagcctcccaaagtgctgggattacaggcatgagccaccacacccagcctaccacacaaactttaaaatgttttaaatttatctaaacttaaacttttatctaaatttaaactttaaatgtttttaaattgtaaaaatatacataaaatttgccattttaatcatttttaagtgatcagtggccactacccagctaatttgcatatttctttcgtagagacagggtttcatcacgttgttgaggctggtctcgaactcctgggctcaagtcatcttcccacctaggcctcccaaagtgctgggattacaggcatgaaccaccacactcggccctatcagctcagtttataaaaaaaaaaaactttctattactaccatgagcaggaactagtatctcttgtcacttgtcactaaaggaaaaaggtggggacaaaaattaaagtataaacaaagttatatgtattactggatgctaattagaaacactccccaagcctggggcctgacatgtctgtgaagagtgaactgcaggctgcctgtgctctctccttggttacttaggcccacacacagactgaaaagtgttgtttgatgatgcatctgaggaccagctgaacttgtgtgcctcctcagtggcgcatgccccgcccagacagtgggaaaactgagctgctccctcttactgatcgccaccagaagccctccccagcaaagacgtgaggcctggcaggcagggactgatgcgtggctgcatggcagcaggctgagagaaggaaccaatgcttttagactcaaaactttaatcagagaaccaacaaatatgcacacacggagggcgtttctaccttggcctgcagcaacacaggtgactgatttacag

SEQ ID NO: 1887494 - DNA, 4001 bp, Homo sapiens; identical to SEQ ID NO: 1560386

SEQ ID NO: 1887495 - DNA, 4001 bp, Homo sapiens; identical to SEQ ID NO: 1560394

SEQ ID NO: 1887496 - DNA, 4001 bp, Homo sapiens; identical to SEQ ID NO: 1560405

SEQ ID NO: 1887497 - DNA, 4001 bp, Homo sapiens
gaggagatcaagaccaggggctgtgccttccaaatggctgcctgctgccttgccaggggcagaaacaaatagatggaaaagtcccctgagtggtgcagtcacacagggtggagtcacctgacaatgctgctctgaatactctcattggaccgctctcctcaggcccaggatgtggggataaatctggtagagcactagacctccacctccatttaaaaaaccagacttttgagtaagggttcacttcaacataggaggctccagctaaaaaacaagtctgaaagacactgatcttatccagtgtcatcttacagaggagttaaagaggccaaggggaagaagtgatttttctgtggtcacccagcacgctggaggcaaagatgagctcaaaagttagatcttctcccaatcttagtgcttggggctctcctcatcgcacccttgggccctttcggtcactccaaaagagacagcctgatggcaagtggctgttcccattagcctggctttcccttgagactggggatgaggaaaatgaaacagcaactaccatttcctgggtgtcctgggtgtttatggcaggccctgtacttggcattaacataaaaataataactaatctcatttaagcttcacaagtgtaagtcaaacaataccacccttattttacagatgtgaaaagagaggcccaaagagctcaagcaatttgccctacatcatatccctagcagagggagagataggattcaaacccagaattcttaaccaggacccaacagttcttccacaatcttaacaagtaccctctactgcccttgggccccctgtccccaggagcctggccagccaagactcacatctccaggtgagtggcaaccaccagaagtggttgtctcggggttactgcaatttttaattttctttttcactcctgtaggaacaccagggctgttcctccactgatagtctctcaactgtggaaaagaagagcaggaattctcatgagaagtccctacaatcacatctgcctttacagtttttacagaactttcttttatgccatctgatttattgccacaaacaactgtacaaggtgttgtcttaatgacttaatgactgagagggattgataccacggcttaaaaaaggcaataattgaacttgaactctgtcttctgactccaagatctggggttttgccacaaatcagcagctgccagggcccaataccagaggcagaggtagaaaaacagacactaagtaggcaggaactgggtactgtgtggtttagagtcacacatcatcacatgtctgttagtgtaggaagtgcagcagcccctctcaaactcttacatcaatgagtcctcatggcagaaggcagcctttctgttacatctgggaattgaacagaaagaggacaacccaagcctcttttcagagtgaattttggtatactcttagaaatctatggggctgtcatccctaagtccatgaacgttttttctctctcaagagaatcaagggaaactgatgcttcagaaagatgccccatattaccctgtggcactcaaagtcacctaggttgagatatgaggaagattcaagtgtcaagttcagtttcccaagatctgtttcatggtaaataagcaaatctcactccaggcagggtctgggctgttgaggggaggggctcactgacaagactttggtagagggagcccagaggcagctgggggcccaacccagtgagcctcgggagtggcatgagctctggccgtggtcctgccatcagacggcacctggggctgggtcgttgggctgccaccaggcgcttgtacctttttctttgctgctgccaatttgctcgtcgggtttcttccgacatggcagggcgggaagggaggtggggttggggccacatcagctctatcccagttaccactgtggaacaagtcctgtctgccaccgcgcagctgtgagactgaccagagaaggtgtaaccagggccaactagggcagagggggggcgtggcctccatgctccaagcccattggtcgatgcgaaagatgacagaaaaaggaagcgcagccaggcaacagcgcacccagggggatatgaggcgtcacaaggaaagctgagcaggcaattgcggccccgcccactctggggagaggggcggggccgctgactccgggagcgggcgggggcggggccgcaggctccagtgggaggaaaggggcggggccgccggctctaagggtgagagaggggcggtgcctcctgctccaggggcagaacggcgggcagactttctctgggtgaagtcgaagcttcttgggctaccctcatgctctgagtcagagttcctttacaggtggacctgagaggtgactcaccaactcctgccctggaccctcctgcgccactgaaccccctgacctgggggcctcggaacctagggctcaggaagtgggtgaggaacggactccacagtttctttcctgactcctcacagccctgccccagaccttcccttcccagaaatcacctctaaggacccctagccaatgttccagacacacccccctctcggaacgtcccattcctagagggtacctaccctgattccgggagagcatctgccccctttccagctagatccagtcccgggcgctcctgcttcccagctcctcctcctcccgcaccccacagcacccctttcttctcagggcggccgtgggtcccatcaggctttcccctcggatcctctccaggatgaaccaggacttacctgaggttaccaagtgaacttctgggaaaagtccaattctcagatgctagatgtcttccaaaaatgaagcaaatttgtaacttagtagctgagtcaagtattcctgttagatggtcaacattaattttttattttattttagtatttttaagtggcaactctagtgtgtaagaaaatgaatgcgacagctgaatttgtagaaagcttctctgactctcttgggctctgtcataagccctggaacgaaataaaagtctagtgaatacagggaagcccccttctttttctccatatttacccctcaccttaaccataatttcacataattaaccacatttaaggtggttgataataaagtgggaatgtacaggattctttttaaccctgagttagcaatccaaaaattagaatttgttgcattcctagaactaagttcagggttcctgagcaggtactcaagcagacacaaagacaaaacttccattttatttcagaagaacctccataatcccgtgagtcagttcccttagtaaattatgttgtctatctatctatctgtctcctattggtactgtttctttggagaaccctaatacacacactcttttttcctggctctttgagtataagatgattggccaggattaagaatgtagcctctgcactgagatagcgccactgcactccagcctgggtgaaagaggagactctgtcaaaaaaaaaaaaaaaagaatgtagcctcctgtagccactagctcattccttctttaatgagtccccccaccctcccagagcaccacactttttgtcaattgatcatttgccttgatatacttgagaaatgtcattgtcattcatgaaacacctccatatacaatagtatgtatactaaaaataactcttcttcctcttccactcaaaaaagaagaattctaatataatggttatatataaggaacattttgaatctgagtttacttttaaattatattaaacattcacaaagtgcaatactttattttttataacagattattggtgaggcacccttaccacaaaataggacagtccattgtgtcctatctaacccaaagattaaaataaaataaatgtatctcagcaaaaagaactatagacaatgaatgctgtttgtcaggaagatacaagttcatataaggaagtgtttttttttcctgattattttactct

SEQ ID NO: 1887498 - DNA, 4001 bp, Homo sapiens; identical to SEQ ID NO: 1560442

SEQ ID NO: 1887499 - DNA, 4001 bp, Homo sapiens
cacctgaggtcaggagttcgagatcattctgtccaacatggtgaaaccctgtatctaccaaaaaaatacaaaaaattagctgagcatagtggcagacacctgtaatcccagctcgtgaggctgaggcaggagaatcgcttgaacccgggaggtggaggttacagtgagatgagatttcaccattgcaatccagcctgggcaacaagagcaaagctccatctcaaaaaaaaaaataatgtataaatatgttgaatcacctggcaaatgattttcttcccctggtgtctatgtgttccatactattgtagcctcttttaactggtaaaataactaccccaattcagagatccagtacttaatgcatcacatttccagagtcgtgagaaaacagctaaacctgttagagtgaattatactcactttgtttccccatagaggaaataaaacccacgattagaaacctttggaaaacataggaaatgcaacatttggaagtatatagaaacaagagataatcatgcaatgcttccaaatgaagtctcacattggatttgctgattttggagacagattcccctcttctggacagctttgatggccaagatagaagttcatttgctatgtttccagggactattctctttgatggatacaggatttatggggtctaaagagaacatacaattctaaagtgttcatgtttgagagaaaactctgcaatgatcagaaggattgagccagttttagcaaaacaaattaggactacattaatgatgaggttgactatacacagtttggagtgggagagttactctacccagtatcactgacatgttggaatgccagatgaaactgaaacagaaaaattgtcttggagtctaaaagacatctgatgtgctgatacctgttcagtcttctgcagtcatgggcgtaaactctcaaagagcaccactgggtcttagtccgtggcataaacattattctcaatgtagatattgtcttctgcttggacttcctttttaactgcattttgcaaagctttagtttgaagactgctaaatgaaacacttagttgttgagtctcctctttgaagaaatactttttggcaatgatgacacccaaaagagcaagaagcaccaagacagaaatacagactccagcacagattcctttagtggtgttgaccatctgtggactatatgctggggacagttgagtttgattgttattccaaaggccatctgaagactctgtcatggtgtcattcccatctgttgtgaaagagtgcaatggtgagctggtgggttgtgtccttatttctccctgaagtgtcatagggtgggtttctgctggctgaggtgaagatggtgaagtggctactgattgatggttctgcgtgggcaatggcgttggaggaacaaaggtagagaccattgttgtcattggaacacttgttttcattgaaatgctcgttgttgttggaacagtctttgtcgttggaacagttgttgtcgttggaacgcttgttgtcattggaacagtgatgctcgttcaaacagtagtggcggttggaacagttgtgacaattggtgtagtcgtgaccctgggtggcacaatctccaatgatagagtgattttcatgtcattgaaccacccactgtgctcaacatggcaacaatataagccactgtcagacacagctgtattttctatagtcaaagggacatcccttcttgaaaggtcccccaataccttatagtgtgtgtccttccgataggtgacgtgggttccattggtccagacaatgctatttcagcatgtgaataaagaacgtgcgcctctattccagcacatggatgtgacagctccattgtagtggcagggtagcgtgatagacggacctgccattccaccaacctttacagaaccagctacagaatctgccagatgtaggatgaggcttaagatggccacttcaggatacattatgggatcagccagttagttagaaggcagttttccagcttcttctccctcctcctagtctctgtttgtggacggctttaaatggttttccaccctgggtgggccaggtgttccttgccctcattctggtaaatgcacaacctcccagcatgggcattatggccatcatgtacatgtcacagtgctgcaaagattttgtttatggccagttttggggccagtttatggccagattttgggaggcctgttcccaacaaataataatctctgaacataagaatttgactagtgttaatcactccacttctccagtacactgatacttctccctttttcttagcataacacaaaacagatacatgactacacaccatctgctctccagtgcggaacagaggaacaaaggcataagcaagcttcagaacacagtcagccatgttcaccacatctatatctagcactgcttaaaacaaagtcaatgagaaactgagaagatgagtgactaccctattttcagcacttattgtcacaagaaaagaaaacatgcccacacactgtctccttctaaggcacagcatccactttcctgaggaaaaagtaactttacagcatatatctcaatctcacattattagcaagatgacactggctttgagcacacaaagaacaggcatattatagacactcttaagacacatcacatggcctggcttacctgatacaatttttaatttctctgaagtaaactcaaatttcaaacatgtatttctttattaacttatttcattaatttccacagggacttcacagaaagtatattcaactttcattcacttaatcttaccacaatagatggtgtaacatatccagaagacagccatatgtaagacatgctcataccccaaagcatagaaaacttaacacaacagggccttgaggaagcaacactataacagtgcaaatatacaaatatttaagaaaacctacatcacccaacaaagagcatgtatggtcaccactacccagcactctccaaaataagtagctatgaatagcttattcaaatttggcttatatatacttgtcaccacaaattggttctgaacatactgttccaattttggatattcacaacaagggtaattatctggtaagatatatttataataacttgtaattagattcctaaatgcacacatatacttgtgtcacagtgaggtgaaaaaaactctgagttatttgtagagtaccttaagatttaaatttccaaaaaacattcttaagcttagttttacaagtattccacccagcatctcttcagcaagctatttcaattttaaaaagtgaggactagggagggcttttaaaagttttatttctttctgttcagtttatcttatcccatacagaaatggaataaagtgtgatgtctgtcctaatgatatttatggttgtggtaatacagaaatatctatgcttccaagcaagaaatgaaaaattatggtttccccaaaatagagaaaccagtgctacctggggcccaaagagatgttcaggttacatctgtcagaattgataccatgcaagacaaccatctttggagaacagtggggctcacctgagattttggtgagtcatgtggatgacatcagagacaagcattacacaaaatgagcatcccaataagactttcatgtgagattgtcttagaagatggtggcccaactcacacagaagaggacggctgtgcatccaagagagactgatattttttctcaggagcagaaatcttaatgtaggagatggccactcactgagtagttgaggaatgccctgatggaactctctgggggtcagatttcacactgtctccctgagttgcataaagcacagaacagcatgcctgcactccagcttctagcatgtaccaactcagcagaaaacacatcactgtctattttgtttcaaaaatgctttgccatttaaaaaaagttaattaatatagtagaaaccc

SEQ ID NO: 1887500 - DNA, 4001 bp, Homo sapiens
gccattctcctgcctcagcctcccgagtagctgggactataggcgcccgccaccatgcctggctaattttttgtatttttagtagagacggggtttcaccatgttagccaggatggtctcgatctcctgacctcgtgatccacctgcctcggcctctcaaagtgctgggattacaggtgtgagccactgtgcctggcccacccaagtagtatcttatcccttctctccttttcatcccagcctgtgcccactgatcgcttggttaccggtcccattatccactccagctcctggtacttctcttctgggtacagctgaaccacctgggaagagcaagctaagaagttctggtgccccccttgcagcaaggctatcagtgggcacaagaggatggggggatgggctggagtaagccctacccagagcaggagggagccccacacagttctccctcagctgttaacttcctagagacccacctcacagtcaagagcaccaacgggcactcctccctccactccccttactggggcaccagtttctttccaccccaggtgttcactatccccgttatttcaattctcatggctcacaggaagaaataggtatattgtactgagatttttctttctttttttttttttaaaaaaaaaagacatttattcagcatcacgatcagactattacatttagcaatcaacagcatggggtgcaaaaagaaatctacgttaaaaccctttgttggaatgctttacactttccacagaacagaaactaaaataacctgttatacaattagtcacaaatacagtcctcgagttttttgcccatacacatgagtatttgtctaaaacatgtcttctttgtagcagctaggccctgccaccactgtgcttggctgagttcacaaatctattgtaacctgtagcttccctgtcacttctctggctctcctctcctgctaagctttgtttcctaattaaaatcttctgccactgccatagctactgctgctgctggaaccgccatagccacttggtttcgtggttttgcaaagtattggcctccaccgccataggggccagagcttctgcctccaaaatttcctcccttcatgggtccaaaatttgaagactgattgttgtaattgccaaaatcattgtagcttccaccacctccaaaattgcttccatcattaccaaatccattatagccatccccactgccaccatatccaccaccaccatggctgccaccaaagccaccacgaccactgaagtttcctccacgaccgaagttgtcattcccaccgaaaccacctccacgaccaccaccaaagtttccagaaccacttcgacctctttggctggatgaagcactagccatctcttgctttgacagggcttttctaacttcacagttgtggccattcacagtatggtatttctgaatgacagtcttatccacggagtcatggtcgtcaaaggttacaaaggcaaagccccttttcttgccactgcctcggtcagtcatgatttcaatcacttcaatttttccatactgttcaaaataatctcttaggtgatgttcttcagtgtcttctttaatgccaccaacaaatatctttttcacagttaagtgggcacctggtctttgagaatcttctctggagacagctctctttggttccacaactcttccatccaccttgtgtggccttgcattcatagctgcatccacctcctccacagtggcatacgtgacaaacccaaagcccctggagcgcttggtgtttggatctctcattaccacacagtccgtgagcgttccccattgctcaaaatggctcctcaggctctcatcagttgtttcaaagctcaaccctccaatgaagagcttcctcagctgttcgggctctttaggagactctgacttagacatgacggcagggtgaagagagactttaacgatgcttcttcggcggtgtccacgggcagaaaagcgagatttttctaaatgacataaaaatatgtattcgtgaaacagtcttttcaagataaggatcccatccatcggactcaaacattacccgctggtccttggtaatcttgccccaccctagtgcttcttctctctcagccacccctgatggaatcctgcagtttgtactgttctgtgtcaggcatctttcactcagcataattgagcttcatccaatagttctttattgtacatgaataatattccatcttcagaggaagcaaaatttatttctccagctgttgatggatatttgggttaatttcagtttttggctattaagaattaaacatatgaatattcacataccagtgtttgtaagaacatatgatatttcttttttgtttgtttgagacagcctcgctctgtcaccaggctgaagtgtagtggcgcaatcttggctcactgcaacctccgcctcccaggttcaagccattctcctgcttcagccttctgagtagttgggactacaggtgcgtgccaccacgcccagctaatttttgtatttttagtagaggtggagtttcactatgttggccaggctggccttgatctcttgaacctcgtgatccgcccacctcagcctcctaaagtgctgggattacaggcatgagccactgtgcccagctgattatttctttagaagattttattttattctacctaggaataaaatggctgggtgttgtgacaggtgtatgtttaacttcttaggaaacttccaaactgttttccaagtggctgttccattttgtattcccaccaacgtcataagagttccagttgcttcgcattgtcaccaacatttgatatagccaatcttactaattttagactcccaaatatgtgtagtggtattagaattgtggcttaatgccaggcacagtggctcacgcctgtaatcccagcactttgggaggccaaggcgggcggatcacgaggtcaggagatcgagaccatcctggctaacacggtgaaaccccatctctactaaaaatacaaacaattagccaggtgtggtggtgggcgcctgttgtcccagctactccggaggctgaggcaggagaatggtgtgaacctgggaggcggagcttgcagtgagccgagatagtgccactgcactccagcctgggtgacagatcgagactccacctcaaaaaaaaaaaaaattgtggcttaagtttgtgtttacttaatgaatgatgatgttgaatgatatttcatgtttttatttgtcactgaaaaatattctgtggtcaagtattaatgacattgattgttttcagattattagtttttgagagttctttatatattctggatataattgctgcatcagattatggtttgtatgtattttctcccatctacggctattctttaaaaatccttagcagtctctaggccgggagtggtggctcatgcctgtaatcccagcactttgggaggccaaggcgggcagatcacttgaggtcgggagttcgagaccagcctgaccaacatggagaaaccccatctctactaaaaacacaaaattagccaggcatggtggcacatgcctgtaatcccagctactcgggaggctgaggtaggagaatcgcttgaagctgagaggcagaggttgcggtgagccgagattgcgccattgcactccagcctgggcaacaagagcaaaactccgtctcaaaaaaaaaaaaaaaaaatccttagcagtcttatgcctataattccagtactttgggaggccaaggcgggcagatcacttgaggtcaggagttcgagaccagcctggccaacatggtgaaaccccatctctactaaaaatagaaaaattaaccaggcatgatggtgtgtgcctgtactcccagctacttgggaggctgtggtgggagaattacttgaacctgggaggcggaggttgcagtgagccgagatcatgacactgtactccagcctgggtg

SEQ ID NO: 1887501 - DNA, 4001 bp, Homo sapiens
cactccagcctgggggacagagcaaggcattatctccaaaaaaaaaaaaaaaaaaagaagaagatcttcgtgaaagcactcatcatcaacaaaaccacggataaagataataatggaagtatagagacggcacagggtgcagggaggtgaggatgaaggtattgctggggcatgtgggaaagtgcccagcccagcccagccacccatttgatgtcccaaagaggagcagggtgtgtccaaaattagagctacaggcagtagaactaggactcaagagcaggtacagtggctcatgcctgtaattgcagcactttgggaggccgaggcaggcagatcatttcaggtcaggagttcgagaccagcctggccaacatggtgaaaccctgtctctaataaaatacaaaaaattagctgggcgtggtggcggactcctgtagtcccagctactcaggaggctgaggcaggagaatcgcttgaacccgggaggcggaggttgcgtgagccaagatcactgcagcctatctcaaaaaaaaaacagaaaaatgaactaggaatcaaaccggggaagcttaaaggggcttcagtctcaactcatcctacaatcccatcctgcagatgggaagataggggacctgcccaagatcccagagtgagcccaggagaagacttgggcccagtctcatcggttccctccactctccccctcacccggcccacctgtgtcagatgctgttcagaggcaaagcccaggccgtagactgtgttggcgcgactgtcggcccactgcccgaacttctgggaagttttggtgaaggtcatgttgggagtgacagtgctgttgatgatggcctagggtcggggaacaaagttcaaggtagatgggacagatactaacaaacatgaaaccccccaggtattaccttgtattagggtcttgaaggtctttactctgaaccctttcaggagatagagactagggcctgggaaggcttagggtttcctgtcccttgggcacacagcaagccagccaccagacccaaggttgtcaccaggactcctggtgcctctgccccacccagaccccaccctgaccttggcgcctccgatgctgatgatgcggtacacattgcgggtggcatcgtagaaataggagacagtgagtgcgtgcttgcccgctgggatccagtttcgcttggtggctgggtcaatttggaacacgtgcgcccgtgtgctgaagattggctgctccctgcgtggggagagggtgtttggtgggggccaggcacccccacttagaaagctcagggccaggctgggggaggtgggagctcacctggctgtggacattggtcaggctgggatgggcaggctctagggggcagccagagaggtggcaggagcactggtttggcccctagggagagaggagggactatgagtgtccctcaggccaggctgagggaggccaagcaggttccatctcaggacccatcaccaggtgtgcccgtcatggaactttcaatcaaaaaggcaggagaggcccaaagtacacctggtgctttgggaggctgagtcaggaggatcctttgagcccaggagttcgagaccatcctgagcaacatggcgagaccccatctctaccaaaaatttaaacaattagctgggtgtggtggcatgtgcctgccgtcccagctactggggaggctgaggtgggaggatcacttgagcccaggaggtcaaggctgcagtgcagtgagctatggtcaggccactgcactccagcctggacaagagagtgagaccctgtctcaaaaaagaaagaaattataaaaagaaacaaaaaggtaagataattattatagataactcagagcaagcagaccccatctttctttgtctaggggaagcccccacaacaccctgtacaggagatggccctctgagaggagcctggtggccgctgacatccagatgtaaatttctcattgtcctggttattgcacccccgtgaagtcccctccatcccaggctgagctgtggaggccaaatctctgctgagttctttccaccacattcacccatgactggccagagcggggctctccaccaaaaaatggggcgttgagaggtgtgtagtaccaggagaccagttccccactacaccctgcagagggaccccacccccagcagctcccaccctagggcagaagcacaccttgaagtccagagtccaaatccccagggagcccccagccaagttaaaaagacaagatgtagacaaacagccaatcccaatgcccaccatgagggcagagcagaatccacactgggagaccagggctccccaacctccccattgggccattcagcaaccccgaatctgcaggggaccaaggaggagtttggaggagggggaagacaggtgggggaggggaggccctggcccagcggcctctgtggtcaaaggggggatgccccccctatcctgtcctgggcagctgctgtcctggtcacagggtctgaaaccggagcccctgagtgggggtggggcggcagctctggcctggactgggggcgggtcctgcgccgggtgggagttggggaacacaggggtccccggaacccaggcccttccggtccggcagctcctgctgcgacttgcagcgtttggggaaagttactcaccaactagtcatgcgcctcggatgccgccggccacggggctcccggaggggggtccgacaccgcccggtgcccgggatccccaatctggccggtggatgaggccccatcccatgcacccgagtgcgggggacgggggggttaatattaattcaggatcccatccccacccgaggcaggacacccagtgcacgccccaactccgggacgcgggctctgaccctggaacttccgagattcccgcgacgccccctgtctctgggtccagaacttcgggggacacctcttctgcctcctccaaccccaggtcggtaactccggggactcccttcgtgactcctcctctaactgggtccgggaccccggtcctccgcgttgtcctagactcctaaacttcgaggaccccctgccacccctccagtccctgggtccgggacgtccggacccctcccaccccagtaccccaccccaggtccgcagctttggggacctcttcgcagcctcctccaacgccgggtccagaactttgggaacctcccacgcagtcccctctcagaccctgaatccagaacttcgggacccccgcgctccctccagccctggaacttggggacccctcgcgccgctcccagtcccgggtccgaaacttctggggaacccccacgccctccccttggccctgggacttcgaggcccccgcgctcccagcgcaggctcggcaggccgggctcaccctgccaggtcggcgccccgcgagtgtccaggcgcgagtcgggtgcggcccccgcggcgctgactccgcgctgccgggcgccccgctcgctccctggctcccgggcccgcgccctccgcgccgccctccacgccgcccgtgcctttgtctgcgccgccgccgcccgcgccgcctccggtcccatcgcggccggtcccgacgcggccgccgcccgccccgcctccccgggccgccaaggccgccccgctgcgccccctgccggctttttgcactgggagagggtatgggggaggggataagggggaggggcgggggccgggactggggaagggacggaggattgagggagggggttaggggcggtggagggggagtgggggggggggttgcgtggggtcgggttgggagcagagggtggggacagagagacagacggagagggacatctgggatgagaaagagacccagaaacagagacacgggggagacaggcggagagataggaagcagatggagagagttgcacggacagcgatgtgacctcaccctcctgtcaccttctcaggagacagctgcctctgtcccc

SEQ ID NO: 1887502 - DNA, 4001 bp, Homo sapiens
ttgtgggactgcccaggccacggtggcgagtttggattttctccaagtgtactagggaggtatggaaaggttttgagcaaaggagggataggatctaatgtgcgatttcaaagggctccttgggtgctatgtgcagagtggatctcagcagtggcaggagcaggggcccaggaggggcaggtgtctggacgtggttgcccgacgtagcctgggtgtctgtgttccaggtgaacggctcccaggctggcctgcccctgactctggctggggggcacactccaggccttcttcacgcccttggccatcacagtccaggtggcacccggcctctccatgacctttcacgaatcccatgccctctgagtggcagtgcctgagacctacaccaacaccctctgtggcctgggcggggacttcagcgtggatacccaggatgacttcagcggctctgatagcacatggctctctgatgccaacagcttaatgggggcccagcccctctgtgcccaccagacaaggcagccctataccaggccttctgtggcttgctgggcacccaagatgggccctacagggcctgcagtaaggacgtggatccccaggtgcatgtggagaactgcatccatgacctctgtgccacggggggctcaagagagactctgtgtgccatactggggagctacgcccaggaaagccagcagcgcagcgttcccatgcagccctggagacacctcttggcctgcagtaagtgggtattcccagggagggtctttctcagcctgacctccccagctggcccaataccacttccaggatgtcctcctaggtcaacaccacccaaagtgacccactgcatgcctttctggctaactgttcccgcgaagaacctacctgcttaaaactctgcaataacaataacagatgacactgagtgctattgcatcagtcaggatggtctgggttatgctgaagtaacgaactaacctgaacatgacccagcatgaccaaggttgtttcttcatcactatcttcgtcacctttgtcatcatcacagtcactatcatcattaccgtcaccatcaccaccaccaccagcgtcaccatcaccaccaccaccagcctcaccaccaccaccaccaccagcattaccatcatcaccaccaccaccatcaccacaagcattaccatcatcactaccaccaccatcattgttaccacaaccacaaccatcaccaccatcaccatcatcattgttaccacagccacagccatcatcaccactaccatcaccaccatcatcaccatcaccaccatcaccatcatcatcaccaccaccaccaccatcaacatcatcatcaccatcataaccatcaccaccagcatcaccatcaccaccagcatcagcatcaccatcactactataatcaccatcaccattatcactaccaccaccatcattgttaccacaaccacaactattgtcatcaccaccaccaccaccctcaccactatcatcactgtcaccatcaccgctatcattaccatcaccatcaacaccatcacatcaccaacaacatcaccagccctaccaccatcatcatcattactatcaccacgaccaccaccaccaccattatcaccaccatgatcacgccaccagcattatcaccaccgtgaccacgccgccaccgttaatcaccgccgtgaccacgccgccaccgttatcaccgccgtgaccacgccgccaccgttatcaccgccgtgaccacgccgccaccgttatcaccgccgtgaccacgccgccaccattatgctacatcctgatgatgcctccacctcccctcctttgcctttatgacttacccttggcccccacaaccctctctccgctcccttggtcctattctggttggaaatgctccagaatagtaatgcttgctcaattatttaactcctacctgttttcttccagagctggcctgtcctccccgcagcaattacgagctctgcggctcctcctgtcctagctcttgtgccgagcctgccctgcccgacagctgcctgacaccatgccaggatggctgccagtgtgacccaggctttgtgctcagtggcatggactgcgtgcccccaatccagtgcagctgctccatggggggcaggtaccaccacccggctggggaggccttctggactggggagcgctgtgagcaattctgccactgccaggcctccacccacgccgtgtgctgctccccgtcctcctgtgggccggggcagagatgtgagaccctcaggggcatctttgggtgccacccactctcccctggcatttatcaagcaaccatgcactcacacgtcgcctcctttgaccggaagagtgttgagtttccaggcacttgcgcttctgcttttaccaagtcctgtggctcctccagctcattgcgccttttcaaggtggaaattgggaaggagaaacaagtccagcagtcccattgtgttcatttcaaagatgtaggttcatgggacccaggtttgtctgcagagagagccccgacctgatgaggtaagcactcattggcatctagagactcttgaaccgattgaagctaaaagaaatacattggctcaaactaagtaaaaatcatgtgatagcctagtgaaagtgtagagattctgggtccacagaagttccctatataccactttggctgttttggttacagaaagcctcataaaaggtaactcaaaccagtcacagactgtgttttatgatttttagactaattacataactgaaaattccagagggagatcaggcatggtttgatcagggtgctaactcagtttttcagcatttctcttggtctgtgtttctctatagcattagctttgtcctcaggctggcttttcttgtgatggcaaaataactgccaattttccagtcattaaatgtgtattccccattgtccaaaacccgaatcttttcttaccccaagtactcaacaaaaattccaatgcttcactttgattaaaccccactgagccaatcagtgcagcccagaggttttcttaagcctatctaatcctactcaggagttgtaggtgggagagatcctgcccctaccccccatctctggcagctacttcttgcagggagagagggcaaaatgggaatccacccctgtgtccctatgtcccccgaaaccagtatttcttcttaacaatcttcaaagagtgtaaatgccctggtaaacctccactctgagacctgaaacttttgtctagaacccacaggggtggatgtgttttctaggcccgagggcccctgcctacaagagttccattgttggctattggaaaacacacagccacacccctcccactccacccccttccaggaagggaaccagctttcagaattagtcatgctgtcagcgtcccacacaacgagcccattgactccaaagggcagcacagcagatggactgctattatcccagtggtacagatggggaaactgaggcccgggaaggcagacttgcttgcctaatgtcgcataaggagaaagtggctgtgctaggattggaacccaggctgtcaggttctgagcccttccctttctgtctgtgggcctactgtgtgctcccaaaaagctgtggccaaattaaggaggtggcatgtctgattcatctgtggcggggcctgggatatatagtaactctcaacaatggtgttcattagtccgggcatggaggctcacgcctgtaattccagcactttgggaggccgaggcgagtggatcacctgaggtcaggagttcgagaccagcctggccaacatggagaaaccccatctctactaaaaatacaaaaaaattgcactttaggaggctgaggcgggcagatcacctgaggtagggagttcgagaccagcctggccaacatggagaaaccccgtctctactaaaaatacaaaattagccaggcgtggtagtgcatg

SEQ ID NO: 1887503 - DNA, 4001 bp, Homo sapiens
ggattttctccaagtgtactagggaggtatggaaaggttttgagcaaaggagggataggatctaatgtgcgatttcaaagggctccttgggtgctatgtgcagagtggatctcagcagtggcaggagcaggggcccaggaggggcaggtgtctggacgtggttgcccgacgtagcctgggtgtctgtgttccaggtgaacggctcccaggctggcctgcccctgactctggctggggggcacactccaggccttcttcacgcccttggccatcacagtccaggtggcacccggcctctccatgacctttcacgaatcccatgccctctgagtggcagtgcctgagacctacaccaacaccctctgtggcctgggcggggacttcagcgtggatacccaggatgacttcagcggctctgatagcacatggctctctgatgccaacagcttaatgggggcccagcccctctgtgcccaccagacaaggcagccctataccaggccttctgtggcttgctgggcacccaagatgggccctacagggcctgcagtaaggacgtggatccccaggtgcatgtggagaactgcatccatgacctctgtgccacggggggctcaagagagactctgtgtgccatactggggagctacgcccaggaaagccagcagcgcagcgttcccatgcagccctggagacacctcttggcctgcagtaagtgggtattcccagggagggtctttctcagcctgacctccccagctggcccaataccacttccaggatgtcctcctaggtcaacaccacccaaagtgacccactgcatgcctttctggctaactgttcccgcgaagaacctacctgcttaaaactctgcaataacaataacagatgacactgagtgctattgcatcagtcaggatggtctgggttatgctgaagtaacgaactaacctgaacatgacccagcatgaccaaggttgtttcttcatcactatcttcgtcacctttgtcatcatcacagtcactatcatcattaccgtcaccatcaccaccaccaccagcgtcaccatcaccaccaccaccagcctcaccaccaccaccaccaccagcattaccatcatcaccaccaccaccatcaccacaagcattaccatcatcactaccaccaccatcattgttaccacaaccacaaccatcaccaccatcaccatcatcattgttaccacagccacagccatcatcaccactaccatcaccaccatcatcaccatcaccaccatcaccatcatcatcaccaccaccaccaccatcaacatcatcatcaccatcataaccatcaccaccagcatcaccatcaccaccagcatcagcatcaccatcactactataatcaccatcaccattatcactaccaccaccatcattgttaccacaaccacaactattgtcatcaccaccaccaccaccctcaccactatcatcactgtcaccatcaccgctatcattaccatcaccatcaacaccatcacatcaccaacaacatcaccagccctaccaccatcatcatcattactatcaccacgaccaccaccaccaccattatcaccaccatgatcacgccaccagcattatcaccaccgtgaccacgccgccaccgttaatcaccgccgtgaccacgccgccaccgttatcaccgccgtgaccacgccgccaccgttatcaccgccgtgaccacgccgccaccgttatcaccgccgtgaccacgccgccaccattatgctacatcctgatgatgcctccacctcccctcctttgcctttatgacttacccttggcccccacaaccctctctccgctcccttggtcctattctggttggaaatgctccagaatagtaatgcttgctcaattatttaactcctacctgttttcttccagagctggcctgtcctccccgcagcaattacgagctctgcggctcctcctgtcctagctcttgtgccgagcctgccctgcccgacagctgcctgacaccatgccaggatggctgccagtgtgacccaggctttgtgctcagtggcatggactgcgtgcccccaatccagtgcagctgctccatggggggcaggtaccaccacccggctggggaggccttctggactggggagcgctgtgagcaattctgccactgccaggcctccacccacgccgtgtgctgctccccgtcctcctgtgggccggggcagagatgtgagaccctcaggggcatctttgggtgccacccactctcccctggcatttatcaagcaaccatgcactcacacgtcgcctcctttgaccggaagagtgttgagtttccaggcacttgcgcttctgcttttaccaagtcctgtggctcctccagctcattgcgccttttcaaggtggaaattgggaaggagaaacaagtccagcagtcccattgtgttcatttcaaagatgtaggttcatgggacccaggtttgtctgcagagagagccccgacctgatgaggtaagcactcattggcatctagagactcttgaaccgattgaagctaaaagaaatacattggctcaaactaagtaaaaatcatgtgatagcctagtgaaagtgtagagattctgggtccacagaagttccctatataccactttggctgttttggttacagaaagcctcataaaaggtaactcaaaccagtcacagactgtgttttatgatttttagactaattacataactgaaaattccagagggagatcaggcatggtttgatcagggtgctaactcagtttttcagcatttctcttggtctgtgtttctctatagcattagctttgtcctcaggctggcttttcttgtgatggcaaaataactgccaattttccagtcattaaatgtgtattccccattgtccaaaacccgaatcttttcttaccccaagtactcaacaaaaattccaatgcttcactttgattaaaccccactgagccaatcagtgcagcccagaggttttcttaagcctatctaatcctactcaggagttgtaggtgggagagatcctgcccctaccccccatctctggcagctacttcttgcagggagagagggcaaaatgggaatccacccctgtgtccctatgtcccccgaaaccagtatttcttcttaacaatcttcaaagagtgtaaatgccctggtaaacctccactctgagacctgaaacttttgtctagaacccacaggggtggatgtgttttctaggcccgagggcccctgcctacaagagttccattgttggctattggaaaacacacagccacacccctcccactccacccccttccaggaagggaaccagctttcagaattagtcatgctgtcagcgtcccacacaacgagcccattgactccaaagggcagcacagcagatggactgctattatcccagtggtacagatggggaaactgaggcccgggaaggcagacttgcttgcctaatgtcgcataaggagaaagtggctgtgctaggattggaacccaggctgtcaggttctgagcccttccctttctgtctgtgggcctactgtgtgctcccaaaaagctgtggccaaattaaggaggtggcatgtctgattcatctgtggcggggcctgggatatatagtaactctcaacaatggtgttcattagtccgggcatggaggctcacgcctgtaattccagcactttgggaggccgaggcgagtggatcacctgaggtcaggagttcgagaccagcctggccaacatggagaaaccccatctctactaaaaatacaaaaaaattgcactttaggaggctgaggcgggcagatcacctgaggtagggagttcgagaccagcctggccaacatggagaaaccccgtctctactaaaaatacaaaattagccaggcgtggtagtgcatgcctgtaatcccagctactcgggaggccgaggca

SEQ ID NO: 1887504 - DNA, 4001 bp, Homo sapiens; identical to SEQ ID NO: 1560477

SEQ ID NO: 1887505 - DNA, 4001 bp, Homo sapiens; identical to SEQ ID NO: 1560490

SEQ ID NO: 1887506 - DNA, 4001 bp, Homo sapiens; identical to SEQ ID NO: 1560503

SEQ ID NO: 1887507 - DNA, 4001 bp, Homo sapiens
acaggaggatttatttagatgtacaccggctcagtggatttgtatctgaaaagctgaccattgaacaaagactgagtgtggtttttataggcaaacttacagaagcaaaacaaaagcagttaatgatacagtcacaggtcatgtaatctatagcataactgctgacttagcataacttgtggctttgcacagctgttggccttgcagctgtgtcaaaagaaaaacagagtctacaaatcttactaaatacaaccattggcaaacagtcatatttaatggttcagaaaaggagagacagtaaaggaatttttcttttcaactttgctccggaggaggctgtctggagcccattcctttggcctcgacttttcagtgttataactgtccttgaagtaagctggctaagcagaggaaaacttgttcttgttttctttttaacccttaccccctgccacataatcacatctttacacttcttttttttttttttttttttttttaagatgggaagtcggagtctcgctctgtcgcccaggctggagtgcagtggtgccatctcggctcattgtaacctctgcctcccaggttcaagtgattcaagccattcttgtgcctctgcctcctgagtagctgggattataggcgcacaccaccacacctggcgaatttttttttttttttttttttgaggctgagtctcactctatcgcccaggctggagtgcaatggagcaatctcggctcactgcaacctccgcctcctgggttcaagcgatcctcctgtctcagcttcctgattagctgggattacaggcgccctccaccacacccagttaatttttctatttttagtggagacggtgtttcaccatgttggccaggctggtctcaaactcctgacctcaagtgatccgcccacctcagcttcccaaagtgctgggattacaagcgtgagccaccacgcccagccaggaaacccattttcaacacctccttgctcttttttttttctgagacagagtctcgctctgtcgcccagactggagtgcagtggcgcaatctcggctcactgcaacctccgcctgccaggtcaaacaattctcctgcctcagcctcccaagtaggtgggactacaggcatgtgccaccacacccggctaattttcttttgtatttttagtagagacggggtttcaccatgctggccaggctggtctcgaactcctgacctcgtgatccgcccgcctcggcctcccaaagtgctgggattacaaacgtgagccaccgcgcctggccttccttgctcttcttgctccaaatcctgggaacgtctgaatcaacaggcggacatctgtcaaaccttcctagcaactacgcctgcggatggccaacctgaccctggaagacagtggggtttagttaagcacagattgtacatcgggggcctcataaggcgcctggaagcattcaagaacaccacgcttgtaaggacaaagcactcggtcacgggcgcctttacttcggagctccgcgctgctgctggacgagcgtccgttgagtcccagccccaatttttccaggaaatggcggtgagccctctagtgagatattttttggcctgggcctcagtttctccatctgtcaatgggggaaggggaaggcgggctagaggaccccgaccaggtcggctgcagccttcggaagctacggcccagggacgccacaccaaggcaggtctgcgggacgaaagaacccaagaacccgggcgcgcattggcgccggtcccgggctcaaggggcagcaacgaggagacgctggacctggccgttcctcgcacacatctctaaccttctgtgcctctcaagggagatggggtgagcatagccacctccactggagcccgaaaatccccggccgagataccgccactaaaaaggtacacatgcgtcaaagcctctcggagccatttccgctaacgtactcagggcgacgggcgtaagatggcggccgcgcaggcgcaaaatgtcgcagccgtagggaggctccgcctctgacgcttgccttgcatcacgtggtaatggccgctcaaaaaacgccttagcgaaaaccagagcgtgccctcgtcacgtgatggaggactcccagtacggcaaagggaaggcgccaaaagttgtcagatggcgaaggaaaccgcgaaattcgccattgtcacatgatggagcaacctatcgaaagcggagggaaaggtgccgaagtcacgtgactacgcacgcaaacactcccgcttgcaccacgtgcaactcacgcccaccccctcagccccccccttatctcttttcgcccctccctcccatttgggttgggcctgcgtcgaggcgcaacgcggcgtcaaagggggcggggcttcagccggtcacgtgttcccgcacctccccggcgcgcgcctgcccgcccgcccgctcgcccccggtccggactcctcctcctcctcttctcgccattgcagttggacccagcagcccggcgcgcaccgcgtggcttttgggggcagaccccggcgggctgtggcaggagggcggcggcggcggctgcggtcgaagaaggggacgccgacaaggtaagcgtcaatgtggcggcggccgggcccgctcccgcctctgcccctccccccgcccgccctcagtgagatccccactgagggttcgcggtgacaaggctggagggatcccacgctcgccgcctccgcccggttccctcatcccggcgcctggcccgttcctcccttgccggcctcgctcccgcgctcggccgttaactctcttccattgtgcggaggaaacaaaatggcggctgcggcggcggcgaggactcggtgcgcgcgcagccgctcccccccgcacgcggcccctcggccggcggcggcgccacgcgcgggggggtgcgcgcgcaccgggcccccggctgccgcctccccgcggctgggcttttgtctgttgcgggggtcctggggacgcgcgcacgtgcttggagcacacaccccctcgggtcccgagttccgcggcggggcgaccccccttcctcactccttccctaccccctcctcctctttgtcccggtcccgcccccgattccaggagagtcccaggttcccgaggcgggaaaagtcgcctcctttgtcctcacaggtcgcggagaggcggaccccctccttggaagccccttcccacgcggattgctgaggaagcctttgtgggttcgtcgggtttccaaatctctggtcagccaggcctctctcagatcagggtcaaaacttgagagggtttcagctttttctttagttagtttgttttcattgttgaatgtttttccagattgttagtatttgccttctctagaccggcaatctacttgggtgcaagcctgggccccgaaacgtggatgcttaaaacccatttctacctttattttctcaagtagttgaacgattgagattctcgaggttactcatgaggttctgccccagttaattcaccgcctggatgaattatttggggtgtacggcggtctgcatgctcctcccccagttcagtggccaaatttgaggagaatgagggatctcttctccacatttccaacattgtttgccagttgctgcttaggtgacatggatcagcaacgaagcgtcggtttcagtggtttctttttctggactccggtaattcactgctgctgaatctttttcaagattttgctctctttaaaatgagtggtgtgatggcatatttgtggtccacatggaatcgcgaggtgccatccgaagttaggattcaaatttaggactttaagctctcttttcctcaggtatttgtggatgggaatctccatggattgctcagagtgctgccactgtcccttgtgcgtgatgctttgtgtgtggtctcgtgggatgtagttacagtagccgcccagactgtgaatgaagtgtgggaaccagggcctcatt

SEQ ID NO: 1887508 - DNA, 4001 bp, Homo sapiens
ggctggacaggaaccagcttcctgcatgtcagatcccaggccctgtccagagccaggcctcagtcttccaggatggaacatggcctccccacctcggactccttgcccagaagctagacctcagtttcccggccttggtttcctagcagcgccccaggccagaggctgcaccagtcttccaaggcagcacagcgctttggtcattggctctgagatttccagacaggctgagaagcaacaccaccgccgccgccatccactctcatctctctgaccccaggaagtgggccagcatcgttccctctcggcagccaactgagatccctgggtgattcagcctctgtccctgacatgataattacaccaacagcaattcccagaaccccagctattgtcctatatcaccccacccctcctcttgtctcctgtgctgtaacacgagggcagacactctgcttctccccagagacatttgtcctttgctccaagcacacaaaaaactgggaagcccttcccactgtctgaccttcaaaggccctgctgctgctaagctgcttctccctactccaagaaaagaagagctccttaaggaaggggaacagcccacccgggacaaaacagacaaaggccacaccccaggaaggtctttcccacacaaacttgggaggggaggcatctctgcagacaacaggacagacacagcacgaggcagccgaggctgtcgtttattgcagatggacacggattcagggaggtgaagaggcagatgggctgtgggctctgtgctcagcatcccacagcaggaggggcaggagacagagctcaggatgggatcttcctgatggtggaggacccggcctgaccacagagtagctgcaagaggcaaggccccgagctgacaccccctgggcccccattccgcgggatgacggctccagagacgctgagcgatgtcattaggaagaaggccggaccaatccagagacggtgcatcctcggcgtggagcacagagctctcgagggctggcgatccgggttggggtggaagggagagttacccgggtcttcgcccctccgcggcctctggcgtctctctgggtgtctggcggctcggacggcggtcagggtcgctgtagcggcggcggcggctcagcggcagctggagctggggtcgcggcccgccggggactcccaggaggcaggagagggaggcagcggcgggcgccgggacaggcggcacgcccgggcgggcagcacacggaggggacggcgcgctgggctgtgggccggcgggtgccgcgggagaccgcgtgggtacccagatgagaccgtagtacacggcgagcagcacggcagctagcgagacgcagaggaagtaggcgcataccggagccaagcgcagccagcgcccccgcgggccctcgctcagccccgcgcctccggggctctcggcgccgccgcccacgcagctggtcccccgcatccccgcagcccactcggctccgcgccgcagaccgcacaggccccgcccccaccaggccccgcccccaccccgcagaccgccccgctctctaaaccgcccgcctccggccccgcccccgccagcatggtcacgcccccacgcgagctgccgcctccgcatcctaggcccaccccctccagcctccgccccaccaccgacaggcggaggtgctaccccgcccccctcgctccagccccgcccccgcgcttagccccaccaccccaatcaccgcctcctcccgccacaacacggttctcttcccagactcggacttcatccagcccaggcatctagcccgcctcggagcccgccccctcgtcccgctcaagccctgcctggagccctaacccgccctgtgccgcagccagtctcacttctctacctgtcggactgctctactccagtgctcgagccctgcccgctacggcctctggctcccacactctagttccggaatccccgctctcctcccgcgcgggttcccgcgcgacaccccgaccacgcccccgctgacggccccgccccatgcccatggccagagccccacccgcgcgcgctgaccccgccccccgctctaactccgcctgtcaggattccggccccgcccaggcagcctagctccgcccccgcgggacccgcctcctccagcacactctcagcccgctttcaggtatcctcagcacctcaggccccgaggttccagctccgcccctcaccgcaatcgcgccccttctcccagctcctccccaacggtcagcttttccctctccctagagccaaggggtccagactaggctctggggtagaaagaacacagcctggaaatccagataaacccctcctcacgccccctccccatcaaggcggggaagcttcagtcccctcccagcagcgtcttcaggaattcggggaggcctgcgggaggggggagggaagacggatcagaagggtggaggaagaccccttccttccgcctcttccgccacagaaaagcccgccaagcacagcgacccagcctgccccctccagaaacacagttcaagggtgagcggaagcactgcgtttaatacgacagggctggcgcccgagtaattcaagcccttcggaagtgtcaccggctgccaggcctcggatgcaatcctggaggcgggagattcggcctgaagactggctcgagccgcccagggcctccatgggagactaacgcggaagcgtcccagccgtcccagtgccgtgacgtcccccgttggtggggcctgcacccgactactgccctggccccgcccggctcgcagaccctggctcctccccccttagatttaaccctctcctggctggagtgtggcagaagcagaggacagaggagcgaggcggtgggaggttagtgcagagcgcggaggccgcggtccggcgggcgcggtcagcgagcggcccccggcagcggaggggccgccaccaccttgcagaaacgcaccctctggaagtcggtgatctccgccgtctcctggccttcggggcctgcctctgaggagagaaggggctgagtcagcggaggggagcagtcttcccacctcccccccggcccagcacccctcccccgtctagccacgtctctcatccagttcgagcccttgccacagcaggctcggcgctaagcggtttacggggcccagactaatcctctcagcggacccacgcagcagcaaacactcccaacataaccgtttacaatcgaggaaacgcgggtgtggcgagatctggctcccgaccaacaagtggcccaagacagagggtctgggcccccgcgccacccaaggctgcaaactgtcctctcccacccccgccccatctcacggccttcatcaacctccaccaagccagtcctagaggacccgccctcccctttccttcgccaacgcctgctattctaaccagtccttccttggctctgcccccaaaatcctaatcccactctgggggaaggggaggccatctgagattcgaaatcttactcctacggagtgtaggtggagaggggcttggcctcttgctcgcacttcgtcggtcccaaaatgctgatcgggtacgcatgtctattctaatttgccccactaggttgcacctcggaactctaatcccagccacagttaaatccagttttctgcccttgcccatctctttggccttttcgagccagttcaaatttcgtagtctgcctatagctcctgccctagtacaccaacgccaaccaccttttttgagacggagtcttgctctgtcgcccaggtgggagtacagtggagcgatctcggctcactgcagcctccgcctcccaggttcaagcgatcctcccgcctcccaattagctgggattacaggcatgagccaaggcatccgatccacaccccattactcttaaaccagtgctttccaaaacccctgagctcgactccaaaattctaatcctttccttaacccc

SEQ ID NO: 1887509 - DNA, 4001 bp, Homo sapiens
gtgggtatcttggattatcccagaccattctgaaactcatgaccaaaaaaagactggagggctgctgtaaagggctctgtaatttctccaaagcaaagcttcaacccaaagatttactaaggtgtgtgtgcctagaaaagataaaaggaagagaggcacagatttttttttttcccagtggaatttcagaggattattttctacttttttctcacgtaaaatgtttacagacttgggaggctgaggcgggtggatcacctgaggtcaggagttcgagacctgcctggcaaacaagacaaaagcctgtctctactaaaaatacaaaaattagccagtcatggtggcagaagcctgtaatcccacctacttgggaggctgaggcaggagaatcccttgaacctgggaggtggaggttgtagtgagctgagatcacgccattgcactccagcctgggcaacgagagtgaaactgcctcaaaaaaaaaaaaaaatgtttacagacagaaaacaaatctttaaaaacctgccattcactgctgtgtaaaaacatgattaacaattaaaacactgtgtttgaaatgtacaataaaggacaaatagttgatagtgttgtaaattggagagaggaagctgtcctcatttcctacatttgagaatgtaggaatgaaagcggacatttataattttactgcaagcctgagttaagctaggagaaaaggtggatttgaagtcctgcttgccatacattaggaagtcacagaggtaaaccagtcctgtggagtgttgagataactaaaaagcaggaaattagactgaagtggctctagtgccctgtgttcataagtaaaaaatgaaaaacctaactcaaattcacttcttataaattactattttaggcagaaacaaaattcaggcttaaccaatcataaacctgcaattaacctctgattacataaccaggaaatttccacctgaatcatacaaataaggtgactacataactgtaaccaattctccaatttggtttgccttctcacacgccctttataaaaccctttcctttatgtctctcaggtgggccacatattatggctgggtgttttccatttcaccaatcactgctcaaataaactcgttaacgttttaacattgactccctttaatatttaatagaagcggctgggcgcggtggctcatgcttgtaatcttagcactttgggaggccatggcgggcgtatcacttgaggccaggagttccagaccaccttccaccatggtgaaaccacttctctactagaaatacaaaaatttgccaggcgtagtggcgcaggtctgtaatcccagcttctcgggggccgggggggggggcgctgaggcacgggaatcgcttgagcctgagaggcagaggttgcagtgatcacgccactgcactccagcctgggcaacaaagcaagactccgtctcaaacaaacaaacatgtttaacaagagactgggagtctcacctgccacagctccttctacgcacacacgagtcggaattctgccctaatgacccgcctggcatccctgaacaatccgggaaatactcggcgctgcgtgcagagctgcccagggagctccagacacggcgccgcagggtccgggcgggacgccggggtcccggctgcgggcccagccgccatcttacggcgagaggggtctggggcggagctccgccagcggagactcaggttggcgacccgggagcggactgtggggaggccggtcccgccggtttcacagctcgctctcccctctcgggatgcccagccccgcacactcaccttttcccagcttccaggatgtcctggcatcttagctgtgcgtctcccagaacctgcagatcacagggcaagaggctgtgacagtcaccgggggctcccgaggtggaggacgtaaaacagcagagaccgatcccaagctgtggcgggagtgagatacaaaggccccaccaaatgccggaagccacgccctcctctccaactgggcggttcctgcgctagcgccactgattggataaagcaccagcactctctctccataccaaccccctcctctcagcattagtgcattttactgacaggaaaacaggctaaagtaggtagggtaaggtgcacagggaattacagctaataaagaagtgagctgagacttgaaatgcacttgctctttcccttacctgggtttgcttgtataatgcatcttatttactacttaagggtaagaaaaaaacatttggacttttttttttttttgtacctagtttcgctcttattgcccaggctggagtgcaatggtgcaatcttggctcactgcaacctccgcctcccgggttcaagcgattctcctgcctcagccttccgagtaactgggattacaggcgcatgccaccacgcccggctactttttgcatttttagtagagacagggttttgccgtgttggccaggctgatctcgaactcctgacctcaggtgatttgcccccctcagcctcccaaagtgctgagattacaggcgtgagccaccgttcccggcccatttggactttttttttgagacggagtatcgctctgtctcccaggctggagtgcagtggcacgatctcggctcactgcaagctccgcctcccgggttcaggccattcccctgcctcagccttccaagtacctgggactacaggcgcccgccaccacgcttggctaattttttttttttttttttttttttttttttttttttttttttttttttttttgtatttttagtagagacagggtttcactgtgttagccaggatgatctcgatctcttgacctcgtgatccgcccgcctcggcctctcaaagtgctgggattacaggcgtgagccaccgcgcccagccccatttggacattttaaaacaactttttaatcattttgataatgcagaaaaaacccagcactttgggaggctgaggcgggcggatcacgaggtcaggagatccagaccattctggccaacatggtgaaaccccatctctattaaaaacacaaaaattagctgggtgtggtggtgtgcgcctgtaatcccagctactggggaggctgaggcaggagaatcacttgaaccagggagtcagaggttgcagtgagctgagatcgtgccattgcactccagcctggctatagggcgagactgcgtctcaaaaaaaagaaaagaaaagaaaagaaaacaaaacaaaaatcctgagatggtgctgctggatatgagtgctggaaagggggagggaattaagagctgaccagatccctcctgactgccccgcagaacaagtggggggtggtgctgcactaaatgatgccctcccacagaagatgtatttgcattggttcaatgaatatacaatgcagagacctaaatgaagacacgtgaatgggtgtatgtggacatcagattgcagctgggaaacaggtgcctctcattctccccagcaagtgtggaaggtgtccatgcccatgagggtatagatctgtcattcttaacttgtatacaactctaggtcagttctgactcaatgacgtgcagatgagatttctcagatcatttgtatgtttgacattgtggctgctgcttttgctgccaccatccccaggcccaacctggcttaaagtccaggctttaggtcaaaacaatggagggcttcctgtgttctgggatgggaagttggagatctgtggtagggctgggggttggggtacactttagttttgtgcagaatgagagctgcagtggttttattaatcgtgatgattggcctggcctggttgtaactctgggcggggggaaggaatcagcattggttgttccccagatattcatgtgtccagccctggccttcctgccctcagacccagcaaaaagtaccaccacagactctgacttgcctgcctactccctgcaccccagatgggaataccttg

SEQ ID NO: 1887510 - DNA, 4001 bp, Homo sapiens; identical to SEQ ID NO: 1560511

SEQ ID NO: 1887511 - DNA, 4001 bp, Homo sapiens
tctgcggagacccattgaggaaggcacagccctccaggatgctggccacggcgaagagcgtggagggcgacacctccagaccgagctgtgggcaaggcgggcagtcagcacagagctgtgtctgtgactggccctgcctgacccgctccacccgggcgttcgcccacctcaatggtgcgcagcaggttctcggctgtgtcgttgaggcctggaatcacctcacagaagcgctccgtgttcgccgtccacagcactatgactttgtccagccccgcgctagaccggaagtctcggatgtccctgcggatctgctccagctgtgggttggatggtgagggtgtggggaggatggagagggtgtagggaagttggttgtacatactctcggactcacagaggcctgggctactcagttccccgggtgtcaagtgaggcctggattcgcggggtggggcaaaaagagggaaccaagtggcgaagaacaggtggcaggaagcaagggatgcgggatgggacagcacctgctgcgcacgcgagcctgggatgaggttgtccgcgcgcgcgctctggttggccgcgatgaattcggggatgtaaacagaaggccggggccgcagggcctccatgtgcggccacagttgctcctgcagcccccagtccagcaccttcgcgcgccgcatcgcctcggccaggttcagcgacgagatgtcccagcctggggggaccctcacactcggccctgcccggatcctgggcccctccagaccccatctcccatcccgccccaccccggcccagggctccgcccaccatcgaacacgaggtcgttgggcgccaccatgggcagcaccgcgctgaagggtacgaacacctcctggccctcggcgtccaggcccaggctcacggtgcccgcctgagtcagcgagccgtagtagttggcctcctgggggtcagcagacacggcgaggtgacgggtgggagtggtgaaagggccgcgacccggcctgggccccacctagactctcaagccccgccccactttcgggcatttttcagttccaggctcacagccaggacggaagccgctgcccccaggcccctcccctgagacctccggcaccttaagctccgcccctgtaagactcccgaggagtccccgctacctcgcgaaacccttccacggggtccgcctgcagccaggccccgccccctgcaagccctcccgccccacagagcttcgccccctgcaggtccctcgcccactacaggcctccagacccgggcaggtccctcgcccctgcagcccctcgccccgcggaaccccaccccctacagcccccctggtcccgcagagccccgccccctgcaggctcccgcccccgcccgcaaggactcccaccaagcctccctacccaccacgcccctcccgcccccaccttgcggccgctgcgcgtgggccaggacaaacgcagtcgattggccagcaccgcggcggtgagtgtggagccgttgttcccgccccagccgacaagcatgaccccgagccggggcacctgccgggcggtccggaaggtgaagcgcgtggacgtggggtgcacctgaagacaggccgcgcagtgaatcccgggtcccgtgcccttctccccgagccgccccgctctccccagcacgcctccttcctcagccccctggtccaccttgagaacgccaccctcgcggctgacgcgcgtcgtccggtactcgtattgcgcctcgatggcctcggggccgtagaccacgtccgggctctcgacgaagaactgggcggcggcctccatcgcggcgggctgggggcccggggtgagcagggggtcagcggggactctaagcggccggggccaagccagcctgggtccccacggaggccgtccctgccccgaaccgcactcaccggcgcagagtcgactcaggcagcggcggcggacagcgcgggctctcgggcgcgcgacctccggagaaaagcgctgcggcccctcccccgccccgcccccttccccgcctctcccgcgctgggagggaggggcccaacgtctggagacccggttcgaggcccgacaacccagagccaccgtggccatcgggtccccgcctggcggaagtggccaggcgtccacgagcgcggcgcgtataggttcacctcgctcgctccgcagcccccaggggctcatggctgcctatcccccctttacaagaggacaatgaggctacacatgagcccagccacaagccagggggtggagctgggcagggaagctgggcctccgggggggtaggtagggggtctgggtcagagacactgcaggggaaacaggcagaggaccagaactccaaagccagaatctcctcggagccacactgccacctactcccccttcgtgggcagcagcacctaccaggcagtcccatcccctggctccccatgtccgcccccatccatctcgggggacaaagtcactctgtccccacggggctcacaaggatggggcctgtttggcctgtttccccacctgcagcaggagggcttggcaggagtgggccggagcgggaggctgttcgctggaaaggggaggggacgcacaggcgggcagggccgaggcaggggaggaatgaggcctgcactgcagggcgcccccctcatgcgcgctgataagggagcgtgggaacccagcgggcaggccggggcagctcccccaggaactttccaaaacaagcgcctggaggccggaaagtttccaccactggagctggcccaaaaggtggatagttgggaacgtttgcaagagacagggcctgaccttggaggatgagggcttaagactctgggtccaggcctcaccctgaaggggccccagtctgagggagttggaagtggactgggacacccccgccccagtgggtgggaactcacaggcagggcccctgcaagacaggctccccagatgagggggctgctggcaagggttttgagacatgaagaggagttcactgaaagaaaactacaggccaagccacctgagccacccagacagggcagatgaaaaattggctacgtgggaggcagtttggggtcttgggcagaccctgagggctggggatagggagtgtgaaagagtatttggtgtttgttcctggttcttggttagacattgagctcaatcaccagtggccaacgatttaatcaatcacatatatgcaaatgagacagttggggctcagaacacagaaactcccctcagcctcaagttatggggccttggcctgccccgcgctttgagcagggcatcggaaagctcagaatcgagtctctccgaccttctcctgccctcctgcctctagcccctttctcccctggaaaccatagaaaccagaattcctcttccccaaggcaggtcagagacactggagcccttctccccttaaaacaaaaaaaaagccacaaagccggcaaaggtcactctctgcctgctcccttgaagaccctcattccgggagggtcctgcccataccctggaggaaggaatgctacccagagtctaggaagtctgggcaggctggcccccctcccccacccagtctgctccctttaagatctacagtgtttcaacacattgatacacattcttcatagaacctaagccgaaaaataggcagtcagccaggcacggtggctcatgcctgtaatcctagcactttgggaggtcaaagcgggcgcatcgcttgagcccaggagtttgagaccagcctgggcaacacggggaaaccccgtctcaatacaaacaaacaaacaaaaaatagccgggcttggtggcgcacacctgtagtccagctgcgtgggaggctgaggtgggaggatcacctaagctcaggaggtgtaggctgcagtgagccatgattgtaccactgcactccagcctgggcaacagagtaataccctgtctcaaaaaaaaaatggggtttagggg

SEQ ID NO: 1887512 - DNA, 4001 bp, Homo sapiens; identical to SEQ ID NO: 1560515

SEQ ID NO: 1887513 - DNA, 4001 bp, Homo sapiens
tctggtgtatttccccctccttcttccccttctccccatctctggtgtatttccccctccttcttccccttctccccatctctggtgtatttccccctccttcttccccttctccccatctctggtgtatttccccctcttccgtctctttccctcctctgtctctgctctttctcttgctggctctctgttcttctctctctccctctaagtttctgcctcttcactttctctatgtcccctccctgagtctctattcctcctatgtttcaccttcttctgggtctctctctttctaggtctctgtctccacttcctggggaccctgtccccctctctctgggtctccgttcctttttctcagaccccccatcaccctctctaacccccgtcctagctgggactgcgtcactgcagagagagttgcagaagtggggcctgtcctgcagcccaggaaggtcgttgccctcactccccagacccagggctctccattgcacccaatccatcatgtccttcagcttctgatggaatccaagagggcacagaaaagacataggtacttcctaccccttccccgaattctggtgcacccccaggcagaagcagagaatcctgaggtgagggactgggctggggctggatgaggctcctgggcaattgggggtggggtggtggaggcaggagcaagggctgggtaggcactatgggctaggtaaggacctcggtcgccatcctcctccacactcccccctcaaccctgcttttcccttctgcttttcacagcagccaggcacggtatcaagtggctaaatcagcgtttttttgcagaggtcagaagtgtgggagaaggtgggggctgtggggaaaaggggctggaataaggaggaatgtgcgatgcgactcaggattagaggccatgggaggggaagaggcagcgggccgggagtagcaggctggtccgtccacattccatcaggccctgggaaacttggatgccagcactccctcatggccctccacagaccccaccagggtctatgggaggatttgtgagcctggagtctccacccacccattagagaggagggggcttctggaagcttcatgagggctccaaatactggacactcagctatgttcacagaccaggaggaagtagactcgactcttgactagggacaccaggaggggagaggccaacgtctgtctcgttttcagttcctttccccacccctgctcctcccaatccatccgttcccaggccctcaagacacaaaattcctgaaagctccaactcccatctacgtcatcttcggcgtcccctgataaccctccctcccccattaccccaggccctggaattggggaagggtcttccctccctgacttctacgaccccttccttgttcctctgcccccattcccacccggttccattcggagccttggtctctggacaccaaaggtgaaaatgtgaggactctctgcctacgatccttcgtcccctaaaaccctccaagtaccttggccccgaaagctcagagtcgaggggaatctccccgctataatctttgggtccctggatcccaagtcccccgtctccaaaactaggattcgggctgtcttaccgcccccggaccctgagccttcgccccctcccccgtactcaccccaagtcgaggcgaggtggggatgggggaatccggggctcgagatggggggaggggtgacccagccccggcagctctgggcagcaagaggctgcagaggggggagtgacatcaccgccggaggaggggcagcaccgctcccccaacccaggggcttcaagctccgcctttatggcggaccccggggtcctggaatgccaaggcagagaggagaaacaggagacgaggtccgagggaacggtatccccgccccttagaacaggaactggtaaacccttaccaattacagccacccccgactgccacctgtggctgccgtcgcgacctgtcgcctcccacgcatgttgtggctgcgcccgcccccgtcagggcgtgaccacggcgtggactacaacgaccgtgatgctccacggagccaggagcctttgacgaaaggcagcgtaggcgagggccttcatgggactcgtagtacaaggcccatcacaagggtgcgccgtggagaaaaggggtgatacccttcgcctccctctcttcctcaactccgtgggtccatgcacaaagctttctcttcaaaaagtacgctctgaaaagaagcaacctaggcaggttcgttcaatggaaatattggatttttactgagtagcgctagctctgctacccggtgcgcatgcgcatcacctgggcggcacccgcggtactgcgcctgcgcggtctcgcgccttcccaggtccgctccgcgagggcgagcgcgcgccagtcccactcgtgcgccgctcttcatgtccccgcggtcgaagacggtcacatacgcccccaagaaaacgtcgccgaggatccacacaggtactggaggcgaagcgatgtccaaggcccggaagccggacaagcagaggcggacgtcaccctgagcaaactgcaaggcgacaaggcggcaactgggtgtccaggccgcaggaaccaccatttccctgggagtccgtgctctctccgcccccaaccccggggacaagaaatgtttctgtggccccttccggccctagtgatgtccaactaccagctccaccctctcaactccagtcatattacatcactgtggcgtcattatgacggacacctacctggatgacgtaatcctgggccgtgagattaaaccagacccccccaatgaggagtgagactgcggggagctttgggatttctgagcaccggatgatgtactggtggaggagaggaacaagtgaagatgggagattcctgctctgctcaaatcccgtccgtggctccccagtgccatggagtaatgttcatattgagcacctgggtattcagcaccgtgtgtggacagccctgttgcctaggctcctctcatctagtcccaaacaaaactgcattatcatctcccccaacaaccccccccccactcccacccctacttcaccatccactgagccacttagcatagacacttgggaagtatctttgcttcctcccaccactctctggcatgtcacttaagaagcccagtcccctctgtcctggatacgctctagctacctgcttcccatcctcaggccgcagtgttcgccatggaattgccatcatcttccccaggacacacccaccagagactgggacctcacctccccagccagcaaggggattcccccaatggctgcatgcagggcccggatctcctcagtgggtcctacgatgacaggtgtgcctgtatccaggatggcagcacagccctgggcacagagagtcagccgtgagcccaccttcacactgagggggaaggaagcagtcattagaggcagggtcctaggagtccaggcctccagctccagacccaggagaccaagtccctcaccgctccatgtggatctgccagtaggcggggactgtgactggcacgaaggtgaggggtgggatgtagtgtgccgggtctgagccccccaggaccagctctcctccatcagccacttcagggtccctgcaggggcagagtgtagaggtcattgtcgccagccctcccccgccagccctaggaatggccagggatgggacttcctgccaattgggtcatttttggggttctagttggggcagtggaatgcaggcagggccgagatgttgggactggaaacaagaaatgaagggaaatggtgcttttcttgatggaagttaggactttaggatgatggatacttcctgaagtggagaggagacttcttcatttggctgtggaaggtagagcttttgggggaaattcctgagctgaatatcatagtaaccaagcagaccagtggagtctcagaattggctcga

SEQ ID NO: 1887514 - DNA, 4001 bp, Homo sapiens
ctatctttctcttccagaaaactctactctctctctctctttatgtgtatatttacatacatatataaaatatgaataactccacactctcccttccctgctttataggatgggcaggggcgactccacaggatgagtttctaactctccgtgagacactctgcacatccatgagagagaagggatgagtgtcacgagactgggaaggaggaggagaggaatgggtgcatttcccaatccatgtcccactgagccactggactcatctcccgagggaactgtcacttccccaagcctctggctccttcgaggcagagtaacgacttccccgagggaaacactggtgctggggtcaggcaacatggctcctccctggatccagctggggtcaggcaacatggctcctccctggatccaccctgctgcaattggtaccagcaccctgcgtctgctactccccaggcagattctcctgctgctcggcttcctccctcctcctccacctgggtacctgattcctcacaggaaatgccctctctttaaattcccaggatggcttctgtgtccacggttagtgcatgactaggaatcccacaacaactctctggcttcattgggtgtggactctgggcaggtccatctggacaccggttggacgtggggtgggctggacttctcctacctgtgacgatgatcttcagggagttgctctcagctgaccactttgaggcgtgcttgtaaattccaacacatctgtaggtccctgcgtgttctggggtcacagggctgatggtgatgttgttggaaaggccagtgtgcaactcatggcttcgggtcccagttgtttggaatattgtccatatgacaaatcgaagatgggaatgacaggagagagtcacacgtcctcctaggggaaccacagggctcggccaggctgacagggagaacttgtcctgagcacctggaagagaaggaggcacagcctagagagggaaatgtggagccccccgtctcccgctgtccttgggggcatttccttctttacattgttctggtttgccctgtaacgtggggtcccctgatgccctgggatacctggtcgcaagccagggacacagccaccccagagtggacatggaaggtctccccagaacagaattctactaagcatgatgatacaatattgagccaagttgctcctagttcttgtctacaacagaaatctgtacatggaggagaaggaggaatctaccagattcaagcaatacaaaaaacatatcaactcatttaacaattcccaacacaagtgcccagcacgggtccctgcctcctgacagagagtactcctaccctacccacccccagacacgctggattctgagcatcacaggctccttcaggagattggatgagcctgaggggctgcctatggagggtttctagaacaaaatggagcctggggtctccagaggactcccttcctgtgttcccagtgctcactgcaaagcccaccccatgtcatctgcatcagcctgacttcgtgtccaccctccctgcctggagaatcatttgtgtttggccaacacagcatcctaggactgggataggactcacccgcatgtgggcagatcttctggttcaggcagaatcctaggcaaaaaaaaaaaaaagagaggagagaaaaatagcttgtcttcatgtgaatccttccctccttgtaactgggtttgtcagctcagcctggattcagagggtggatgaacctggcttcccaccaccagacctgggttgtggagaggccaggtcttcaagagagcattttccatcccaaccgtgtcctcctttcccttccaggacttacccagacacaggacggtgatgagtttgggggccatggtgccacttctattgggcaggacacaggggttgagctaaattggaaaatgaacaggatgtggtaaccatggttccagtttcagtttgcagagtttagagggtgccccacacaggaagatgaccagctctcaccctaaacatagtgggtgacacaggaaacttgcagacggtattcttggttcaacagagcccctaacaaaggcttgacttgaaccctagcaccgaccaatccataatgtctatatttcaaatttaatttttctatgtgcaaaagtgtagaattgtatcttaatatcttattgccttttttgagaactatgcatgatttgatttctgtgatgcaaggttctccgccaaattaaaatagatgcactgtcagtgttgtaaaacggttgtacagtaaaactgaaatgtttatcctgtcattttcaaagttgcaaattaattacttgcaaattaagaacaattttcaagttcttcaatttttctcctatgcttcaagaagttaacaccaagaaaaactgattttgcattattaacacagaagcgagcgtgaaaatcctggttcttgatgttttctctgaaatcctttcttgactcacagttcaagacacagatctctatctttctcttccagaaaactctactctctctatgtgtatatttacatacatatataaactctgaataacacaaacatatgtgcatataacgctgaaggttctccccaaaagccaattcattttattaaaaaattagtaagattatagcaagaaaaaaagccctgtgaaatccacactgaaaaaaaacagcatattcataaaaatagtatcaactcatgctttgtctctcatctgtcccagaacttctcaatgtatgaaaaccacacacatacaattttggatcttttctgtgttatttttgtaaatatgtgtctctgatatcatagctatcatctggtaatatttgtgtgtgtgtatgtacgtatatttttacgttttaaatataacacaaaaggatagtttgttttgtgtttttgattgtaaaatgataccgctatgctcctaatgctctgcatagctcttgtttatttaacaacagacagactgcagtaaatcgcttgcatattcctcaatgtatttgtccttttgggcagatatgatgtatgttttcaccggacattttgttttttggagcaatgtttgccggagcattcttgcctgagtgtcctgggttttatgagtgagtttccctgagtacacaccccagggtgggactgcaggacatggggaatgtcaagataaaaataaactgacaaaaacacatgttttacagaatgatgaccccaaaactgccagcaaccgttgtcagattctgttgttttttccacttctcagaaaatacctgattacagatgacagaggatgaacttgatgttaacatttacttaaatatattctacaatagaaaaatatgttgaataaatgctgtgatacaaatatctgtacctgtaagcaaatgtatcacctatgagaaataatttttacaaatcaatggtgccatttattaaacattgtgctatgtttcataaaatgtgttataattgattgacttggaagtgagatttgcaaagttcaagacctcagtagtggacagtcaccctgcaagcaaacacacgggacaaatacccacttaaaaatatgacgcatgcattggttaaaaatgaggagaacttgttaattgacgttgctaaatgtacttcatggtgtttacgggtttcttgccaggaagacagcttagcagtgtttacacattgggatgaggccaacagctttatgaagtaaactgttttaatccagtgcaatttttatttagtacaaattaaagttctaagaagtaagcgtacactggactgtgagaacaagacacagcataagtaatagcagaggggccgtggcctttgaagaaggaaaatttgaacactgataacttcaaaagtttggcttttgaaggtgagggttaagtccataaaaatttcaaagcgttccatgaaattcgaaatttttaattttatattgaagaatgtgattctgtgctttttaaag

SEQ ID NO: 1887515 - DNA, 4001 bp, Homo sapiens; identical to SEQ ID NO: 1560578

SEQ ID NO: 1887516 - DNA, 4001 bp, Homo sapiens; identical to SEQ ID NO: 1560579

SEQ ID NO: 1887517 - DNA, 4001 bp, Homo sapiens; identical to SEQ ID NO: 1560581

SEQ ID NO: 1887518 - DNA, 4001 bp, Homo sapiens; identical to SEQ ID NO: 1560587

SEQ ID NO: 1887519 - DNA, 4001 bp, Homo sapiens
tctcaggttatcctttccttccgaagcttccacagttggctcaaacccagggttctgagataacctagtctccctgactccatggaggctctgcttctcattcagacctagcaaaatcatctaaagctcactccaccaatattgagctcctagccagaccttacaccaaggtaagccctggcccatgctcaagccccacccctcctaaagtcttatccctgctcaagccctgcccctagcccaagccctttcctctgtgcaagcttctgaccaaggcgctgccctctgctcaagccccaccccttatcaggctccacccatcccaaagccgtaatcctgctcaaccccacccctgctcaactccacctgtgccccaggccctttgcacaaaaattagctgggcatgatggtgcacacctgtaatcacagctactctggtggctgaggcaggagaatcgcttgaacccaggatgtgaaagttgcagtgaaccgagagcatcatctctgaccaaggctctgccctcttcttaagccccatcatgcataaggccccatccctgctagcctgccacccctggcctgggactctccttcactcaaactctcctccagccagcgcttgcctcttagctggcgctctgccccagacccacccagcactcacttctggaggcagtgtgcagccgacagcacccactgtggatgctctaagatgccccagcgtcttaaagttttccactgacggtgctggctgcctgccagggctgcaagtgcagactgtattcctgttgccaccaatgaggactttgctggcactggagaaagtgcttgggaatggagtctgggatccttcagggggaatcacagctcctggggatggaatcaggacacaaagtggaggggttcagagtcgagggtcagggttaggattaggaaggtgtgggttgtattgaggggtgtgatggttaatatcaagcatcaacttgattggattgaaggatggaaagtactgttccctgggggtgtctgtgagggtgttgccaaaggagattaagattttacttagtggactgggaaaggcagacccaccctcaatctgggtgggcaccatctaatcagctgccagcgtggccagaataaaagcaggcagaagaacgtggaaagactagactggtttagcctcccaacttacacgttttcccctgctggatgcttcctgacctcgacattggaatccaagttcttcagctttgggacttggactggcatctttgctcctcagcttgccgacagcctattgtgagacctcaccttgtgatcatgtgagtcgcttatccttaataaactcccctttttatatacatcaatcctatgagttctgcccctctagagaatcctgactaatacaggggggaaaacatgggcagggtatccaggtctgctttttgggctggggcatgatgaggctaaaggacatgtcagttcttttttttttttttttttttttttggagacagagtcttgctctgtcacccaggctggagtgcagtggcgtgatctcggctcactgcaagctccgcctcccgggttcacgccattctcctgcctcagcctcctgagtagctgggactacaggcgcctgccaccatgcctgatgcctggctaagtttttgtatttttaatagagatgggatttcaccatgttagccaggatggtctccatctcctgaccttatgatccacccgccttggcctcccaaagtgctgggattacaggcttgagccaccgtgcccagccaggacatgtccgttctaaactccaggcccctggtctgtccctccgatacctcctcttacaccatcctcagacacacagtttcttttcttttcttttcttttcttttcttttctttgagatggagtctcactctgtcgcccaggctggagtgtggtggcgcagtcctggctcactgcaacctctacctcctgggttcaagcgattctcctgcttcagcctcctgagtagctgggactacaggtgcctgccatcgcacccagctaattttttgtatttttagtagagacagggcttcactgtgttagccaggattgtctcgctctcctgacctcatgatccacccacctcagcctccctaagtgctgggattacagggtctcccagctaataaatggcagggcagggctttgaacccaggcagggcaactccacagcctatttccttaaccactgtcccataaggcctcccaaggccccagtgagcagggcatgactaaacatgcagctacatgtcagaaccctggagtcaggctcagggacacaggaccaggtgacaggcacaggacacaacctcccatgtgacatcacgcttggctacacacactcttgcaaagctgcagggtgactcatacaatgtggtcacaccatgatacacacagcacatgacactgaaccagataggtacaaccacaaagatccagtcacatggtaaattacagtgatatcataatccagaaacagcctcggatgaatggaaatgcctattcaccccaatacacaaaaatcacacaagtacagccacacaagcacccccatacacacgtcatacgggcatgtaaacttagaagcaaccctgtctgcttgaagacggtgacactttgggacatacacatcacacacgcaaagccatggaccaaattgtgtccccccctctccagacttatatgtcaaagtgctaagccccaagatagtggcatttggggctgggacccttgggaggtgaggagggttagctgaggttgtgagggtggggccttcatgatgaaattaagtgccctaatatgaagaggaaaagagggagagagaattgaaacctgctaaacctcagacttggactttccggtctccagaatggtgagaaataaatttctgttgtggaagccacctgtctgtgttatgttgttatgggagccagagaagactaagacacacacacttacaccactctcccaccacacacacacaacacacacacctgtgacattgtggacgacatatcccaggagcctggtgcagggggtttctgctgtggtcatcaggttggcacctggtggggaggggattctgggattctttagccgtctcccttctccaccctcccacagaatctctgggcagcaacagccataagggatcctctccaccttaggcggtgagaccctgaaaccataacctagggcagaatttctcaacctggccgctactgacacttctgattgaatcattctttgttgtgggcactgccctgtgtgctgtaggatattacgcagcatccctgccctctgcccactagatgccagtagcaccctccttgccaagtcatagcaaccaaaaatgtcccactgtccagtggtctctgggagaagtcagtgttagcaacatctggaatgagagggagtgatggggagctggagagatggaaactcagagtgcaagaaaggcaaagaaagtcagtgacagaaacagagaaagttagatagggatagagacacagagacactgatacagagacaccaagatggaggctgggggagacagagtcagaaagctaggatggggaagatggaaacacaggcacaaagagttctcagggtcagtgagtctgaaaggtatggagacggaaatacaggtgttgacagcagacacagcctacagcctctgtgcccaggcattgttctaagcacttgacatgcagtaattcactttcataggaaccttacctggaagatttgattattagccccatttcacagagttaagtatcagagaggttaagtaacttgccgaaggtcacacagctatcagcagtttattccatttttactgctgaataggattccattgtatggatgcaccatggtttatctgtccactcgccagtttatggaacgtctgtcactgctttaacactgcaaacttccct

SEQ ID NO: 1887520 - DNA, 4001 bp, Homo sapiens; identical to SEQ ID NO: 1560590

SEQ ID NO: 1887521 - DNA, 4001 bp, Homo sapiens; identical to SEQ ID NO: 1560594

SEQ ID NO: 1887522 - DNA, 4001 bp, Homo sapiens
acgatgtgaagacaccaagagaacagtacttttcatggttagacacatttcttaggtattttttctactttgggattcttttgtgatataatttgtcctgtttacataatttttttccctgacatgtaagataaatgtatctaattgtgggcttacttgtaaagagttttcacatttaagttccagtcatttcattttatcgctgtatctgtgtacagaatgctaaagaataagacataaaaaataaaagtacagttataaacacctcttttaaaaggcagagactgttcgcttgggcaaaaaaaagcaagatccaactacatgctatctacaagaaacccaccctaaatacaacaggtaaaaggaagctaaatggaacgtgggtcctggcttgtaccctggcatgtaaagaaaacattggaggaaaaggtggtgaaatcccagtaaagtctgggttttagttacagtaatgcatcatgtcagtatctacaacaaaccacttttgttggtgcttgtgatgacagcatcagaagaaagtgggcataaaacatggtggactgcttatgatctttgcaacttttcttttttttttttttgagacaagaatttcactcttgttgcccaggctggagtgcaatggtgtaacctcggctcactgcaaccttggcctcctgggttcaagcgattctcctgcctcagcctcccgagtagccgggattacaggtgcacgcgccaccacgcccagctaatttctgtatttttagtagagacgggacttcaccatgttggccaggctgatcttgaactcctgaccccaggtgatccacccatctcggcctcccaaagtgttgggattacaggcgtgagccagcgcgcccggtctttgcaacgttttgaataaatccaaaattattccagaacaaaaagcttagtaccaaaaagaaaacaaaaacaaaaacaaaacaaacccccccccccccacagagtaaaataacggaaaaagatctactatgctagcactaacaaaataatacgtagttatgaaaatggtatgtatttttcaagctagacgttcataatggtagaacatgaggaggaaaactgcctcttaaatcccaccacttactgtgacacagtgaccggtccctgcagcggactggatagttgtatcagagtcctggacggaaacagatggcactcaaaaggtggcgcgcagttcagagaaatgcctatgtacggatttggtccaatgcctcagcctgacctcagggaccttcgggggtctgctccgcgcccacccttacacatctgtgaccccacacacttccaccccagcgccactgccaacagctacacccatccccctccaaccgcgtcagcttccagcctcggtccatctgaactcgccgtgccccctcccctgcgcccttccagattcatttgctagggaagcccgctcttccgggtggagctgttcctcatcccctttctttatcattctctccccagggcttccacatcaccgtgctgtggacaatcccggaactcctgtcacgccagtttacatttaggaacagtaatggctcccactgactcagtcaaaacaaggctgcggccgggcacggtggctcacgcccgtaatcccagcactttgggaagccgagacggagggatcacgaggtcaggagttcgagaacagcctggccgacatggtgaaaccccgtctttactaaaaacacaaaaattagccgggcatagtggcgcgcgcctgtaatcccagctactccggaggctgaggcagaattgtttgaacccaggaggcggaggttgcagtgagcagagatcacgccactgtactctatcgtgggcgacgacagagcaagagcaagactccgtctccgagaacaacaacaacagcaacaagaaaacaacaataaaaaaaataaggctgcgtgggaggcagaaagagctaatgcggccacgcttgtctcctcggggccaccgtccccacccagacttccggtctgccttaaaatgttcatgcgtaagtgcgtgggcaggaaggcgggctcaagcgcagctcgtggcgttcattggctgtgcagggccgagggaggcggtgcaaggccgccgcgtgacgtcaggacgccgcggtcaggacgtcgaagccaaagaagaccagagccagccgggtggcacagcggtgtcgtggccgtgttgctgatcgcctgggtggttgttggcgtgtccctgcagcgaaggatcctggttggtaaggggagcggcaggcgagcaggcgggcggggatagcatctccttttggtcttgcgccccgcgagccccgaggccttctcggccgtcgcagcagcagacgccgcgcgcgagcgtcgacagggtgtggcggcgcaggggcagccactgcgcctgcgcaccgggcctggggccgcgcgttcgggcactagcgcgcgtgcgccgtcgtcttctaatttccgttcctctcccttggagttctcggggccccggggcgcccctcactcgccgttgaccgggtgttgccccgggcgacgggcggctcctgcgcgtctttctggggcgtggtgcgcaggcgcggcctgggcagtggctccgtggctagtcgtggggatccgagcggcctcctccacccggcgtcctcctttgccttcgcccagcctgcgggacggccaggtgctcccgggacctcaggcctcgcgtctgatgcctgtctctgttcttgagacccgtccgggagtcctctgtccagcccccaactcctgaccttacctctaatctcccttctgccctggggctcctcttcctgtgtccccgccacgatccctcgtctccacccacgccctgtgtcctgtttaagttaagcctttgcgtttctagggcttttccccagctccagactcccgttcctatcccgtcaactcgtgggaattccggttctcctgcgggattaattatcctacttatcagttactccctctcgggagtttaggctcctgaatccttgctccggagacactccacttttcttccaattctctctgtaccccactcttaattcgttgaacatgttttgggtcttctttggcattcccaaagctttatgtccagacacccaaccacggtgatcccttttctctcccagccctacccctgcttccgggaacctcccgtggaagcaggcaggggtagtcccactgaggactcccacgtaggtctctttactgcccttcggagacctttttgaaatcagtctgtcagtgctaagaacccatttcttcacgttggggttcacgttggcattctcaggaacgctcaacgaccacttgcttccagggttaacttccggaaaatccccttttcctctcaaaattttcttctcttctccaatattcttccagccccctcgatgctccctgaaaggcctcccttttcacagagttctcggaaacctttccaccctctcagccttaagggttccctcagactcttctcattatagcatccatcctcttggttcaggttcctttcacaacccgtactccctagctttttttttttttttttttttgagacagagtttcgctcttgttgcccaggctggagagcaatggcgcagtctcagcttaccgccctccgcctcccgtgttcaagcgattctcctgcctcggcctccctagtagctgggattacaggcatatgccaccatgcccagctaatttggtatttttagtagagacgtggttactccatgttggttaggctggtctcgaactcccgacctcaggtgacctgcccgccttggcctctcaaagtgctgggattacaggcgtgagccaccgcgcctggcccctagaattttttgtagaccttttccccttgatggaggcacccctaccctctggacctttcatcacagcctctctttgctcacatgggtttcagacccttctccttccctttgggaagtc

SEQ ID NO: 1887523 - DNA, 4001 bp, Homo sapiens
aacagattcctatggtgcaggaggctagaggtcaaagggcaaactgtgagcctcctccctcccaccgtagcggtcagggcggcatattcctgaagaaattagtgacccatacatgagagcaatggttcaggatccatgctgccttggttccagtcctcattctgcctcttactagcagtgcaatcttagatccattacttgaacgctccctgcctcagtttccccaggacaaggaggataagcagaaatttctgctttgtagggtttttccagtaatatatgaattaatatatgtgaaagttttgccctaatctctgccatgcatgaagcctgttgggggttacccattagaacagggaggttgcttctggaacaccgacctgtgattattttcaacactgaagctgtgaaaacaagatgtgaggatgtaagagtagagagattcactccagtgagaaacaacacttgttgaaagagagagagaaatgctaaaagaactggaaacccccgtgtgcatcacaatcatcaagggccatggacgtcctttccagaaggggacaccttgctggcagcacagccccagtacctgcacacatgaagagtgtgggccagggaagtcattggaggtaatctaaatattgtttgattttcatttctctgtttggtgttggggtttggggtctttttgatacaggatcttactctgttgcccagcctggattgcagtggcatggtcacagctcactgtggcctcaaactcctggactcaagtgatccgcctgccaaaacctcctgagtagttgtgaatgaaggtgcacaccaacatgcttggataatctttaaattctgggtacagacagggtctcactacgttgcccaggctggtctgaaactcctcaccttaagcgatccttccaccttggcctcccaaaccactgggatcacaggcatgagccacaaaccctggcaagttattgattaatatgcactgtaagctctgtatgaactaagaataaactgattccttctctattttgggcgactcagtctccgaacccacatcccccaaaggccttccctagtgagccaggatctgctcaccctcttctcccacaatgggatggacaggctgggagacagagagacctgaggctggaggcaggagcagatggcctttctggacagaccccacctgaggaaccatcggccccatagtctgtgttccttttccccactctgcttgggaggaggcacctgaggattcacgcattctgctcagagatgactcctccataactcatggctcacaacaggcgcaccagttctgccacccacactgttcacacatgggacacacactgacacatgggaagtgcccagctgcttcatcagaggcgctgctgtgttgggaggaaactttacatgcacagaaggccccttgcatgctcccagttcaacacccagtcacatcccagcacacactcacccatagtctcacagagccatgccactcactgagtctcacacacctgctcactgtgcatataaagatgctcacacactggtccagctgtgctcacacacacactcacatcacagtcaagaagacaaaacgcagttacacccttacactcaggcacacacccgcccaccctggtgggctgttcacctcccacctaaagtcacatcatctcagcagaggttactctcatcagacaccaccatgcactcacagacggttacactggttcagagtccacaccccacactccaccagcatctcagatatcatagccgcacggtttctctttcacacacccacaactctcagtaaagtgttcacaagagaaactctcatactttcgtcttgtgaaatcacccctgattctttcttggtttatgtgaattgagtttattaaaggctgtgtcttttgacttacttttagtgatgacattgttgtctccctctgtgtagttcttcagaatagtatctggtcttctgtgtgagtctctgatttgcagcacttaaatagtccctcttggccctgccctctggctttatttctttctctgaacccctgccaggaagatttctcagcagcgtgagtaggggtggcagaaatagactcagtttcagttttcaggcctgtgactgtgctgcagcagaaacgacacggagggtcacaccaaggggcagggaatcgccagggaaggcacagatgaggatgatggagtgagggtgggaagttgtgcacttcagcctccatgcttctcatgaagccatgtcattgtgtgccctggtcaaagggtttgccttgcatccatctctgaccaagattgacactctgcaaagtactgactgccttgtccactatttgagcccacagctcctcctctatgacatgacttttcccattctaagtcagaaaggaggatggtagaagggcatggtcatctatgagcactctttaaatcaacaaattagcctttgctaagtctgggtctcaacatttccagaaatgggatggttcatcccccattcctgaactgagggcagagagcatatgaatttccctcttctttttcctggtcgagcggaggcacctgtgcactttggagtccaaataggggaagggagcccccatgaggtccctactctgtttcagtgtagagagcgcagttcccactcagccctgctcagctcagacacagccccttccacgctgctactcactcagttattcacgcccgaaatcccgtctcagtccagaaatctctatgctgtccactatcctcctcttttcctcacacactttctcacacctatagaaagttctcctagtctctataggtttctactttcctaaagcaaccagggacacagagattcttatttcctgccagttcacctagggcaggcaagacactctgtatctactctcagtgtcttcatagctgtttcctcaagcagcaaatattgttcctgtgatttgtgtctgaaatactaactagagagtatgcatcagactcaagcagtgaattacaaaatcagtttcctctccacgtgggatttcctggaaatctattgatgtcttcataagtagaagtgaaaggggaatcaaatcctgtttttaagtcggttccaagttcagctggaattatgtgaaagtgaaagcactggaagcacctggcactgcccagttggccccacatccatcctctgcttatttgctcagtgtcaggttgcagaagtggaatggacacactcagcaaatggcagaatcccacattggttgtctgacctgtgcagggaggaatgtgatagtaggaaagggcaatggaagccattagagctgcttccacctacaaaaataggaaagcaaaagcaacaccgcattcttggagggcctgcacagagtagtacagtcatgagggactttaagatacaagggtggcgttttttagatggagtcttgctctgttgcccaggctggagtgcagtggtgtgatctcggctcactgcaagctctgcctcctgggttcacgccattctcctgcctcagcctcccgagtagctgggactacaggcacccgccaccatgccccgctaattttttgtatttttagtaaagacggggtttcaccgtgttagccaggaacctgacctcgtgatccaccctcctcggcctcccagagtgctgggattaaaggtgtgagccaccatgcctggcccatatttggcagttttatctcttaaatttgggttgttgatccattttgagttaatttctgtatatagtataaggtgagggtccagattcattcttttacatgtggatattcagtacaaaaaacctccatgacaggtttacgtgtataacaagcctgcacatcctgcacatgtactcctgaacttaaaataaaagttaaaaacaaacaaacaaaaaaccccacaaaaaccaaaaaccatttattcaggagacaatttgttcccacattga

SEQ ID NO: 1887524 - DNA, 4001 bp, Homo sapiens; identical to SEQ ID NO: 1560610

SEQ ID NO: 1887525 - DNA, 4001 bp, Homo sapiens; identical to SEQ ID NO: 1560611

SEQ ID NO: 1887526 - DNA, 4001 bp, Homo sapiens
ggctcccccggcagggcctgtgcagagcctgggtccctgactgaacccgctgggctcctcacctgccatcaggatgttcagggggtcgctgggggccgaccactcggaggagaggttgtgtgcaccatagcacctgtactggcccccgtgggaggggctcacagggcccagggtgaagttggcctgggagagcccagcctggggctgctggccagggcgctggaggaagtcacgttccccctccttatacagaacaaatctgtcgtagccgacatcagagccacactggagggtcaggctctgcccaggggccaggacagggccctgcagggtcaggagggagggcttcctagacacgcctggagggaaagaggagccaggactgagagggctggttcctcccacgccccttccttctcccgtcctggccctgcaggtctcactgtctctcatgctctgagtctctgaccccagggcctccttctcacccggggctgtcttggagtcatttcagaggagtggggtctccctagccctggccactgtgcctgatctttcctcctctccctgagagctgggacctcacagcaaacacaccgatgccttcctgagtcctccccgttcaggtgagcgtggctgagggctcctcctcccatgtcagagcctccccatggggtctccctcatgccttcagcccgtccttcaacacatcactctgggtcctttccagattcagtcaccagccaaactccccacaacctgtcagctgccccgaaagtgtgttagacaaggccgtggctccctcacctgagggcagaatctccagggggtcactggggtgggaccacacccggggggtgttcatataatagtaatagcatgtgaacctccacctgtggctggggttcacggggcccacagggaacagggcctggaaccccccactgtggagctgctgtgagtccagggtccgggggagctggtgttctccttccttcatcagaacaaaatggtgatatcccttctgtgagccacattggagggtcatattcccccctgaggccaccacagggctgggcagggctgagagggtgggtttgctataggctcctaggagagaaagaggcaccatgttaaatggggctcccacctcccacatcatccccagggctgggctgtgagagggagacacccctgagagccgacccccttcctgagggcagagcctggggctgggaccccagagtgtcctctcacctgtcatcaccagctccagggggtcgctgggctctgaccagcctgcagagctgtaatagtggcagcggtatctccccgcatggtgctctgttatggatgggatggagaatctggccttgttcttgggttccagtgggttatttctgtcccagggctctgggcttccctctttatccagtcggtactcctgggcctccaggctcccctgacaccagatggtcacggggctcccccagctgatcacagagcctggctcagcccagagggtgggtttggggaagggccctagatggaaatcagaggctggatcccaagacatccccacgctcagatcccagctcccagccccaggacttcctcatcatccccatcagtcacccagaactactgtctcctccccacccagaactgctgtctcctcccccagctgcccatgtgtggcccttgtccctagtaaggatgagggacctgggacagctggggacagactcacctgcctgcacgtgggtcctggggcccagactcagccctggaagagaattccctgtgaggcatttgccctgaagcctgagcaggtcctccccgccctggtgcctcctgagcttttgaggtctcctgatggaccagggcttgtgtgtggggtggggttcctccaagactcagatctccccctccccatcttgaaatctcacctaggcagagcagggctgcgagggtgggggtcatggcgtctcctcctggtgaccccgggctctgcagagggatgagccctcagtgctggcaggacagagagacacacagggtgtggccgctcggaggctgggtccttcttgtcatggggttgtctcatcctcagcccacaggaagaggaactgccaccccaggaacctggctctgatttccccagggctgaagtgggggcaggcaccaggctctctgcaggcatttcagagagaaatggggtctccctgcccccgggccactgtctgcctgatttatctttatctcactgagagctaggacacagcagcaaatagaaccagtgccttctggagtcagcccctttgaggcgagggtgactgtgggctcatcctccctctcagagcctccccatggggtctccctccctccttcagcccgtccatcagctcagcgttacggggtccttaccatggcagtcgtctctccagccctggagatgcttcagggaagacccaggtccatgctgcaggcagactcagatcagcagagacgcacctgacacctggctgtgtagtccaggctgagctgcgtgtagcagtgagcacagaggagaaatgcagcgtctaccgtggtggctcatgcctggaatcccagcacttcaggaggctgtggcgggtgatggcttgaggccaggagcttcagacagtcctgggaaacagactgtgaccctgtttctacagaaaagaaaaaagtgagctgggcatggaggctcatgcctgtggtcccagctactcaggaggctgaggtgggaggaccacctgggcccgggaggcggaggctgcagggagatatgatcaccccttggccttccagcctgggcgacagcgcaggatcctgtctgaaaaggagaaatagaggggataaagagaaatatatatatatatatatatatgtttcattgtaatctataatctgattctggggaaggtgagctgatttgtatttaattcctgattatcatctagggtttatgagactttggacatgaatgtcacctctgagcctgctgtcgtgaaccccactcatcacagtggctgtgggggtcagtggtgcccaggacatgggaggctcagccatggtgaatttccagaccagttcagacaggagggtggggacgggagaggatcctggtgctgggctccacagttgaggaggatgattgacgcccccattcaagagcccacattggctccaaataccatgaaattcttgtgatacgtctgaaatatgcagatcatcacagccacaggccgagaaagaggaagaacagttcctcacattgagacgcatccccttccatgagcagagttcaatgctgagtggccacaggtgtctgggaccaccgagcgtcattagggaggaggaggctcccacctccatgtgggacagaagaggaaccccacgtcctcccaggcagggaggggtcagggctctgggtgaggctggaagcggtggctccccctcccctgtgtgtgtggacaggcgctggggggtctctgctcactcactggaggccacggtcagcgctcagcccctcccctgtgtgtgagaaacagattcgatccacggtggtcagacatgggcgtctgccccacaggtgagtgtgaggctggcgttggtcccatccctgctgggcacaatcttgagctgacactgagtttgggggagtggggcaggagcagcggcaacaatccccttcatcaggctgatgcctggacagccgtgggagaaaccctttatgaaaggccaggtgcgtgggaggagctgtcccacaggaatgacaaccaagatacgtgaggaaaacacagacagttgttgaaatgcattagacagacgtcgtgaaggtgaaaaatagtaaattgaattaataccatcgaaaagtaatttaataaatatatacacctactatgtagccataaagtgaaaaatttgaccgggcgtggtagctcatgcctgtaatcccagcactttgggaggccgag

SEQ ID NO: 1887527 - DNA, 4001 bp, Homo sapiens; identical to SEQ ID NO: 1560618

SEQ ID NO: 1887528 - DNA, 4001 bp, Homo sapiens
ctctaggagcctctgtctctgttttctctgagtcttcccctccccacccatcccctgtctctctctctgtctctccctcccttgggaccaccccccgcctcatcctggccatcactaattggattcccccggcagggcctgtgcagagtctgggtccctgactgaacccgctgggctcctcacctgtgatcaggatgtccagggggtcgctgggggccgagcactcagaggagaggttgtgtgcaccgtagcatctgtactggcccccgtaggagcggctcacagggcccagggtgaagttggcctgggagagcccagcctggggctgccggccagggagctggcgaaggtcacgttccccctccttgtacagaacaaatctgtcatagccgacatcagagacacactggagggtcaggctttccccaggggccatgacaggacccggctgcactgagagtgatggcttcttagaaacacctgggaaaaggtgctcatggtttccaggagccgaccctcaggcttccccacaaaccctccctctcccccggtgcctcaccactgctgatcttcctgtgtctctggccccaggacccctgagccctctcgccccaacatcatcccacctggaactgccctgagacacggctgctccccacctgcctggagactcagggagactcagggaactccagacaatgctgtgaatttctcacctgggaccaggagctccaggagatcactgggtgaagaccacacatagggagagttcaagtcataaccatagcacctgtgcgaccacctgcgattcgggctcacggggcccacggagaagatggcgcgggacgacccacgggcatggggctgggagttcaggcattgtgggtgttcatcttctccttccttacacagaatgaagccgccaaatgccacctgtgactcacactggagggtcacccttcctcctgaggtcaccacagggctgggctgggctgagagggtgggttttgggtaggctcctaggagagaaggaggcatcgtgttaaatggggctcccacctcccacatcatccccagggctgggctgtgagagggagacacccctgagagcctccttcctgagggcagagcctggggctgggatccctgagtgtcctctcacctgtcatcaccagcaccagggggtcactgagctcagaccaccgagcgcggctgtaatactgacagccatatcgccctgtgtgttcccaggtgatggatgggatgtggaactggccgttcttcacaagctctggtcgtatccgtgtaatccaagatgctgattttttctccctatatagacggtactcctgggcttcaaggctcccctgacaactgagggtgacgggactcccctgggtgatcacagagtctggctcagcccacagggtgggcttggggatggtccctggaaggaaatcaaaggtcagattcgaagtcatttcccacccaacagatctcagctctcagcccaggaccctccagatgcccccatcagtcagtccagaacttctaatccccatccccagctgcacggaggtggccccttgtccccagtgaggaggagggacctgggagagctggggacagactcacctgtctgcacgcgggtcctggggcccagactcagccctggaagagagttccctgtgagggatttgccccctgaagcctgagcaggtcctcccctccctgggatctttgtgagcccctggggtctccttagggaccagagtttggctgtggggtgaggtccctcctaggttagaagctcccctctctcttcaaatctcaccgagacagatcaggactgtgacgatgggggtcatggcgtctcctcccactgccctgctctgcggatggatgagccctcggtgctggcgggacagagacacacagagagaaatagcctcccctccttcccaccctgtgtggacactcagaggctgggtccttctcatggggtgttgtcatctgcagccacacaagaagcggaactgccctcccaggagcctgactctcattcttttagagctgaggtgggggcaggcactgggccctctgcagacatttcagactgtaatggggtctttcctgacccccagccactgtctgtctggtttctcctcgtctcaccgagagccgggatgtagcagcaaatagaactggtgcttcttgtgtctgcccttcctgatgagggtagcagtggcttccccttccttctcacagcttcccacatggtcaccctccctccttcagcccatccatcagcacagcgttgtggggtccttaccatggcagtcgtccctccagccctggagatgcttcagggaagacccaggtccatgctgcaggcagactcagatcagcagagaagcatctcgcctctggctgtgctgtccaggttgagctgtgtgtggcagtgagcacagaggagaaatgcagggaagtaggggaagaaaagttgacttctttcttgacactggattgtgggttttctttcaaccaaatagtcccctcttaacttcccctttttaaatgtttttgctccagcgtccactccctcccccccgggaagaaacctctgagtctttcctgcctcctcggtgcccattgcgtccttagccgtccctctgcacctcaattcctggtcaacattttgggaacaatgacttatgtttgagctttgatttggggagtgggggagggagttgatatttatttgatgactggttatcatccgctgcctacgtgaccttggtttgtaatgtcccatcactgagcctcagtttcttcctttgcagattgttgtcatgaatcccactcgtcacagtggttgtggggtcagtggtgcctgggacattgggaggggctcatttgtgcttgatttccagaccagggtaagacctgaggctttgggacgtgagaggatcttgctgttggactccacattctgtaggtgattgatgagtccactcaagatgtcacatctgaccgtaatggagaaacgtatgtgtagcatttctgaaatacccagagtatcaaggtcatgagcagaaaaagacatgtggaaaccccaagtgtagacggactcacaagaaagaacagaggccagaggtgagatgccacagggtcccgggaccatcaagggctcattagggtggaggtttccaccactgagtggagccgggagaggaaccccgggatctgcaatgacagtgaggggctcagggctccagaccaaggtgggaggctgcgtcctctagctacacctgaggctggagtggaccccaagcagcccaggggaattccctcaagggagtgcaccaaactgtccagacctgctggaattccaaggaaagaagcactaaacaccagggtgttcatagagcatttattagggggacctctgcacagtggggcatccttgtcttcttgcccagtgtctccttgtggatctcaaggatgtgcttccacatagcagcatgttcttcagatggacaaggagacactgggtattctatccaaagctttaacctaaaataaaaacaaaaccaaaaataaacccctagaaaatatgatctctcagtacagttgtttcttgggatacacaggcaattcgtttcagtaccccctacatgtaccaacacttgctcgtactccagccctgacgttgtctctgctgggtctgcatataggaaaagtctgccgttcatatacgcaagtcttgtttctcacaaatgctatagttttgatccccgtttgtttggaaaaagtgtgcatataagagacccctggaattcaaggctgcattgctccagggttgcctggattttgagtttatttgggagtgagaagcaaggattacaatatggagtgcatggcatggcaagccacagtgtgtccagagagggaagtgtgatgttgtgatatatgctggttttcacccgcagttcctggct

SEQ ID NO: 1887529 - DNA, 4001 bp, Homo sapiens
ctgggctcccccagcagggcctgtgcggagcctgggtccctgactgaacctgctgggctcctcacctgcgatcaggatgctcagggggtcactgggggccgaccactcggaggagaggttgtgtgcaccgtagcatctgtactggcccccgtgggagaccctcacagggcccagggtgaagttggcctgggagagcccagcctggggctgccggccagagccctggacgaggtcatgtcccccctccttgtacagagtgaatttgtcatagccgacatcagagccacactggagggtcagattctccccaggggccacgacagggccctgcagggtcaggagggagggcttcctagacacgcctggagggaaagaagagtcgggactaggagggctggttcctcccacaccccttccttctcccctcctggccctgcaggtctcactgtctctcacactcagtgtctctgggctcaggagtcccaaacttcccttgttccaccctcctacatggggctccgtgagagtaagttctcaaaaataaatagggcaaggaggaagacatccatacctaagaccaggatctccatggtatcactgggttccgaccacacccaggggaagttcgtgtaatgcccatagcatctgaacatccaccggtgactggcagccacacggcccacagggaacagggccagggacaagggacagccccttggagagttcctgtgagtccagcatccaggagagcttgttttctccttcctcaatcaaaatgaacctgtgaaatcccacccttgagctacactggatggtcacgttctctcctgaggtcaccacagggctcggcagggctgagagagtgggttttctgtgggctcctaggagagaaggagacactgtcttaaatggggctcacgcgtcccacatcatcccccagggctgagttattagaacggagatgcccttgagagctgacccccttcctgcaggcagagcctggggctgggacccctgagtgtcctcttacctgtcaccaccagctccaggggctcgctgcgctctgaccagcctgcagggctgagatagtgacagtggtatctccctgcatggtgctctctcatggatgggatgaagaagttggtcttgttcctgggctctggtgggctctgttggtaccaggtcatggggtttccttccttggtgagatagtaaccctgggtatccagggtcccctggcaccagagggtcatggggctctcccaggtaatcacagagcctggctcagcccagaggctgggtttggggagggtccctggaagaaaccacaggctggggtccacagacctcccccgctcctcattcccagctcaggtcacagaccctcttgattttctcaccctcagttcagaagcccctgagatgagagtccaggtgctgagtgtgaggtcaggcatgggaggttagcagagactcacctgcaagtgcttgggctttctggcccagactcagccatggagaagagtttcctgtgggggatttggaacacagaggtgtggctgcttcccttcctgttggagcaccagtagccactggagccctgaggctctctggtgaacaaggctgctgtgggaccctccccacctcagcccagtgcccctcctgtccctcgtctctccaccactgactgaggcacagaagaacagtgaggatggacaccatgatgcctgctctgcgtgctccagctgtgggacaggtgaccacatggccctccatgacagacagatgcacggatgtggttaagtcagagcctgctgccgcctgcctgggtccccacagctgtgaacccacaggaagtggacagccccttgctgggcctgtctcttattccccccccagtgcaggggctcaggaggacccaggccctctgcacacatctcagcccagacctgaggtgtcccctgattgccagggatcctttgtctgaaaacctgcccgtggagggtggacccaacatcatatctatgtcagctcccaacttagctgggtctaaactgaaaacacagcccttattttctcagagcctccactcatgacatcggctttctttttccccactgatgcaaagacaaatatttcccagcagaaagtcatcctgatctggagagacccatttcctgcgttcagtaaataaagtcagtttcattaggggaggctctgggaaaataaggggatgcagactagcagaagatgaacatttagctacttgtttctcaattaattgatttattaccaaagagagagaagtggaaacatgagaatagggaccatgactagaatgtggttgagggaatggtttctatcttattccctggcagagaactaagggataagaatgagaaagctggctgggtgcagtggcttacacctgtaatcccagcactttgggaggccgaggcaggaagatcacaaggtcaggagttcaagaccagcctgaccaacatggtgaaacccctgtctctactaaaaatacaaaaactagctgggtgtgctggcatgcgcctgtaatcccagctactagggaggctgaggtgggagaatcgcttgaacctgggaggtggagcttgcagtgagccgagatcgcgccactgcactccagcctgggcaacaaagccggactgtctcaaaaaaaaaaaaaaaaaaaaaaaaaaagaaagagagaaaacccagcagtgagaggtagttgtgagaacacactaaagaggaaagataatccagggctgggagtggtggctcatgcctgtaattccagcactttgggaggctgaggctggcagatcacaaggtcaggagttcgagaccagcctgaccaacatggtgaaaccctgtgtctactaaaaatgcaaaaattagctgggtgtggtggtgggtgcctgtaatcccagctactcaggaggctgaggtgggagaatcgcttgaacccaggagacggaggttgcagtgagctgagattgcaccactgcactccagcataggcaacaaagccagactctgccaaaaacaaaaacaaaaacaaaaacaaaaacaaaaaacaagaaagctcagtgagaggtggttgtgagaacacactaaagaggaaagatcattcagggctgggagtggtgactcacgcctgtaatcccagcactttggggggccacaggcgggtggattacctgagggcaggagttcaagaccagtctggccaacatggtgaaacctcgtctctactaaaaatacaaaaactagctgggtgtgatggcgggtgcctgtaatcccagctacttgagaggctgagtcaggagaatctcttgaacccaggaggcagaggttgcagtgagctgggatcgtgccactgtactctagcctgggtaacagagcaaggctctgtctcaaaaaaataaaaattagaaagaaaaaaggagaaggagaagaggaaggagacagaaaggagagaaacatccctgaggtggaacattacatgcaacatggagtaggcagggaatccgatagagcactgaaactctcgctgggtacggtggctaacatctgtactcccagcactttgggtggccgaggtggatggatcacctgaggtcaggagtttaagaccagcctgaccaacatggtgaaaccccatctctactaaaaatacaaaaggctgggtgtggtggctcacgcctgtaatcccaacactttggcagtctgatacaggcggatcacatgagatcaggagtttgagaccagcctggccaagatggcaaaacctcatctctactaaaaatacaaacattacctggctgtggtggcagtcgcctgtaatcccagctatgcaggaggctgaggcaggagaatcgcttgaacctgagaggtggaggttgcagtgagtcaagatcgtgccattgcactccagcctggccaataggagcaaaactccatgtgaaaataaaataaaataaaat

SEQ ID NO: 1887530 - DNA, 4001 bp, Homo sapiens
gttgatgagatctccccctgtggggacccatcttagagcacagacttggacggaggaccaccctccaccccacccacaggggctccatcctgggggctcttctagggcgaggctcagctccactggggtcagaaaccccaggcagatgtgcaatccagaacacggaggtcacagaggtcaaggcttgagttcagcatggcacaggccagggctgagagcatggcccagggccacgtctgggtctctgggccagttactgcccctctgacctcaggcgtctcacctattcagtgggtacatttgaggaaagcacccctccaccccgccatggagtcgccgtgaggatgaaggagacgactgtttgcatggtcagcatagaacgggcacccggtgagtgctcatggatgaccctcctcgggtagctgccacccacctggttgtgactgtccccaagtcagcaggggggaagagagcaggtcacgctttcctgagtctgatcaggcagcggtgctgagatgtgcttctcacccagaaaagggtcctttctgcacaaccacttacagcacctctgtgtctccaactgctccatgacacggaggtaggctggcggcacttggcacagtgacagcatgggttcacagcctctgtcatgacggggccctacctggctcagcagggcccagggtcagcgtcctctgcccgcttaatggtcaacatgtatgcgtgcaatttgtctgtgtatgtgaggatgcatgtgtgtgggtgaacacgtctctcctccagctgggcctggctgctccactcaggtgtgcacctggatccctgtcactgtcacccccgggcctgtggccagcatcagagcacccataggtgctcctcagcctctgctctttccatgctgggtggtcctggggatgcagatggggcagggacatagggcaaagggcagagggcagagggcagagggcagaagccaggcttcccccttggggtgactcgcgtagtgtgtaaagtgccaggtctgtgtggcagggctggattcaatgcaatgcaccctctcacctcctcctcccagaagcccactggggtgctgtgactcaccccccaccccatggatggaggcaatcacggaggcttcgaggactaacccgtggcctgagatcacccaggatcccactggccaggcttccaatggttaagctcccactgaacaggtcctagctgaccacccccacaatgaccaggtcccactgaccagatgtggactgaccaggtcctgctgactgggccccacagaccaggccctggctcatcagacaccactgacaaaggccacaataacaaggctgcaactgacaaggccctcacggccctcactgactaggtcccaactgatggaccccaccaaatagatctcactaatcagacccccgctgaccaggccctaacaactgctggacccctgctggccaggccccaaatgctgaaccccactcaccaggccccaaaagctgaaccccactgactgggccccaaatgctggatccctgctgacaggccccaactatgggatccccaccaaccaggcgccaactgtcagacccctgccaaccaggccccggacgctggactccactgaccatgtcccagctactggacccccactgaccaggccccaacaactgctggactgcactgatcaagcccaaactgccagaccccactgactgggccccaactcctagacccctcctgactgagccccaactgccagacccttgccaaccaggcctcttcttatgagacccctgctgaccagaccccaactgctgggcccctgcttaccaggcccccacatccacacctcactgactaggcctcactgctctgatccccgccgatcaggccccaaatgccgggcccagatgaccaggcctcaactgctagacggcccaccaaccaggcctcagctcctggacccctgttgaccaggccccaactgccagaccccaatgaccaggccccaactgccagagccctgctgaccaggttccaactgctggatcccctttgaccaggccccaactgttggacccccgacaaccaggtcccaactgcctgattccgccaaccaggccccaactggtagacccctgctgaccaggtcccaactgcgagacccatgcagatgaaggcccagcgtccagacctcactgcctagaccgcactgatctgatcctcactgaccaggccccaaccgccagaccccacctaccaggtcccagctgctgcatccctgccaaataacccccagctgccgtatcccctctgaccaggccccaactgctggaccccctccaaacaggccccaactataagaccccgctgaccaggccccaactgccagacccccatggacgaggctgcaactgccagatctctgctcaccaggccccaactgtgggacccccgctggccagaccccaaccatgagaccctcgccaaacacgccccaactactggactcttgctggccaggccccaacccccagggcctagtcagtcagtgagacctgactaggtctcactgatcagatccccgctgaccttgccccagctgcagacccctattgactgtgggcggaggattacccaggtgccgaggtgagagactgaagacacaaactgtttcagtataataaagaaaatagttagaataagaatagtcataatacaaattagatatagagatgatcatggacaattatcaatcattattataaacattattaatcattagcttttaatattactctttgttgcgttactaacataacctaggaataactggcgggtagagggtcaggtgctgaagggacattgttagaagtgacctagaaggcaagaggtgagccctctgtcaacgcgtgcataagggcagcttgagggctccttggtcaagcggtaacgccagtgtctgggaaggcgcccgttacttagcagactgcgaaagggagtctcctttccttggaggagtcagggaacactgctccaccagcttcttgtggaaggctggatattatctaggcctgccgcagtcatccggaggcctaaacccctccttgtggtgctgtgctccaatggtcactttcatgttcctcccgtactcctggttcctctttgaaatttgtagtagatagcggtagaaggaatagtgaaagtcttacagtctttgatctttcttgtaagtgcatagaagaaaacgctgacgtatgctgccttctctctctctgcttcggctacctaagagggaagggccccctgtgctgtgatcacgtgacttgcttcaccttgtcaatcacttagaagattcaccctcctgaccctacgccccttgtcttgtatgcaataaatatcagtgtgcccagccattcagggccactactggtctccgcgtcttgatggtagtggtccctcgggcccagctgttttctctttatctcttggtcttgtgtctttatttcttacgctctctcgtctctgcacacggggagaacacccgctaagtcccgtagggctggaccctccaatcaaccaggtcccaactgctggaccccactgaccaggccccaggaactgccggccgcctgctgaccaggccccactggtccgatccccactgagcagtcccctgctgatcaaaccccactgaccagattttccatgacctgaccctcattgaatggatcccgttaagccgaccacaatgaccatgtcctcactgaccaacacccccgtgagtaggcccccccactgactaggcttctgatgaccaggcccacactgccagggccccactgaccagaccacatgacatggccccacagaccaggccccactgacccaaaccactgactggtcccaactggccaggagctcaatgacaaggtcactgccaacagtgccccttacaaccaggcctccactgaccagggccccac

SEQ ID NO: 1887531 - DNA, 4001 bp, Homo sapiens
catagtagatactctcatttacataaaatccagtaagaaaacaaaactgaagttctggcttccggtaatactggagtagcttgctaaactaacactctcacagataacaatgatacaatctggataaaatattatatatagttacatagaaacattcatctatatacaatacatacatacgtgtgtgtgactgaatgagaatttcaacctttcccaccgtagggaagataattattctgtttgaattcagccacatttaccccctcttcaaataataacaatgctcttccaaagaatacaacagaatttagtctctataactaatatttataatttctattacacaatattaaaattcataaaatgtgtgaagaaatgtaacatgcaaactatacacaagataaaaagcaggcagcagaagctatttctaagatgtccgagatgatgtaatcagcagacaagtatttcagggcagctattataagtacgttcatgggggtaaaggaaaatattctcataatgaattaactcatgtagagtctcagcagagacatggaaattataaaaagagtaaaatagaagacaataaaataataaaataaaaagaacttttagtttacagagtagaaacagaagacagcaatataaaccatccaatctgaagactgaaacaagtttaaagaaaatgaaaagaggcctaagagacctgtgaaatgattgagtctgagacagagagggagagacagaaaaattaaatataatacaaaaacaaataaacaatagctgaaaatttaaaaacttggtcaaaaccgcaaattcttatattcaaaaggtgaacacactccaaaacaaaaacaaaaacaaataaaaccatatcgaggccctactgtgatttagaaaactggcagagcaagattttccagggagttgctatgatttctcattttcactatttataataatggaaaatatgcactccttagttttcttcttggagaaagtctgacttgtcaaacacagatgacttttcagtttagttttcaaggtttaatttcttaccttggaaatcaattaaatttgtttctttaaaatgtcgcagtaaaattgctcctccagacagatgtccacggagattctgtcctgctgcgtccgcctttcacagaactgaggttgttcctacaccagtttcagaagcgtgtaggcacgctttattacagtggcagcagcgtccctgtgcgaggtctaacccaggtgtgggccctgcagccagcccgggggtccaatgggtcctcctatggagcacaggaagaatcgtggcaggccagagatagacaaaaggtggcttttaaaagggaagtgtcaggttaccagggactgggtacttttacacgcggaccttcggccctgcccatagaaaggggcagcactgcgcatctctgaaggagtgtggcaaagggtggggcaataagaagggtggggcagaaaggagtggcccctcaggaggaaggggcggggagatcccagctactagaggacgcccgttccaatggcaactctgccaaggcgcctatgagagcctcttggcttttacctggtctgcgagaaatcaaactttgggcacaagtcatgaagccgacaagcccgggagacacagtgtcagaattacaaggtgagatcagccgcccggccaagctatcttctcgctagcaggtgaggcccgtgaacagccaagctccccttggcacggcggaaccgcagtggacgcgtggaggggctccgtagaggagggacctttgcttgggatgcggggagctgtagtctcttatctgcacccagcttgttagttgtacgcctgcaggactacaatctcagcacaaagcaggattgtagggcggtgcggatccctggagggagacagcgcggtgcgctcctgccggccatgctggctggggtggtgtcttaggcggttccagccgttagtcacagggcggccggactacaatcccagcatacaacgggagtggaggtggtgaccttgagagagggcctgtgctgtgcgcgcctcgcggggcatgctgggagcagtagcatcttagctgcttccggccgctggtcgcagggctgcgggactacaatcttcgcatgaaatggaagagagggtggtgcggatagcttgaggaaggtacggataccttgagggaggtatggatacgttgagggaggtacggatacgttgagggaggttacggatacgttaagggaggtacagcagcggtgcgcgccttgcagggcatgctgagaggaacagttttttaactgcttctggctgttggtggcagagctgcgggactacaatcccagtatgctacgggagtggggatgatgctggtcccttgaggggggggggcagcgcggtgccctcctgccgggcatgctggtaatagtgtcttagctgcttccggccgttggtcgcagggctatgggactacagtctcagcatgcgcagggttcaagggtgttgcgcagccccgcagggaggggcagggcggtgttgacctctgtttccaaacccatgctggctactgaatctgtgccacccctggctaaggggagtgagtccatagagggacttgaagggcaggtctgggctgggcagtgaggagagtatgatactgcaaagtgcgcctcgcctttgccaaaatcggtcgggtctcaggctcaccccacctcccgctgctcagttccgtttccctccagagcatcaagcctcctcccgcccagggggcctcctgctttcctaagctgctgtggaatcggcctgaggtcccagacgctgtccattgtgctgctgctctctgctttctccagccagagtgccagttcatccgcttttgggagaactccgccgcctggcctgcccgcggaaaaggtcacagctttgcagggggtgacatgggctatggcttcctggaaatgtcaccctcactagcgccttttagatagatgtgaattttgagacatgagggagagtaattattggtttacccaggagatgctaagagcagaggagaaaaccctaatttccaggcatgtgtcctgagccagggacaggctggccagaccctaagcccccagtgccgccagagagcagcctactgccctgatttgtgtggaatccccttcgtgctgctgggccttagcgtcagggacagcccagtcaggtgaaggtggggatgacccatgggcttctggaagtgggttggtggtcctgggagggccagcccatccccccttggagagggtctttgtgctgaaggatgcccacagaggcctgggtaccaggaacactgctctaggcaaggtgcctttcttccagatttggctgaaaggaaggaagacttggtcagcttttccacccagccatctggcccttacagggctgctccccatggacctgggtttgtagagtcctccagggctttgtgtggcccactagttctgatactgaggacacccctgcaggctgttaatttcagaacaaggggtgtgtgcagactggggcatgggtgctgtcagggtaccccaggctgctccagggacggtaccccagtgttcaacttggcttggggccccctgcctcatgcccttactccagggctgcttggcctgggcttgagccatggtccagaactcaggtggccccattgccacctaatataagggcctgtctccacagtgggtgagacgcccctgggcactgggctcttcagtcatccagggctatccactccatggcatgagttcccacattcagctgaactctgtctggctctggactggggtccctcctgtgccctttccctgaatcctctctgggtccgagacactgatcctcttcactctctggcttaaggcttgttctcctgacctccttggaggggtgctcaggattgaggacccctgctgttctctggggctgttggtactcggaggtgtgggtg

SEQ ID NO: 1887532 - DNA, 4001 bp, Homo sapiens
agcagaagagggtcagagccacaaaatctaaacaaaagacaccaaaccacaagaagcacccagccctgtgaacaccagctgtggctacatctgtaccaatcttttcagacagctgccgtgggactgctgagagcagccacacaccaaacagcagtgcatctgaacacaagtcccaagacactcctctctattaatcctcattttgagaagatggatatggttatgttacaacatccccatacaacacttgtgggcgagggtaatcagacaccctcacctaaagagggcacaggaaggaggaggatgaaaacagagggctagggaagggatgtgtgctctggatcacatagactttccccacaggcactatttaaaacaaaagaagagccctagaaatgtgctgtggtctccctatacttcctcatcttgccacatgcataggtgccacgtggttttgttttgttttgttttttgagatggagtttcgccctttcgcccaggctggaatgaagtggcttgacctagactcactgcaacctccgccccccgggttcaagcgattctcctgtctcagcctcccgagtagttgggattatagcgcctaccaccacgaccggcaaatttttgtatttttagtagagatggggtttcgccatgttgactaggctggtcttgaactcctgacctcaggtaatctacctgcctcggcctcccaaagtgctgggattacaggcttgagccactgcgcctggcagatgccacaatttttttttctttctttacacaggtgctgatgaactcaggtgtaattaaccctaaggggtaaattattcactaagtgcagtaatagggtccaatttttatgaccaggttttcagttctttgatattgtcctacattcagaaatcacaaatgaaaaatactggaatgtgtgacgtgaacaatgtcttggaggttaacatccaggtttttacatattagatgtaacaacatgaaagctggtaccatctgggaaccaaaggaactgtccctgagaacacagaattttagggacatcaattattaagagtttacatggaagcagaagtgctcctagatgtttccattatctagatagaaaaattcaacagatgagccccagtgagtcaaggaacatctctgacagctgtgggtgatgggctttctatccaaagcagagatgtgaaacctgacgggtttcaattgaccccgaagtgctccatatctcaaaagtcaatcccacaaagctggaacgctatctgttcctgagggatcaggtcccacctgtgtctctaagacactgccttgagatgaggccgatgatttcaaacgtaaattgcctaaattatcatcagcttcatgttgtgttttggagcttgtccacttaagtgggttgataaaaaatggctcacaagacacatgcctgggaaatggggttttcttctttgctcttggcagatcctgggcaaccctataattaaccttcttgatttctcaattttcacattcgcgaaaaaggtgccagtgcgcgtgacatttccctgaagccacagcccttgtcaccccctgcaaagctctgaagttgtgcacaggtaggccaggtggcagatttctctcaaaagcggctgagctcgcgctctggctagggaaggcagaggcctgcggcacaaagtacattgtcttagacatcaggacagtgtctatagcagtttaggaaagaaggcggctccctgggctggagacgacgcaatgctctgggaagacccctgggtgcgggtgagagaggaatccgagctgcacaaggccaatgaggggaggacgacccgcccgatttagataaaggtaaggcatacttcctagcttaataccctcctcaatgcccagcccagacctgcctttcacgtccctagctgtattcactctccctggcgaccgggcggcgtagaatcggcggccagcagtgctttagacacaggttaagtgtctgcccctccctccagggttacgcaccaccccgatgcatactgggattgtagttctgaagctacctacccatgggctgagagcagtaaagagactacaactcccagcataccaggcgcggcgcgcaccgccctgccccttcctctggggttgcgaaccgcccccgagcctggtacaggctgggattgtagtcctgcagccttgtggccgaagggctgggactggccatgagattacatgtcctagcatgctcagccaggcgcgcgcagctctgccccttcctccagtgatgcgcacagtccctgatccctgtgcacgctgggattgtagtcctgcagccctgcgatcacttgcaggtaacaagaaatttcagcttccggcatgatgggcgaaggcccccaccttcagcctcgctcctccatgccttcagagctgttccgccatgcagacggggagcctgcctgttctttaacctctcctacctgatgggagaggacaagctaccaggacagcttgtctcaccaagaaattgtgataccgcatcccccaacgtgctggcttcctgacttccaaagttgcggtaagtttgatttctcacagaactgcaagagtccgggatcgtttcccagcctgcccaaagttgccatggttctcaccctctgggaggttggcacacccagtgacaccttgtgtcccttgaaactaatctgtgtcaccttttaggcttttgagaccacttgaactctgactttgtggcatttattaccaaatctactaaaatgggtcaactgtcagattttaactccttttccacacatgttggttaggtaatctgttgattagacatggttttctccaaaaggggattatctcttcctgattgcctccaagagaaggatgaaacgattgggcgctctaaggatctatttcccaaatttgagattccacactgatcattcctgggcaaaatgtgtctttctgttccataaccacaatcttaggccagcctgagtgccatcccagcccaatgggggttatggaactccaacttagttctgtttaagttttatgtaaatatccttgtctctgtttcacctggctctgttagataaaatgtctaggagaaagtaggaggtgacaagaatacaggtgaaatcataggtactggaatggggcacactgattctgtggaagcagagggagaacaacaacctaaaacccagggaatgaacaacttagacctcaggagctgtggggaatggaggggcattaataactttttgtctttctgaattacccctggtgcaacccagaaaagagtctgggaatcttgttgggccaggacaaaagtagttttagttagaccagaaggtaaggcacaagctgtgaattcatctcctcctttggctccccacattaaccttaagaatcctttgagactgttctgtctctctgtgatgtaggtgtggaattctagggggcagcgtgcactctcagtgcccagctgtctgagaccacagttccctcagatgatgaatgatatggtttggctgtatccccacccaaatctcatcttgaattgtagctcccataattcccgtgtgatatgagagggacctggagggaggtaatcgaatcacgggtgtgcatctttcccaagctgttctcgtggtagtgaatatatgtcacaagatctgatgattttatagagggcagttcccctgcacatgctctcttgcctgccaccgtgtaagacatgacttcgctcatccttgccttcctccatgattgtgaaccccactgccctgacctacagccatgtggaattgtgagtcaattaaacctctttcctttataaattacccactcttgggtatgtctttattagcagcatgagaacagactaatacaatggagaaccatcgcttttttctgaagagactcagtcccccatgggtaagcttaagctggacgctaggcagcactgattatattttctc

SEQ ID NO: 1887533 - DNA, 4001 bp, Homo sapiens
agaatcaacacatcaaaaacatgaccagaccgtgcacagtggctcacacctgtaatcccagcacttttggaggccacggaggatacctggaacccaggagtccaagactatccggggccaacatggtgagacagcatctctattaaaaaataataattaaagttaaaaaagaaatatatatccagagcatggacaacatagcaagatcacatctctactaaaaagatgatacaggctgggtgccagtggctcacgcctgtaatcccagaactttgggaggctgaggtgggcggatcacaaggtcaagagatcgagatcatcctggccaacattgtaaaaccccatctctactaaaaacacaaaaattagctgggcgtggtggcgcacacctgtagtcccagctactcgggaggctgaggcaggagaatcacttgaacccaggaggtggaggttgcagtgagctgagatcatgccactgcactccagcctgggtgacagtgtgagattgtctcaaaaaaaaaaaaaaaaaaaaaaaaaagatgatagatagatagatcagaaagacagagacagagccagccagatagacagagctggacagacagagagagatgatagacagatagatagatagatagccagccagccaggcaggatggtgcatgcctgtaatcccagcactttgggaggtcaaggctggtggattgcttgatcacaggagttcgagaccagtctgagaaacatggcagaacctcatttctacaaaaataaaaagtaaaaaatgcaaaataaagagccagtgtggtggtacgtgactgtagtaccagctactgggagaactaagacggaggatcccctgagcccaaggaggtccaggctgcagtgagctgtgatcacacacctgcacttcagcctgggtgactaagaagacctcatttaaaaaaacatacacacacacacacacacacacacacgtatgaaagaagaaatttaaaacagcaacttcagtgtgcaggaaggtgcttaagagagaaaacaaaacaaaacaaaacaatagtaactcaatgtaccgtggaaacaaactcaaagtggggctagaaaaaaagaaaaaaaaacccagaaagatcccgagcctcagctactctggaggcagaaacaggaggatggggccgggcatggtggctcacacctgtaatcccagtgctttgggaggccaaggtggacgaatcacctgaggtcgggagttccagaccagcctgaccaacatggagaccccatctctactacaaatacaaaattagctgggtgtggtggcgcacgcctgtaatcccagctactcaggaggctgaggcgggagaatcgcttgaactcgggaggtggaggttgcagtaagccgagattgccccattgcaccccagcctgggcaacaagagcgaaaactcaaagaaagaaaaacagacagaaagagaaagagaagagaagagaagagaagagaagagaagagaagagaagagaagagaagagaagagaagagaagagaagagagaaaagaaaagaaaaaagaaaagggaggatgacctgggtgagtccgggcaggtggagggcgcgtgagccgtaatcgcaccctctgctggacctaagcggtactgccgcgggcgagagctatctagtccgtcttaaacatctcaagctggaggccaaaccctaaccttggggctgacatctggtcgacccagcggctggacagagaagccagccggtggcgagggcagaggcccaccgggtccacactacgcgccaagtgtggccgagtgtggcgcgcggggcctgagcccgtccgtctggagtataactccgccaaccttccttcccagcgctctcccacactgtctgctggtccactaagacggggaagagctcaagggggggcgaccggcccctactccccgccgacccctcctccccgctgctgagtgggagaggcccaggacctggaccgccacttccagaccacacagccacccctgaaacgggggctgccgggccacaccctctgacgcccgcgcctcagccatcccaccacgctcccacagcggcgtcccagccagggcgacgagccacccgcagggtgggaagaggaggaaaccagagggggtggacaccaagcaagggagccccacgaacctgcggcaccctcagagcagcatgtggccccttcggcgctcggaaagcccacgggcggacccttccaggctctcggaagatggcacaggacggtccctgattctccatggggacttgggaaaagaaatcggccagagcctcaaacggccaggacacacatgggcccgcaaccgggcctggggggtgtccccggccccctgcatcatgcctggtgggttccgagggtcgggcctccgcagctgcggtgagctggggaccagcccgggcagccccacactaagctcatgccgggagcacggtaacagcctcccctccacagccctacacgccagagctatgactcacaagggacgcgccagagctctggcaccatcgggactgttctgctgaagtctgcaggactcccgagctctgctcagctcacagcgggggctgtccctccctcggcagctgccactggagctccagaggacaagagaactctagaaaggtggccgcccctgtgggccacaagccgtgccgtcagcccaagcggcctctggaggaggcctgtactgctagccggccgctaggaggcgccaaacaaccacccacgcaataatcagccaggaaagaatgaaaaaatacatatatatgcatatactgatcaaagaacaatcatacccagtcagggcgacgattttctaggcaacaaggaagaagccaactttgaggtagggacagtagagaagacacagttgacccagtctgtgcacaggcttccttttctgtgagaccttggtttaggggacataactatatttctttgtaacacaattacttattataaacgttatgtttgtttatttacttatttgctttttgattggagtcttttttttttttttttgagacggagtcttgctttgtcacccaggctagagtgcagtggggcaatcttggctcactgccatctccgcctcccgggttcaagcgattctagtacctcaacctcctgaggaactggtattacaggcacgcaccacctcgcccggctaattttttattgttagtagacacggggtttcgccatgttggccaggctggtctcaaactcctgacctcaggtgatccagccgcctcagtctcccaaagtgttgggattacaggcgtgagccaccacgcccagccgatttttttttatttcttatgtgtatggtcctgtgatagaccaggggacttgtaacctcagagtccatgaggccagaagttaacgtcctaaatgtctatttagaatgaacttaaatgaaccaaactctctgccacgaaactctcagaaagacaagagattaaaaaaaaaattgcaacctggcaatgaatcacgcctgtaatcccagtactttaggaggccaaggcaggtgcatcgcttcatcccaggagttcgagaccatcctgggcaacatggtaaaacatcatctcaacccaaaatacaaaaattagccagtttcataacctgatctcaaaatacataaataaatagattaaaattcaaaaataaaatttaaattttaaaatgctgagttctgttcattttgcttcctacccagagaagggcataaaatatctgttgcttgcttgtttgtttttgacagggtctcactctgtcacccaggctggagtgcagtggcaccatcatggcttactgcagcctcaacctccccagacttagatgatcctcccacctcagcctcccaagtagctgaaatcacaggtgtgtgctggcacacctggctaatttttgtattttcggtacagacaagttttccacatgtttccca

SEQ ID NO: 1887534 - DNA, 4001 bp, Homo sapiens
cttaggggacttgggctcctcttagcattgacaggccggtataaacccccggctcggatcgagctatgccggatgctgccttaagccttatgaggtcgccacggaaccgcaggtgagggcccacttgaactccgtagctttcgccgtggagctacaaactggaggacaagcgcaagcccttgtcctcccccattcattcaccattcacacagagtttataacagtttttcttttttctttcccagagattctccaagaaacctgaacaaggaaagattagagatagaaaaagagagagagagagaccagtctgccagaaaccaggactcagtcccccagcatcctgggatgtggactgactcaagggatggcccctgtcagggccacttccctcccagacagagacacagaggcgtctaacagaaaaccagggctctaccctctagcatcctagagaaatgggcagagtcaaaagagggacaccctcatcagggtcgcttccctctgccagaaccaaagtcaaatctgacctacctgaccccggggtcagcagttgaggactcagaggtggaatttttgtgggcacccacatggtagtcgatccgctgtcctccggaagacggtcaccctttggggacctggaaatttttttttcaggtggcactcccccctacaagctggctgtccttccgggggagcacacagcgggcccggctctcgcccggtgacgtttctcccggtgacgtttctcgctggggcctccaaatgtcgtacctgagcgagttagagaaaacgccacactttgagacaaattaaaagtccatttatttagctggccgccaagagatggctaatgctcaaaattctctccgctctgaagaaggggctagatcttcttttatactttggtttagaaaggggaggggaggtctagttaaaacaattttacagaaataaagtaagcaaaaaagttaaaaggataaatggttacaggaaagttaatagttccaggtgcaggggctttaagattattacaaggtgatagacgcggggcttttgggcataatcaatcggatgaattcctcggaactgcggatatagcttgccacagtatcttaacagttaattgcattcttggatgtgctgggagtcagcttgcacaagttaagtccttgaggaaggggctgccagtgaaagagccaagatggagtccatctggcgctcttagctaagggagagtcaattcaggtggaaacaaggctaggtgatttaaggaaagggagagtctaaaaacagggttagtaaaaaccaggttgggcattacactactaagatatcaaaaccaggaacttacttcctttaaaacaattccaaactaactcgctgtgccttacacagaaatttcccccaagaaatatggttttataaagcctgagaagttgttgctattaggacaaacaccaaaactaaaaattggtttaattagcaacaacaaaattccattttaactggctgtccttatcagagacagtccactaaataatacaactggcaaaaagtgagattttgtaaaggttggggtgctttattataaacataacataaaccaggaatgtattttaataaacctcaacctgcgggtcactccctcccaggcgtgcaacaaaacacctgcctagaaatcaaaaggcgttttacccgagtgggctgaaaaagccccgtttttacctttaatctggagacaatacgggtcagaggtcaggaaactacatcagcgccagtgcgagcgcccacgagtccggtggacggatgagaaacggccggggggcagcctgagtcccagttcccgccgtggcaatggccaatttcccacccgtggacgcaaaaggccaggactccacgctgctgaccctccagcgtcccatgtccggcaggcacgtggccgaatagcccaagactgaggactcacacttcccactttgcacctggaggccacctgcagaccaaccttgcgccaggcttccggaaatgggagggcgggcttccggaaacggcggccaatgggaaacgtgatcagatgttactaggcagacagtccgtttccaggcaacacagaagaaaggaacgcgctcagtcagcctcaaatagacggagatttcagccaatggatgtgcaggttccctccacattagccaataagaagtgcttggggcctacctgcctacaagcacagcaaaagctttcctgcgcatttttgcgctggaatggctacctgccgcgccaaatcaaaatttacaatcacccttggtgctgtttcctgcactttcttggagatttgcaccaggcgctggagaccctcccacctggcccatgcctgccacccggtgaacaccaagacccaaccttctgcaccaccagtcttgttgtcagcgaacaggctagtaaattattgaaggggtggcctgcccctccacacctgtgggtatttctcgtcaggtggaacgagagactgagaaaagaaagagacacagagacaaagtatagagaaagaaaagtgagcccaagggaccggcgctcagcacacggaggacctacagggacactggtctctgagttccctcagtatttattgatcattatctctaccatctcggagagggggatgtggcaggccaatagggtaatagtggggagagggtcagcaggaaaacgtgaacaaaggtctctgtgtcataaataagtttaaggaaaggtgctgtgccttgatgtgcacttatacaaacatctcggtgcattaaagagcagtattgccgccagcgtgtctcacctccagccctaaggatgttttctcctatctcagtaagtagaacatacaatcgggttttacaccaagacattctattgcccagggacgagcaggagacagatgccttcctcttacctcaactgcaaagaggccttcctcttttactaatcctcctcagcacagacccttttcgggtgtcgggctgggggatgtcgggctgggggacagtcaggtcttacccttcccatgaggccatatctcaggctatcacatggggagaaatcttggacaatacctggctttcctagacagaggtccctgcggccttccgcagtgtattgtgtccctgggtacttgagattagagaatggtgatgacttttaacaagcatattatcttcaagcacttttttaacaaagcatagccctaaatccattgaaccttgagtcaacacagcacatgtctctgtgagcacagggttggggctagggttacagattaacagcatctcaaggcagaagaatttttcttagtacagaacaaaatggaatctcttatgtctacttctttctacatagacacagtaacagtctgatctctcttttccccacagaagggaagggagggagggagggaaagaaaaagaaaccttaagcattttttacagatgagggttctgctctcccttagttcagccatgctgtgggggaaggggaaggagtgtggtaagatggcagaggaggaaataaaatatggatggcttctgccttttcagttcttttcctcatttcctggcttactgtccctggtttctgactgctttgtggtgaagcttcagaattggagagaaaaagaggccagaattggtggcttatgcctataatcccagcactttgggaggtcgaggcaggcagataacttgaggtcaggttataaatgtttaatacctaaaatgatcaatacctaaaaaaaaaattttttttttgagagggagtctcattctgtcacccaggctggagtgcagtggcgcgatctcggctcactgcaacctctgcctcctgggttcaagagattctcctgcctcagcctcccgagtagctgggattacaggtgagcaccaccacgcccagctaatttttgtatttttagtagagatggggtttcaccatgttggccaggctggtcttgaactcct

SEQ ID NO: 1887535 - DNA, 4001 bp, Homo sapiens
aatacataatatcagtagaacaaaaaacaaatcatatggtcatttcaacacatgcagaagaaacatatgacaaaattcaacatcttttcataataataattttttaaattatttttattttttaatatagagatggggttttgccatgttgcccaggctgttctcaaactgctgaactcaagcaatctgctggccttggccttccaaaatgctaggattgcaggtgtgagccaccatgcctggccataataataattttttaaaaactcaacaaagtagtataaaaatgaacttcctcaacctgataagagcaagtacaaaaaacccacggcaaacatcataatgattaaatttggatgctttccctctaagtttacaaacaagattataggctgggcatagtggctcatgtctgtaatcctaccactttgggaggttgaggcagccagatcgcttgagcccaggagttcaagaccagcctaggtaacatggcaaaaccctgtctctacaaaaattacaaaaaaattagccaggcatggtggtgggcacctgtagtcccaactacttgggaggctgaggtgggaggatcacctgaacccaggaggtcaaggctgtggtaagctgtaatcgtgccactgcattccagcctgggtgacaaagtgagactctgtctcaaaaaaacaaacaaacaaaacaaaacaaaaaaacaagattataatgtctactctcatcacttttatttattattgtacttgagtctttagctagagaaatttgcagattagagttattttgtggggaatgtccaaaagaatccaatgaaaaatctattagaactaataaactagttcagcagtattataagatataaattaatatacaaaaatcaattgtatttctatacacttgcaatgaatcatccaaaactaaaattaagtaaacaatttcatttacagtaacatcataaagagtaaaacatttacgaataaatttaacaaaaacattttcaacatatactctgaaaactacaaaacattgtttaaagagagtcaaaaatatctacagaataggaaaaagaatgcacattcacgaataagaaggcttgatattgtttaagatgacaatattccccaaactgatctacagattcaaagcagtctctagcagaatcccagctgaccactttgtagaaagtgataaggtgattgtaaaattcatatggaattgcaaggaatcctaagtagccaaacattttgaaaaagaaaaacagccgggcgcagtggctcacgcctgtaattctagcactttgggaggccaaggcgggcagatcacctgaggtaaggagttcgagaccagcctgaccaacatggtgaaatcccgtctctactaaaaatacaaaaactaggccaggtatggtggctcgtgcctgtaatcccagcactttgggaggccaaggcgggcggatcacaagatcaagagatcgagaccatcctggctaacatggtgaaaccccgtctctattaaaaatataaaaattaggcaggcgtggtggcacatgcctataatcccagctactcgagagactgaggcaggagaattgcctgaaccagggagtcggaggttgcagtgagccaagatcatgccactgcactccagcctggtgacagagtgagactccatctcaaataaaaataaaaaataaaaaagaagaagaaagaaagcaagaaagaaagaaagaaggaaggaaggaaggaaggaaggaaggaaagaaggaaggaaggaaggagaaggaaagaaagaaagagaaaagaaagaaagaaagaaagaaagaaagaaagaaagaaagaaagaaagaaagaaagagaaaaaacaaagtaggagaactcacacttactgatttcaaaacttactgcaatggcaatggccaggcatggtggctcatgcctgtaatcccagcgctttgggaggccaaggtgggagcattgcttgaagctgggaggtcgaggctgcagtgagccatgctcatatcactgcactccagcctggatgacacagcaagaccctgtctcaaaaacaacaaaaacaaaacaaaagaaaacaagagttattgcaatgcaatagtaatcaagactgtgtggtattggcacaaggatagacatatagatcaataaaatagaattgtctacaattgcatgaaataaacccataaatcttgtttgattttttaattatttcaatcattttgttacatttctctgataaatttctgaattgcttttcggtattatcttggaaatcactgtgttgccttaaaattgctgttttgaattcctgatcatagagtttgcctattgtcatcttgctaggattggtcactggctccttactttgtccgtttggggaggtcatggttccctgtctgctgttgtttcttatggatctacatctatgtctttgcattgaaggatgtgttagttattccagctttctctgtctggtttgtttttgtttttcttagatatgtttgcttagagattctttgtagtttatctgttgagtatcttcttcactaggtcactctctcctttatggtgctaggtggcaccttaagcccaggtgtgtctttgctctagtgaacattttgagctttgcccatcctgaatgagggaggtccgaaaggggctaccctggcagggtgggaaggctgactaggggtttctgcccaggagaccctctcatttgagttctgggatattgctggtgattatctttgtgctggatatttgtttctgtttctgtggtgagagtgaagccagcttgcttctactctaccattttggacctagtacaagtacaaaacccatatatctttcgtcaactgattttttaacaaaggtgctaagaccattcaatgggggaaaagtaatctttcaacaaatagtgctggggcaactggatagtaacatgcaacagaataaagttggaccattgccttgctccatatacaaaaattaactcaaggtgaattgactacataaattaagagttaaaactataaaactcttagaagaaaacatatagaaaaagcttcatgacattgattttgggaatggtttcttagatgtggcagcaaataacaagcaaaagataaactagataaatgttttgccacatcaaaatgaataacttttgtgcttcaaaagatagcatcaagaaattgaaagtaaaacccatagaatgggaaaaaatatttgcaaatcatatacgtggtaagaggcttgtactcctaatgtataactcttacaactcaataataaaagataaaaacctatttaaaaataagcaaaggatacgaatagacatttctccaaagaagacataaaaatggtcaatttgcaaacaaaaagatggttagaaacattagtcattagagaaatgcaagtcaaaaccacaatgatgtgccatttcatacccactaggatggctagaatcaaaaagtcagataacaaaaagtgttggcaaaaacctggggaaattggaacctggaacctcaaacactgttggtgggaatgttgaacggtgtagccactttggaaaacaatctgtcagtttctcaaactatcaaaaagagttactgtattacctagtaattctacttcaaagcatgtacccaagataaatgaaagcaacccatgcccacacaaaaacttgtatatgagtgtttgcagcattattcataatggctaaaaggtagaaacaatccaaatgcccaggtgattaatgggtaaacaaaagcggtacatccatataatagaatgttatttggtcataaaaacacatattatttagccataaaaacacccatgctacaacatggatgaatcttgaaaacattatgccaagtgaaaaaagccagacacaaaagaccatatatcatacagttccatttatatgaaatgtccagaacaggggatccatagaaacagaaagcagatcagtgg

SEQ ID NO: 1887536 - DNA, 4001 bp, Homo sapiens
aagctggtgcacggcgcgacaagcccttgaaccggctggatgcgtgtctagtgaagttcccagtcgtctccatgctccacctgcccgagaacagggccacgggctgcctccagagggactccatctccatgcacaggaagagcctgatttgcgggatgagccacacggctggccgcctggtgttggtgcaatgccacgtcctccagcacttcctgacgtggcccagcaacactgcgaggaggcctggaaacagggcaagaggaagggtgagaagggtggcatggtgggggtcagctccttcctgaccctgagcactacccccaccactgccctcaacctgcaggaggtggagagcaagatggatagctgcagatgcttgcccaggaaggtggacaacagcgctgctgctcagccacagggcatggagctcactgccagcaggtgaggggcttcaagaaggagcatcagcaggcggccagcccttctgtggcctcagccaggccttggagtgggcccagcaggcctctgggtggtcctgaaccaaaccatccccttccccgaggtgcctgtgatgccattggcaagctcttcccggattggcccaggcaggacctggaccccgtctcggacctgttagtgcggtcccaggagcactgggccaacttcccagaccacctccacgttcacagaggagctcttaccagagtcacggggagcaggagactcgtgggaggagggaagatggaggtgcggcggctgatggcgttcaggagcgcgggacacgagttctttgggcgctctggctgaaattcaccatctctatccaattccagtagagacttgagatcacagatgcagcactgtttaccacaacagatattttttccaaaaagtgacccagaattcggaaccagctcttcacaaaaatggagtgttgaattggggatttttttttctggttcaaggataatttctacggcagaacaaaaattgctatcaaagagccatggccaactattcatggtggtacaaggatggttttgtgctcaactgaggccggttgaatagagaattacataggaaataaagagcgaacatggtgatggagtagaaacagcaccacgtgttgtaattttgtaggcatcggtactacggaagttccttccttccttctctccttcctgctgtctgagcctcctcccagcattgggcatcccctgggcctgggtctgtgctgggagagacacaaaggacaccattggctgcaggccagggactggcatggtcaggggagcctggtgaagtcagagtgttccctgaggatcagtcctgggatgaccaggtccaactgaccaggcaaccagggccccatcacccgggccttccatgacctggccctcactaaatgggccccgatgaccaggtctccaccgacctggtcccccattgaccaatccccaatatccaggacacactgaccaaccctgccgaccaagttttcactgaccaggcccccgatgaccaggtttattgattgggctccctctgactaggagcctgctgaccaggatgtcactgaccaggccccactgacagccaccccccctcacccctcccccacctctgccaggccccgatggattaggtccaatgatcaggcagccactggccagggctgcactgacccctactgatcagtcacctgctgaccaggcccctgaagaccaggttcacactcaccaggcacaaggccccactgacgaggcccccactcaccaagccctcactgactcactgactaggtccccctgatgaggccctcactgcctggaccccactaactaggcctcatcaatgagactttcactgaccagaccctacttacccaggaccccaatgaccaggcctcactatccaggacccactgatggcctaggtctccactgaccaggcccccactgactggacccaactgaccaggtccttaactgacgagattctgactggccaggtccttaactgacgaggttctgactggccaggtccttaactgacgagattctgactggccaggtccttaactgacgaggttctgactggccaggtccttaactgacgaggttctgactggccaggtccttaactgacgaggttctgactggccaggtccttaactgacgagcttctgactggccaggtccttaactgacgaggttctgactggccaggtccttaactgacgaggttctgactggccaggtccttaatgaccagacctttactgactaggccccactacccaggactcccactgacttggcccaactgacaaggcccccactgaccaggtcctcactaaccatgtccctactgaccaggcccccagtgactgggcccaactgacaaggttccaactgaccaggtccttaaccgacaaggttctgactgaccaggtcctcagtgaccagacctttactgactaggcctcactaaccaggaccccagtgatccaggcctttactgaataggccccactctccagggcctcaaagaccaggtccctactaaccaagtctctctgaatagacccttactgactagaccccacaaaccaggacctcagtgaccaagctcccattgaccaggtcccactggccaggccccagttgatgaggccccgctaaccacatccaacactgaccaggtcccactgagcaggccccagctctccaggcccccagtggccaggtttcactacctaggccccactgaccaggctccttctaacaagggtcccctgaccaggtcccattgacaagtccccactgactaggtccccactgatgaggctccaacttaccaggaccccactgaccaaacctccactgaccaggccccactagccaggccccactgatgagactcccactgacttgggcccaactgacaagaccccctcagaccaggtcccactgaccgggcccaaagtgacaaggttccaactgaccaggtccttaatgaccagacctttagggaccaggcccccttacccaagtccccactgaccagtcctccagtgactaggcctcactatccaagacccactgatgaggcttccattgccaggtccccactgactagagctcactgacacggccccaacagatgaggttctggctgaccaggccctgaatgaccagacctttactgactaggccccactacccaggactccagtgcccaggtccctactgaccaagtcccactgactaggccctcgctgaccaggtccccactgactgggccccaactaagaaaattccaactgaccatgtccttactgaatagacctttactgactaggccccactacccaggagcccaacgaccaggccctcactgccaggcttccactgaccacctttctattgaacaggctccagtggccaggtttccaatgactaggtccccatagaccagacccccaataatcagatcacactgacccagcttccgctgaccaggcgcccactgaccaggtcctcactgatgaggtgccaagtgactaagtccttaactcgaggacccatgatcagtcccctctgaccaggccacagctgaccaggcctcccacagaccagatcctcaccgagcaggtccctgctgacaacacccccatttactaggtgttttctgactatgtccccaaggaccgtgtccccattcacaaagcctccgctgaccgggcccccattgactaggacacattgtttaggtcccattgatcaggccccgctgagcaggccacaatgtccaggtcccacagatcaggcccccactgaccagaccacaatgttcaggtcccactgacaaggcccccgctgaccaggccacaatgtccaggtcctactgatcaggccccgctgagcaggccacaatgtccaggtcccactgacaaggcccctgttgatcaagccataaggtcgaggtacccactgacc

SEQ ID NO: 1887537 - DNA, 4001 bp, Homo sapiens
tggcaactaggccagctagggcagtgatgatgactgggacgacaagtgggatggcagctccatgacggtgaacgatccaggtgcactgggcagaggtgcatacctggagctcgacggctccctgggtccccacgtgggcaggagctcggtcactgtgagccgcaacctcaaccgctactctgccttcatcaagtcgggaagggaggccttcgtgcttggcgaggcgttgggctctgtgaaagacagggacaagctgtgtgcatggtgctgttggtgcttggccccatggccccaagtggcaggaaaacccctaccccatggccccaagtggcaggagaacccagtgcaccgctggcgacaccactcagtagaacaagttcaaggacataaagacctacttctcctgcaagctggtgcacggcgcgacaagcccttgaaccggctggatgcgtgtctagtgaagttcccagtcgtctccatgctccacctgcccgagaacagggccacgggctgcctccagagggactccatctccatgcacaggaagagcctgatttgcgggatgagccacacggctggccgcctggtgttggtgcaatgccacgtcctccagcacttcctgacgtggcccagcaacactgcgaggaggcctggaaacagggcaagaggaagggtgagaagggtggcatggtgggggtcagctccttcctgaccctgagcactacccccaccactgccctcaacctgcaggaggtggagagcaagatggatagctgcagatgcttgcccaggaaggtggacaacagcgctgctgctcagccacagggcatggagctcactgccagcaggtgaggggcttcaagaaggagcatcagcaggcggccagcccttctgtggcctcagccaggccttggagtgggcccagcaggcctctgggtggtcctgaaccaaaccatccccttccccgaggtgcctgtgatgccattggcaagctcttcccggattggcccaggcaggacctggaccccgtctcggacctgttagtgcggtcccaggagcactgggccaacttcccagaccacctccacgttcacagaggagctcttaccagagtcacggggagcaggagactcgtgggaggagggaagatggaggtgcggcggctgatggcgttcaggagcgcgggacacgagttctttgggcgctctggctgaaattcaccatctctatccaattccagtagagacttgagatcacagatgcagcactgtttaccacaacagatattttttccaaaaagtgacccagaattcggaaccagctcttcacaaaaatggagtgttgaattggggatttttttttctggttcaaggataatttctacggcagaacaaaaattgctatcaaagagccatggccaactattcatggtggtacaaggatggttttgtgctcaactgaggccggttgaatagagaattacataggaaataaagagcgaacatggtgatggagtagaaacagcaccacgtgttgtaattttgtaggcatcggtactacggaagttccttccttccttctctccttcctgctgtctgagcctcctcccagcattgggcatcccctgggcctgggtctgtgctgggagagacacaaaggacaccattggctgcaggccagggactggcatggtcaggggagcctggtgaagtcagagtgttccctgaggatcagtcctgggatgaccaggtccaactgaccaggcaaccagggccccatcacccgggccttccatgacctggccctcactaaatgggccccgatgaccaggtctccaccgacctggtcccccattgaccaatccccaatatccaggacacactgaccaaccctgccgaccaagttttcactgaccaggcccccgatgaccaggtttattgattgggctccctctgactaggagcctgctgaccaggatgtcactgaccaggccccactgacagccaccccccctcacccctcccccacctctgccaggccccgatggattaggtccaatgatcaggcagccactggccagggctgcactgacccctactgatcagtcacctgctgaccaggcccctgaagaccaggttcacactcaccaggcacaaggccccactgacgaggcccccactcaccaagccctcactgactcactgactaggtccccctgatgaggccctcactgcctggaccccactaactaggcctcatcaatgagactttcactgaccagaccctacttacccaggaccccaatgaccaggcctcactatccaggacccactgatggcctaggtctccactgaccaggcccccactgactggacccaactgaccaggtccttaactgacgagattctgactggccaggtccttaactgacgaggttctgactggccaggtccttaactgacgagattctgactggccaggtccttaactgacgaggttctgactggccaggtccttaactgacgaggttctgactggccaggtccttaactgacgaggttctgactggccaggtccttaactgacgagcttctgactggccaggtccttaactgacgaggttctgactggccaggtccttaactgacgaggttctgactggccaggtccttaatgaccagacctttactgactaggccccactacccaggactcccactgacttggcccaactgacaaggcccccactgaccaggtcctcactaaccatgtccctactgaccaggcccccagtgactgggcccaactgacaaggttccaactgaccaggtccttaaccgacaaggttctgactgaccaggtcctcagtgaccagacctttactgactaggcctcactaaccaggaccccagtgatccaggcctttactgaataggccccactctccagggcctcaaagaccaggtccctactaaccaagtctctctgaatagacccttactgactagaccccacaaaccaggacctcagtgaccaagctcccattgaccaggtcccactggccaggccccagttgatgaggccccgctaaccacatccaacactgaccaggtcccactgagcaggccccagctctccaggcccccagtggccaggtttcactacctaggccccactgaccaggctccttctaacaagggtcccctgaccaggtcccattgacaagtccccactgactaggtccccactgatgaggctccaacttaccaggaccccactgaccaaacctccactgaccaggccccactagccaggccccactgatgagactcccactgacttgggcccaactgacaagaccccctcagaccaggtcccactgaccgggcccaaagtgacaaggttccaactgaccaggtccttaatgaccagacctttagggaccaggcccccttacccaagtccccactgaccagtcctccagtgactaggcctcactatccaagacccactgatgaggcttccattgccaggtccccactgactagagctcactgacacggccccaacagatgaggttctggctgaccaggccctgaatgaccagacctttactgactaggccccactacccaggactccagtgcccaggtccctactgaccaagtcccactgactaggccctcgctgaccaggtccccactgactgggccccaactaagaaaattccaactgaccatgtccttactgaatagacctttactgactaggccccactacccaggagcccaacgaccaggccctcactgccaggcttccactgaccacctttctattgaacaggctccagtggccaggtttccaatgactaggtccccatagaccagacccccaataatcagatcacactgacccagcttccgctgaccaggcgcccactgaccaggtcctcactgatgaggtgccaagtgactaagtccttaactcgaggacccatgatc

SEQ ID NO: 1887538 - DNA, 4001 bp, Homo sapiens
ctctaccagtgccaaaatctacacttctccgggtttgggacagcaggtgttgtttgagtagccctgaccccagggccagagggcaaggagatagttgtcaaagttctctgcctctgatcttattataaagtgtgatctggtcagagttctttgcctctgatcttattataaagtgtgatctggtcaaagttctctgcctctgatcttattacaaagtgtgatctgcctgtagagaatgaggaagaggttaccatggacctcaagggacccagcggaaaaaaccatgtgcagaaaccgaaccacctccttggctgtcagatggcagagtccctattgcatagagctgtaattagggcctgaagaagaggctatgtaggcctcctggtgagccagttgtccctggccagttgaccctgggcacagaagtttatggggagcacagattggtatccataagggatggtgcacctatctaaaacttcagaacgttgatgttttcttcactttctgtctactggggctccatgcacccagctcggtttgttttgcaaagagcaatctgttcttttctcttaaaacttctgggatctgttggcaagcttgccatattctctcttcatccctctgttcgaagaagcctcaagagttgactcagataccttgagctctttgctgtgagcatcagaagatccagagagatctactctccttgttcttctttcaaaacccaccttccttttgaactcaaataaagcagggctgtgtacatccccttgtataattctcagaggtgtccagggtgatttttttttgttttttaacagtgggaacactgacacccttcttttttgtctccaactgggtgggctattgcttgctacttgcactccttagttaagaaaaatctctctacagcaaaccctcaggagaatatcttaaacctctggtaaaatctctggaaagtttggaataggtgagcagatacaaggactgtacagaaacatcctgtcttcacagagtccttttcaatcatatcttcctttacattcactggaaatgtttataatttaggatgagcaataaatggagcataatgcatctctctgcttgtgagaatgaatttcgtgcctactgagggttcttcggccaataaaatcttcaacgaaatgagggtgaaaagactcataaatgtgttctgtgtcctgcagggagagggatgtacattgtcatttttatgccatgcataaaaagctccaagctccccaagttatatgagatattatttttgcagaggccaatatggggaatattaaattactttgtttatgtttcctaaaataaaaattttactacagatttcaaatatgtgcaaaagtagagagaatagtatagtgaccccccatgttctcatcacccagcttcaacaattatggatgaatggccaattcagatttttataatttgatctataaatatttcagtatgtatctatacaaatgtttttgtacaattgtacaaaatgtacaatgtacaaacgtacaaatgtacaaatgaggtacaaatacctgattttaaaaagttatacccacaatacaattttttacacctaaaatattaataattccttaataacatcaaacatggggtcagtgttcacattttcccaattgtcatatggctgctcttaaaatttttacagtttgtttgaacctggggccaaaacagacccactcattgtaattgatgggtataactcttatgtttcttttaatttaccttctccctctgtattttttctttctggcagtttttttttttcgatgttgttgtttttgaagaatctagaccttttgtcctggagagtgtccaacaatctgaatttcgtgaattttgccccacggagacatttcccgtgctcatctatcccctacattttctctatatccataagccagtccagatgcttgatcaggtccaggtttaatattttgtgacaagactgctttagaggtggtgctgtgtgagtttcataaggccttattgtgtgatgttaacagccatcaatgattacatcataatctgtcacctcacagaaggttccaaatggggatagtctagtctcatcgcaccttcttcatttgtcagctggaatatgctcataaaacgaaactttcccctatcagttttgtggttccactgagaaagtgtgcctatagggaaggtattacacatgctttggttttcccctttatgtgcaaggctttttttaattaaatttttaatttcaagataattgtagattcacatgaagttttagaaaataaatacagaaaggtcctgtgcaccctttaccctgcttacgccccatggtaccacattacaaagccatagtacaatacacagccaggaagctgacattagcacagccaagattccaaacacgtccattaacacaaggctcccccctgctgccctttcatagccacacttccctgactcctgcccacaagtccccaatccctggcaaccaccaatctgttctccatttctataattttgtcattttatgaatatggaacaaaaggaattatatagtctatgacctttagggattggcttttctcacttagcagaattacctggagattcatccaagttactgcatttgtcaataattcatttcttgttattggtgagtaggatttcatggtatggatgtaccatcatgtgctaataatctgttcacccattgaagatcatctgattgtaggttttttaatgtgcttacttgctgtttattatattacttagtaaagtatctattcaaatccattgctcattaaaaaaaaattagagtttggctgggcacggtggctcacacctgtaatcccagcactatgagaggccgcggcaggtggatcacctgagcacaggagtttgagaccagcccaggcaacatggcaaaaccctgtctctactaaaagcacaaaaattagccaggcgtggtggcatgtgtctgtagtcccagctccttaggaggctgaaggaggataattgcttgaacccaggaggcagaggtttcagtgagctgagatcatgagatcgcaccactgcactccagcctaggagatggagcaagacctcatctcaaaaaaaaaaaaaaaaaaaaatcaaagttaaatcaaagtttttttttttaaattgagttttaagagttcttcatatattcttaaggcaagttccttatcaaatgaacgtttaaagaatattttctcctgaactgggtctttccttttaattttcttcatggtgttgaaggtggaaaaactcaagctgtttctcctctgctgtcattccacacaataatcaacacagaagatttctgtgaccaaacgtgtgggaatttctccccaccagtgagcaagtaatcaagcctgcagtggacaggagctgggcctcctcccattcaacactgtttacctagagacagtttagatctcatgggttaagagctcagtcactgagcctgtgagggggaccactgcacccttcagtcaccagttgcaagttcgggccttcagaacttctgaatgactagctatataaatcagggctcccacaaccccctttttgggttcaattaatttgctagagtggctcacagaactcagggaaacacttatgtttatcagtttattataaaagatattgcaaagaataaagagaaagagatgcatagggcgaggtagtggggaagaggcgtggagcttccactttctccctgagcgcaccgccctccaggaacctccacatgttccgctatcaaagctctccaaaccttgttcttttgggttttaatggaagcctcattacatagacatgattaattaaatcattggctattggtgatgaacttaactctcagcatctcttctcttcccagtggttgtggggtgtggctaaaagtcctgaccctggaaccctgccttggtctttctgat

SEQ ID NO: 1887539 - DNA, 4001 bp, Homo sapiens
gaggggccggtgtgaggcaagggctcacactgacctctctcagcgtgggaggggccggtgtgaggcaaggggctcacgctgacctctgtccacgtgggaggggccggtgtgagacaaggggctcactctgacctctctcagcgtgggaggggccggtgtgaggcaaggggctcacactgacctctctcagcgtgggaggagccagtgtgaggcaggggctcacgcctctgggcagggtgccagaggcatgagttgggcatcaacaggccaccgtgagggaggagctgggccgcacgcgggctgctgggaggcaggcagggacttggccccgggaggccgccgtgggggcaagagctgggcctggagaggcccctgggaggcaagggcggggcctgcagaggctgttctccaaccagtgctagaactgtacaggccaccaggaggcaggaggtgggccctcagagcttggctggagaaagttcggggcctacaaaggcggttgggagctgggcaggagttgagccaaaagagcttgcttacttgctgggaggcagggccgggagagcccgacttcaggacaacttgggcctgcggcagtcgccgggaggcccaaccttggcgtggaggagcccaccgaccggagaccatttggggcctggagatgccatcggagggcaggagctcatcctggagaggccaccgtgaggcctgacctgggcctggggagcttggcttgaggaagctgtgggccgaccaaggccgccaggagatgggtaggcactgagtccaaagaggttgttgagaggcaggaatcgggcctggagacccaaccaggaagaagagctgggcccggagagaacgcccggagggtgcaagtgggtctggagaggctgacttgaggaggttctgggcccggagaggccgccggaagggaaaaactgggcctggaaaggccgttgtcaggaatgagccccatgggcctgaagaggccactggcaggcgggagctgggtgtgtagaagctgctgaaaggttgggagcttggcttggggggtccacagtgaggtagatgctgggcgtgaagaatctgctgtgaggcagacgttgggactgtagaggctgacgggaggcagaggctgggcctggaggggccaccaagatgcaggagctgggcctggagaggctgcaaagaagcatgagctgggcctggtgaggtcgacttgagaaagttcagggcctggagagaaggctgggaggcaggagctgggtctaaagaggccattgtaacgatggagctgtgcctgtggaggctgttgtgaggcagtagcctcatctgcggaggctgccgtgacgtagggtatgggcctaaataggccattgtgagtcatgagcttggtctgtagaggctgactggagaaagttctgggcctggagaggctgccgggaggtaggagctgggccaaaagatgtaagcacatttgcatttattaggcactttatttccattattacactgtaatatataataaaataattatagaactcaccataatgtagaattagtgggcgtgtcaagcttgttttcctgcaactggatggtcccacctgagcgtgatgggagaaagtgacagatcaataggtattagactctcataaggacagcgcaacctcgatccctcacatgcacggttcacaacagggtgcgttctcctatgagcatctaatgctgctgctcatctgagaaggtggagctcaggcgggaatgtgagcaaaggggagtggctgtaaatacagacaaagcttccctcactccctcactcgacaccgctcacctcctgctgtgtggctccttgcggctccatggctcaggggttggggacccctgctcaagtgcatccaaagcgacccttcccacaccagtcttcacagtggtcaagggcagcaaccacttagctcccaaggcatgtgcctcagctggcatttcgtcacaatcaacagtaagtggtagcttgagtcactgtgaggtcacctactggaaatcaccagcatcccatttcccactggcaaagagctcagcactgccccctgggaaaccaaacctatgcccaaatcccatctgtgtgggtttacctcctgggacccttcctaacatattagtcagagtccaatcaggaagcataaaccactcaaaagtttaaagtggtaaaatttaatacagagaattattcattataacaggtgaacagcataatgagagattggctagcacagagtaaagataactctagagaatatgggactagcccaggccaggcatggtggctcatgcctgaaattccagccattacagaagctaatgcaggaggattgcttaaggccaggagctagagaccgctctggacgacacagtgagaccctgtctctatccaaaagaagaaaaaagttagctgggggtggtggtgcacacttgtagtcccagctactcggaatgctgaagtttgagcctgggaggtcaaggctgcagtgaggcatgattatgccactacagtccagccggatgacagagcaagaccctgtctcaaagaacaaaaccacaacaaccatttacagacagaaaagaaatagagctaataagctgaggaaagatgttgaaatgtgacaagtaaagtaatatgaggtcttttgtctatttaaaataatcaaacaaaaaatggcttactaaattataataccctgtgctggcaaaggtgcagtgaaatgggcactttcttatactatgaggggtggttaaattgtgtataagccttccagggtaaagcctgtcaattttttaaaataatggagacagggtctcaccatactgccatactgcctcctccaactcttggcctcaagcaatcctcctctcttagcctcccaaagtgctaagattatagctgggaggcacccaaaaccctgtcaatttacatcaagggtaaggagaatgtccattcaccatgactcacagtaatcttacttctggggagacaattcaatctaagcaaaaggtcatctgtacacacacagtaaaaatctgggagtaactgaagacagagttggtaagtgaaataagaaacagttataagaaattaaactatggtatcaataggcacctggtaaaaggtcagttgatgttagctgctacttttttgttgttttgagacagggtctcactctgtcacccaggctggagtgcagaggcctgatcatgactcactgcggtctcagcctccctgggctcaagtgatcctcccacctcagcctcccaagtagctgggactacaggaacatgccaccacactaggctaattcatgtatttttctgtagggatggtgactccccctttgtttccaaggcctatcgcaaactcttggcctcaagccatcctcctgcctcagcctcccaaagtgttgcgattaccagtgtgagccaccacacctggccagctgctacttttatcaatattattcttattccactcaattaaaaattattattttcaaggctatgcaacagtatgtatcctacagcgtaattgtaaaaacatacacagtcgtcatccctcagtatacagaattagttccagccccccatctctgcatataccaaaatccatgcttactcacgtttcgctgtcacccctctagaatccacgtatacgaaaattccaaatgttagttgggcatagtggcaagcacctgtagtctcagccacgtgggaggttgaggtgggaggatcgcttcagcctggaaggttgaggctgcagtcagctgcgatagcactactacactccagccttggacaacagagggagaccctgtctcagaaaaaaataaataaataaataaagcaggttagaaactgtgatgaggtctgctgggcaaaattccatataagcaaagtataaattaataaagcaaatcgtgataaattagtacgattgactttctggagtttctgac

SEQ ID NO: 1887540 - DNA, 4001 bp, Homo sapiens
gatattcattagacactccaagagatatggccactgtgggcatcttgggttatccctgacggttctgaaaatcatgaacaagaaaagaccggagggctgccacaaagggccctggaatttctccaaagcaaaacttcaaccgaaagacctactaacaaggtgtatgcaccagggaagataaaaggacagtcacagagattttttttctttttaacagtggagttccagaggattattttctcacgtaacatgtttacagacttcggaggttgaggcgggtggatcacctgaggtcaagaattcaagagcagcctggccaacatgaggaaaccctgtctctcctaaaaatacaaaaattagccgggcatggtggtgggagcctgtaatcccagctacttgggaggctgaggcatgagaatcgcttgaatctgggaggcggggattgcactgcactccagcctgggcaacaagagtgaaactccatctccaaaaaaaaaaagaaaaaaaaaattgtatacagacaacaattattttaaaacctgccatccactgctgtgtaagaacatgattaataataaaaacactgtgtttgaaatgtaaaataaaggacaaatagttgatagtgttgtaaattggagagaggaagttgttctcatttccacttttgagaatgtaggaacaaaggtggaaatttataattttactacaagcctgagttaagctagggtaaaagggtagtggattagaagtcctgcttgccatacattaggaagtcacagaggaaaaccagtcctcctgtggagtgttatttaaaaagcaggaaattagactgaaggggctctagtgccctgtgttcataagtaaaaaatgtaaaacctatctcggattcacttcttataaattattttaggcagaaacaaaattcaggcttaacctgcaattaacctctgattacataaccaggaaatttccacccgaatcatacaaataaggtgactacataaactgtaaccaattcttgaatttggtttgccttctcacacgcccttttcaaaacccttccctttttgcctttcaggtggcccacatattatggctgggtgctttccatttcactaatcactgctcagataaactcgttaacgttttaacgttgactccctttactttgcaagagaagaagctgggcgcggtggctcatgcttgtaatcttagcactttgggaggccgcggcggtggggggatcacttgagtccaggggttccagaccagcttccaccatggcgaaaccacttctctactagaaatacaaaaatcagccaggcgtggtggtgcaggtctttaatcccagcttttcggggggcttaggcacgagaatcgcttgaacctgggaggcggaggttgcagtgatcacgccattgcactccagcctcggcgacagagcaagactttgtctcaaacaaaccaacaaaatgtttaacaaaagagactgggagccccaccggccacagctcctcctacgcacacacgagtcgggattctgccctgatgacccgcctggcatccctgaacaatctgggaaacactcggggctgcgtgcagagctgcccagggagctccagatagggcgccgcagggactgggcgggacgcgcgggtcattgctgcgggcccagccaccatcttgcggccagagggacctgggacggagctgcgccagcagggactcaggtcggcaacccaggagcggtgaggaggccagtcccgtcggtttctcagccagctctcccctctcgggatgctcaacccctcacactcaccctttcccaccttctggaatgtcctggcatcttagctgtctgtgcacgtcccaggacctgcagatcacagggcaacagcctgtcaccggctggggcgagaggggggcagaggtggaggacgttgaatagcagaaagcgatcccaagctctggctgcagcgagagacaaaagccccgccaaatgccggatgccacgccctcctctccaactgtgccactgattcgataaagcaccagcactcgcccagtaccactccctccacccccaggaaaacaggctaaagcagggagtgtcaaccatagggaattacagccaattaagaagtaagctgagacttgaaatgaacttgctctttcccttacctgggtctgcttgtataatgcatcttatttgctacttaagggtaagaaaagaacatttggattatttttgtttgtttgagactgagttttgctcttattgcccaggcttgagtgcaatggtgtgatcttgtttcactgcaacctctgcctcccaggttcaagtgattctcctgcgtcagcctcccgagtagctgggattacaggcgcatgccaccacacccagctactttttgtatttttagtacagacggggtttcgccaagttgggcaggctggtctcgaactcctgacctcaggtgatcctcccaccccagcctcccaaagtgctgggattacaggcgtgagccaccatgcctggcccatttgaacatattttaacaactttttaatgattttgataatgcaggaaagaccctcatcccatccctgagtacctctctcatcatgctataccacgctgttgaccacatcgtgggatggccattaggaatggggcaggggtgggggaaagcggtggctgagaatggttaagcaaaaattatgttacccaaatttgtttattttagaaagacttctcaatcattctgtgtgaagtgtgtattccagggtaattgtgccctgactgcactgcatctcaatctgacttctcttttttaaaatcactggattactgtcactaatggggtattttattttctattttatttctatttgaaaatggccaactgtcctttgtgggtgtcctgatttgatttgctgggttagaccatggaggtaagagtgaggaaatattgggtcacatcagaataacttattctcatttagagaatatataggaattttttcttttttgagatggaggtttgcttttgttgcccagaagggagtgcaatcgtgtgatcttggctcactgcaaccttcttctcctgggttcaagcgattctcctgcctcaacctcccgagtagctgggattacaggctcccaccaccatgccctgggtctgtcagggtttcatcatattggccaggctggtcttaaactcctgacctcaggtgatccacctgcctcggcctcccaaagtactgggaatacaggcatgagccaccgcgcccagccaggaatttcttaataatatataacagttttctcaatacccattttatatgtatatgtatgtgtatatatatatatatatatatatatatatatatatatatatatatttttttttttttttttgagacagtgtttcacttttgttacccaggctggagtgcaatggcatgatctcagctcacctcaacccccacctcctgggttcaagcgattgtcctgcctcaatcctcccagcctcccgagtagctgggattataagaatgcgccaccacgcccggctaattttgtatttttagtagagatagggtttctccgtgttggtcaggctggtcttgaactcctgacctcaggtgatccgcccacctcggcctcccaaagtgttgggattacagccatttgccaccgtgcccggccaataccattatatttaacagtgatagcttacagggcagggaggggacacatatgacacaaccttagaattttaatttggtcgtaagtttttttgttttgttttgtttttggagacaaggtctcactctggtacctaggctggagtacagtggcacaaccatagctaataacttggttgtaacagttccttaaaaaatatttttggcagagtttgatggctaacacctgtaatccaaacactttggaagaccatggtggaatgattgcttaaacctaggagttcaagacc

SEQ ID NO: 1887541 - DNA, 4001 bp, Homo sapiens
gaattctcttttgagtggaagaggaagaagcgttatttttaatacacatactattggctacggaggtgtttcatgcatgacaatgacatttgtcaagtatatcaagacaaatgatcaatggacaaaaagtgtggcgctctgggagggtgggggggatccatttaaataaggaatgagctagtggttacaggaggctacattctttttttgttgtttttttgatgaagtctcgctctttcacccatgctggagtgcagtggtgcgatctcaactcgctgcagcctaccaggaggctacattcttaaccctagcaaatcaccttatactcaaagagccaggaaaaagagtatatgtactaggggttctccaaagaaacagtactaatagaggagagagagagagagataataaatagatagatgatatatagatagataggtgatagatagatgatcaatatatgatagatgacagatagatgatagataatagatgattgatacacgatagatgatagattatcaatatatgatagatgataaatagatgaatgatagatgatcgacagatgaataatagatgatagatgaatatgatagatgatagatgaattatcgatatatgatagatgataggtgatagatgaatgatagatgatagatgaatgatagatgacagatagatgaatgatcaatacatgatagatgatagatgaatgatcgatatatgatacatagatgataaatagatggattatagacagatgaatgatagatgatagatgaattatcgttatatgatagataacagatgacagatagatgatagatagatgaaagatagatggatgagatgagatgatttatgatgggaattaatgcatgggattatggaggttcttctgaaataaaatggaagttttgtctttgtgtctgcttgagtacctgctcaggaaccctgaccgtagttctaagaatgcaacaaattctaatttttggattgctaattcaggattaaagagaatcctgtacattcccactttattatcaaccaccttgaatgtggaaaaagggacctgtgaaattatagttgaagtgaggggtaaatatggagaaaaagaagggagcttacctgtattcactagacttttatttagttccagggcttatgaaggggcccaagagagtcaaagcagctttctacaaattcagctgtcacattaattttctcacacactagagttgccacttaaaaatattaaaataaaaaaaccagtgttgaccatctaacaggattagttgactcagctactaagttactaatttgcttcatttttggaagacatccagcatctgagaattggacttttcctagaagttcacttggtaccttcggataagtcctggttcatctgcagaggatccgaggggaaagcctgatgggacccacggccgctctgagaggaaaggggtgctgttgggtgcgggaggaggagctgggaagcaggagagcccgggactggatccagctggaaaggggggcaaatgtgctcccggaatcagggtagggaccctctaggaatggggcgttccgagaggtaggcgtctggaacattgattaggggtccttggaggtgatttctgggaagggaaggtctggggcagggctgtgaggagtcaggaaagaaactgtggagtccgttcctcacccacctcctgagccctaggttccgaggctcccaggtcagggggttcagtggcgcaggagggtccagggcaggagtcggtgagttgcctctcaggtccgcctgtaaaggaactctgacccagagcgtgagggggacccaggaagccgctgcgcccacccagggaaagcccgccccaccccattgtccctggatccggcggccccgccgcttccgtccctctggagcgggcggccccgcccctcttcccagagtgggcggggcagcaattgcctgctcagctttccttgtgacgcctcacacccacctggacgcgctgctgcctggcctcgcctcctttctctgtcatctttctcatcgaccaatggacttggaggatggcggccacgccccctattctgcgctgtagtaggccctggttacgcctcctctggtcagtcgcacagttgcgcggtggccgacaggaattgttccccagtggtaagccgcaatctagctgacgtggccccaaccccacattccttcctgccctgcaatgtctgaagaaaccctacagagcaaattggcggctgcaaagaaaaaggtactatcgccaggtgatggcctcccccacccagccccagaatccctctgatggcaggactgcggccagagctcatgccactcccgaggcttactgggctgggcccccaagtgccactgggctccccccatcaaagtcttgtcagtcagcccctccccttaacagcccagaccctgcctggagtgagatttgcttatttaccatgaaagagatcttgggaaactgaacttgacagcttgaatcttcctcatgtctcaatctgggggactttgagtgtcacagggtaatatggggcatctttctgaagcatcagtttcccttgattctcttcagagagaaaaaacattaatggatttagggatgaccgtctcatagatttctaagagtataccagacctctctgaaatgaggcttgggctgtcctctttctgttcaattcctagatgtaacagaaaggctgccttctgccgtgaggacgcatgggaaaagagtaacagtaaagaatctggttttttgtgtgtgtgtttttttgtttgtttgtttgtttttgtttttttaaccttgctctggaagggatggggtgtttggagcccattcctttggccttggctatttggacagcgttattttataactgtccttgaaatgagcttgctaggtggaggaaaacttgttcttttctttgttttttttaaacccctgccttgccacattctgggccttagcttttacttttcttggagtgaatacatgtagtacttattattatttttaaatttttgcctcagtttcccccgtttgatgatttttatgaaagaagtttaatagaaagcattactattacttagttttgcctgaagagacaagttttgtttttttttaacacaaaggttgatatttacgcagagctattagctgagtgttgatttttctagctactattgcctctatagttgattgaatacttctaacaatgagaggtaacagacaagggagtattaggaaactttttagtgtggctaaaaccactcctattaaagttttgaaccctccaaaaaatgaaaactagcctccaaagagagaatctggagactactctttccaagtttgaactggaacgtgggctaatttttttatttttgtagttatttttataattgcttttttattatttttgattttcaggcaacaattagttagattgaattttttacatactcctccttcgtgggctagggggcagactaaagttaatctgttctgatggcgttttttatttttgtggtttgctgggttagtaaacttaatgcatttgctgtcttattagtgatgattttaagtactgcctgcaaccttatgatgtggttaagcatgtaaataggactgcggtatgcctatgacttattttgtgtccaggtagctggcctatagtattgaattttttttttagggtgccaatttgtgcctttttaatttttaatttttatatttcttcttatatctgtattttttcaactttattatagataagataccctaaagtttctctctgttgcagtgggagtaggaagaaagacagtctaattgttccaagcacacaggcccctgttcatttagctagcaactgttgatatgcccatggcccacagatctaataaagaccaggggatgcttgccaagtatttggagcttccaaatacttgcaaatacttc

SEQ ID NO: 1887542 - DNA, 4001 bp, Homo sapiens
ctgatttgcacctttggcggctgagccaaatgctcattttacttagtaacattgcctcagcctgtagcaaaactcttaacattataaaggaagagataagatccatttcaaataatgtgtgagagagaaaagagatgaaaggaaaacagagtcttttacctgcaggaaagggagagaagtggcagagttttggaagaaaggcaggcccaacagtttcccattcactcacactcaccttccgagatcccagacgagccaccagttgaaatgggaaaagtttccttgtccccctcacaggaggtggagtgggggtgtggcttgcttctttagtactccgctgctcaaacctctagggaagcatacagactggcaagttgtggggctacaaccccatggcagcatctaggggtagatgtttacagctgctgaagccccagtggacatgtggtaccatgtgctcttttagttttgccatctataggtggctttgtggtaaccagctcaattagacccattccttaacccaaagacagagggctttctgtatcccgcggttgttacctaggtgtaccagaaaaatcaaatcacacgtggtcttggagaatgagtgcaaggttttattgagtggaagtagctctcagcagatgggggagccaaaagggagaatagttttcccctgaagtcgggttattcagcggcccaggctctcctctggctgccccagccaaactctatgtcaatccattggtcggtggcctgccagagtgctggtgcctgttggtggattcctctcagcgtcgagagtttttccctctcaggaaagggagagaagtggcagccacccatgtgttcttgcactgatgtgctcctctcgacgtccaacctcctgtgtgtctgcctgctagggtcccagggtttttttaggcacaggatagggcatggtgggccagggtgatcttgggaaatgcaacatttggtcaggaaaacaaaaatgcctgtcctcatctaggtccaggggcacaagcccaggtttggagccctagccagggaccccggcctcctctacccatcactttccttcaccttttctgtatcattcaaagggaccatgcccttcccttcccagcacttctcttctgtatcaataggtgatgtttttaaaatttcccaactctagtgcaggcatggtactagacatatacatagaaataaaaccacacttattcttctggctggcaagacatagtatttttgccaaattatgtgttgttttgaagcattttatgtacccctggtcatataaaaataaagctattttgttcagtacaaacagcagcattttctggattagaaagttaatcatcttaaaagatcatcacggatttttccattgcactcatcactaattgctttggcaaaaaatttcttatctcacgcatgacaaaatcagccgcagtatctcctagtaatttaatggtgatgatctttataaaggaaataagcacatcaagggaaaacataatttttttaaaaaaaagagtaataaaactttttaaaagtcttttttaaaagactgcttttctaaaatagtaaaataaaactccaccaataaaaccaccaacaaaacagaaaagaaaaaataatgatatgatcggagctatttgatgaaagatggtaaattaaatttaaaatgattagaagagaaaaagcaatacctgtctcccgtaggtctcagtccaggttctgctatgcctttctcctggtgagccacctatttaagagtcgcttaaagcatatgttaatccaacaacagcagattaaaaaccaatgcaatctgaactatttgatctaaaaacataaataaaatttaaaacaaataaaagagaaaaagcagtacctgtgtcctgtaggtctcagtccaagatctgctctgactcccttgtggtgagttagccctttagaagtcacttggggtggggcatatgttaattccactaacattggttctggccaatgagtcaggaaggtggtaaatggcaccttttcttcttgctgatttctttcagttcctttggagtctggacattagtcctttgtcagatgcctagtttgtgactactgtttcctatactgtgggttgtgtgtttaccctgctgatatttcttctgccttgcagaagattttcggtttcattaggtcctattgatcttattctatttttatatttttgcgtttgcttttggggcattagtcatgactacttggcctaagccaatgtctagaaaagctttttggatgctatcttgtagcatttttagactttcaggtcttagatggaagtttttatatgctttgttaaagatcaggtgactgaaagtaccgggctttgtttctcggttctctattctgttccattgctctatgtgcctatttttatacttcctgcaccatttattgaataaagtgtcctttccccaattagtgtttttgcatactttgttgaagattagttgtctgtaagcatttggctttatttctgggttctctattctgttccattgctctatgtgcctatttttatacttcctgcaccatttattgaataaagtatcctttccccaattaatgtttttgtgtactttgttgaagattagttgtctgtaagcatttggctttatttctgggttctctattctgttctattgctctatgtgcatattttataccagtatcatgctattttggtgattgtagccttgtagtataatttaaagcctgccttcagatttgttctttttgcaaagtattgctttggatatgcggtcacgtttttggttttgtataaattttaggattcttttttctagttctgggaaggagaatgatgatattttgatgagaattctactgctctgtagatggctttggagagtatggtcactttcacaatattgattctacctattcataagcttataatgtgttcccatttgtttgtgtcaactgtgatttctttcagcactattttgtagttttccttgtaggaaacttacattaacctacttggttaagtatatttctaagtattttacttattaaaaattctcagggaaatgcaaagtaaaactgaggtgggaaattaaagaaaaataaaattaaaaagaaagggaaataagctttcttgtattaagctaacttgtcccagaggcagcaacaggcacagcccagacccaggaaaagtcttgataatattatttattgtattctggagactcttccagcactccttcaatgtagggagaagaaaaacaaattttcctttgttttatggtatgagtttatagattcttgttctctttaactagtaacttcaagtattctgttttatctaagaagtatggcaaaggtcatgagaagcctgagcaggcctgaactacagctctctaggcaccatagtgaagataaaccaatgcaagcctctttagagcaaaacctagataatagacatctgggttgcatagcaacagttatgtgcaatcctgagttatgaacctgttacaatttgattaactgtctttttcctgcctctgtatccctgctttcacaccactgtaagcttgcttcaagctggcccacccccttttgtgaagtgtgtataaaagtcaagtgctgtctttgttccaggccctgtctttggacgtgagtctgctgggcctgagagcactcaataaaagattctcctgttttaacccaaagcctctctctcatcctcctaaatcccacaacaaaaccacaatgagatgctatcttaatcttgctagaagcccataatttaaaagtcagaaaacaatagatgttggcatagatgtggtcaaaagggagcactttgacactgctagtgggaatttaaactagtccgaccactatggtaaacagtatggggattccttaaagaactaaaagtagaccattcattccagcaatcccattactggctatct

SEQ ID NO: 1887543 - DNA, 4001 bp, Homo sapiens
caatcctcctgtctcggcttcccaaagtgctgggattataggtgtgagccatgtggaacaggttgcccagcctaatttaatgttaattatgttaatttcctgcttacaatgccaacagtttcctatcacacacacaaaatccaacaaaactcacactcctttagaggcccttaactgtgtggacttgtggccacttcagcctcacgtctctccaagtcctgctgctactcatacatgggcagttcattttgacttcagagcgtttgcacagcctcttccatcactccccacttctttttttttttcttttgagacggggtctcgctctgttgcccaggctggagtgcaatggcacaatctcagctcactgcaacctctgtcttccgggttcaaatgattctcctgcctcagcctcccaagtagttgggattacaggcacatgccaccatgcctggctgatttttgtagttttagtagagacgaggtttcaccatgatggctaggctggtctcaaactcctgacctcaagtgatccgcctgcctcggcctcccaaactgctgggattacaggcatgagccattgcaccccaccatctctccccacttcatttcaccttttttgcgtggctgactcttatactgtaagactcaagcatcctccacctgaaaggccatactgtctagggtctcatcctcatcccactgcatttcattcccaatggtccaagggtcatgttcacccttaaagccccatcagggaccacagagctcgggacacagtcggtgttcggtaccactgctgactggccaactgaagccacaccctccatacagctccttgatcctgccgccacagatgtacctgcagccaggccctcacctctccgcaggagcctggccgggccccatcctgggcccccagccacagccaggtggtgcagacggcccacctgggtgtctagatccctcttggagcccagctccactgggaagcgcgaaagggctgcgagggcatctgtgggctgcggctcagtcggctcctgggcagggatccgctaggggggtctcatcagggaagggggatgtgaaggactggaactttgggcacaacaaaacaatgaagacagagctggctgggggtcctgggggcgcagtctagacgggaacgggatttaggaggggtctgatgggaagggaggtggctgaatgagaaaagggggtggctctgggagggcgacacaccagaaggtctggggtcgcagggaggctgagagctgagggggatctaaggcaatcgggagtctgggagggggcttagggctggggtcgggcgtgccagggtggcagaagggctgcgaggataggatccgagcttgggaaaggagtcggagggctcaggaggaggctctgaaggctgcggtgggaggatgaggcgcctgtggtttaggatctgagaggcggtgagaggggtcatggggaggctctagggacagcgtctgtggggtccgtggggtggatggggtctgagggcagcgggcgcgctctgaaggaggagagggcgctgatggcaggatctgccgactgtgcgggggtccgcgggtgggacgcgtggactaaggactagggaagtgtctgtgtgttgggggtgggggctacaggctggggaagggggctctgaggacagtgtctggggctggggaaggggtcagtggaatggggaaagggttcgctaaaggggcgggcaggggtgtggtctgagggccgcggaagagaaggacagggtgggaggggcctgagggctgggggaagggtctgagggtgatctgagggcccagaaagctctgggaaagttctgggcccacaccccagtcctggtggctttgcactcaccgttgggctagatagtggtcgccacctgactgccacatgatccggccggctgtatgagcgggaatccgaggtgcttgagcaccagtggcctcccgcagcgcctgcgcagtagcatccccttccccaacacagccccagccactcagcctgggccccacagccctgaccagtcggggctgtcactgtctgaggacggggctgtctacccacaccggactaagccctgtaaggcagggccttgggtcgttcttgtcactgttgtgttcacagcgttgttcaccccagaacctagctcaaaagaggcctcattcagtgcttttattctcactctgtcgcccaggctggcgtgcagtggcgcgatctcggctcactgcaacctgcatctcccaggttcaagcaattctccttcttcagccttccgagtagctgggattacaggcgcacgccaccatgcccggctcatttttgtatttttagtagacacggggtttcaccatgttggccaggctggtctcaatctcctgacttctgcccgcctcggcctcccaaagtgctgggattacaggcatgagccactgcacctggcgtttttctcagacaggatctcactctgttgcccgggctggtgtgcagtggcaagatcatagctcactccagcctccacctccagggctcaagccaacctcctgcctcagcctcccaagtagctgggactacaagcacaggccacccaccacacctagctaatttttttttttttttttaagatggagtcctgctctgtcgccaggctggagtgcagtggcacgatcttggctcactgcaacctccatctcccaggttcaagtgattctcctgcctcagcctcccaagtagctgggattacaggcgagtgccaccacgcctggctaatttttgtatttttagtaaagacagggtttcaccatgttgggcaggatggtttcgatctcttgacctcgtgatccgccggcctcagcctcccaaagtgctgggattacaggtgtgagccacagcacctggctagctaatttctttctttcttttttttttttttttttttttgagagataatggggtttcactatgttgcccaggctggtctcaaactcctgacctcaagcaatccacctgccttggtctcccaaagtgctgggattacaggcatgagtcactgcacctagtttcattcaatgcttattaactgagagaatggcttggctctttcttctgtccctccctcgccaagtggcctgggccgagccccttgacttcagtgccttggtgtctgctccccatgtgtgcccttcctttaggcatcccctgggatgaagaaagttctgcatcagtcactggccagacccaacccaggatggtctgcctcagaggtgagggaggcttccttagtcctccgtcaatgccctggctatgctcaatgggtgtctaacgatcttttttttttttttcttttctttttttttttttttgagactgagtctcactctgttgcccaggctggagtgcagtggcgtgatctcagctcactgcaagctctgcctcctggattcatgccattctcttgcctcagcctcccgagtagctgggactacaggcgcctgccaccacgcccggctattttttgtatttttagcagagacggggtttcaccatgttagctaggatggtctcgatctcctgacctcgttatccacacgcctcggcctcccaaactgctgggattacaggcgtgagccaccgtgcccggcctctttttcttttcttttctttttttttttttaaacacagtctcttgctgtcacccagactggagagcagtggtgcagtcataggtcactgcagcctcaaacccctgggctcaagtgatcctcctgcctcagcctcccgagctgggaccacaggcacgcaccaccatgccctactgatttaattttttgtagagaaagaatattgctatgttgcccaggctggtcttgaactcctagactgaagcacgcctcccacctcggcctcccaaagcgctgggagtataggcgagagctaccactcccagcctaacgatctctcttgaactg

SEQ ID NO: 1887544 - DNA, 4001 bp, Homo sapiens
ttaattatgtaaagtcaagcattagaatggtggctgtccaccatgagtacaacacaaatgctcgttcttaatgattcaacaaacatggaatttcattaaatctgaaataaaggtattttgagaaattgaattccgttatcaagtgtgaagtcctgatccagactcacctcgtgcacactatttaccacaaaggtggactccctattttaaatgcattcacttaaagagacctttccctgtactaattagtgtttgttaagaaggaccttctggacatagttgaaagaaagagaaaagaagcaggtgtggggaggaggagaaggagaagggaggaagggagggaggggaaagaagatggatggacagatggaaggaaggaattagggatggcagaaaggagataaaataaactctacttttaaaagaaaccaggtggggtgagtgggagggcttccctgtgaccttggcctcaggggctctttctggcttccagataagatacccctcagctttgcactgggtctcctgaggcttggaagttatgtccacagtgaggttggtgtagaggggcagccactctttggagagcaacctgtagcccagacagttgatgccatcatcagaggatccagggatcggaggattggcggatccgggacagaaggcgaggcctggaggatggggaggggcagccatgtgagcctcagggaggacccagaaccaaccaccccacttccaacactgattcacctccagggcctctgcttgtggccaggatcttccccctccagcatatggtagcctctgaaaagcaggtggggctgggagaggagcatcccgcttagtttcacccttccagagacacaggaaggcatggaggccaaacacctgtctctgacagggtccccatgccacagcccagccctccagtccagggtagcccatgtccccctcagcccagggcggcccatacctgcctcatcatgtcaggacctgcagctcctgcctcccacctggcagtgatgtcatcctcatcatcccaaccccactacacgttggagaagccatttatcttcaggtagtgagtggggtgcagggcaaacacccctccaaggcacaagctaacggcttaattgctgttgtttccccatgttctggcttgcagcacttgtaacctctgggctcctgcagcccttaacatctgatacctttacattaagatttatcatccttatctctggaccaggctgaatacacctgtgtcccggtgcatctggccagcgggtcaaagggcctagcacacagattaacaaatgaatgagttccagttaccaaagttcaatccttgaggtggacagaagacgcccaaggcgtgtctcccatcacccttcactctcaatcctccttatcaagggcctcacgggaatagtgataagatctcagaatatacaggagggagcagtttcgggaaggggggcattggaaggaagtggagggcttggatctggggagcaagcggggagagtgctccgttccttggttttgggatcttgccttacgggtctcacctgccctccatcctggcttccacctggcagggtgtgtttgtgtcagaaagacgattgtgcgtaactgttcaccgcgtccacgtcccgagagttgcgcacgcgtggagatctgcaaaacgctccctttcagctccgcgcatgcacagagaccccaccccgcaagtccttgcccttcggcctgggcaggcgtccactcccatggctgcagggcgcgccgaagagcccactctgcatccccgagacgcggcccaatcctaggaatgtgcttagcgcaggtgctatcttcccttttcacattcccaatctctttctccgccccctcaaactcttgccatactcccacaacagcagaaaatctgaaaaaaaagtccatcccatctttgcactgacagcagtgcacagcagctggcagagaattctggcacggctattgtgcttgcgcaggcgcagacgggaagcgggccggaccggcctagtacactctgggaggcgtgcgcagaatgcgcagcgctgccgcgaggatctctgggaactgtaggcccagtttgtccgagagccgcaagtgtttcgggacgacgcaacgcaggggcacctgggagtcgtaggcggatgggcccaaagccttccgggagtcgtagtccttccgcccgctcctcgtttctttggaggttggcccttccagctccagttctgcccaggtgagcgcccatcccgcggccggccggtcctggccctttgtcgcgatgacgtggcggagttgagggtctctgtatttctctcccccgcgttctggtaggcgtccctggaaagatggcacccttttccgtgatctctcaatccctctctccgggtgggagtgctctaagcagctgttgtacctgctgacccgctttggattctgcggcccagcctgacaccttctcactctcgcccttcaacctgggtgcagtgcgagtgcaccctcctctgtcctggttacaacacagagtggtcagggctggcccagggggtgctcaggaggctgtgggaacacagaggaggtgctagacccagcccagggttcaggaaagaccttacagagcaaaggacctcaaatctaccacatccaaacgaaatcccagattccctgtcctaaacctgctcctctcacaatctttctgcctcctccccactaactgtccatccaagtgctcaagccaaaatcttggaatggtcgccagtgttctgtttctctcatccgcttccctcccgcaaccaaatcttgtgtgagtctcatcgtctctatctccagaagaggcccagaatctaaccacttctctccacttccactgtctccattctgctccgagctaccgttactcctcacctgcatcactgcaggggcctcctcactgttctgtttcttcccttgccacactccaccctctattcaggcacagtgccaggaagcctgtggaaatataaatcagatcctgtcaccagtcactaccctgccccccagcttaaaatcatccagtggttcccatctcagaataaaatccaagctccttatcctgccaacctctaagcttctggtcctttctggtcgtcctcagtcacaacacactttccaatgggctgaacacagccaggccctgcccttcatgtcctttgcatttgctattaactcaatttggagcattcttcccaccctgacccaatatctgtctactcattttgttggcctcagctcaaaggcctccagccaccctaaagaaccccctccctgttcccccccccccagtcataccaccaaagataattccctcgtatttggaaagcatcttagtcatttacttccttatccatggcctggttcctccattagaacatcagtgccctgacagctgcaacctttcctatcttgctcactgctgtgtcccagtacctagagcatgctgggtacataggcggcactcagtgggtatttgttaaatgaatgaatgaaagtttgagctgagacttgaaggtaagagttaggtctaccacagtgtttagggaagtgtcttgcgcaatgagatcagcctggccaaagatgcaaggggttgaaaaaccaatgggaagttcatctggctgaggtgagtaggtaactaaaacagggatgcaactggatctgataaggacctcaggaagtgaaccccagtactaggtgactgcagattcagaggttgaaaaagctgagttgtcttccatagagaagctgggtgaaaggtggtgttgcttccgggagacggggagcttggttaggtaagtttctgccttggggtgtgagagctggtcagttgggcactgagatatgagaggcctagatgggatcttccgtggggcatttggagggccaggctggtggacattgcgattcagagtcacccacaaacagaatgagaagagggg

SEQ ID NO: 1887545 - DNA, 4001 bp, Homo sapiens
gactctactaaaaatacaaaaattagtagggagtggtggcacatgcctgtagtctcagctactcgggaggctgaggtaggagaatcacttgaacctgggaagcagaggttgcagtgagccaagatagcaccactgcactccagcctggacgacacagcaagactccatctcaagaaaaaaaaaaaagaaagagtaagcttaaatctcctcgaagtgatcattgaaaggtaaacatttaaaataaaacttgtggctgggagcagtggctcacacctgtaatcccaacactttgggaagccaagacaggaggattgcttgagtcaaggagttcaagaccagcctgggcaacacagtgagagcctttctctacaaaacgttaagaaattagctgggcatggcggtgtgcacctgtagtcctcgttactctggaggctgaggcaggaggatcacttgagcccaggggcttcaaggttacagtgaaccatggtggcaccactgcaaaccagcctgggcgacagaacaagaccctgtctcaaaaaaaaaaaagtttaaaaatgaataaaataatgaggccttaacctatgacagatagcatatcacctgctggcccatctgtacatctcattctgcattcgagaacttcagaagtagaggaccagatgaatgggagtggccctgccgccacggggctgagctccaccgcttttgtcctgctcctcctcgccaggccctgaccatctctccactgacttgtcctggccccttttccatttctgtggcctcttccctctcctccttggagagtagcctgtcctctgctccctgcatgctctccttccatcccgtctcttcctggggttatgatcccagcaacctcttccctgagcccaggcgaggtcaggtcccttgccttttcctgcaggtagatgggtgggttttcaaagatgtctggtttcagaagccggtggcatcttgtctaactggaccaccttttccttttccaccaacggcaggcttttatacctggaagagtcatgtggtcaaaaagaggaaagtcagtggttgagctctttctaaagcagcttgaccttctgggtctcccaccagattttgtccccaacagacttatttcacccagagtccaatttttttttttttgaggcagagtcttgctctatcacccaggctggagtttagtggtgcgatctcagctcactgcaacctctgcctccctagttcaagtgattctcctaccccagccttccaagtagtgggattacaggtgtgcaacaccacgcccgactaatttttgtattttttgtagacagggtttcaccatgttggccaggctagtctcgaactccgaacctcaagtgatccgcctgccttgcctcccaaagtgctgggattacaggcgtgagccactgtgctcagcccagaatccaaatttgaacagttttttcaggcttcctcctccccctacattccaagaggttgaattctgtttccttcccatgggcaattatcccacacgactacacgcacatccatctctcacttccgctttttctttctttctttcttattttgttgttgttgttttgagacagggtcccactctgttgcccaggctagagttcagtggtgcaatcgcggcccactgcagccttcacctttcgggctcaagtgatcctcacacctcagcctcccgagaagctgggccacaggtgcacgccactgcatctggctaattttttgtatttttggcagagacggggtttcaccatgttaccaagagttgtcgaactcttgagctcaggcagtccacccgctttggcctcccaaagtgctaggattacaagtgtgagccaccatgcccagccccaagtttgtttttagaaaaaaaaacctagcattgtcccttgcctataacagacactcaaatccttgtggaatgtaaggatggaggttggatgtgcctgtgaatacttgctagctgatgacacaagcaaagaatgtgtcagaacctgcgccttttgtctcctgtcctttatctgcattctgttgcccgggttactggtatggggacatctttggtgctgaggtctaggttccaatgagtcaaagggagaattcaaactaagttgtctggcagcaccccaagactgtgctgacctcacacacagctgtatcacgggagtgggcagtgcatcatctcaaatccaactcaactgagcaatggttcgggctgagtcacaccatgtatgaatcggggggcgggggtatgtggctcctctccaacaagccacactgtctgcttccctgtcacaaaacacatggagccgttactctgtgtgaggtactgttctaggagctggagacaagagtgaacaggatgaacagaaaacaagtagacaaaccaacaaggcaattttacaggaagaaaggaagtaggccaggcaaggtggctcacgtctgtgatctcaacgctttgggaggcccaggcaggaggactgcttgaggccaggagttcaaaaccagcctggtcaacatagcgataccccgtctctacaaaaagtgagataaaaagtcaggcatggtggctcacacctataatcccagctacttaggaggctgaggcaggaggaggattgcttaaggctgggtgtttgagaccagcctgggcaacatagtgagatcccctgtctctacaaaaaaggataaaaataaaaaattagccaggcatggtggtgcacacctgtagtcctagatactcaggaggctgaggcgggaggatcacttgagcctaggagttggaaattaaaatgaactatgatggcaccactccaatccagtggtcctgtctgggggaaaaaaaagggaaagaaaataaatcggctaggcgtggtggggttcatgcctgtaaccccagcactttgggaagctgaggcgggcacatcacttgaggtcaggagtttgagaccagcctggccaacatggtgaaactctgtctctactaaaaatacaaaaattagccaggtatggtggcgggcactggtaatcccagctactcaggagactggggcaggagaatcaccttaacctgggaggcagagattgcagtcagccgagatcatgccactgcactccagcctgggcgacagaggaagactctgcctcaaaaaaaaaaaaaaaaaaggaccaaaaatcaaacaacaacaacaacaacaacaaaaagcaagcagggaaattgagagagagagagagagagatgggcagggcctgtcaggaaaggcctgggacatttgaatgggtgagaaggagccactatctgaagagcgttccaggtaggggcaccagcgggaacttagcctgaaccatggctcggttgagttggacttgagatgtcgcaccgcccactcccatgatgcagctgtacgtgaggtcaacacagccttgggatgctgcaaaacagcttagtctgaattctccttttttttttttttttgagacagagtctcactctgttgcccaggctggagtgcagaggcgatctcggctcactgcaacctccattctcctgggttcacgccattctcctgactcagcctcctgagtagctgggattacaggcactcaccaccacacctggctaatttttgtatttttagtagagatgaggtttcaccatattggtcaggctggtctcgaactcctgagctcaggtgatcaacccaccttggcctcccaaagtgttggaattacaggcgtgagccactgtgcccggcctgaattctccctttgacctcatggaacctaggcctcagcaccaaggatgtctgaagctctgaagctctgaggtgggaggaggctggaggaggggccctggctgctctgcctgcagccacagggagagtgcactggagccagctgtaaagtgctgactttagttaggagctgtttgccctcagctgatggttacctcatccgttgatcatatc

SEQ ID NO: 1887546 - DNA, 4001 bp, Homo sapiens
cagacatctgcaagaactttccagcaggctgctggcttcctacggctaagtcccttttccctgcggtagtggtggtctctgatccacagaatgtcagctgttcaagtgggaaagcctgggcccagaactgagaaaaggccttttccaagtcccagagtgagctgctaagtgagatggaacaaaaccttcacctctggcttcttctcagccaagcccacattcattttccctgtttgacatttttgactggaggttccaactaaaaatagtgacccagttacacacaaggactaggaaactcaccctccggccctggtggctgcatcatctcgacttcactctgcggggcatcctccacagacccatccctctccagctgcctctgcagtgtcaggatgattgaacacaaaaggagacagtgctgagacatgccaggctttaccacagcattcaaaaggattcagcattcaacctccagcctggccattcaatgccagattatcagcagctctgaagaaggagctcaagaggcttcatcaggagtgcacagcatggcctgagctggtcatgagagtgaaggtcccaccatgtgggctgggtgatgggggagcacagagaaagggggtggggatggggtcacgttgaactaggctgggcagcagcctgtttagtaaaagtcagtgggcacacagagctaatgcctgatcttttcattcaagaccacaaggtcccatcaggggttcgggcgcccagtgtgttaggaattctccttaaaggtggccccagccctcccagcctgtcttccccgagcatacctgagcaacatcttcattgcattttagtcctgagatggggaagggaccctctcttaggggcctaatgagccttcccaagcatgaaaataaagaaaactcctgcgttcctcgaagggaaattccaggcacctaggtaggcctgaaaagtaagtaagcaagaaagcaatcgtcacctaaagccaaggaaataagtccagagatttttggtttctctacagaaatgaaagataacatctcaacatatgtccctgagttctttcacacacccagaccccactgcagaccccggtgggattcgctgacaggtagacctcggataagggggaattgcaggcagaactctgaccacactgttctttgttttaagtttattcctgagaggcttggtgggagtcaccctgtcccctagccagttaacatgtttttctgctgacccccaatttttaaacaaagcttctcttccttaactaattgcaaatcagaaaatctttgaatctacctatgacctgtaagctcctcccctttaaagatgcccccacccttttaggccaaaatcagtgtgtaccctccatatattgatttctgattttgcctgtggcttctgctcttctgaagtttacccctatatatatatatatatatatatatatttatttatttatttatttatttatttatttatttattttcagtcttgctctgtctctcaggctgcagggcagtggtgtgacctcggctcactgcaacctttgcctcccagattcaagcaattctcccacttcagcctcccaagtagctgggactacaggcgtgtgccaccacacctggctaatttttgtatttttagtagagacaaggtttcaccatgttggccaggctggcttgaactcccaacctccagtgatctgcctgcctcagcctcccaaattgctgggattacagatgtgagccactgcacccagcctacccctacctttaaacaccttcaccctcaagccatgtgggaggtcaggagctgagcagtagcttccagatcctccttgcttggtgccctgcaaataaacactttcctttttattgctgtgaaaactcggtgtggctgtcgggttttactcacctagcgagtggaccccagttcggttctgtaacagtgcctctcagcgctcagggcttcctgaggataacggctgcaaagctgctgtctccctccccagggctagctcagggtctcgtgtctgaaccacatgctttgttctgtctgtcacagttgtttttctatattagaggagaggctgcttcccaccttcctacttacatttgtgggtgtcctcccgagaccatcccacactttgcttaaggcatggggctgggcaggagaaaggcgaaccgtgaacttctaaaagatccatctgcccccacaatttggagcttgggggattctctgactccattcctttgggtgaggggaacacgtgtttagtcaacactgtccttgtttagccaacatttgctttcagaaaagtacatttcccatggagacttttattcctaagcttggttgtcccgaaaaatcttttctcctttttcacccgttaagcagaaacaaaaatgcatttctgcagggaataaatcatttgcctggaggccgaaactctagaggaaatctgtccaaatgttcatttgcatattcgagcttttagcattctcctcgtgtctccgaactggaaacttgggagaagtaccgactcagtgttccagcacagcgttttatgaaacccaaaccaagctgatcagtgaatcagtcacccagaactgtttcctcccgggaatgagctctgggagctaaccttgaaccaggaagacaagatgaggaaggagggaaggaatcactggattagagccgcctctgtcacccggtggctgataaattttttatttctctgaggcttgtctttcttatctgtaaaatgggcacactttgttttcttccatccaagtattgatcaatccagagcctgtttagcttctgagatcagatgacaccaggcacgtccatggtaatatggccatagacaccttgttttctgaattgaaaacagtttttttgtcaggggcaggggagtcacattttaacctttctgaagctgctgccgctttttcagtggaccagccgtcctcttaacaggctcctcctgcaagccgcttgtgttgaaatagcagggccttcctttggcagaggagggcagggagggggagctggtggctgcctccagctctctctctctcacagtgaggatgccacacttccccaagactgctgccctagagtcccaggagttggtcgcattctctcccttgctcatgggtcctggcgtggatgcatctccagacacccggatatttccagggctgggtgatgtcctccatgctggcgttagattccaagataagattccaaggtagattcctcccacatctactcctaactccctgcactccaggtgcattatgggatgtttgtaaagagcagttctggaggccctggactctggttccattccaggaccggtcacccatgtctttgaagtggaattcccccacccctctccccgcctccctcacccctctccccacctcccccacccctctccccgcctccccgaccatgcaccaaagatggctggggcaccacaaggatgtatttaggagtgaaatgacacgatgttgggaatttgccttaaaaatgtatgtgtatggggcagctgagagaagaatgacagaaacacgtaattgttaaaaatgaggattcattatattattttctctactttggggagtgtttgaaaatttccgtaattgaaagtaaaaaataaaatgaaaacttatgaacagagaattgaatggaggatgtgtgtaccccactggcattgataaacagctcttgcttagagcagggtggtccaggatatcatttttccaggcttccgaatccaatttactcattaacctaattgtggactcattgcagggtgcagaaaaccaggggaagagctgggcccggggaagcattttgcaggagacaacttagccttctgtgtgtcaccctctcagctcggggttcccctgccccttggggtgtcccaggacagagacatagaaggcagcttatggggggaggtcacctcc

SEQ ID NO: 1887547 - DNA, 4001 bp, Homo sapiens
ggtccagatggagtatccaggaggtgctgccatgagaggcatgtgctgtgtgtcatttcctgttcatgaccttgtaaaccatgggcagcagttttgagagttaaagaaacatcaaacccgcttgaggagggtgcttcttcccagtggctgcctaccgccactcccccacgctgtgacatttcacacagtaagggctgcctcatttctagtgaggtgaatgtggatggggatcctgccctgtgggccggggtgcaaccaccctatggctcaagcatgcccataagtcccccacaaacagtgagcccagaagagctgggggctggctctgtccattcatcaacactcaactgctctcttcatccagagctagggttcagaacaggtgcaggtggagatcggctttgagcaaggacagatggacaccaccacacactatcactgactccgttccatcccccaaagcccaagggcacacctttggcagagcctgtgttatcagagctgagaccaactctcaccacctgcaggtgctggggaaactacccattcatttgccgagagaaacacaaccatcctgacatggaagtgcacccattggccttatcagtactctttattcttgtgatggatcaccccaggaagccaggctgtaatccgaaaccacactatcaaatcaccttggggagcaagagagtgggcccttgtcatgaacatattcttttgccgaaggcaactggagatatccagccagtttggagctaagccaaaatctttgggaagagcttgagttagcacctggggtggcaggtaaagctatggcagaggaaaacggggcaggttgtcagtggaagcctggggaccaccaccaaccagggacaggtcaagaacgagggagccatgggtggaaatgagctggagtggtcatggaggaaggaagaaaacccgaggccaagggggtagatagtttcaagatggcaggagtgttcagtggtgatgaacacagcagagatgttcagccacacaaggactgaggagtgggtgtctgagatctgcctatgggaaggtcactgatgactggactgagtgagagggaggaggtcatcatgttaagggtggttagtttgttggtttatggtaggagtgctttagctgttggtggtggggagaacagagtggaggagacagaggaccatgggcaacaggaaagagcaaggagggaaggttggtcttcagtggctggtgagactggcaggaaggcgtcgccatgaatgttgctaaatttgtaggtggaaggatgaggtcacaagagcactgggaggaatgaaagaggaagctgaaaacagaggcagaaagccctgatggagggacctagggtgcagtggagatgggggcccacatgcagtgctacacagtggcgagattcttaccattagctcccagccacatgggtgggaggaggaggggtgagcagggcgcaatctctgtaggtttaaggacaaggaagagatgtgggataactgagtgcccagctgagaccagtgtgttcttatgaaccagtgtgggttctgggctgcatgggagggaggagctgccaggagggactgatgcaaggggcaaggggctggcatcactgttctgcaggtctctgggaagaaaaccaggtgtctgaagactggcaggaaaggcggctgtggtcgaggggcggacatggggatgttagagttctgagacccgtccctccaccctgtggtgacgacactattctgggacaatgctgggcgagggtggctgaagtggaagagctcgcaggctcgaatcctggctttcttgcatgagattgagcgagatacttcacctctttaggcttcccctgcaaatggcggtaatgatggtgcttccataatacggcgtgttaccatatggcaaagcagaagcaagttggagcctggaagaaatgacccatgtggtgtcttaggccagggcaatgcttaataaatgattgccactatcgtcatcgttgtcatcatcatcataatgtcatagaaccagggttctagaaggctctgtggcagggagtgggagggtgattaacaggggaagaattaggaaagaggacacgcaagaccacagtaagagatggaaataagagtaagtttaggggccgggtgtggggaggaagcattgcaggccccccaactgcatgtgttacggagatgggagcttgtttggctccaggtttctgatctaggcccagctgaaggtctgcggtagagcctggtcagctgtgagggagacagcgagtgcccctgcaggtggggcctaccctgggcgtgtctggagcatggatggacccgcatgcctgaatgcactgcaaagccgggccatgcggtgaggcagggacgggccgcaggggagtttaccatgtgtaaacccaagggtttctttcttctttgccctgtgcctcagtttccccacatgtggcataaataattggagaaggtgatgttttagttcctttctgtactgccattctctgattccaagtctccctttcctgatgtttttctgaaatgccaccccaccctctcaccctgagtggtgagaagctcaagtggacaagtcacacggttctatgggcatcaggtgcttcccctaacaaaaggatggtgcttcttggatggccgtgagcaaaccatttgcacagatcagggctgctggaatacagagtggaaacatgtttgggggaaataagcccagtcctcaaagagagatggctccaaggcgaattgtacccaaaggatggtggggaatgttccataggttttctgggacctccttgagcagtgtctgtggttggttttacctgacagaaccaaggggcgagtaaaaatgaaagtggtccagggaggaaaggagaggcagggcagggcatggcctcactgttccagctttctttatcagtgctgaataccttgacctctgcttcagatggcaagctcggtcttgcaaactggttagcaagtggggtttgttgtcctctccagtaggtttgggggcagggggaagcatgtcttgtatcatcaacccatttgtggagtcccaggaggtcttggcaactggacttaaggtcactgagaggaagcggagcccttctagctgctccccaacatgcacacctgagcctgggcatgcacagccaggaggctgaggacgtgaacttgaagaagcaaggaggtccgtcaggaacagcagaacaaggagcagggaagtgaaatgcaaattgaaaataccagttgcctcaatgagatatcatccaacaccagtcagaacggctatcactaaaaagtcaaaaactaacagatgttggcatggatgtgaacaaaagggaatgcttatatattgttgttgggaatgtaaattagttccacctctacggaaaacagtatggagatttctcaaagaaataacagaactaccatttaacctgcaatctcactactggatatctacccaaaggaaagaaatcattatattattcatcaagtatatattaatcattataatgtatacttgcattcattacagcactacatatattattatataatatattcattacagcactattcacaataacaaagttgtggaagcagccttagtgcccatcaacagttgactggataaagaaaatgtggtacatacacaccatggaatattacacagccatataaaagaatgaagttatgccttttgcagcaacatggatgctgctggaggccattatcctatgtgaattaatgcaggaacagagaactaaacaccgtgtgttctcacttataagtgggagctaatcagtgggaacacacggacataaaatggagataatagacactggggatttcaaaagggagtagagtgcgagtgaggcagttgttgaaaaatttcccatcagggataatgttcactgttcgggtaatggatacactagaagcccaattctc

SEQ ID NO: 1887548 - DNA, 4001 bp, Homo sapiens
ataggaacccatgtgcccataaggtcctggaggggaatgcaaagttggtcaagacatgggagctagacagcaaggaaaaggaattgcaaagggaagttagtagttaaataagttaccacatatccatgtaatataatactaagatagacaaatgcaaagttgtagaaaatagttaaggaatattttcaagatactgtatcagagaaatcactttacaaaacaggttgaacaatacaattatatcaatatggtcatttaaaaagtctagaaagttaaacacctgtttcagttatttattgctatataaccacctcaaaagtttatggcttaaaacaaaaaacaattagcttattatttggggggcttggcaatttgggcttggcttgcctgagtggttcttctgctgatcatattcatgtgacagctgtcagctgttggcctggtggaggctggatggttcaagatggtctccctgaaatttctggccgttgttgctcactggacctctctctccaagtgatctttaatgcgcaagcaagttgctcttagccttcagtcatggtggtctcagggcaggaaaaggggaagagaaaaagctgcaagacttcctgaagctttgtctcagaagtctcacaatatcacttccaccacattctattggtcaaagcacctcacaaggccctgcctaatagtaacctaaccactgactagcatttcaggaggagaaaaaatactcccttgctgaaaaacaaaatcaaagagaacaaaaatagaaaatacaacaaaacttccttgaccttggttttcagatatgctcagcaatggttccctttcctcagggctcttagagaacctcaaggcaagggagaaggggtaaggaatcatgagacatcagacctttcttggaacccagattggctaaattggaaaaaattattgccaccacacgagctctcatcatctaccataaacatactcagatggaagtaaaagggagatgggagtactgctaacccttcttagtattcaagggaaaggccagggtcactgatatccaggactggggactttctcaaaattcacgttaagtctcctgcggagacagctctgggaatgatgtggatcacatggaacctgacctctgagagttcccaagggagagcctctgaggaaggaatcctactcctaggttctccccacgacgtcttcccagaactctgcttaagggacacttacaactcgaaaagcctcgttccgaaaacaggtctgtcctttttctgtttgcagattttattccaccactcgattatcccttccctttttgatggccatttcactgcagctggggtctatacagctataaagcgggagaaaaaaggaagctgggaactcagagatgcagagcccaagaaacaatcgagtctaaaactgccgcttaggtgggcactccgccaggatcccctgtgtcaaacaccaggctgagaactggggacaggtgtgccctgagaagacaacgcgggccatgcttcattgcaagatgactctgcttaacataggcatggatcatagtcctcacaggcacattggggagatcttcgacagacccctcagtcccaacattaaacacagcactgcagaaatgaagctttacccgttacacacacaacaccacagacctaaaaggctcttccatcacacggccacagcagcactgtcatgatggaaggtctcaaaccctacagtgtcacacacccgacagccgaccacggccacccaaaggtcccgcatccgagcagggacaggaacacaatcacgcacctgtcgcagcctcctcgccgcgcacaccgccgccttgtcctggcatcaaacacacacgcacaggtgcatacacaggcccgagctacggccctgcacaccctgtctgcgtcccgggagctcggggcttcctcaccgtgagcgccgccctcatcccagccacgcactatgagaatttggaaggggaaccagagatcaaagttcgaaaaccgcccgggcgcctgtgggaaatgtagtccaaggccggaaacgcccggatgtggagaaggcgcgcgtagccggtggacagcaggaacgcgccgcggagacacctgggaggcatcgtccgcgtgggagtgcgcatgcgcagacgcccggccggcaaccgaaggtgaggctggtgggtcccgcgggcgcggagaaggcgggtgacggtgtgacccgtaaggaaggctgaggagggaggcgggagcctgggctggggaaagcaagaagggaagaggagcaacctgggacgaggagttggctggaggaaagtgcgagtccgggcctcagagaaggctgggagggaagcaggaaccagagcgcgggcccgggagcacctgaagaagggaaccggttgcccgaggcggggggtgagctccccagtggcaggaatttcgtctgattttcgtcccctggctcctggagcacggcctggcacacaacaggcgctccgtgtgtgtgtgtgtggcttttcgtacctgtcctgtgtgttgtggtaggggaatgtgttattctgtgtgacgttgtggaaccggttgtttatgaaagtgatagggtccctgcgtgtcttaagttttaatttaaattagatgcgagtcgatttgtgtttgagcctgtgtccgactctggagaggcgacagtgagggcattgtgagtgaaaggttgttactttttgtagaagttctgtgaaattgtgcacgacgtgggggcctatgggattatgactatgtagtgggtgatacagctatgaatatgcctaattttaaaagtatttggtgtacacgacctatgatgactgtgaatgtggcacactgtgtgacttaggtggagtgcttgagaaaccgagtgttgactaaagtatgcattgtttagattgatttatgagtattgggcattttatatatgcctgtagaatttgactctggtaattagacaagtaaaataagtagtgattttttttttttaatggagaggaagaggcaaaataattttcagagggtaagattgggcccatgcgggccgggcgcggtggctcacgcctgtaatcccagcactttggaaggctgaggcgggccgatcacgacgtcaggagatcgagaacatcctggttaacatggtgaaaccccgtctctactaaaaatacaaaaaattaaccgggcgtggtggcgggcgcctgtagtcccagctacttgggaggctgagtcaggagaatggcgtgaacccgggaggcggagcttgcagtgagccgagatcgtgccactgcaatccagcctgggtggcagagcaagactccgtctcaaaaaaaaaaaaaagattgggcccatgcgcggtggctcacgcctgcaatcccagcactttgggaggctggggcggacagatcacctgaggtcaggagtttgaccagcatggtgaaaccccgtctctactaaaaaatataaaaattagctgggcatgatggcgcatgcctgtagccccagctactcgggagctgaggcaggggaatcgcttgaactcggaggtggaagttgcagtgagccaagatcgcgccactgcactccagcctgggcgacagaacgagactccgtcccttcccttccaaaaaagatcatttattgggaaacctggtattgactgatgactgatatgcttaaatgaatagaataccactgggaccacacagaaaaaaactttatctcataactgccactctcaaaattcctatttgagagtgtgtgtgtgtgtgtgtgtgtgtgtgtgtgtgtgtgtatttatttttttttttgctggatgaatttcttctgctggaagcctgaaatgtgaaaggatacatgattagtttcttctctaattccccaacctttattttgtctcctctttactccctataggcagtctttagctctcatggattgggagctgggaaaggaatgagaagacagaag

SEQ ID NO: 1887549 - DNA, 4001 bp, Homo sapiens
gagtaatggattgagggtcactattaagatatggggaaatatcaaacggaaacattagtggctaatgctgggcatttccagagctctcatataaccacaaaaaacttaattttaggtacaatgtcagaagcagaggggtgctgagaattaaggacaggcctatgaagaatgtgggggctgttttataaagcaccgaatcttcacacctcatgaagttagcaacctggagcctataggaggtgtctcattcacactatgaaataaatcctgtgaaagtaagagatccaccaacatatatatatatatatatatatatatatatatatttttagactgagtcttgctctatgcccaggctggagtgcagtggcacaatctcggctcaatgaaacctccacctcccaggttcaagtgattctcgtgcctcagcctcctgggtagctgggattacaggtgcccgccaccacgcccggctaatttttgtatttttagtagagatggggtttcaccatcttggccaggctggtctcagacacctgacctcaagtgatccacccgcctcggcctcccaaagtgctaggattacaggcatgagccacagcgcccagcccactgactaagattttaaaggagttaagaagacagaatcattaccactataaaaaaaatcaaaacccactttgggaggccgaggcgggcaaatcatgaggtcaagagatcgagatcatcctggccaacatggtgaaaccccatctctactaaaaatacaaaaattagctgggcgtggtgacacgcgcctgtaatcccagctactcaggaggctgaagtaagagaatcacttgaatctgggaggtagaaattgcagtgagtggagattgtgccactgcactccagcctggtaacagagcaaagggaaagacctgaccatcccccagccggacacccataaagggtctgtgctgaggaggattagtgaaagaggagggcatctttgcagttgaggtaagaggaaggcatctgtctcctgctcatccctgggcaatggaatgtctccgtgtaaaacccgattgtatgttctatttactgagataggtgaaaactgccttaaggctggaggtgagacacgctggcagcaatactgctctttaatgcaccgagatgtttgcgtacgcgcacaccaaagcacagcaccttttcttaaccttgtttatgacagacctttgttcacatgttttcctgctgaccctctccccactattaccctactgtcctgccacatccccctctctgagatggtaaaaataatgatcaataaatactgagggaactcagagaccagtgctggcgcaggtcctccatatgctgagcgctggtcccctgggcccacttttctttctgtatactttgtctctgtgtctttttcttttctcagtctttcatcccacctgaggagaaacgcccacaggtgtggaggcgcaggccccccccttcaacatcccactaaataatacaactggcaaaaagtgggatttttaaaggttggggagccatattaaacataatctaaatcaggagtttattttattttataaaccgaaacccagcagtcactccctcccctcagggcattctgcaacaaaacacctgccgaaaaataaaagggtgttttacttgagtgggctgaaaagtccccgtttttatacctttaatctccagatcctatgtgtcagaggtcgggaaactacatcagccccagtccgggcgcccatgagacctgtggacggacggggaagggcctggacgcagcccgggccccagtttctgccgtggcgatggccgattgaaggccaggactccccgccgctgaccctccagtcaggagggttaggcaggcgctcccatgttaggcaggcgctcagccgaacatcccaaggttgcggaaccactatacccgccgtgcgcctggatggcatctgcagacccagcgtccgccgggctcccggaaacgtgggggcgggcttccggaaacggtgaccaatgggaaacgcgaccagctgacagtcctatccaggcagcacagaaagaagggaaggtggcagtcagacttaagtagacagatcttttagccaatggatgtgcaagagaggggaggtttgctccatgttggccagtaagaagtgcttgggccgacccgcctccaagtcctgggaggacagttcaaattatggaggaggggctggtgctaggcagcagtggcgaggggagtagtggggattagggggagcacgagatcattcacctttgccgctcagattaccaagcctgtgactttgagaatgggtgtcttccttgcaaggtttcaatctgaggctcttgggaagagggaggaattggagcctgatggaagcgctggtgagaggagcgggtgtagggagagtggagaatgtgtcagtcaggcggtgtctttattcctggcacctcacttagcctgccctagtttctcagtctattccaggagcatgctcttgaccctgcaggggcctgaaagggaatgttgctcgccagtctctgcttccttggactggattggaattggtcccacgaacttaggcattatgatatattgttgcgtttagattcacttggtttttacattgtgctttcttttcccctttcccttcaaggatttagaatgttttatttgctctgtttaattatatatgattgccttgaagatttcaccttgaattaaaattacatgtttttgcctgtctttattaatatttaaaaatactaaaataacacatgttcataatgaaaatgaaatattacaaataaatataaaggaaaggcagtattccccctccagttccactcttgaaataacgagttaacaagatgatgagcatcttcccattatgttctccacgattcatgtaagtatttacacacatacagaagcatatacagtagtccccctttattcatggttctacttcccacagtttcggttacccacagtaaattgtggtctgaaaatattaaatgcaagattcccgaaagaaacaattcataagctttaaattgtgggctgttctgaggagcgtgatgaaatatctcactgtcctgctttattctgcctgggatatgaacacccctttgttcagcagatgcacgctgtatgcgctacccttagtcggtgagtagccaacttggttatcagactgactgccgcagtatcacagcgcttgtgtttaagtgacgctaattgtacctaatgatggccctaaaatgcaagagtagtgatgctgtcaatttagatatgcagaagaggagccctaaagtgtttcctttaagtgaaaatgtgaaaattcttgactgaataaggaaaataagtcgtgtgctgaggttgctaagatctatggtaagaacaaatcttctagctgtgaaagtgtaaggaggaaaagaaatttctgctagtcttgtttgttgaaccccaagctctaaaaaatacagccacgtgtgataagtgcttagttaagattaaaaaaaaaaaacattaaatttgtgcttggaaaacataaacagaaatgtgttctgatcgacagcaattgggtcatactatccacggtttcatacatcctctgcgggtcttagaacacatctcctgcagataagggagggctactatataaagtttcttttattattattattattataaagcattttccttttttaatataacaatttgaatcagacaccacttcaggtacaaagatattaggatacctttagagtagaaagggagctaactcattctttctaagagttaaagtatcttccattatatgagcatttaagatgttaaagtacttttgcaccaaaaataatacttttttttttttttgagatggagtttcactcttgtaccccaggctggagtgcaatggtgtgatcttggcttactgcaaaccctgcctcccgggttcaagcgattc

SEQ ID NO: 1887550 - DNA, 4001 bp, Homo sapiens
cgaagcaagggatcctcagctcagaggtcctcgttcacccagcaagtgacttctgagtcagggcctgtgctggggcagggagctgtagcccagaactcttcctgaaggtccagatccactggcctgagtcaccactctccttgtccaactcatagaaccccttggtcacctctgtcaaaacagtcactacccatcaacctgctcctcttttcctgtccccacctcagagatggctccactgtcctccagactagagctctgggtctcatgctggacaaccccttgtcccatagcccatcaatccccactttctgttctctctgcctcctgaatctccttatttatttttctttctttctttttttttttttttttttttgagataaggtctcactcttgtgcaggttggagtgcagtggcaccatcttggctcactgcagcctcgacttcccgggctcaagtgatcctcctgcttcagcctcctcagtagcttggaccataggcatgcaccaccacacctggctaatttttcttttttttttttttattttgagtctcactctgtggcccaggctggggtgcagtggcgcgatctcagctcactgcaacctccccgtcctgggttcaagcaattttctgccttagcctcccgagtagctgggattacaggtgcccaccaccaagcctgtctaattttttgcatttttagtaaagacagggtttcaccatcttggccaggctggtcttgaactcctgacctcgtgatccacccgcctcggcctcccaaagtgctgggactacaggagtgagtcaccgcgcctggccacacctggctaattttttgtagagatgaggctgtcactatgttgcccaggctggtcttgaactccttggctcaagtgatcttcccgcctcaactttccaaagtgctgggattacagacacgagccacagcaccaagccttgcctcctgaatctctatcttatcccctcggcctcttccctgatccaggctccactctctcctacctgaatccctgccagagccacctcctgggctactggcttccagtctcattcctccagttctggaccaactatgaccttgtcctccactactctcaacccttccatggctctccactaccccctcaccctcaggacaaagtccaagctcctcagcctggcctctgctcatctcttcggcctcctccagccttacagttcccctgctggccatacagacttgactggccttccgcttaggcacctgcacgcagtactgctcctgcatgcctccctgtctttggtcacgctgaaacaccctccccacacccattttgcctggcatctccactttgcctggcaccttctgctcctccaagatccagctccaatggcccctcccctggaaaccctttcccgaccacgccaaactcaaaaaagtctctcctgggctcccaccgtctccgcacacccatgcccatcaacgtccatcctcccatctgacccgggctccttgagggcacggcccaggcctgactcatcttggtcaccagcatcgcccagcacgaggcttggcacaccagaagcctcaggaaatgtttgtctaactaataggtgggagagtgtgtgagtgagtggctagacgagggaatccgtgagtgagagaattgagggcaggaagggcagaacggatgaaggaacaggaaggcaggagcagacgagaatcaggcttagggtgggaggaacggatggatgaataacagatccagtatcccggtctcagtttctccaagaaagcaagatgggttcgccgggactgagctcctcccccctccgcctcaagcctcactaagcctcacggttttccacccgagctatgtgcagaatcctaatactaggcgtgctggaaagggcttacccggccagactcggagaacccgttccctcgcgagcccgctcgggcctctgcggagtggaccaggattccgatccctcaggttccgggtctattggccgactgactgggcctggcagagactggcgtctccgaaagcctatcgctgcccgagttgggctgtgggccccgcctaccaggcaaagggtcctgagtggcccagggaggtagaaggccgagtgtccattggctggaagatagtgactgacgtcatggatagctttcgccgccagactccaaagaagcgcctcgcgtgtcggacccgcctccggagggactgagtcggggtgggagccctgggcgtagacggtcgcagaatggtcgtgaatggagtttctggccccacatacctaggctgtttgctgacccgatccttgggtcttgaggaaggttggggatttgagagttcagactccttggttctgaaggaggagaagtctgggacccgaggaaggagggactaggggcccggactcctgggtcagagggaggagggggctggaaacctgaaggtttggtgtctaggagcgggaactccgggatcttgagtcactcgcccgcccagggatgacaggtttggggttcaggattttatgaggctatttatgggaagggagccaggccttacccccaggcaagtgttctgggtaatgaggcggagcttgtaatggagagggagaaggaagaggctcaggggaagctctggcctggatatgccctttcctcatcccgaaaagggaagtcagaggcaggtgctgtctgcaaaaggaacccagagctagaggagactggagactcacgtgagactaagagaaaaatagagataccaaaggggagatggcaaaaataaaacagtaataataacagagctctcttgtactgagtttactgtggcctggttctgtgctgagcattttacataattatctcatgtcttcctcgccacagctctgagagattggattattattagtagtattatccccagtttacaagtgagaaaattgaggcctagtgagggagaatccagatacagatgtaaagatacaagagagacacaaaacatagatggagataaacaaagagttacaggcccagagagaaaaaagaaaacgcaggcaacaaacaaaaggagaggggctgagagctgggactcctggggctggggaactggagagctggggacccggactcctgggtcctggggaaagcaggtccaaggatggggtctcccagatattttctcccgtgaatccacgatactaagcttgtccaacccttctgactgtgggcgtgagcctggttggggtcgaaaatagtgattaggaggtgcacttgcatcatgagcctattaggaggtgataagaacatgattcatggcggtctccttcgcctggaagggacctttcccccatggcctctgttctttgatctggacagatctggccttctctgtccctccccatcactgcatctcggtcactcagaactgtcactgaggcccattgtggaggcagtgggccaccttggggcagcaacagctttcctggtgggggtcatctctctgggtctctctgctttcccccagaccctgaaccgaccagaggtcctggcacattgcaggggctcaggaaatgctcatggaatgaatggacagagatccccgtctctgggcagctcttcctctgtcccaatccagccatcgtttttctgtgtcaccatcacgtctcttaccctctccctggcctcactggtcccctcccaccttccctttcaatctcctgtttctccttgagccactgggcccactatccccattagggagaaaccaaggctcatcttggaaggatctctcccaggggtcacctatgggatgttatgtaagggagtggcctcacagctgagagaagggttctcaagattccaattatagacacactcccagcacctcagaatcagaaatgcaagatcacaccaaacacgtgccatcacaatttgtgttagatttgatcttgcatttgcacccacacaaagaatcaca

SEQ ID NO: 1887551 - DNA, 4001 bp, Homo sapiens
tcactgcagcctcaaactcctgggctcaagcgatcctcatacctcagcctccggagtaggtgggactacaagtgcaccaccatgccccgctaatttttacattttccgtagagacgtggcctcgctatgttgcccaggctggtctcgaactcctggccccaagcaagcctcccacctcagcttcccaaagtgctgagattacaggcatgagccaccgagcacctggccaacatcctcattttagaaatgaggacatcaggtagaaaataaagaagtaagggttcttgcacagggccatgcagttaggaagtggcaaagtcaggatttgaagccggggtctttctcccctggaccaggctgcctccctatagaggatttggggaaaatcaaatcccagagtgggaaggcactctgagctagggaccaggagaccaggaaagcggccctcttgccagtgttcattcatccatccacagaaactgactgagcaccagctctggggtagacacgggcgtaagtcccagcaatacaatacaaagacggtaccttacccttctggagtttccaggcaggctaggcagaacattggggcatcaacagtctctcagtttaccaggtctgtcctcttctgccaggaagatacctgctccctgccaggctgcctccataggggactcagtccagccaggcggaagggccttgcgggttgtgttctcagcaaggaggagccgggagagaggtgcgggagccgccaaggtctcaggcaaggtcagggactgacggcaggaaagttgggggagcagcatcagaggataacgggcccaaggctctgggctcaccgcaggcactccctcgccttctccgcctcttcccggggcccagtgctgccccctgcctgcttcacaggagccccaggaagctccgatcttccttctctaggctcaaaacccctgccatggagaaggggggaatacaagttttatctatggaactggaggttacttgttgaagtcccctgatgtggggggaaaaaccaacgcagccctaatcctgaagctgagggtatctgtgaggccctggtccagagggcaggcaatggcggcccctccgcccagaggccagtctgtcttgtctctcccacagctgataagagagtaacgcgtttctcagcgccggggctgctgggtatgctttgagagggaaggaagaggggcggcaggcaaaggcagggattgaggcctgctctccccagtgctgaggatagaaagctgtttctccaggcctccagagcacagtctcaagggatgcccgccccacaccaccgcggcgggcgaggttgcctttcaggcggtccagaagcagttggctgtgtgcgtgtgagcaaggcggtccagaagcagttggctgtgtgcgtgtgagcaagcctcgagcctcctctgtttcccgccatttctcaagcatgcgtcgttccctctacctccgctcttgggccggcccgcggcctgaagctagtgcgcaggcgccgagcgttctcctaccaccatcccccaccctcattatcgggagcatggattagggggcggagacagagggagaaagatcccccaggaaaagcgcaataggagaactaggagacaggagagggaaagcggggctccctcctccaacggctctcaggcacagccacgcctccagcgctggcgccccgcctcgtctttgagttggcagaggacctggcccgcccccaccccaggcagaggctcagaggcgccccactttcccccttcaaaaggcgggccgggccgcgtgctagggcatccctccctgggaaggtgagtgggatggcgagactgagccagcacatgggaggcttcccagcacgtgggaagatcgggacttccctgctggggtgctccccgcggggctccgcactagtcctgcccgaaggacgcttttcgccacccccggggttgcctttttgttggccgcgagccctttaatgcgcggtagggggcggagccagatcttaaattctggcggttgggggcggagcacggcagcggagggagaccagaattggttagggagctggacccagagaagagcaagctcgggattgggtaataggggggcccgacagtagtgtgtagcgaggattggccctccgggcagggcctcgcggctggaattggcccccgcgggaggaccgcggggaattgatggagttggccgggggaacggagcccgccgaggccgctatggccccggcctcgaagaatgccaaagagggctcaaggagccacggtcgccggcggtggcgaaaagacaaggccaaaggtgagcgcgcggagaccggcagcagcccggaaggaacctcgtacatcctacggggcagtggggacagcgtggactggcccactgccacagggagttgggggggtccgcggactggcccattgccgcttgcggggacaacgggatgatccattgtgagaagggggtgatgtgacagccgagaggcccaccctggcacagggactagctgacgcccggatcggcttgggagcagagtccggaatgcgagcttcgtggaccagggttcccgctcggattccgtattcgctgtgtgaccaagggcaacggatgccctcagtgtttcccacctggggaatgcttcaagcgccgatgttcagggctccagcgctcttgagaggataagggggaaggaggttagcaggtgttactcaaagaggaagtctagcggtgagtcaaggagaggtaggaggaaggggtgcccatagtggagagtgcagcggggccagtaaagttcatcgcagtcccggcctcccacccggcaagtcagtccatccatccatccattcattgtcagtcaacccgcttcagccggctccactggggcctagccctgacccctaccctttccaggacaacgggccctggcttggcttcagacctccacacctgcctcagcaaaagggaaggcctcatttctctagggtgtcacattattttcaggtctcaaaaggcggaacaaaggctgacagaccaacagaaatgctgcaagcctcaggcaggggcaggtcctcagttacaagcatttatcaatcagcatggggacccgtgggaggttcccatgcaggaaggaaactaacaccacccctcagccccagggaccccaaactcattgcttcccctgccgtagaacacatcattagcccagaatagacctggagttggcttcagacacacgcaggctcagacaggctcagagggcagacggactggagcccaagggcactcgctgtcacagcaagacactgagcctcacaccagtatagcatacccagaggcagtacagactgtagttaagaaacgtgggcgtcggagatccggttcctcaggctgggagctgtgatgttctgggcaggagactccctctttccctgcctcagctttctgagctctaaaatgggtatgatgataggagtacctccttttgtgaggttagaatgaatgtagagcgtttggcacaggcacgcagcaaaccctcaggagaagtgaaggttattgttactgttagtccccaccggacggtgaacatcctaaaagcagggctgtatctgccttgtttaccctgtatttctagagcctggtatgccaggcaaataggcactcaaatatttattggattaataagtgaaggaatgtgtgaactgtaacagagatcataataatcacgcttcccttagggttgtcatgaggagtcagaatccagttgggcagggctccctgcaaaacgagccattcacaaaggctcattcctgcaaactccaagatttgcctgtcatttcctgaagccccgccctcgtgccaggctttagataaattaatcagacctcactcctgcctcaagggcatctgggctggctggagcaatcctcgtcatcagtttcatcttgccagtaactggatgaggctag

SEQ ID NO: 1887552 - DNA, 4001 bp, Homo sapiens
acgatacgaagaaaataaaaagagagtaatacaattgagaattagggagatgagtcacagctggctgttaccaggatgtgacatctgtgctgtgatctggatgaaaaaaagaaaaccctggggctgtacaaggaagaagattccaggaagaggaaacaatacgtacaaaggccctgaagcaggaatggacttaccctgtttgaggagtggctggggtccagaaatgggcaggaatgacaggagatgagcttgagggactgaggtggggtgtgggataggacagaggccagtcctgctgagttttctaagctgtgagctggaatttggattttactttaattacttgggaagccagtgcagaatgtgaggcaaggacctgatgtgagatcctaaaagtgcccttggctgcctgctggaggatgagctgtagggggctggagtggaagtggagagacactctcttcttacttctgtcactcttccttctccagcctctctttctctgcttgatcctgagatggaaattgtggctgtaccatccatagattgctttcctctcagtgcccactctgactgggttcaccttcctgccagctggggcctgtcccaacaccttgccccttccaccttacctctctcatggtcctctccctcgaattcagcctgtcctacttgaaattttcctctcccttgaattcagcctgtcctacttgaacttttcctctccctctgaaagggctactcccctttgcccacccacagtgagtgccaacaccacccaacaacaaaagcccaacccacaggccagctttttaaaatgatcctccattactagtggaaatatcttcaaaatctctcttgcccactgctcactcaagtctagcttcctaaatggccatgctttctttggtatcaccacctacagtccctcagtccctttttttgagacagagtcttgccctgctgcccaggctggagtgcaatggcttgatctcggcttactgtagcctccgcttcccgggttcaagcgattctcctgcctcagcctcccaagtagctgggtacaggtgccctccaccaagcccggctaatttttggtatttttagtagagacgaggttttatcatgttgcccagactggtctcggaactcctgacctcaggcgatccacctgccttggcctcccaaagtgctgggattacagctgtgagccaccgcgcccggcccgtttttgtttgttttaatgccgggtcttgctctgttgcccaggctgaagtgcagtggtgcgatcatagctcactgcaaccttgacctcccaggctcaagcaatccttccaccgcaacctcctaagtagcggggactacaggcgcgcgccatcacaccgggctaatttttgtattttttttgtagagatgtggtctcgctatgttgcccagggtggtgtcgaactcctgaactcaactgatcctcccgccacagcttcccgaagtgctgggactacaggaatgagccaccgctcccgaaccgctccatgcatatcgatagaggaaaactcacagggtgcgtcgctggtaacccatgctcccataaagcctggcctctggaaagagacttgggaacgagccctgacgttctcagccgtcgagcttcacagagaagggtagctcgaattaggttccttatcttaaagagaataacagcagtcactttctcacaatcttgcgaacgccaaatggaaggatccctcgagagcgctgagaactcgccgagctcctcccgggaaacccggtaccacgaggcgccattttgcggatgggcaaaccgaggcccgcggggccgcgacttacccaggcctttttgcagtgggaggcgacggtggaggagggtggtctgggaccgggacaacaaagtccatcctgccgccggcttcgacgcaggtgccagaaaggtcccaaccccgcccaggcagggcgaggcggcgcggcccaggaacctgtcatggcggcgccgctgcccgacgccggaagtgcccgcctggaactacagctcccagcagaccccgcggcgcgctccggtcgacgccggggaagcagccgccattgtccgcggctgaggtgaggcctttgctcaggctgtggggccgccgtagctgcggggcttggggggtcaggagagccggctgggagaggcggcgtcagggtgggtcctgcgcctgccctttccgcgccggctttgcgccgtcgttgccgtcggttctccagccagcagcctgcctccggcctcccgcctccgggcgttcttcgttttctggtcggacgggcctgggtgaactctgctgcacgtcggctccgcgggcctttgtccccgaggccgcgccgggagctcccaagcgcactcctgggccggacctcggcgcgggacaaaagccaaacgccccaggcgggcagaccccgatcctgctgcgccgccttcaagggggaccgccggccgcgagccaggtgaggccgggacgagcttttgcagcgtcgcggccgcgtcggtcttgaggaggaaatttgggtcgggagctctggaagcaggtgataaggatgcttctgaggccattgatgggacgaataaccccgttcgttccccagccgtcgtttctccccctgccagttcacacaaagcactgtgaaggacgtcagacctgggttggaaacagctccgggttcccttaaacatgcagtgacggcggcggtcactgtcaagttgcaaataatggtgcaaagtacggtttgcattctgcgttttcgcgctgattccggtgctcctgaggcccactgtgtgttctagtgctttatacacatacccaggaatccattcgagaggttgctgacttgtacaaagatctggaacctgaggagttaggggtctgggcgccaggcccatctctaagtcctccacacacacacaagcttaggcttagtaaatcttggaggtgaattttttttggaggtgggattaaatttgcataacataatgttcactttaagcacttaaaagtgtgcaattcaccggttttattgtatattaataaagttgtgcaatcatccccattatctaattttagaacatttcatcaccccacaaagaaacccttgttccccttaagcagtcactccccatttcatttttcccccagctctaggcaaccactaatatatgaggattgcaagttgattttacaataattgtcagattaatccaaaagttccatctgtgttgtgactggctgtctcttgggaatagctgacaaatttgtaccctctcattcaggatcatgctcttttttccagcttatgcaaattacctttcatttctctccaggaattgtgttacttttttgacatgtaaattctcttttcttacgatgctccttacaagtttttttgttgcttcggtggatggattcccttctttgttcccacttggtcttctgtgagaaaggactagttttgtcttttttcacttttgtcactaggttgggatttgctgtgttcctgggcaggtgcctggtcaatcagtcctcgggatggcagccatcaacccgtgggcctcctggggtgagtccaagttgtgtttctcctgggcctcccctatcattagctgctgcagtcatgggtcagagctggtgatgggctgaggacttttgaggatggaagggggtctgtctatcttggtacaaaattagaactgattggtggtaaaggaggaaaattgttggcataaaagacactaacttttatgttttatagtcatctcctgagaggtgtcattagttttaagggatttttctggtggtttgtggggtttcctaaacaacagtgatacatataataaaatattgtctctactgctctcatatatatttttacctttattgtttttacttatatagcattggttggtaattttaaaacggtgttaattaatagtgactcacctgtgcattgcctgt

SEQ ID NO: 1887553 - DNA, 4001 bp, Homo sapiens
agagacaatatataaatgagtaagcattggctgttttcaaataaaactttatttacagacactgaaatgtaaatttcacaccattttcacatcaatagatattcttcttttggtattttttttcccaaccagctaaaaatgtaaaaaaatcggcaggcgcggtggctcatgcctgtaatcccagcactttgggaagccaaggtgggcagagcacctgaggtcagaagttcgagagcagcctggccaacatggtgaaaccctgtctccacaaaaaaacacaaaaactagctgggtatagtagtacacagctgtaatgccagctactcagaaggctgaggcaggagaatcacttcaacccgggaggcggaggttgtagtgagtcgaaattgtaccactgcactccagcgtgggcaacagagttagattccaaaataaataaaagaaagggaagggaaggaaagggagggagggaacaaggggagggagggaggaaccatttttagctcatagactatatctggcccacagattgtagtactcctcgctctcttttagatcatactcaaaaaggtgcagagctgggactccaacctaggtaagacctgaaacacaaggtcccaggcagagagacgaccaagtgcaaagacccttaggttggaatgagcttgtgctccaaggatggaaagacccacgcggctgaacagcaatgagcaagggggaacaaagcagggcatgggagccaagttcaggggacttcataaacctgaatacaaggtttaggatattccaagttcagctgagagccctctggaagcactgagtggccttgatatttccattttcagtctatgtgtatatatatatatatacacacacacacatatatatgcacacgtgtatgtatatatctgtgtgtatatatatagataaaaacaaagtatatatgtgtatatatatgggggaggttcttgctgtgtccctaggatggtggcagtggcactgtcacagctcactgcagcctcaacctcctgggctcaagtgatcctcctgcctcagcctcccaagtagctgggaccacaggcttgcaccaccacatccgggtaatttttgtgtttttgtagagatggggtcttgctctgttgcctaggctggttttgaactgagctcaagcgatcctcccaccttggcctcccgcagtgctgggattccaggggtgagctaccgcgtctggctgattatatttttcaaagactcctcagcctgcggccatgtgcagaaccaagcctggggcttcaaaagaatgcagcaaaggatagcagagaggccgctgtccaagtcttccatgagatagatacggacgatgtggcctagggtggtgacagcctgggggtgacaatgggtggctctgggctgtattttggaggcaaggccaagtccgaaggatttgctgagagattcatagcaggtgagtagagaacaactccagggtgtccaggaccctcccatgagccttgtgagtgaggctgatggtcccattttacagatgggtaacctggaggcgcgcggttcccctcccatgagcttgtgaagttgattctcgtagctccgaggggtcgagtccctcgcgccggctccccccgcccccaacgccagcacctgggtcccagggctgcgccccctcctagagcctgaccacgacccccgcccccgccgatgagctctgatttaccccccaatcccaagcaccccgcgccctctcgccacttcccccgtggtttcaggaaagcgtttgccgaaggtaccggctcctaaggcgggtaaactgaggtaggaggcaacgcgtctcccgcccgcgcgtgtgggaagcccccgcaggcccggcgatttacctggaggaaggcctcggctgcggcgccctgaactgctcactgtcccaccgcgggggaaccccggaaaacgagtgggaaaacgagtgcttcaagacccgcctcgggccgcgcggtgccgcctcactaaaccttagtcgctgccactgcgcatgcgcccttcccggccctttccccgccctctcagtcggcgggaaaaggaggcgggagatggctcgtgcgcaggtgcgtgctaggagcgcggctcgtcagggcaggctgctctgcagggcaggcgatccggggctcgcctccgcgcggcattcagcgcgcaggcgcgagctggccgcctcacacggagtcggcttgttaagtgcgcacgcgcgggagtttctggcagaaagcaggcgagcctgggccggcgcggggccttgtgggagggcttaaggaagtaaaatggcggacctggcgaacgaaggtaggggaggcgccgttggggaccggctggcggccggggaacgggcggcgggaggactaggggccacaagcccttggggggagcaccgcagagtgcaagggtttcgtccgctccaggctagcgccgtggcgggccttgcagccgccccctattgcgtcccctcaggccgggctcaccggcccggcccatcactcccggcaaccccagccactgcagccgtctggctagaggagccgggtggccatcgggatcgcagccctaaggcccctctgcgtcgcagccaagctcggggctgaagggggcgggaggcgcggccccagtgcttcggccacggatgtaaatagaccttagggcctggttgtggcccggagcgcgccacgctccctccccgccccctcgtcctccgccacccggcatctccccttccccggcctggctgcctatctcctaagcccgtgaggccctcgtcctccgcgggccagccgcacaccgcggacggaggaagcccaggccgttttcaccccgtccccgccccgaacttcggcccccacttcccgccagttccccccggatccttcggggcgcttcgtctccccctcatttaggccccgccgcaggatctgggccgccgaaaaccctggctgctctttggccctttttgctgcacttccagacaagagaccgtgcgagtccctcctctgtggagcgctgacagcccacctgagtgtttttgacaaggttacacttccagatcccccgagaaggcaccataaggctgatgtctgcttccatccatagtcgtgttgccatcgctgtagcttcaagacttctgaggcctatttttagctcccccccttttctagttgcacaaatgcaggcaagctctctacctgtctggctctgattcccccattcggtgctccctgtgactggagggttttccctaccgaattgcagtaatgaatgaatgatgataggaagtgcttggtcttgtggagcatttagggtagttaccaggtgtggtgcaaagtcttgacatactgttttccctggtaggaggtatagatactgttagccccattcacttgatgaggagactgagtcaacgtggttaagtcgcttatccaaggcgtgtcacacagctgggaaggagcagggatgtgaaccaagatggcctggcttcagatgccagaccacgggtgctcagtccctgcagattctgattctgtgtggtgttgggcgggcgctgggcatctgtacaggcagcagcacaggttctctccctgattcttggccattttattctattttattttttgggacggagtctagctctgtagccaggctggagtgcagtggcgccatctcggctcactgcaatctccgcctcccgggttcaggtgattctcctgcctcagcctcccgagtagctgggattacaggcgcgcaccaccacacccagctaatttttgtgtttttagtacagacggggtttcaccatgttggccaggatggtctccatctcctgacctcgtgatctgcccgcctcggcctcccaaagtgctgggattacaggcgtgagccaccgcacccggctgctacatctctttttttaagataaaggagcccatggagggttgcagcattccaactcatga

SEQ ID NO: 1887554 - DNA, 4001 bp, Homo sapiens
ggaggtgttgggcagcatcaaaggtgctgggacatcccagggtggtgagatccatccacgatccagctccggtggagaaagggcccatgtcaagccttgttctgcaccccaagcattggtggtaggactgggtcctggctgatcgtccttgttcccagtggggtacatgtgagcccctgccagggccaagtccttctcccgaacccagggtcctgggaactgcagatcccggggggattcagcccttctcccactgtgctggcagaggcactcctgtgacgctgaatacagtgaacagggacattcccgccactcggggacagatgggcacaagggaggggaaactccatcaggaagtgctcccctgggcagaggcgcccactgggtgctgtgggctcaggagggggcggggcaggagctggtgccaaccgggaaccagagccccacagccatacagcccattggtgacaaggtcctgagaacacagtggccaggtgtccccaggctcctggcccctccgacgacctcaactctgcccagcccggtccctggccatcagcgacgctgtccgccccccgtcagatcccatgtgtgccatgtttatcatcagtgttttgtatttttgtactgagtatcggagcactttacagaagctgactgtacattcctgttctgttgtgaagagaacattcccagaccctggcaccctcctgagccggcgtgtgccggtccagccctccgagatgccacaattccttggatgggggagaagttcaaggaatttctgctcggccacgcggtgggaaccccgcgtccccgccatgtggcagaggggtctcagtcgtgctaggcatcgggcggcagcgccgacagcccttccctcgccagtgcccctcggccactcctgggttggagcccgattttatttgtaaagttgacagtcgagcaaatgttcctattttcgtgggatctgcacacgtctttgtcagttgtggtcatgatcttagtcacctgctaattatttttacaatgattacaacatttcctcactgcgggatatttctgacccgctttagaacttaagacctgattctagcaataaacgtgtccgagatgagcggtgactggcgtgcacgttcttggaggttttatttgaggattttcttctgcccaaacgttgctgcaggagtagcaggttctgttgggggctccccatggctcctgcccctcagctcgctcacctgccctccgtgtcctgcttaacgctctgaagaccccttcaggtccagtccccaggagttgttgggggttttgtttttgtttttgtttctgtttttttggtttgtttgtttttttgagacagagtcttgctctgtcgcccaggctggagaccagtggcaggttctcagctcactgcaacctctgcctcccgggttcaagcacttctcctgcctcagcctcctgagtagctgggattacaggtgtgcaccaccacgcccagctaatttttgtatttttttagtagacatggggtttcgccatgttggcgaggctggtctcgaactcctgacctcaagtgatctgcccgcctcagcctcccaaagtgctgggattacgggcacagggcaggagtggggcgtggaggtgcctgtggagggtcctgcccaccgggtacacttcaggctttggtggcgcctccacgaaaatctttttgcttttaatccacaataaccgcaaaggctggaactttcacttcctccatctggggtgagaggcagcttggccatgagtatgaaatcatcatttccacctggtctgagtcccggtccagtgaggcgaggaccctgctgtttcaacagagggtttcccatcacaaggggactaggtgtaaagtcgatcactagctcactaggaagcgcaaaaagggaactctcaggcagcactgtccaccaggaagatgatgcaggccacgtgtggaatttttcatttttagtagccatattaaaaaagtaaaaggagggccgggcacagtggctcatccctgtaatcccagcattttggggaggcgggggctgaggcaggaggatagcttgagcccaggagttcaagaccagcctgggcaacatagtgaaaccccttcacagaaaaattaaaaaattagccaggttggccgggcgcagtggctcacgcgtgtaatcccagcactttgggaagccaaggtgggcagattacgaggtcaggagatcgagaccatcctggctaacaaggtgaaaccccgtctcaactaaaaatacagaaattagccgggcgtggtggcgggcgcctgtagtcccagctactcgggaggctgaagcaggagaatggcgtgaacccaggaggcggagcttgcggtgagccgagattgcgccactgcactcagcctaggcaatagagcgagactccgtctcaaaaaaaaaaaaaaaaaaaaaaaaattagccaggtatggtggcgtgcacctgtaatcccagctacacaggaggccaaggcaggaggattgcttgagcctaggggttcaaagttgcagtgagctatgatcgtgccactgcactccagcctaggcaacatggtgagaccctgtctataagagcttaaaaaaaaaaaaggaaatttgggggatagaaaaaagaaatgaaatttaaaaaaaaaagaaaaaagggctggacgcagtggctcacgcctgtaatcccagcactttgggaggccgaggcaggcagatcacctgaggtccggagtttgagaccagcctggccaacatgttgaaaccccatctctactaaaaacacaaaaatcagccgggcgtggtggcaaacacctgtaattccagctactctgggggctgaggcaagagaagcggttgaacccggaggcggaggttgcagtgagccgagactgcacgattgcactccagcctgggggacaacagtgagacttcgtctcaaaaaaaaaagaaaaaaaggatgtaattaatttattacatttttatttatttttttgacatggagtcttgctctgtcacccaggctggagtgcagtggcacgctatcttgactcactgcaaccgccgcctcccaggttcaagtaattatcctgcctcagcctcccgagtagctgggattacaggcacccaccatcatgcccggctaatttttgcatttttgtagagatggggtttcaccatgttgaccaggctggtcttgaactcctaatctcaggtgatctgcctgtctcggcctcccaaagtgctgggattacaggcgtgagccaccgcgcctggtctattttttcttcattgtggtcaaatgcacacaacataaaactggccagttgctattctcctgatggtgggcattggagtgtgtgtgtgtgtgtgtgtgtgtgtgtgtctccccccaccctctgatttgctccaccccaaccccagccgtcctctgacctctgcctagctgacccctccactgggatgcccccagccttcctcagcactccttatgggccctggggggcttggaggcaccctaaaatgagatgttctgcaaagagggcctgtagtggctgggcacggtggcccacgcctataatcccagcactttgggaggccgaagtgggtgaatcacttgagcacaggagttcaagaccagcctgggcaacgtggtgaaaccccgtttctactaaaaatacaaaattagccaggcatgcttgggcgtgcctgtagtcccagctactcgggaggctgaggcagagaattgcttgaacccaggaggcggaggttgcagtgagccgagatcgcgccaccgcactccagcctaggcgacagagtgactctgtctcaaaaaagagggcccgtagtctttaaggttcacaaaggggtctgttcccagcccctaaaaggttgaaaaccactggaccagaatgggcaacccagggacagagtagtggtcaccaagcctgggggctgcgggtg

SEQ ID NO: 1887555 - DNA, 4001 bp, Homo sapiens
cctggtattcattgtctagcaccaagatgctcagatcaaattgtttgccgtccttgaagaacacattgtggcatctcccctcacacttccaggccccacacacatggctgtcaatgaccaaacaatggccaaagtgcactcagaaatggaaggcgatgtctgagttctcattcatcccagtgtagaattccacccgcagctctgggtcattgctgagggcaaagcacacggagtgttgggcaggcccctcccttgtaggacacacactcaacacacacacaaatcccttccttcttttccccaaggcataaagaagcctccctgatctctctggtgatactgcaggcctggtccctgtggggctgctttagctcctcgtatatcccccaggtggggagattctcttcccctcacaagatggaaagtgagccacagtcacttacctgggtctatgccttgtccattccctgaaaattctgtgccccttgataaagagccacagccctaacccctgagtgttctcctcccttagacctcatgactggcccacagttcagccactgcaggtttcatgcttggtgctggagggtctccaggacctgcgcctgcatggttcctccatcctgccaactagaaatttccacatcactcacatgagaccacctcctgagtaaatattctcccttcttttccacccctgtgccatgcagtactcacatgaaagggaggatccgtgtccctctgattgtcatgcaagaaccaatggacgaggacacgccttctgtgtggcacctgctaggggattgagagtgggtgaaaggggctgggccaggtgtggcctccccttttgtgacagattaccatgatgtagaaaattagagatcaacaggcaaactgtgaggacttccctctttcaccctatcacagtcagaactccatattcctaaagacatgagggtctcatagttaggagctaggattcaggagccaggctgcctggactccagtcctgattctgcctcttactgacagtgccatcttagatccatacctgaactctgcctaactgtttcccaggtactaggaagattatttaaaattctttttttctgtactttctttactttttattttttatctttattagtaattcttactaatgggtgatcttagtgatagagaaattaatatctgtgaaaacaagacttgaggatctatcagtggagaaattcaatccgtaagaagcaacacttgttgaaagagagagggaaataacaaaagaacaggaaacccctgtgtgtgggatgcacatgcatcactatcgtcaagggccatgggcatctttcccagaagttgtaaaaattgttgagagcacagctgcagcacttggacaaatgaagagtgcgggtcagggaagtaattagagacaacctacaagtggataatttttcttcctttctgagacatggtctcactctctcacccaggctgatgtgtagtggtgcacccatagctcactgaagccttgaactcctgtgctgcaggggtcctcacaccttggcttcctgagtagctttggtgaaagatgcccgccaaggctgggtgcagtggctcatgcctgtaatcccagcactttgggaggccaaggaaggtcgatcacgaggtcaggagttcgagaccagcctgaccaacatggtgaaatcccgtctctactaaaaatacaaaaattagccaagcgtggtggtgtgcacctgtaatcccaggtactcaggaggctgaggcaggagaatcacttgaactcgggaggcgaaggttgcagtaagaaaagattgcaccattgcaatccagcctaggtgacagagtgactccgtctcaaaaaaaaaatgcccaccaagttgcctgtctgacacttaaagtttttgtaaagacggtgtctcactattttgcccaggctgctcttatactcctggcctcaagttattttcccatttttgcctatcaaaatggtaagattatagacatgagccagcaaacccagctacttggatgattaatatccactgtaaactctatctgaactgaggctacccttgttcctttccagtttgaggtgattcagtctctaaaaccacagtctccaatgttcttcctcagagagccaggacttgcacaccctcctgacctacaatgggaatggcagccttgggtgggagacaggaaaagacctgaggatgagaggcaggagatcatggtcactatgtgcagaccccacctgagggaccattgttcccatagtctggattcctcttttccactctgcctgggaagagacatctacagatcatacattctgctctcattaatgctcacaaatgagtcattggtaactcccagtccccaagatccccaccagttctgccacccgggatccacactgacacacatgggaagatgcacagctgcttcatcagaggccctgctgtgtaaggaggaaacttcacatggacagaaggccacgtgcatgttcccagttcaacacctagtcacatcccatcacacacactaccacagtcacacagagccacaccactcactgagtcacacatgcctgctcactgtccatataaagatgctcatgcattggtctgggtgtgctcacacacactcacatcacagacaggaagacaaaacacagtcaccctcttacactcaggcacgtcccacccatcctggtgggctttacaccttttacctaacgtaacatcatctcagcagagttgactctcatcagacactatcacaccctcacagagggttacactggtccatgggccacacctgacaccccacaaacatctcagacatcatagtcccagggtctctgtcttccacacacctccaatctcagtaaaacattcacaatagaaactctcatattttcctctcataaaatctccctttttccaccttctttaatgtgacttgagattattgaaggctgtgcctttttaactcacaggtagtggtgacatttttgcttccttgggttggctcttctgaattgtgtccaggcttccatgtgaatctctaggagttgcagcatttaaatggtccctgtcagccctgccctctggcttcattcctgattccaaagccctctcagcaagaattccccacagggtgagaaagggtaaggtgtcagaaatagactcagtcacaaccacacttgcttgcaagtctgtgtctgtgatgcagcagaaatgacagtgggggaggcaccaggaggaaaaagaggtcaccagggaaatgcacagataaggatgatggagtgaggttgaggggttgtaaagtccagcctccatgcctctctttaagctttctctccactgtgcagaatctaccaagaatgtgtgcattttcctaatttgtacaatggtaaaaatagtgaggattctggtggaaattattggcaacggaaggtaatccttctttttgcctatagaggttctgggagaacaatggtcttgatcctaaacaggacctatggaaggaggtagagaaagcccttgtgtcccccctggtctcacactggttcccttggctttgccaggtgaggccagttcccatctgcctctcacacagctgggctctaactccacccttttcttttctgagtgtccaagggtatcaaaattttcagagacactctttcccaagaagatttgtggagaaagttgaatttcttgtctagttcttgatttgtgtgttccttatttccagactgtgtgaggtacaggtgattggacttcagtcacaatgcagttttcttcaactggtgtggaggactcaagttctctgttcatgatgaaaggaagcagccttaaaacatatattagaatttaaaggtcaagtgaattcgaatttcctttctcccttgtttctttctccctcttacttcatttttctcttcagttttattgccagtgaatttaaaccattga

SEQ ID NO: 1887556 - DNA, 4001 bp, Homo sapiens
attatgtttgatttattacagataccccatcagcctgagtctcttaaaggcctttatacacatatgtctacacatagggatttggatgatctcgggatcccacatcctcgctgtcccctgtccccccgcaacatcccccaccaatacctttctgaagttttctagtccctcctttttgtttgtgctccttaaagcccagccccatgcctgactttggttcccagtgagcattgtacatttgtggatattaaatctttggcaaagtcatttacctgggctggaatagggctcttggctgattctttttcctaaacacccacccaatgggagaggctgatactcaacatgcaaaccttgtgttttatttctccaggcgaagggatgttggaagacattctggaaggggtggggtgtgaagatttacaaataatctttgaatatctgcttcatgataggtcttggaggtgccttgtgggtgtggctttggggggatggttacgaggaaattgtggatattaaggaagtcaggaaaggaaaagatcagtcacaattcaacaattcagagaaagctcctaagggactttctggctgcttgatgcccagaggccaggccctcacttcgtattaaggctcaggactgtggatagagaatttaaaggggcaccaaaaaaaacattaaaatagataaacatatttttaatggaatacctttaaaaatgcaaatcaatgcacaaagaaaacgcccatgttgaacaaaatggtgacaattgtgccttctcttcaacaccaccccaccctccagaagtttccttcaagccgtacctgtaagagtaaaaatagagaaaaataaaaacctttaagttaaaagataaaaatgagctgggtgtgggggctcatgcctgtaatcccagcactttgggaggccgaggcaggtggatcacttgaggtcaggagttcgagaccaggctgggcaatgtggtgaaacatcgtctctactaaaaatacaaaaaaacaaaaaaaatttaggtgggcacagtggcaggtgcctataatctcagctacttgggaggctgaggcaggagaatcgcttgaacctgggaggcggaggttgcaatgagccaagagcatgccattgcactacatcctgggagacagatcaagactctgtctcaaaaaaaacaaaacaaacaaacacctcgggaatttctggctcaagcctctgatcctcaccaccactatcaccaggggatcttttgctgttcacccaagtccagccttcatcccctaaactcctggggaaatgcgaccagactctccccatctccattccgggagtttgcctcaagccaatcttgttctccctgaaaacggccttggggttccccatcctggtacaccctcctactctaggggacacagggccgatgttgccccccaaaccggcagtcccaggagcgcatcgcttctccctgaactgcttctgccccaacctggcatctgcttggggaagggcaccccagggtggagacttgcatggtgagctcagctcaccttcaggtgaaggtcagcgcacactggccacccgggaccacattttccagaatcctttggcggtcccgcgatgctctcgtggtcagcagctctcattgggttgcagaggagaaacttgtccgtgtcactggggcatcttaacagtcggctcctaagcttggttgtgtgcgctgtgcagatgtgagaggcacaccgtgtgggcgaagccaactgcttgcccgcctctctagctccaaaactacaatccccagaggcctctgcggtcacttccactacccaccctacacaccttctgtgtgtcgcgttaatgtcagaagcacttctgtttggtggccccggcgggttaggctggttggcacccagggaagcacccaggtcttccccacacctctgcacctcattacctgaccggcttctggatccgcagcgtgcatctgcagtctgtgagtcccctataggcactcagtatgcccctctgcgtgtccctctgttactcatggggacgcagtctgggagccgtagacctgtctcagaactagggcgccctcctgtgggcacctccaggccattttcctttcactggagcccaccgggttagagacagaccctcactctgttgcttggggacaaaggcttcactccctggcccgagcttggggctgagctagagggttcggggtcatcctgggcccctctggatgggaattggctgccctgttaatttctgtgacatccccgaccctaacagtgggtctctggagcagactgcgcttcaccccatgggaagggggtttccacctgagagtcaaaaaagaggtgagaattctctgtaattccatcttgactgtcaacaggatggattctgttaccatttcttgccctggaggctgccttgttggtactggggaaagttcattcctagtcctggaaaagtggctcattccaactggagtcctccctcagcattcctttctgctgcatccatactgcagtcattcatgttgttaattgtaaacaaacacacatggaacagtttaaataaaactacacagatgtgtgtgcttaattgttcagtgatgtggataaagggcagggacagcagagatgcctgtgatttcaagggcttggggaggactcgtacaagtagagctgtctcagctgcccctgaccggtttggtaccttggagactcgggggaaggcattgcactcggaggcagaaggaaacatagtctgaggctgggctcttgctacagggtaggaaggattatggtggccaagagccttcgtaaggttgatttttaaatatgcataggtgaagatacagactagctgttcacacatagaataaggagaagctttatagagtgtgacctaaattttacatcacagaacactttcaccttccggcagttgggacatttcacccataatttgaaattccctcctactctgaaaatgaatctggcctaactctgcactgataattttttttttttttttgagacagagttttgtgcttgttacccaggctagagtgcagtggtgcaatctacactcactgcaacctcggccacactggttcaaccgattctcctgcctcagcctcccaaatagctgggatttacaggcatatgccaccacaccgcgctaactgtctggtacttttttttagtagacgcggagtttcatcatgttggttaggctggtgtgatcccctgacctcaagtgatccatccgcctcagcctcccaaactgctgggattaaagatgtgagacacctcactttgccagtatgcattgttcttagtgtcagccgctgaaactgctacttctgctttacgcgactacgagccaccggtgagagagcagcccacgggcacacaggcggacctgtgctcgtcatcacaagggctccacttttggggagactcacccgcacaccgtccgcgcacgccagaggctgggatcccgcgctgcctcgccggcgatctgtctgaggtttcttcctcctggggtttcttcctgctgctggaccctccgcgaatcccggcctccggagaccgtcctggtaactgccctggccaggactggtctcagcccagactcagacgcacgatcacacagggctcctacttccccaagtgtcagggacccatccccgggcaacggtggctttcactgtgacccaagcggcggctcgggcctcgcgcctgcgcgctggcgaggccgactccccccgctccacccccccttactccgcagagtcaggctgcggaccctttaaaaaatggcggcgacgcggcggctgcggggcctggggcggcggtgctggaggttgcggcggcggcggcggcggcgcagcccgaggcgacgggtgggaagaggactgccagaggggcctgcgggagacccagggtcggacccataggagtcctgtggtgaggacctc

SEQ ID NO: 1887557 - DNA, 4001 bp, Homo sapiens
tagtgggattggattggagtgccagtgtaatcggggtagtcccgcccacccgtgccttatcagggctgaggacatagcctgggcaccgggagacactgggagtgggggagcctggagccacatggcattgaggaccactgccccctgctgcttccccccagtgtgcccagcagctcagaaggcagccagggaggtggtgcctccggcccccgagctccagccaccctctcccaagcctgcccggggtcgcctgctccaggtgcccccgctgtgctgccaggccttagcatttgtggtgacgcaggtggagcccccgaggaggggtcccgcggtgcccccggcccggcccccgacggcgcaggaggtgtgctacctgcgggcccagcaggcgcagagggcatcggcgagcttgctgcaggcccccgccaggctggcagagaagtcgccctccgtccacatttccgcccctggcgagaagaggaggatcgcccacatccccaacccccgcctggctgcaggtgagtcctggcccagggggcctgtgccggggggccgtgggcatgtgggcaggagaggtggcaccctgaggtctctgagctcacctgaaccacatggtgcttgctcatgggatgactttgggccccctccctggggccctcagcctgcctgtctgtgaaatggggactgttgaggggtgcaggaggcctggcccagcaccttccttccctgacccagctccggggttactaggagtccaacagcctgctggggactgggctgaaccagggcctgagcctgtggttccagggaatggggagccatgtcggggtacctggcattgggtggggagcaggcttctgcaggtgtggctttctcctggcgtgtgagtggggggcgtggcctctgatggaaatgagtgctgtcttcccaggagtggggctgtatttcctttactccgaggggcacttcccccccagcagggtcttgtagaaagtcgggccaggcctcagtggtgggtggacaggacccttcacggggggttgtcctgtctcctgcgtcttcacatcagtggtgtctgtagagcgagaaagtatccctggaggcaggtcacagatgagggtcccccagaaagctcctaaaaaatgcaggttctggtctggaggctgggaaaggtctgtgtgtctggcaagctccctgggagggcatggctgctgtccgaggaccaccctgagcagcctgctggtttggagcccctgcctccctggcgctggctggagagccttagggccagccccggcgattcccctgcagatcccatggatcccacggccctccttagggagagctctccaggctactctgacctcccctccccagagccccctcacggctgagaccttagccccagggaggggaaatcattgagttgggcctatcccaggaccccacacgcttcccgtctgtgtctccgcgctcgggttgtcctgttgctgatctgtggtgggtgctgagctgtcgcagtgcccttggggcccgccgcctgaagggagtctggcgtcccaagtgctggcagtgccgcagggcgggctcatctggcttggaggactcctgtggctgcctgggctcgcccccagcgtgcagccgagggagtctggaggttctctgtccgttcctgaagagcaaaccctccactgcaagaggcgcgtgccagcctggcgggcagcctgcttccttgctgggcggcccgcggtagcatgagcagactcatcctgcctcccttgcaccttccagggccagatggcatttcgagggatgttgctctgagactagggccagatgtccctgctcacagctccccttcctgggtcggtgccgagcccccagtccagaagcccccctgccacacagacgtacatgcccaggttgcagctgcccgcgtggccagccctccgaagcagcccctgcaggcctggcctcctccctctggtttgtgacttcatcaaagggcaaggcagaacacagaggccgcagggcagggcaaagccaatgagcaggtgggggcacccgagacccttcggtcctctgtccgggagccagggcctttccctcagacatcgacgccttgggcttggggtcagaacacgtggcagaggcctggaccaccccaccggtgacgtgtcctcagcggcctccgcagcctgacctgtgtcctctgcctcgatggacttgcctgaaggcagctagagcctgatgccattgcgcagccccagcccctcaccctggcccggccccctgcacgcggagatgcacgtgctgctggcgctgagcggccgcggctgcctggtgctccgccacgtggtgatgggcagccactcgccctgtgcccacaccccctgtgccccgccagcccccacaggtgccaagaggacccttgcggccagcggcagccagtcctccaacggccctgagccaggtggccagcagctgaaaacacgcacattgtcggggatggcgtccaagactaccaccaccatcatccctaagcgaatcgcccacagtccatccttacaggtagcccctcccatctcggccaggaccaccacccccaagaccacgccctgaggcccggccacatgggacctgcggagggccagcctcgcccctgccctgcgggccttcgtgctccacaccgcagtacagccttcaccttccctccccatgccttggtgttttttttttttttttgagatggagtctcgctctgtcgcccaggctggagtgcagtggcacgatcttggctcactgcaagctctgcttcctgggttcacgccattctctggcctcagcctcctgagtagctgggactacaggcgcccgccaccacgcctggctgtttttgtatttttagtagaaacggggtttcaccatgttagccaggatggtctcgatcttctgacctcgtgatccacccgcctcggcctcccaaagtgctgggattacaggcgtgagccaccatgcccgaccgccctggcggtgtttttttgttttgtcttgttttgtttttttggttggttggtgttttttttttttgtttagagacagggtctctgttgcccaggctagagtgcaggggcgcaatcatggctcactgcaacctcgacctcctgggctcaagtgatccttccacctcagcctcctgagtagctgggaccacaagccggtgtcatcacaccccagctaataattttgttttttattttgtagagacagggttttgccacgttgtccaggctgatcttgaactcttgtcctcaagtgatcctcctgcctcagcctcccaaagtgctgggattataggcgtgagccaccacgcttggccttgttttgtttttaattaatagactttatgttttttgagcaactttaggtttctaggaaaattgagcagaaagtacagcaagttcccttgtgcccccatggcctcagtttcccatgaccttagttccgctgccctcagtttcccctgctgctcctgtcttgccttggcgtgtctgtccctactgcagccaggctgatctgtcccagcgcacctcactcttgcctccagccatgggcacggcctcatcgcgtctgcgttccccgctggaggccttgtggaggccctcacccatggcagcttttgccttccctctagagtttaaagaaacccattatccccaaagagtttgggggcaaagtccccaccgtcatccgccagcgctatctcaacctgttcatcgaggagtgtctcaagttctgtacctccaaccaggaggccatagagaaggtgaggtcctggagttcctatctggccggtcgggtggggactaggggtccagggtggtccccagacatcccccggcctctcagccgcagctgtgacccggagctgcctgggagagatgcaagtccccgaccccatggcgaccccaccgctggggctccccggcaccaggcaggca

SEQ ID NO: 1887558 - DNA, 4001 bp, Homo sapiens
acatgcctgtaatcccagtgactcgagaggctgaggcacaagaatcgcctgaaccctgtaggcggaggttgcagtgagccaaaatcacaccagtgcacagagtgagactctgccgggaaaaaaaaaaaaaaagtggtacatataaacaatggagtactattcagtcataaaaaaaaaagaatgaaatccagtcatttgtaacatggatggaattggagatcattatgttaagtgaaatcagccaagcacagaaagataaacatcacatcttctcacttatttgtgggatctattataaaaatcaaacaagccggccacggtggctcacgcctgtaatcccaaaactttgggaggccaaggcaggtggatcacgaggtcaggagatcgagaccatcctggctaacacggtgaaaccccgtctctactaaaagtacaaaaaaaagttagccgggcatggtggcgggtgcctgtagtcccagctactcaggaggctgaggcaggagaatggcttgaacgcgggaggcggagcttgcagtgagccgagatcgcgccactggactccagcctgggtgacagagagagactccatctccaaaaaaaaaaaaaaagaaagaaaatcaaacaactgaactcatggacttagagagtagggtggttattagaagctgggaaaggtagtgggagcctgagagaaaggagaggacaattaatgggtggaaaaaaaaaccacacagaactgtacattttaaaataacttatagagtgtaactggattgtttgcaactcagatgcttgaggggatatccctttcttcacgatgtgcttatttcacgttgcatgcctgcatcaaaacatctcgtgtactccataaatatatacacctactatgtacccacaaaaattagaaataaaaaattataatacttttagtagctattgattatatacctttcagatacatgaagaaaatgacacacaagtgagtggtcaaatcttttcaagaatacaaagtcaaggacgggcagtgccgacctgaaactgctaaaaaagacaggtcacccagggaagtttccaaagaggagccccaacccaagagttcctgcagtgtgtctgtgctcaggagagatactggaaggagagtcataaggatttatgtaacaattccaggtgggtattctttgccttcctcccatgtaaaatatccgcaaacaaaaaataaatccgttaaaacgagtcatccctggttcttcggaaaaatgagaaacacggcgtccgtgtgaaatgcaccagaggccaaacaattgacaatgacgctgtgaactggagagggggcgttagactttgggaatgcgggaagggatccgcaaacttaggaatttactgccagccccaggaagagatagtctggagacaggattatggatttgacaccctgctttccatacatttggaaacctcaagggaagatgggtgacctttatggagaaaggagggactgaggatcacacagaacactgctcctcccacgcacgaaccccacacacgagtcggaatcctccccatgaccctcccggggctcccgtgcaatctggggagacacgaggctgcggcgtgcagctgcccagagagggcgccgaggctgaggccggggccgcaggcgtcgcgcaggaacgggacaggatgcccggggtcccggatgccagcccagccccactctgcggccgagggcactgagggcccagctgcgccagagggacccgggtcccagaccccagagtcgccgaggggagccccgggtcccgccacagccggttccggccggttccaacctgtccctcctcaggtctcgggacaccggccccgcacactcaccattttccggcttccaggtgtctggccgtcctccctcatctcctgtatgcagcattggtcacaacgcgcgtagcgggagatattactacggtcaggtgatagtcgaggtgcccagcaaccgcgctgcgtaacgacgtacgacgcccacctcttttatgccgcattgccccacccaccttccacgtggcgcctctgattggacagttcacgaagccccgccctcttcacatggagtgacagagctgcgaaaggtcatgtcgccggggaaaccctgcttcagtccggggggaaaccagtcccagcgaggggcagttgagtagaagccgaacttgttcccagcctctcgatggactctggcatcctgtcgcagctgtttctgaacgcggggacaaaagtgtgcgcggcgaattccagcctcagttgccagatgtagtgaccctttaaggaacaaatccacagcaagagggtcacccaggcaagtccagattggaacaagagggtctgactcctccgggggccagggacttggcctgagtctagagggcactcgtggaactgtgagctccgttcacaaacacagacactttaaaagtgacttcgccgtgtgtaatgagtctagctccattctgacattgacggctaacggcattgagacctccacccattccttccccaatccccacacatttactttaaataaagaatcccttggcctccagagccttttacacacaatctctttgaaccccacatccctagcatggatgcaaggacgcttatcagactaaccacagctgtgagatatgttcaattaaactctgaagtgtacatttcacactacaggaaaatttattttaaataggttacagattgtgttcgcagagaactttgaaatgtaaacgactatgatatacctaaggtaattgaatccctattttcactgatacaaaaatgaacaataaaaagtgatgtaaattaaggtatatctggaaactcttagtatgcttaacagattaatcaaaaatctgaagtcatatttatttgaaaagctatatcagaataaaacacactacacaatgcatcccttttaagtgtacaattcagtaaagtatattcaaagatgcaaacagataatcaccacagtcaattatagaacattttcttttttttttttttttgagatggagtctcactctgttgcccaggctggagtgcagaatgcaatggcgcgatctcgggtcactacagcctccgattctggtgttcaagcgattcttctgcctcagcctccagagtagctgggattataggcgcgcgccactgtgcttggctgatttttgtatttctagtggagacggggtttcaccatgttggccaggctggtcttgaactcctgacctcaagtgatccacctgcctcagtctcccaaactgctgggattacaggcatgagccacggcacctggcctagaacattttctttttttcttgtttgagacggaatctcgctctgtcgcccaggctggagtgcagtggcgccatctcggctcactgcaagctccgcctcccgggttcacaccactctcctgcctcagcttcccgagtagctgggactacagggcctgccaccacgcccagctaattttttgtattttttagtagagacgggtttcaccgtgttagccaggatggtctcgatctcctgacctcgtgatccgcccgcctcagcctcccaaagtgctaggattacaggcatgagccaccgcgccaggcctagaacattttcattacctcaaaaaagaaactcctggcagggcacggtggctcatgcctgtaatcccagcattttggaaggccaaggcaggaggatagcttgagcccaaaagttcatgaccagccctgacaaaagagcaaaaccccatctctaaaagaaaaagaaaaattaattgggcatggtggtgcacacctgtgttctcagctactcaggaggctgagatgggaggatttcttgaatccagaagtttgagagtgcagtgagccttgacagcctgggctacagagcaaaaccccatctcttaaaaaagaaaaatttaaaaaacaaacaaaaaagcaaagcggctgctctatttt

SEQ ID NO: 1887559 - DNA, 4001 bp, Homo sapiens
gattccctcccttccatgtgctgatgcctctcggatctctaactctaggcagaaaccggcttctcagttcctcagctcaaatacccaccttgggacgggcttctgcaccgggacatcccgccaggaactctcccggtggaacacagtccatgttctctggctgccctgcagtttttaaatgccaccagtacacatggggaatgttctgccttcgcaaggaggaagctggaaagttcattttcccagcactccttgcaggagggacaccgacacgggtccaggctttccccatcaggtgctcccgtgaaagactcagggtcccgaacagcaccaggaagcagagggtgcatgacaccgatttgttattgtttttgttttaattttttgagcagggatgggggaccgaagcttctggtgtagaagcttctggactccagcgccagcctcagcagtgcagggtgcagggtgtggtttctgcctcctgcagtagccagaagatcttgaccggagctgtcctgtgcctgtggtttgtccttgccctgggccctgtggcctccaagccggattcatgagggcccttggagcttggtgaccttcctaccctctcctttaaccggtccttttctgattcttgctggagtgagctgggcggttttctctgaatctgctcctggggttctcccttagggaagggcaccctaggcacccaacccctcagccggatgcccagcagatgttatcatgcttccactttccttgcccctttatgtcctgtggtcactcctttctgtcccttccatgtcctacatctctctctgctgtgtcctgtcttctgcaccctgtggcctccacccaagtttgcatcaccacccattcctccttgaatgaatacagttgtctccccgggtctccctgtctccataggggccagcagcatccgagccagcttcttctctgtggcagagatgatctttttcaggcctcctccggccatggccctttcctgctcctctttccagagctcccaagtccccgggatgcactccagctgctaagagaggcctcgaaggttaggcgatgtggcctccacagtcctcctgagcagccaccccacctaccctcatccttcagccccattacatttcctttttctgtttgattttttgaataggtgttgtatttagatggctcagtaatttccatctgtgtgtatctgtatatgtgtgcaggcatgaagagcctgtgtctcatccctgttccctatgcacccaggtcctagccccacgccagccccagtggccagctgtgctgttcatgacctgcaaagctttctacagctgttttatgcaaaacaataggaattattgtaaattattgtgaaatatatataacatagaattcaccattttaaccatttttttcctttcttttttttctgtcttttttttttttttttttgagaagggttcctcttctgtcacccaggctggaatgcaatggcatgatctcagctcactgcaaacttcacctcccgggttcaaccacttctcctgcttcagcctcctgagtagctgggactacaggtgcatgccaccatgcccagctaattttttgtatttttagtagagcggagatttcatcatgttagccaggatggtctcaatctcctgacctcatgatctgcccacctcgacctcccaaagtgctgggattagacgcaagccacctcgctcggcccattttaaccacttttaagtgtacatccagtggcaggaagtacatttaggttgttgttcaaccaccaccactgtccatccccacccagaactttttcatattccccaactggaattctgtacccattaaacaccaactcctctttccccctccctccagccgctgacaaccaccttttcattttctgcctatgcatttcatgacgttacgcacctctgttaagtggaatcatgtagtagttgtctttttgagtctgattatttcacttagcagaaagaactcaaggcttaatcatgttgaagcacacatcagaatcacccttcttgttacagctgaatcccatttgtttgtacgcatagaccactttttgtttattcattcatggatggatggacactgggcttgtttccaacttttagctattgtgaataatgctgctatgaacaaagacatgcaaatatctgctggggcccctgctttccgttctttttggaatacaccagaagccgaattgctgcatcttgtggtaagtctatgattaattttttgagaaatgaccacagttgttgtgccatattacaaacccacaaacactacacaagcattccaattcctcctcgccaacacttttcttttctgttttcctttttttttttttattgggaacaaccatcgtaaaggatgtaaggtggtatcccactgtagttgtgatttttattttcctaatgattagtgatgttgagcatcttttcatgtgtttattggccatttgtaaattaattttacatttcctcctttgtaatgcaagaggtagcacaccgtgcattgttctgcttcttgtttttctcactgtgcagtgtatcttggaaacctttcccggtgcacagacagaaggatacctcattcattgccacagctgcacagtatccatgatgtggatcatggctcatgacccagttccctacggataaacgtcaaggtcgttcctggtctgtggccatcaccaacactgccgcgactagtctagaatgggtgccatttcatgcatttgcaattcccagaagtacactggttagtcagcaggtgagtgcattggtgagaggatgtgactccaatctcaggaaatatggaaaccttcttccctttctagctgcagcacccctagtctggacagcatatggaaagcacccatgatcatttgaaaatcacaaaataactctaaatttctgcacaagtaggtcatctaccacttgtcattctaatcccacactaggcactttaagaacatgcacccctgggcttttgctacactcttttcttatgctggtacccaccttgtggtgactgagggttctcttaatatccccaagtctgaggaaactgaggcacaattcgattatccacttatgaagtggtgaatctgtggattaaacttataagacatatccacttcacactccagaaaacttcatcattcccaacattattgtcttccaccattgggaaagaaatattttccttggtaattagaggagaaaaggtgtttggtgtttcattgtcactttcctggtgtggaaagtatctacttgcgggtctttcctagggccagcgagtcctaacatgtttgaacatctacccatgctatttaaggcagcacaccaaacacattcctgcttcgactgcagtatctgtttcatcaagaagagtattttccttaaataagtttgaggtgcctactacttggggaaatactaagcctttggtatgcttctgctcatctaggcatgagacggctccatcattactttggtcttcagttttctgaatctgcttctggaaaacactgcaaaatgtcatttttgagaactgctgctttgcaaatacttttcatgcctatgtgatgtgctgttattctctctcatttccttgctaacgtacagtcatgcatatgaagcaagttatgagccagttaagactggatctgagtcaactagatttgcatgcattttcagccacagtacaggttcctaaaagtcatcacatgtctagtctcaaagtacttatagaatagcatctgattattattaagtagattttttaaggcctctcaaggataaagatttgaggtgttatatccattgctttcctccctcacactgtttttgacttttaattcttccctttctccactttaatttctagtctcccactgctaattctccatatgacccatccccaccaccaccatcctcaacagccaccag

SEQ ID NO: 1887560 - DNA, 4001 bp, Homo sapiens
agcagcagaaagaagtggaatacacggttggacgcggtggctcacgcctgtgatcccagcattttgggaggccgaggcgggtgaatcacctgaggtcgggagtttgagaccagcctgaccagcatggagaaaccccctctctactaaaaatacaaaattagccgggcgtggtggcacatgcttgtaatcccagctacgctggaggctgaggcaggagaatcgcttgaacgcgggaggcgaaactccctctcaaaacaaaaaacaaacaaaaaacaaccaaaactgaaagctggtaatgaaacaaatacgtatacacgaacatttgtagcaacactgttcactacagccaaaaggtgaaaagaagccaaatgtgcgtcaatgtatgaatggagaaacaaattgtagtataaacataaaatattcatctatgaaaaggaatgaagtactgatacgtggtatgatgtgaataacattaaaaatattatgctaagcaaagggagttagaaacaaaatgttccattcatttttatgatttgtccaaaataggtaatagaaaagagagaaagattcatgtttccccaggaatgggattatggacaacagtagtgattgcttagtgggcatggggttttctttgggtgataaaaatgttttgtaattcaagaggtggtggtttcacaatgaagcagctactttgtctgaggtttaaacccggggttcgtcgttaagcgccagaaaaatttaggacacggacacacaaaaactcctcagtttaggagcggaggtttaataggaagaagagaaagagaaacgggttcctccatagaggaaggggtctccgagcggaaaagggtcggctggcagtgaatgtgctgagttttacagaccagtttgaggaggcagtgtctgatttacataggggtcatagattggttcgatcagttatgacgtttacatagtgcgtggggaaggctggtcgccccaccctaatcttcttatgcaaataggcttcccagttgattggcccatcttgccagcttcttactgtgcacgtggctgacaaagagaagggaagatggagccgccatctttaacatgattggcacaactgctggtatctatgtctgcggcagctggattttacaggctgctcttccttaggaagggaaataatttggggctgcttttcattaaaaagaaaagccttaccgagggctcccataccctatctgcctaagtgatggcttcttaactcgtatatattaacaacactgtattcgtactagatgccattgccattgaattatgtgccttaaaataattttgttttgtgaattacacctcaaaaatattttttaaataataaaacgaccacgttaaaaacgttttgcatagcgaaaaacaagtcaaaggaaaaaagctttttggttgagcaatatttgatacaatgttaatatgagtatgtaaataatacttaacggaggggaaaaaactaaacactcaatagaaatgtgggcaaactatttgaccaattcacaaagactataatagtggcaacggaaaatatgcacggatgttccactttatttacaaaagaacaaatacaaattaaaactacatttagaaaccatttcttaccattagattagcaaaacttaactcctcgaagactgtgtcttctcgcttgttccctttccaataacactcctgttatcattggaggcgtttagacttcagaaattcctgtctattcagtattttctgtcctggaccagggagagagaaggacgactctcaggataacagttcacattccccactaggcaggcgctcgtggctttgggattcgttcccagtgggcacctcggagtggcaacgcttccccctgaagaatgagattttgagcgtttttccttcagcattcggaggagtgtaatccaaatgctctgtggagtcgtacacactggctccagaaggaggatacaagcaattctgggaatggtagtccagacgctcagtggagtagcggtcagcttggctccggcaggcgaatcaggggatttctgggaaatgtagtccagacgctcagtggagtctcggtcaatttgactccggcaggtggatcccagggaattctgggaagtgtagtccagacgctcggggtcgtcgcggtcagtttgtctcaggaattctgggaagtggagtccagacactcagtggagtagcgggccacttccgctccgttactgtgaggttgctgcagttttgtccctggtagtttgggtcagttccgcgagacccttctgaatttcctggacctacgcattggatccttaacgaactggtgatcgaattaggggaaaagaaacctcgtcggagagcagaggtttggcggagcggggccgctgttttcgttctcgtcagtggagccttcttgggcttggggctctcctcgcgtccccggggtgtttgggacttggtcgggtcgcgtctcgcctggttttagggtctccggggctctgagctcgcccactcggcctccctgcaccccacgcgcgtggccacttcctcgcgataaaacgctgggatgttacttaatctccttgggtctcccgttacagttctttaagatggggagtttaggaccatcctaatagaatcgttttgggaactgaaagcggtaacacaaatgagagccttaaagcagcccctgtcacttggtgactggtggtctcttgttaatttcccacgaagcctgtcaggtccccgggtggggtgaaactccagctgcaggggcaccggcccttctccctgattcctgcaagacgctgggtgatcccggacgccttctgacctctcttttaggaaggcgagggttgcatccacttccaggaggggagaggagcatttaacttttatggggcacggcgaccacggtcagagtgtttcacagccttctccttacccagcccgacctttccaaaagagctgcagggagggacttcttggcttctgagggcaaagctctacgtgagtgatccttggcttttttctttgacagagatgctcaccccaaccgagagtgtataggatgtgtcttcgggcatgggtgttgctttcagttgtcatgtttttctagtctttaatcttgaaagatagcatagctttcatcgttttttcttggtattttatccttgttatttttgaagagtatagatgaagttattttggtcaaagatgttcatttggagtttttctgatgtatttcacgtttaacttcaaaatatgcattttttgctggaataccacagaagtggtaaatctctctctctctttttttttcttgagacggagtttcgctcttgtcgcccaggctgtagtgcatggcacgatctcagctcattgcaacatccacctcctgggttcaagctattctcctgcctcagcctcccaagtagctgggattacaggtgcctgccaccacatccggctaatttttgtatttttagtagagaagggatttcaccatgttggccaggctggtctcagactcctgacctcaggtgattcaaccgccttggcctcccaaagtgtgggattacaggcatgagccaccgtgcccagcctgaagtggtaaatttcttattgcaacataacaggggccatatgtcagtttgtcacttcattggtgatctcaactttgttcacttggctaaagtcatgtttgtcagatttccgcattgtaaaattattttgaatttttttttttaccccaggaacacagattcaagttgctctcaatatacactccctaattttttagttaaataaaattttgtaaggagaaatacatttattagtgcacattctactgtaaaggtgaactctcccttctccttcatttgcttattcattcattcaactataaatattctatcagtgtagatccagaatccagtcttattaagttaaatgacatgtggatgaacaattaccaatgc

SEQ ID NO: 1887561 - DNA, 4001 bp, Homo sapiens
taaaaaacgaaatgacggctgggaacggtggctcacgcctgtaatcccagcactttgggaggccgaggcgggcggatcatgaggtcaggagatcgagaccatcctggctaacacggtgaaaccccgcctctactaaaaatacaaaaaattagctgggcgtggtggcgggcgcctgtagtcccagctacttgagaggctgaggcaggagaatggcgtgaacctgggagacggagcttgcaatgagccaagatcatgccactgcactccagcctgggcgacagagcgagactctgtctcaaaaaaaaaaaaacaaaaaccgaaatgaccactaaataagcaatgctgagggtagcacttagactggcagagtagtttccgaaggtggtttcaaggaaggtgtctgagacggtaattagcagcagtctttcttcctccaccacctttgattttctcctttccctttctccttccttccattcctttgtcccagctcaggcccccagaattacttgatcccacacatgagacgatcaaagcaggcaagggtctactactgttcacaaacactgacacgcatgagccttagagggcatcaacaccttactggctgtgtgacaatctctctgtgcctcagttttcttgcctataaagagaagataaaaatagtatgcttacttcaattaaattaagagaattaaagaaattacttgttaaccatttactacagtgccaattacacagtatatatgtatatttgttaaatataccttacttcggcaccactctttacagctattttgtttttccagctttactgaagtaaataaaaatattgtataatctaaggggtacaatgtgatgttttgatatacattatgaaatgattgccaccataaagcaaattaacatttccatcacctcgcatttgtgcgctgagaacacgtctcactctcggcaaatttcaagtacacagtagtgtcattaactacagttaccaagctgcacactagatccccagaacttactcaactttgtactctttgacccacatcttccccatttctcccacttgcagcccctagcaaccactacgctgctctttttctctcagttctgctttattttccacataggtgatattatttagaatttttctttatttacagccactttaaaaatattccccttcgcacagtgtttcactgcgtcttcaccacaaggacagccactggctccgtctttagatgggaaaactgcggcccggcgacttttgctagttggaaaggtgggtcagtggtggaattaagtcacacttaggccttttcacttcgcagcggctctttccactacacgatacaactgaacgtgttaaagtaaaaacgtgacccagtttaaaatgtcgggggcgggggaacggaagcggggggaaggaatctacctgaggagtgaggaggcagaaaggaccgagaacaaggggacccggttccatttctggaccccgtccgcaggctgctcgcccgacttggggtcgctctgccccggacgatcaggacagctgcgtgggcccagggttccagctgcctttatcttcgggagagcgaatggctcagatctccgcggagatggagctggaaaagcggagccctcgctccacggctcgcggcagttccttgaagcccacccaggtggggagcccctggcgcagcccaactctctgcagtctcggggaagctgaggcagagagggaagccccgccccgggtccttcccgaccccgacgtcctggcccgccgagtcccaaggccccggcccgggcgccccccgaggggccggacgcccaggcctcactagggagcggctcctggcccggcccggcgggcgctcacctttctcccgggcactggagcctccctggccgcccaggtgcacgcgaccccgagactccgtctcccggccacccagtcaggcacttcaaattcccgcggacggcgcggcgcctctgattggacgggcggccgagctcgtaccggtgagagccccgccccgccgccccgccaagcgccccctcccggcaggcggaccgctgctctcgctcaagttctggcgtggggctgcgctggagcaactggggcgaagttgaactgggacatccttggagatgatttttgaaaaacgagcaagccatgcctggaaatgagggagagtgggaaagacactggattgagagtcagaagacatggtgtttagacggacttcggccattcctaggggcactgccttgggcaaatcatttcccctttcaggcgcacctcacctgtgccaggatgctggcacacacacagtgtattttcaaagaatgtcaaatgtagtatttgtttttattattgatcaaaggcagctgtagcttccaataataatggctaacatctaccgagtactgtgtgcgagacacccttctgcatgctttacctgaattaccttatttaatcttcaaaaaccatcccgtgagagaggaactattattatacccattttacagagaactaatagagacaacgagaagtgaagtgacttctccgatctaactaggcaaagccaggaggtgaaatcagccagactccagaagaaaccctttagtgcctctgtcaggccctcacttgccaggctgatgagagcaacctgagatggcccaggtcaccaggacaccaggcggggtgagtccacaggaggccaggagcctggacatgacacccagggcagccttctcgtagggaaatatttccacttaatgctttgacggaaaacctgggctacagtctctcagatcccctacagctgaaataaaacggagccaggagaggtgattgtggaaacctgcacttaattcagctagctttgccaggaaacaagatttctttgacttgtgtgcagagtctgaccttacatttatttgttcactgaacaaatatttattgagcaccataaggtgaaaacacaaaacaataaaattaggactaacaacgggccttgaggactaaggtagctttttcataattttcccgtttaaccctcccgcccataaacctcacaagtggcagcatttctccttacccattttcatcatcactttagacaacacagctctcttcttattcaattaccaaatatttcttcaaacatcaagatattactcaaaccagtgcttctagaaaattatttgaaagaaacaggaggcaacagggtcagacagaataccaatgctattgcaaactccataaaggagaaactattgattacatgggatacatttgctagacacagcccttctcatttccacaccggtgtcaccacatattccctacttgttcagattctatcagaggtttttagagtctctccctaagtggagacctgttagaagcacatatgtcttgtgagttttctttccctgcccctccatatcctaaagaaaggatttttcttcttcctccttttcaatctcttcccttgtagcctatcataaccttctactcgccctaaggtggacatcacctactgctattccatcttttttatatctttgctctttttatcactactgggtccttactgtgtttaaacatgggctcacaaatacctgcgctccccctaaaaccttcccaaagcccaacttcaaccctgagaaactgcccttttgcttcccttcttggtagccccagacttttcagtacagtgcctccctctcctgctttcttgaaggccagcagcccctcctgaggcccccaacttccaccccacagcactgacctggctgaccacccacctgtgctctttcctcccttgccctctgcgtcctctcccttgatctccagtctagttctctgactacagtacctgggtgaactgtggtctgaaaggattgaatgaaaaattccagaaataaatgataagtttcaaattgtgagctgttctgagtagcaagactcattcctttgtccacaa

SEQ ID NO: 1887562 - DNA, 4001 bp, Homo sapiens
gcatggctcgaggcctcttctgtggcaacgaggccaccatctccccctgccttgagcctccctgttccagctgccagtgtgttccaaactctgcccctctatcctctctcaggcaggcccatcctccttcaagatcccctcaccaggcccagctctggtctgaggcactgagaatggagccagcatgggaggcgagaggtgtggggttgtttcatctctcagggagcgtatacagccttccccggctccaggactgaactgcagacctggccgcactggaagtgggtggtccttctctgctggctctagggggctggaatggggtcacatccaaaagcgtgttcctgacgtggatgatgttgagtctgtccagggtggagcataagggtggctggtgaggttttgcccccccccataatgtcctatagccccatttccaagccccccaaaacaaatcctaactgaaaacaaagcttactgcgtaaatgtcgctttgagacaaggctccagtgtccactgctaccaggctgctgtcgggaagaccctcatgtatagaaatcctgtggccagttgctgtgtggtctgtggatctcctctgtgaaatggcctttacgatacgggatgttgtggagtgtagatgccgggaaacggtcacctctcgtgtgcatatatgagaactgccagtccttcctgttgtgcccacctgcttgcctgggtgtgtctgggtgcacagggcacgtgtgcagtcaggggagggcactcctgtagttgtgcctgtagtataccctttctgagtgtgcctgtgtgtgagtgggtgcgagtggccaggaagtatgcttgggcacatatgtgtagaagtgcccttgtgcccatgggtccatgtgagggagtagaggaggtatcagtatatgggagtgaccatcgtcagcagggagggctggtgttggggcctgtgcacatagatgtgttcatgcacgtgtgtgtgcacacgtgtgtgtgtgtgaagtgctggggttcatctgtagaaatacttgtgtgtgtgagggtgagtccaggcgtctgtgcatgcacctgtggtttagggggccccccagccacggggcgcaggatgtcctgcggggcccaggcgggcatgtggggtgtctggagacgccaggcagccccacagcctcagacctcgggcaccaagaggaagagggcagcggactcgggcgcgcctttgtctgagctgcggtgcgccgggagtcctgcgcctttgtgtgaccctcgcaggtgtgcgagcggaggtgttgggagggtgttggggaggggagcggagggaggggctcccttctccgcagccggccccgccctccggcccattggctgggcgctgccgccctctggcgggcacggagggaagcgctgaaatgggagcgccgcagcgcgaagagccagccggcagcccggggacctggtgctcccctccactggagccgcctcgggcgcccgcatttggccggcgacttattgtagccccaggccaagtccccgacccaccgtccccactaccactgcccacgggcaccacttcctcccaatggtggcacccaacagctcacctgcagataggcgcagggcttgcttgatcttccctgccgcggcgtgcttttaagcttcaacgcttcttggctctgggcctttgggaaagctactgctcacctctctgatcctcagtcttttcatctgtaaaatggggcaaataagagtgaccaccacattggagatggcacctgtcaagagtgaggcacagggtcaggcatcggcaaagccctctctccaataagctgctggctagtgttttattgttgttactgctgtggacccaccttctctcccagacccccattccctgttccagacttgtttgcctccatgggggcgacagaagtcggggggcaactgttgcaggcacctcttggatcgcagccgtaggagtcggctcttccagcctgcttatcctctgccccactagcccccaccccccagcacacacacatgatttggggtgggccgggctgccggggcgggtctgtgggccagggtattttcccttctgaagggggcggaccggccctgtggtttcctccctgagtgacttccggcagggagggctcggcccccagagagggtggggagatgacacagttgttcccccagccctggcggggcgggcagcatggttcactccagcatgggggctccaggtaagggggctggtgcctgtgccactgctcagaggacaggcagcacatttaggtttgctctgcgggccctgcctgcccctcctcctcagctgtctccattgtccttctcctctgtactctagcaactccctctctcccatgccgggtccccgctaacccccacagctcctctttgccctctctttccacatcaggcaccggaacttccaacatcttctcttctctgttgccctgttccgaagggtctggggacgggagggagggagctgggtgttggtagcgggccctcatgtggagaaccagtggggtgggtgacatgggcaatccttggataagggctgcaaagggattggaatgccaagttgctggacttgggggatgtcattcccttttgagtgtgtgtgtgcacatctggtacaggtgtgcgtgtgcatgtgtgtgtgcagtagttctgagtgctctgagtgggactgctgtgtgcttgtgagtgtagggggctgttgtgtgtggcattgtggggtgatgattgcctggctcccttcttcacttcattcacctcagatgtcacctcctcagggcagccttccctgacctccccatctaaactggcactgatcctgtcactctcagtcccctcaccctgctttatcttttcttcacggcacgtatcactgctgggaatttcattatgtgtttgtttgtgtgcttattaaatgccttctccaccaaatgtcagttggctgagtgaacattgtgcaccaggcactgtacaaggtgatttatagctgttggctcatttagtagaatgtgtatatgtctgtatggtgatggctatcactcagcagtgttgatgggagtcttaaatgaggtaatacatgtagcatgcttagcacagtgcctggaacatggcaagcactcagcccttcatgcctgtttcatttgtggctgtgtaggcatgaccatgggcatgagtcttggtttggtggtgtgtgctgtcctatatgcgccattgtgtgcgggcacccgtgtgtcctccaccaacatgtatctattgagtagttctgtgttgggtgttggaagtacagtggaaagggtagctcaggtctgtcctcctggagctcccagtttattggagaagacagacctgtcaccaatgacagtacagacaggtcagggctgggatgggggaggtccaggcagagggatcagggctgggatgggggaggcccaggcagaggggtcagggctgggatgggggaggcccaggcagaagggtcagggctggggtggtgggcacaggcagaggtgtcggggtgggatggggggacaaaggtagaggggttggggctgggatgagggaggccccaagcagaggggtcagggctggggttggggaggctcaggcagaggggtcagggctgggatggggggacataggtagaggggttggggctgggatgggggaggcccaggcagaggggtcagggctgggatagggggacataggtagaggggttgggccaggacggggaggtattaggggatcgtaggagccctgaaaacatgtgatttagttggtagagtgtcaaggagggcttcctggaggaagggggtgtctgagcagggatatgaagaatgagtgggtatgagcaagcaaaggcggtgaggagaggggtgggatgaaaggaagactatttgcagggtgacatgtttatttgttgaggtgactgtgtatgcaactgtgtatatgtgtgt

SEQ ID NO: 1887563 - DNA, 4001 bp, Homo sapiens
ggagaaaacttagtatactctagaacaaaggtcctctaaatatagtccctgggaacttgttaccaatgcagattctctgctctacctcagacctaccgaattagaaactctggggctggggcccagcaaactgtttgaacaagccctgcaggtgattctgatgcatcctacatttgagaaccagcgctgctctaaaaactgctgctgtgttttattgaaagcttttactttattttcatcagttcccattacctgaacccaccctatgattcgtttgcctgtagaaatgtatgtcaatgtaaatcggagactctgatatttcgtatgcattactggtagtctcaaagctgcttcctattatacattcctgatagatgggtttattttacttctgaatctatcctcctaatcacagtgtcctacaagcagctgttaagacatcgtgttccatttaatgtcactttgcatttaacatcattagaataaaaactctaaggtataagatccattttctttcactgagttctcacagttcgatcatatcctgacaatgctgctatagccagaaagatgcctcttccctgtgaactcccaagacaggtcatctgaatttctctagtggcctttcacatcaactatctttcttatccctattccgatttcattttccttactggataccaagtcatttgaggatagcaactatatctttttgtcattgtatcctaacaagtacaagcacatggtaaatatctgatatttgactcaaattttgaaactagggtttatcctcagggaatggctataaaaggaagcaaagatctctgcaaaatggtgttcattatagactagtttttagtcaacaattagaaacataatagctcgcagtaggcaaaaggttaaataaattatgaagagaagggcttaagggccttgaaaggaggctgtaatggcatattcacagatacgtcactgttaggcaggacatttccaaagagaagaaagggtctcatgtctttaaaattaaagagcatcttacaagtaatgaggaaatataaactcacctggactttagctttcagatgtgtagcaaaaattctttcctctttcaggatcttttttttttttttttttttaacagaagggtagcactggaaaagagaaggcaatcatgagacagctggggtttcttggatagcacagtaacttagaaaataccctcaatgatcatacctgctcacctacttcaccgagcacaaccagatgggagtaggagagaaactggaacagtgttgaccttcccaatacaagagaggccaagatcagtgatgcctagggtggaatctgtctctaattcacagcaggttcctggggctggagctttagaaatgctatggttacaaacatagagctggctcctcggcgcttccaagggggaaatatccaggagggatgcctattcctgagaactctttatcgagtcttctcagagcctgccttgaggccgcaaccaatttcaaaaatctcgtctcaagatcaagtctgtgttttcttgctgggatccttcacgcctccatgaatctggcttctctcttttacctgctgcacatcccaagtgtctgtgaggcgatagggctgaggaatctgcagagcctagagcctggagtcacagtgacaattcacacaggtacacaacactgttcatttgtctaacgcacacacacgtacacaaccctgttcattcatctcacacacacacacacacacacacacacacacagtctctcacaggcacacagaaactcctcctctgctgctcaagcagacaggcctgaaattctactgaaactccagggatgacacgccccgttcacgccctgggtcttctggtcttcagcgcctctcatcctcaccgccggttccattccaaccagggactgtggaagcctccgctgatttctgtggagacgatctactcaccacgtaggggctacagcagctcggacaccggaaaaagatctagagctcgagggtgaccctagcgcggtgacttctgggaaatgtagtccacccggaataaccatgtccacggcgcccgccattctgtagcctatgctcggagggcacatgagcaagagcttgaccatctgtaccgttggttgacttgctctattaagggctatgatttcaggtcgtcctgcgtgtttagaggaggcgagtggaatcttgagtctcggctggagaaggcagagcacgggcatgcagacctcaaagcctcaaacctgcgtgtgagaggagaagttggcgagctccagcgtatggtccacggttggtattctaggtgcgagctgaggacaggggcttttgtttttcgcgctcccaggtagcgccagcacctatagtagctccaggagcacagaaggcgttaagtgtgcattggttttagagaaagaatgcctgtgcgttttgtgttttcactctgtgacattgtgaaattcattgtgtgagaacatggatggggttgtattccggattatggtttgtttctaagtgtgttactttggacatgaaatggtttgtttcagattttgagattatgtaaattttttaagccctctcccttcactcctactcccactctgaaatttctcatgcccaattgccattctctcacttaaaatacgagtctggctgatttgtccaaggtaaatactactatggcctacttatccattaggctgaatgggcaaagtaccgagagcccacagaaatgttttctttcaaaataagaaaatgaattttaaggtcaaagaaacttaatatcgtagtctactggcgagtgtataaattgatataatcacttgggaaaactatttggcaagatctattgaatttgaatatatgcatttgctataacctagcagttccattcttacctttaacccaaatgtaagtgtatacatattcaccaaaatacatgaatggggatgtttgtggcattgccatttttattggaattgcactcaatatatgggtacttttcaggaaaattggtattttaaacattgtgaaaaggctgggcgtggtggctcatgcctgtaatcccagcactttggggggctgaggtgggtggatcacttgaggtcaggaggtcgagaccagcctggccaacatggcaaaaccccgtctctagtaaaaatacaaaaattagccaggtgtgggggcccgtgcctgtagtcccagctacttgggaggccgaggcaggagaatcgcttgaatccaggaggtggaggttgcagtgagccgagatcgtgccactgcactccagcctgggagaaagtgtgagattctgtctccccctacaaaaaaagaaaaagaaaattgagaagggacctccaggaagatggaatagatgtacttttttctatttgtccagctaagtacaataaaaaccctgggcattagttataaaaaaagagaaaaagaacactgagtggtagagaaaaggtagactggtgctgagttcccttgattttctttgtgcctcctttgtgccagacttaaagccaaagaagctagcagtcccaatacaccaatgggcacagacaaaaaagtcccagcaaaagcctgctgtctttagccaaaagacaaggaagagggcagcctagcaagaaggaaaacttttagacaattactgccatgctctagtcaaaacaccacaggaaaaaccttcagcactatccccagcatgccagcaaagacccatgcttccactcttgcctggagagttaggactttcctccccacccctcaacccagtgctaacagtagaagccacatggagtgcagtaataaggcactcctttccctccaaattagaaaggtatcagtggaggtctagtgggaaaccggaactcccacccctgccactagtaatgaggagcccccctgtgggtatcaatggaggctgagtgggaaatctggatttctgtcaccaccta

SEQ ID NO: 1887564 - DNA, 4001 bp, Homo sapiens
ctgagattgcgccactgcattccagcctgagtgacagagcaagactccctctcaaaaaaaaaataaaataaaataaaacaaattaggcatggtggcacgcactggtgatcccagccactcgggaggctgaggtgggaggatcacttgagcccaagagttccaggttatagtgagccacgattatgccacttgcactccagcctgggcaacagacctctattaaaaaaaaaaaatcccacaggaactggattgtttaaaaagaaaaggaaaaggaaaacatactagcacagtgagtgagtcctagtgagcccacagaggtgactgggtaagaaatactagtgccttggctcagtgctgttcaggcgtacggcctgtgagtttgaacactgtccagagcacccttagaaaggcctctctggggagaggacatttgaacagagacttgaatgacaagaaggcataagccatgccaagagcctaggagaagaggttctgggcagaggctttgcactgggagtggcttgtcagaattttaacaaaaagagggttacttagcctggtttgaagttggagctgggtggttaacaggagacaaagcatagagtttcaaagacaatgctctcatccggagaagtgacctggtcaaatgtgtttctgaccttcgctgtccagtaatacaggagccacttgtcacacgggctcaggagcactcaactgcggctatcaagacagctaaactgaactttcttttttaaaatttaattttaatttttagagacagggtctcactctgacactcaggctggagtgcagtggctggagcattctgggctcaagagatcctcctgcctcagcttcaggagtagcagacactacaggtatgcactaccacacctggcttattcttttattttttgtagatatgaggtcttgttatgttgcccaggctgatcttgaactcctggcctcaagaaatcctccatgaccagcctctaaaattacaaataataataaaaaaagatatggccgggcacagtggctcacgcctgtaatcccagcactctggaaggccgaggcgggcggatcacttgaggtcaggagttcgagaccagcctggccaacatggtgaaaccccgtctctactgaaaatacagaaaaaaaattagctggttgtggtggtgggcacctgtaatcccagctactcaggaggctgaggcaggagaatcgcttgaacccgggaggtagaggttgcagtgagccgagatcgcgccattgcactccagcctgagtgacagcgcgagattccatctcaaaaaaaaaaaagtggcttccaaaaaatgttaattttacacctaattttggtgcgcggctggcattatttttccactgggcagcactgatcgcccgtgggggcagagactctgagacctggagtctcccaggccgggggcgacggcccagacgggaggcggtggagagaagtttccggatgtattatgtggtcatgaatcatgtcagggaattgccacggcccccgttgaatggggaggcgctgcctcgggcgctgagtagcagagcccggactctgaacactggtctgcccccgaactggaactcccattttcagtaccgtccgcttgaaacctcccaagagccctcaagggggcgagagagggatccaaacccctcgggggcgagagcgggatccgaacccctcgggggcgagagcgggatccgaacccctcgggggcgagagcgggatccgaacccctcgggggcgaaagcgggatccgaacccggccggattcccgaggtctgagcgcgcctcgtgaccgccactccgaacgttcgcaacgttcacaacggactcccgcgccgctggacctcaagggtcaggagccactcagaaaagctccaggaaacgctcacctgttgacagacgctgaggccgcaaacgctcctcctctctcttcacactcgccaacaccgcggtggcgctcgacttccgcttctctccagcgaatccccagctgagcctccttctgctcccgccaccattaccaatccagccaataaactctcagaaaaccctctttatctccgccccactccctcctgccaatcacttcgggtgcgagcaccgcccttcccgccttctttagcgagcgccgcgcgccaccgctcggcgggtggcggcgctgcgcgctgcgggatgcatctcccggaaaagcgaggcgaggggcgggccacgccggtgcgggaaccctcaggattggccagaaggaggccggcgctgtgactccgtccattcccgccgttgacatccaagtcggagacgctggggattggtttccagcggacacgctaagaagcttggagatagtttcgccctcctcacacgctgcggagagggagctccgctgattggtccgaggagtctgggcgcgcgccgatcggcgctccaggactggctgagggggtgcgcgcgccgccagggagcgttggcggtgattggccagagggcggaggccggctatttgaaggcggcgcgcggactaggtgcgcacttcagttctcggagagaagaggcgggagtggacctggtcagccctaccccactgaccccaccggacccaggcgcggcctccgccacagccacagcccctgcccctgctgcggcgcggcgaggcgaggcgatggccaaggtgtcggtgctgaacgtggcggtcctggagaacccgagccctttccacagccccttccggttcgagatcagcttcgagtgcagtgaagccctggcggacggtgaggctgggcctgtgcggggacccccacccccgggccgaccccggcctcccctcagagaaccgctcccatggccaacttgatctcccccatgaaacccctcgtcccccttccgccaaccccgatctcccccagcccgccagtcaaccggatctcccggtggagaccccccgccaccagccaacacggacctccccgtgacctcctcccccactgcccgccttgacctcccgggtggagaccccccgccagctaactcggacctcccagtggcctcttcccccactgcccgccccgacctccccatagagattaaccccctccaagccccatttcccgcgtggggaacctcatccatcttttttctctggagctcttcctaggtacccgttttcatggggagaccttctcggcctccatttcttaacccacggagatcttcagccaccgtggtttccctgtggcaagacccccgcttcaaccacccacccatttttgcccacttattccctctttcctgtagtgagatactcacacctcccattttccctctggagacccccaatatccagccccttcccattttccccgggggaaatcccagccatctcctattttccctatggagacctctcacccaagctcctctctccttgccgtgaagaccctcccctccagtaacctttttttcctgtgaaaacccctcaaccccttttcaggacctctctcaaccccatcttcccatttgtgtcccaccagtcccctccccaacctgccaatatttcaataaccccacgcccaccagttgctgccgcttttctgccccaatgcacataccctggaacctggtttctctccttcgttggggcccaacccccctatgcttgagctctccctgggaaaggatgctaccgtctttgaggggaactttgtctccccagctccccttccccacctttctctgtgggcttggataaacacactgagatccgaggggtggcatagccaggcaggcattagctagttctccaggtttgcccacccgtttccagctgagttactgcagcaatttttctgtcactttttctttcttcttcttcctcttcttttttttttttttttttttgagacagtctcactctgttgcccaggctggagtgcaatggcacgatctcggctcactgcaacctccacct

SEQ ID NO: 1887565 - DNA, 4001 bp, Homo sapiens
gcagggtgctattaagtatgagagaagtgaggggcacactgaaatcaagggagaatgagatggaacagaaactttagagtcaaatagacttacatttaaaaagctagattttccccttcaactttttttcctttggacttttcagattgaacaaagttttatctcatctatggcagacgtcttaatgaggtcagtgggaccaatgccactcaatatacattcgccccatggggaaaacctgttactaacatcatacaaacatcataggcttcccctctgaatctccattgcctcctggctcacacacagaggattacatgcccctagttctagaagagacagactccagctacaatttcccctagaaagagtgtcactggcttcaacatcataatgcctcggactcccccagcccctcccccatatgtccagtgaaagcagcaacatgaagagcatgaaaatccccacatgaatatgccaagcgctgggaggcaggggaaatctggtagtttgtgatagtggaaaggggtcactacattgcggtgggatggcgagatttaaactgtccttttatgacagaatgactttctgagggctggccatttgagatcctacagccggatgagtagagacactaatatattgtgagggagggcagggagtgtgacccttttatctaaataaactttattgtgtgcttacatgtgccagacactgctctaggaactgttcatgccttgtctccaaacactgccttaaagcagggctgccagataaaatacagttacatttgaacttgatgcccggttacatttgaatttcagtgaaaaatatttgggagatacatgctaaaaaattctgttttctttttctttgttttgttttgttttgttttttgagatggagttttgcttttgttgcccaggctggagtgcaatggcgcaatggcagctcaccgcaacctctgccttccgggttcaaacgattctcctgcctcagcttcccgagtatctgggattacaggcgccggccactacgcccagctaatttttgtattttcagtaaagacggggtttctccatgttggtcaggctggtcccgaactcctgatctcaggtgatccgcccgcctcggcctcccaaagtgctgggattacaggcaggagccacagcgcccggcccttgttttcttttttaactgacatccaaacttaattgggtgtcctccattttaatttgctaaataaaatgtggcaatactacttaaagctactatcattccccttcctccaggtgaggaaatgccccaccacacagccagaatgtggcagggcgaagagtcagactccagacatgtgctgagccattatgccattgtcccgcctggccgtgctgggatgtgcatgggacgctctggcctttgtgacagaggccttgcatcagcggtttgcaagcatggccggctctttacggttctacggggtccccatgcagcccttcataaaggcaacgcttgagttccaccaggccggaagaagccatgaaacaaaagctatgagaaggccgggcgcggtggctcacgcctgtaatcccagcactttgggaggccgaggcgggcggatcacctgaggtcaggagttcaagaccagcctggccaacatggcgaaaccccttctctactacaaaaattagcccggcatggtggcgcgtgcctgtcatccaagctacaaagtaggctgaggcaggagaatcgcttgaacccgggaggcggaggctgcagtgagccgagatcgcgccactgcactccagcctgggcaacagaggcgactctgtctcaaaaataacacacacacacacacacacacacacacacacggaaaacacggccctggactccgtgtatagaacctggtgtctcagggcgttgggcaggagcagaggcaggtgtctaagccggaccattggctcccttccgcgccagcccggtgtgctatgagaaccttgttgccgcctagctgaagctgggaaaagcagccgccgcactttggcgagaaagcacgcggaacccaccgaacgcgcatgcgtgcaagccagggcggggctagggcgcgcgcgcaaaggaggggctctaccatccgcggagccacgccctccgtcacatcccacctccccgcccaggagcttccgcgaggctcgcccggcagctcctgctccacagcaggcttcctactttgacgcctcacgcgctcttcagctctctttttctgtgggtctcgcggctctccccctctacaattacgagtagtgccttgagccgggcgttcggagacccacacaggagggacaggatggggagagcggcattaaagggtggtgactcaggagttcaagaccagcctggccaacatgacgaaaccccgtctctaccaaaaatacaaaaattagccaggcatgatggcggacgcctgtaatcccacctactcgggcggctgaggcaggagaatcgcttgaacccgggaggcggaggttgcagtgaggcgagatagcgccactacactccagcctgggcgacagagcgagactccgtctcaaaataaaaataaaaaaaaaataaaggcggggtggtggtggtgacaagcccctattacggccttagtgcgggattccccttggggcgggagacgtcgtccttccgggtgcgggtgcggactgcaagtcctatcggggaccgcgacaccggactgcatccgccagcgtccagggcgtagcgccccccaggcgctgccttcgtccatctctacggggagtggcggccagaagactgggttttccccgtgcagctgtgccccacgttggggaaactgacttttcaggtaagatcccttccaagttccatggatttcgcctttccctttaacctgttccccagcgtcctctggtgatagcagatgagggtggtgacaggaatactaaagttccccatctgcctcgtgttggaagtctccatggtgttcacctccccaatgttgcctgcaagtagataggagcagagatggtacttggggaggtgaccggaactatggctcctaacatacagggcgttgggaactacggctcctaacatacaactctcagtttgccccgtctgtagctccctgtatttcgtctctccctccccctcaaagttcccaaagagaaaaggtggaggcgacaggtggattgcagctctcaggagatcctgtgggaagagggagccttcccagcaggcgccaggcggtggcttccgctccctaagtagccaagctgcaccctggcccgcatgtggctggagaaaagtgcactgccaccctgctcccgctttcaagttataaccacgaacctcaagtagttcttagtgctcccccgcagacacactgtttagggttttgttgtgtttttagtccactcactgccaaacacaacttttcaaaccgaccgcacactcccattgcctccctctaggctaataagtgcttcttcactgagaaaaccaaagctatcagatgagattctctacagactcccagcaccatgcctacctatctgcatctctgctcatatacactgcctctcctctcttgccgcaaatgaactaaccatgttcttatctaaagtccattcagcaattaggcactagattccacccccttttatctgtccagtttttgtttgtttgtttagacggagtcttgctctgtagcccaggctggagtgcagtggtgcgatctcggctcactgcaacctctgcttcccgggttcaggtgatccttccacctcagcctcctgagtagctgggactacaggcatgtgccaccacacccagctaacttttgtatttttagtagaaacgtggtttcaccatgttggccaggctggtctcaaactcctgacctcaagtggtccacctgcctcggcctcccaaagtgctaggattacaggtgtgagccagcgtgcccagccaaa

SEQ ID NO: 1887566 - DNA, 4001 bp, Homo sapiens
ttgctggaccaccagcaggctgactcctgggagaagatggtatggtcaacttccacttgtggccccttcagtccagcactgggtgcctatgaccacagaactgccagtcacccagagggaactatggaggcaatgaccaccgagtccaggctcagctctgagagctgtcccgggaacagcagtgcagtccacaaggtgggccgggggccaggcagggcagcattggtacttggggaactctgatgggattcccaggcagcagccacatctgcccactgctgaagctcactgatgatctccaggctgtcaggagagatgggcctgggcagccctgcagggtgggggtctttgggtgaagaaacacttgtctgacgttgcttgtggactgacgagaagatacctgggaacctggagacaaaatataggtaacagagaaccagaatgcccagggagcggagggtagaggagaaaattccattaaaaaattcctgacctgtggtccctgaaattctgttagtttgatgtctaacaacatctcccagtcaaccttttccagtcacaaagaaaaaaattatttgaaatgtctatccatgacaaggcagtcccccaatgtgtaaaatgataccaaagtgaatcctatgagataaggaatataaaacgctaagacatcattcttaaaactggtcagactttttcttgcagtaagagacagtgatttgggtgggagagagaggaaaataaagctaaaaagcagttccttctgatttaaaaacaaaacaaaatccaaagctatgaaagacagctgagacaaacaggaagtctgaatttcagcctgaatactaggtaattctatggaattgttagctttttctaagtgtaataatgatattgcggctagaacagaatattcttaattttaaaggaggcatgttgaagtacttagagataaaatgacatgatgtcttcgacttacaaatgactcaaataatagaaagggagggagaaaagaagaaggcttatgaaaactgataatcattaaatctaggtgcagggtacatgggtgctcatggtgctttttttcaacttctctctatgtatgaaaatttaaaatttctataatacaaagctaggaacgagagcattgcagctctcatgtctcagtgctgggaggatacatgagaaccacttccactgaggggagcttggcgagagttcttaaccctgttcatggccacacatacacccttagacctggcaatcccactttaaggaacatatcctagagatataaccacctctgtgaaaaagtgctgcagtggagggcggctggccgctgggggtcacagagcaggacttggaggatctccaccacccctcctccccgaccccagtatttggcatggtccctcctttcctcgtcctggggaggggaggctccttcctactcctggccggtctatacaggggtccccacaaaggtgaaactgtcaaacaaatacgcagcccaaatccaggtgaaacaagtaagtcattggctttattctgggtcctggaagctccagtgacagtctgaaaaagagatacaacaggagtgtcggcccacagggctggtgcaggatacagtctttggctgctttggccctgggagcctaaaggacagtgaggagaaggcttcacaagaggcctagagcagggggagttacgtcccctgggaacccctcgcccccagaagaaggaggaagatggctggagagtctgctcggttccgcagccctgccccgcaggagggggctggtcatgggttactccttgcccttctcagggtactgggctctcagggccacttggtagcccccaggggctcagtctcagggtccagccgtggttcctccaagggcccctcaccctccaggtccagctcctcaaaagaggagccgctggcacctgactctctgcagctgcactcactgcaggtgtcaccatcctcccagccgcggccgctctccccaggtgacacggtagcaaatgaagtctcccggctaccagggctcacctccaagcttccagaactcgtgtcactcatcatgtcagttcctatggccaggaaaagggagcccaggttagccaggtccactccgccttctcctccaggaaaaggcagctcagcacacacagcacagtcatgaagaatgcagccacccagtcccagggcgctcactgcctcactgcagctgccttctgccctgatggggcagtgggaaaaaggcagagggaaggccaggcacggtgattcacgcctgtaatcccagcactttgggagagcttccatttccattcccatcaccctgtcccttttcccagcctgctctggtgaacaaagttgcaaggatcctccaagtgttccaagctcccactcccacagactctcctgtcctgttccctgaccccagccacactgaccatgccctctgcccagcccttgctgccccaggctgtccatggcctacctggccccaccgaggcaggaggcacagggcagctggtcaaatactgccagcaggctgatgtccccaaacatatccaccagcccagccctttctgaactccagaccacacatcccattgcccactccacacccctaacttggatgtctctcaggcagctcccctgagatagcccaataacctggcttccccccaaaaccagggcctccctcagttcccccacacatcagtgaaaagcatcactacatgcttgcccacctgcccaggccagagagaagtggagcccgctgtgactccctcactgcctctccccacaacagccaatccacctgaagtctgtgagttctgttccaaaagtgcctgtaaatctccgcccttgtctgcgtctccacagccactgggcctgcccaagccgctgccactcacacagggattcatgacagcctcctaagcacctctacctcaccccagttctgtggtccagccccttcctgcctgggaatgggacagcccaccttgcacacacgctgctccaactgtgttattttcctggttggaacactgcagtgacttcctgctgcatttagaccaaagctctgcctagaatgttcttacctcttctccaaaggctcctctaggactctgccttgaggtgatctcccctgagaggttgtccctgatcattctgtttaagtcggttccctgacttttctcaccctctccttctctagcacatgtcccatttttgtctgacattgattacctgtcttcaccacctcattgtaaatgcctgtttcatgcaccaaagtttcattcacattgtgcccattatagcacccggcgcacagaaaataaacaagttaaatgaatgaatcaacagtcacttccaagccccaatgggtcattttcctggtttccaggtttacaaaacatttagaggaggagggatgcgtaaaagggcaagttttaaaaaaatctctgtagacacacagacctctgtcagacaacctggtggctggctctccttcctccaggaagggtgtgctgccaccatggccagtgaccaggttaggaagtaaaggagaagggcctgccattgctgccccagccctgggctcagggagcaggtgcatagcagaggcagggccaagggcaacacgtgattacctggggcctgcccagccacggggagcctcaggtccttgctttgcaggcttctagcagtgggagagaaaagtggactgtccttccatctgagccaggagtgtgggattagcactaagcatgtctttggtcaaagccagagccaaaccaaccagaccaggttcatgaacaagctctccatgctcttgggagatgctctggctcccacaaggtcttgggcatctgaaagagatgccaacacctcggcccatcttcctggctccacaggtacctgttccatgagggccccagagtgctgctctccccaaatcacctcttcctcccactctggg

SEQ ID NO: 1887567 - DNA, 4001 bp, Homo sapiens
aggaaccagctctgggacacaatagtagtgttagtacccaaggatgacttctatgggagagatacttggtctgggaatctttaaaaaaaaaaaaaaaggaaagatggaagggaatggatgggtggatgaatgggtggatggatagatgaatagatggatggataagttgagggatagatgagtggatggatggagtggcaggatggatgagtggatgaatcaatggatagatggatgagtgggtggatggatgaatggatggatagatggatggattgaaagagggatgagtggatggatggatggatggatggttagatgggtggatgggtgatacatgaatggatgagtgggtggatgagtggatagatggatagatgggtggatgaatgggtggatggatgggtgaatgagtggatggatgaattaatgggtagatgggtggaagggtgatgggtgaatggatgggtgggtggattggtgagtgaaggatggatggatgagtggatagatggatgggtgggtgggatggatgaatggatggatgaatgggtgggtgaatgcatggatggatgggtggatgagtggatggatggatgaatgaatgggtagatgggtggcaggtgatggatgaatgaatgaataaatgggtgaatgggtgagtgaaggatggatggatgagtgggtgaatggatggatgaatggatgagtggatgggggtgtgggtgggtggatgggtagatgggtggacgagtgagtggatagatgggtagatggatgtatgagtagatggataatgggtgaacagatgggtggatggatagatgagtagatgaagcgatggatggatgggtggattgagtaaatgggtggacaggcaggtggatgatggatggatgaatagatgggtagatggatagacggatagatggatggatgagtgaatgaatagatggatgggtggatggatagatggatggatgggtgggatggatggatggatggatggatgaatgggtggatggatgggtggatgagtggatggatggatgaatgaatgggtagatgggtggtgggtgatggatggatggatgaatgggtggatggatgggtggatgagtggatggatggatgaatgaatgggtagatgggtggtgggtgacggatgaatggatgaatgggtggatgggtgagtggatgaatggatgagtggatgggtgggagggtgggtggatgggtacatgggtggatgagtgagtggatagatgggtagatggatggatgggtagctgggtaatgggtggacagatgggtggatggatggatggatgagtaaatggagagatggatgggtgggtcggtgggtggatttcgtaaatgggtggacaggtggatggatgatggatggatggatagatgggtagatggatagatggatggatgagtgaatggctggatgggtggatggatgggtgggtggatggatgatggatggatggatagatgggtagatggatagatggatggatgagtgaatggctggatgggtggatggatgagtgggtgggtggatgggtggatggatgagtgaataaatcgatgaatggggtgggtgggtggataaaagtttaggagtgaaggtagaggctgggaaatcatggggaagtctgggccaaggaagtgatttttaggtgtggcccaggagtgagacgaatgaatggagtgagggctcagaggacactgagacccgagatgagaggtgatgcccacagttcccaactggtcagttgctgatcccactcccgtctcagtctccagagccccctctcgacggctgcttaccctgtctggctctggatgtggggtttgagggactctgaggatgcatgggaggagtgggtctcagggatcaggagacacatccagcagctgcagcctaactgcttcatcatcagtcccggtttcccctcctgtgcaatggggcaagtcccttcttgcttgaggccctgggccgggcccgtccaaagcctctgttctgggacttcctgagtaacggttgcatccccagggaaatgacgcacagatggttatcagcgacccacatttctcagaagagagagaacaggaaggtgggggcagggttcaggcttttgttacggtgcgtggggctgagtcacagatggaggggaggacgtgtgctctgggaacagccctcattcccatctgtgtggccactggacatgcccatggccagccagagcacaggagccccatagcacagatgggaaaactgagttttggagatgtttggcaatttcctccgccgggtcgcccagccagcaccagggcacatctcagatctgtccaacctgctcccctctaatatgggggtagaaagcaggcagcccagcacagtagaagcttgggaaagtccccgctcctccctggatctcaggcttctcatctgtaaaatgggcgtaagactcatccttgcctcgcgggaatgacatggcaaatccacgagaggctagcacctattcttgctgtcgctattatggatcttggcatatcccagacgtgatgggggttgggggtgtcacggagcaggctcctgagctctgaaagggggcacctcggttccctgtaggatcgtggacgtcgggggccagaagtcagagcgtaagaaatggatccattgtttcgagaacgtgatcgccctcatctacctggcctcactgagtgaatacgaccagtgcctggaggagaacaaccaggaggtgcgccaccgcctccctcgccctgcccacttgttggcccagggaccctcacctgagcaggaagctctggtgcagaaagggagggatccctgctcttgaacgggcctgtgtgtgcccagcatggctatgaacttgacccttcagccttttgtggtcagattgcagcaacccaagacacagacctacagcatttgtttggtcaggaccccagacacacacacacacacacacacacacacacacacacacactacagtgcacacacgcacatacacaatgcatgcacacaaacacgcacagacacgtgcataatacatgcacatacacacgtgcacacacgggacacatgtacacacgcagtgcacatgcacaacacatgcacacgaacacacatgcaccacacacatgcacacttgcatgcactcacgtgcacaatacacgcatatgtacacatgcgcacacacatgaacacacacatgcacacacacagtacacacatgcacacgcacacacaggcacacacacgcacacacaggcacacaggcacacacatgcgtgcacacacacatgcacgcacacgcacaggctggagtgcagtggcgcgatctcggctcactggaaactccgcctcccgggttcacaccattctcctgcctcagcctccggagtaggtgggattacaggcacccgccaccacgctcggctaattttttttttgtattcttagaagagagggggtttcaccatgttagccaggatggtctcaatctcctgacctcgtgatccgcccgcctcggcctcccaaagtgctgggattacaggcgtgagccactgtgcccagccaatagcctcttttaataagtacaccagtcgtctaggatcagggcccaccctactccagtacgacctcatctgggttaattcctcgtgtgatggccctgtttccaaagaaggtcacaaactgaggttctagggggttaggtcttgaacgtatgaattttggggaaatatgatgtaccccataacacaaggcatttgagaccttattgtacttttttttttgagatggagtctcgcttttgtcgcccaggttagagtgcagtggcgcgatctcagctcactgcaacctccgcctcccgggttcaagcgattttcctgcctcagcctcccgagtagctgggtttacaggcacctgccatcatgcccggctaattttttgtattt

SEQ ID NO: 1887568 - DNA, 4001 bp, Homo sapiens
acagtccaacctaacaggaggggcgctgcttcggacttagcttctgcccagtgagagagggtctccccgtgactgtgctgccagggaagccacttgacccagatgcccccaaggagggattaagcccgagccccacctctcccttagggacctccgcccaccctaccctcaagccaggatgcccggagcgtccccggaagtgggtgtggttcaggtgatttaactcattatttaatacgcccgcagggtgcgtgtcttgcccccggggccacagcctgcaaggacattatctggacttagtcccctctccgtgatgccgcagctgagtgggtgtctgggctagtcccgcccccacgttgccaatagacgtaatgagtgcgactcaggctgggtccggaacccttcctagtgagcggaggtcccgagctccgctcggcagcgcggccctgggggcgggtctggggtggggctggccctgacggctcacaccagcgccggcttcaagctgccatagctggagttctcggtactgtaggctttcggcacgctgtagatgccccgcaggggcttccagtgcgggccgccccagggcgcctccagcgggcagaagcggtcgagccgccggagcgggtgcagcagggggctgtaggactcctgagccagagacagggctccccggtgcggcatggccgaggtcaccgggctgacgcgcggcacgcggacccgcggtggtcggggcggccgggaggagcgcggacagggcggccgctgcgggccgtggctccagacctggggcgtctcttcgaagctccagtaggtcagggagtccttgcgggggtatccggacagctccgtcctgtgggagcagggcgggatggtgaggatacagctggatccttggggacgagtttcagacctcgggatctaaggagtctgcacattcaaactcctgcatttccaggcgagcaccccttaggaaggacgcgacccggcacgcgttgcctgcgttcctgggtcctcgaggtacttaacgtcctggaaactgagctttcgcatcctagggaagtaaaaggggactttcgcttccttgggaaggagtatctgggggctcaagtaccgaaggaggccctgccctcagatccggaatcccctcgagccgctgtgcaggcttcctgtccctaccgcggttcctgagaggtgacactaaggactcctgggtgcttaaaaaaaaaagggaggggctgaggcctgaactttggttcttgctgctacagaagtcgaggctgagaccaccggctcagggaatgggagccagcccaggggctcggcgtgcaccggccacggcgggggctgtgcaggaggcggtgccgagcgagagcccggcttacttgggatagaaccgaaagtcccgcgccgaggtggtcagatagagctggcggcggtccaggacgccccggtcggatactgtgaaaggccggccagacagctcggggttcttcgtccaggcaattagagcctgagcaagattgggggaggaggcatacccaagacatagatttcataccccatcccaagccctgggtcccgagttcagaatccctctccttcggcctcgacagccatgacggccacggccctcacaccccgccccagggttagagcccttcctgccacccacgccagggaacttcagcttcctttctcatacccgaacccttcccagcctcacctccctaaatccaagcaccttctgctgttcaaggaactcaaacccaagcccccagccaccaaaaacaacctccctggttccgctctgtcttaaaccgtcttggtgtggccactggagctgagctgcatcttgggcagcaactccaagttacctctcccaactcccacctgaccccgtctcagaatattctagtctcctccccacccacagcccgccgtctagctccgcagcagcttaggagccctgaaggtgagtttgtagtccctggtccttctggcctggcctaatgcccagcccctcccccggctcctctaacctcgcgatcccgccccagaccctttagccacgccccaaagccgtgattccttctggccccgccccaggctcccggagctccgccccgtctcgccggcgccggcttccacccagacacctgggaaggacccccgcggtggtggtctgcgagttgtgggggctggggcccgaagtattccggggcgcgcgggtccccgctgggagagccagtgtactgcgccctcgtctcgctgctctggtactttgtggtcagtgggaggcgccagccgcggtgtctgagctgcggaaaggcgacccagagactcacgtgaaggagcaggggactcaaatgcagtcccccgccctgtcccctgcggactccggcactccccaaactttaccttttctcctaaatccttgatccccacagtccgcgtggggtctgcaggctctggggctctgggctgggcgcagggcccgccatgggtcttgggcacgtaggccgagccagaggttgtctcccatctgctgaggacctcgtcgaaagcccagttgtgagaatcctgctttgcaacttggggtagagggtccgcgaccgtggactggagagaaggcgccgcacatcagctagaaagactcaggagtccctatcaccccccaccccaaactctgacctcttccagtcggcccccagccctttcctctgcagtccctggcattcagcttccctggtgcctcctctctcagacccagaactccaggaccctcctccttcagagaggagtccaagctcccaatccgctttatttagcccctatctttctgggtctccaggcccggcagggctgcagcgtagggtccgctcacctgcaccgtgggcggggtgaagggtatgggtgggataatgcggtgggaaaagtagctgctggtgagatggcagttgggcctggatccaggtacctcggttgcagagatacgacagcccggagccagggtgccactggccatggttccacccccactccgtagccaagcaggagctggcttattgtggttgttgccccaggtgacagaacccgcccacccagaacctagtcaatcaagggcctgcaggcacctggatggatggaatgagaaagagacccagagacagggaccccaagaggggtacaaagaaacacaaggagggggaatggagactcaaagataggagggtggaaagggaaggagaagttcagtatttcagagacccagggggtgggggagagagaaacccaaaaagagggacagggacctggaggtgtcagagatccagacagagagacagagacccctgcgctgcacctagcaactcaggacatccatgagaaacacccccctttcttccagggcccagatgctcctggctgcttcctccctctaccaggcctgcccacctcagggtaacgatttccagacatccccggggctccccgaccctccctgcatgcacgtgctgaagtaatcagcactagcattggctgtcctgcctgcctttgattggcttgaaaagttccacctgggtaggcggggtgtggaaacagggaggcacccacagagaagtgcaccggaccatagcgaaaaacatgggctttgatgagtgagaaagaaatacaagagaggagagagacagggaggaagacacagaccacgctggaaacggagctattagtactcacccagaggctagagccaccggaagttagagacagagagaaaggcggcaaaaaagagcaaaatcagagatggtaacaaggagatgtagaaacggaggcagccacacccctccctgccgaggggcctggtctgtacagattggtggagggggtgcctatgtcctttgctcaaagctggacctgagagagagagagggggagagaaagtgagagagagagagtgtgtgtgtgtgtctgtgtctgtgtgttggcaacacatgtgg

SEQ ID NO: 1887569 - DNA, 4001 bp, Homo sapiens
acagcctgcaggggtgtcctcagtatcagaactagtgggccacacaaagccctggaggactctacaaacccaggtccatggggagcagccctgtaagggccagatggctgggtggaaaagctgaccaagtcttccttcctttcagccaaatctggaagaaaggcaccttgcctagagcagtgttcctggtacccaggcctctgtgggcatccttcagcacaaagaccctctccaaggggggatgggctggccctcccaggaccaccaacccacttccagaagcccatgggtcatccccaccttcacctgactgggctgtccctgacgctaaggcccagcagcacgaaggggattccacacaaatcagggcagtaggctgctctctggcggcactgggggcttagggtctggccagcctgtccctggctcaggacacatgcctggaaattagggttttctcctctgctcttagcatctcctgggtaaaccaataattactctccctcatgtctcaaaattcacatctatctaaaaggcgctagtgagggtgacatttccaggaagccatagcccatgtcaccccctgcaaagctgtgaccttttccgcgggcaggccaggcggcggagttctcccaaaagcggatgaactggcactctggctggagaaagcagagagcagcagcacaatggacagcgtctgggacctcaggccgattccacagcagcttaggaaagcaggaggccccctgggcgggaggaggcttgatgctctggagggaaacggaactgagcagcgggaggtggggtgagcctgagacccgaccgattttggcaaaggcgaggcgcactttgcagtatcatactctcctcactgcccagcccagacctgcccttcaagtccctctatggactcactccccttagccaggggtggcacagattcagtagccagcatgggtttggaaacagaggtcaacaccgccctgcccctccctgcggggctgcgcaacacccttgaaccctgcgcatgctgagactgtagtcccatagccctgcgaccaacggccggaagcagctaagacactattaccagcatgcccggcaggagggcaccgcgctgcccccccccctcaagggaccagcatcatccccactcccgtagcatactgggattgtagtcccgcagctctgccaccaacagccagaagcagttaaaaaactgttcctctcagcatgccctgcaaggcgcgcaccgctgctgtacctcccttaacgtatccgtaacctccctcaacgtatccgtacctccctcaacgtatccatacctccctcaaggtatccgtaccttcctcaagctatccgcaccaccctctcttccatttcatgcgaagattgtagtcccgcagccctgcgaccagcggccggaagcagctaagatgctactgctcccagcatgccccgcgaggcgcgcacagcacaggccctctctcaaggtcaccacctccactcccgttgtatgctgggattgtagtccggccgccctgtgactaacggctggaaccgcctaagacaccaccccagccagcatggccggcaggagcgcaccgcgctgtctccctccagggatccgcaccgccctacaatcctgctttgtgctgagattgtagtcctgcaggcgtacaactaacaagctgggtgcagataagagactacagctccccgcatcccaagcaaaggtccctcctctacggagcccctccacgcgtccactgcggttccgccgtgccaaggggagcttggctgttcacgggcctcacctgctagcgagaagatagcttggccgggcggctgatctcaccttgtaattctgacactgtgtctcccgggcttgtcggcttcatgacttgtgcccaaagtttgatttctcgcagaccaggtaaaagccaagaggctctcataggcgccttggcagagttgccattggaacgggcgtcctctagtagctgggatctccccgccccttcctcctgaggggccactcctttctgccccacccttcttattgccccaccctttgccacactccttcagagatgcgcagtgctgcccctttctatgggcagggccgaaggtccgcgtgtaaaagtacccagtccctggtaacctgacacttcccttttaaaagccaccttttgtctatctctggcctgccacgattcttcctgtgctccataggaggacccattggacccccgggctggctgcagggcccacacctgggttagacctcgcacagggacgctgctgccactgtaataaagcgtgcctacacgcttctgaaactggtgtaggaacaacctcagttctgtgaaaggcggacgcagcaggacagaatctccgtggacatctgtctggaggagcaattttactgcgacattttaaagaaacaaatttaattgatttccaaggtaagaaattaaaccttgaaaactaaactgaaaagtcatctgtgtttgacaagtcagactttctccaagaagaaaactaaggagtgcatattttccattattataaatagtgaaaatgagaaatcatagcaactccctggaaaatcttgctctgccagttttctaaatcacagtagggcctcgatatggttttatttgtttttgtttttgttttggagtgtgttcaccttttgaatataagaatttgcggttttgaccaagtttttaaattttcagctattgtttatttgtttttgtattatatttaatttttctgtctctccctctctgtctcagactcaatcatttcacaggtctcttaggcctcttttcattttctttaaacttgtttcagtcttcagattggatggtttatattgctgtcttctgtttctactctgtaaactaaaagttctttttattttattattttattgtcttctattttactctttttataatttccatgtctctgctgagactctacatgagttaattcattatgagaatattttcctttacccccatgaacgtacttataatagctgccctgaaatacttgtctgctgattacatcatctcggacatcttagaaatagcttctgctgcctgctttttatcttgtgtatagtttgcatgttacatttcttcacacattttatgaattttaatattgtgtaatagaaattataaatattagttatagagactaaattctgttgtattctttggaagagcattgttattatttgaagagggggtaaatgtggctgaattcaaacagaataattatcttccctacggtgggaaaggttgaaattctcattcagtcacacacacgtatgtatgtattgtatatagatgaatgtttctatgtaactatatataatattttatccagattgtatcattgttatctgtgagagtgttagtttagcaagctactccagtattaccggaagccagaacttcagttttgttttcttactggattttatgtaaatgagagtatctactatggatagttttacacctactttttctttttttcttttttagttatttgagacagagtctcgctctgtcaccaggctgtacagtgccgtggcctgtctcggctcactgcaacctccacctcctgggttcaagcgattcttatgcctcagcctcccaagtatctgggactacaggcatgcgccaccacgcccagctgatttttgtatttttagtagagacggggtttcaccatgttgaccaggatggtctcaatctcttgacctcgttatccggctgcctcctcctcccaaagtgctgggattacaggcgtgagccaccatgcctggccacatctacttttttaaatgtgtcattatatttgtgatattgtcatgatgttttctacttatattttattcaaaaattttatactttaagttcttacctttaggtctttgatgcatttttatttgtttatggtgtagggtaaatgttcaa

SEQ ID NO: 1887570 - DNA, 4001 bp, Homo sapiens
ctcaatcctgagcacccctccaaggaggtcaggagaacaagccttaagccagagagtgaagaggatcagtgtctcggacccagagaggattcagggaaagggcacaggagggaccccagtccagagccagacagagttcagctgaatgtgggaactcatgccatggagtggatagccctggatgactgaagagcccagtgcccaggggcgtctcacccactgtggagacaggcccttatattaggtggcaatggggccacctgagttctggaccatggctcaagcccaggccaagcagccctggagtaagggcatgaggcagggggccccaagccaagttgaacactggggtaccgtccctggagcagcctggggtaccctgacagcacccatgccccagtctgcacacaccccttgttctgaaattaacagcctgcaggggtgtcctcagtatcagaactagtgggccacacaaagccctggaggactctacaaacccaggtccatggggagcagccctgtaagggccagatggctgggtggaaaagctgaccaagtcttccttcctttcagccaaatctggaagaaaggcaccttgcctagagcagtgttcctggtacccaggcctctgtgggcatccttcagcacaaagaccctctccaaggggggatgggctggccctcccaggaccaccaacccacttccagaagcccatgggtcatccccaccttcacctgactgggctgtccctgacgctaaggcccagcagcacgaaggggattccacacaaatcagggcagtaggctgctctctggcggcactgggggcttagggtctggccagcctgtccctggctcaggacacatgcctggaaattagggttttctcctctgctcttagcatctcctgggtaaaccaataattactctccctcatgtctcaaaattcacatctatctaaaaggcgctagtgagggtgacatttccaggaagccatagcccatgtcaccccctgcaaagctgtgaccttttccgcgggcaggccaggcggcggagttctcccaaaagcggatgaactggcactctggctggagaaagcagagagcagcagcacaatggacagcgtctgggacctcaggccgattccacagcagcttaggaaagcaggaggccccctgggcgggaggaggcttgatgctctggagggaaacggaactgagcagcgggaggtggggtgagcctgagacccgaccgattttggcaaaggcgaggcgcactttgcagtatcatactctcctcactgcccagcccagacctgcccttcaagtccctctatggactcactccccttagccaggggtggcacagattcagtagccagcatgggtttggaaacagaggtcaacaccgccctgcccctccctgcggggctgcgcaacacccttgaaccctgcgcatgctgagactgtagtcccatagccctgcgaccaacggccggaagcagctaagacactattaccagcatgcccggcaggagggcaccgcgctgcccccccccctcaagggaccagcatcatccccactcccgtagcatactgggattgtagtcccgcagctctgccaccaacagccagaagcagttaaaaaactgttcctctcagcatgccctgcaaggcgcgcaccgctgctgtacctcccttaacgtatccgtaacctccctcaacgtatccgtacctccctcaacgtatccatacctccctcaaggtatccgtaccttcctcaagctatccgcaccaccctctcttccatttcatgcgaagattgtagtcccgcagccctgcgaccagcggccggaagcagctaagatgctactgctcccagcatgccccgcgaggcgcgcacagcacaggccctctctcaaggtcaccacctccactcccgttgtatgctgggattgtagtccggccgccctgtgactaacggctggaaccgcctaagacaccaccccagccagcatggccggcaggagcgcaccgcgctgtctccctccagggatccgcaccgccctacaatcctgctttgtgctgagattgtagtcctgcaggcgtacaactaacaagctgggtgcagataagagactacagctccccgcatcccaagcaaaggtccctcctctacggagcccctccacgcgtccactgcggttccgccgtgccaaggggagcttggctgttcacgggcctcacctgctagcgagaagatagcttggccgggcggctgatctcaccttgtaattctgacactgtgtctcccgggcttgtcggcttcatgacttgtgcccaaagtttgatttctcgcagaccaggtaaaagccaagaggctctcataggcgccttggcagagttgccattggaacgggcgtcctctagtagctgggatctccccgccccttcctcctgaggggccactcctttctgccccacccttcttattgccccaccctttgccacactccttcagagatgcgcagtgctgcccctttctatgggcagggccgaaggtccgcgtgtaaaagtacccagtccctggtaacctgacacttcccttttaaaagccaccttttgtctatctctggcctgccacgattcttcctgtgctccataggaggacccattggacccccgggctggctgcagggcccacacctgggttagacctcgcacagggacgctgctgccactgtaataaagcgtgcctacacgcttctgaaactggtgtaggaacaacctcagttctgtgaaaggcggacgcagcaggacagaatctccgtggacatctgtctggaggagcaattttactgcgacattttaaagaaacaaatttaattgatttccaaggtaagaaattaaaccttgaaaactaaactgaaaagtcatctgtgtttgacaagtcagactttctccaagaagaaaactaaggagtgcatattttccattattataaatagtgaaaatgagaaatcatagcaactccctggaaaatcttgctctgccagttttctaaatcacagtagggcctcgatatggttttatttgtttttgtttttgttttggagtgtgttcaccttttgaatataagaatttgcggttttgaccaagtttttaaattttcagctattgtttatttgtttttgtattatatttaatttttctgtctctccctctctgtctcagactcaatcatttcacaggtctcttaggcctcttttcattttctttaaacttgtttcagtcttcagattggatggtttatattgctgtcttctgtttctactctgtaaactaaaagttctttttattttattattttattgtcttctattttactctttttataatttccatgtctctgctgagactctacatgagttaattcattatgagaatattttcctttacccccatgaacgtacttataatagctgccctgaaatacttgtctgctgattacatcatctcggacatcttagaaatagcttctgctgcctgctttttatcttgtgtatagtttgcatgttacatttcttcacacattttatgaattttaatattgtgtaatagaaattataaatattagttatagagactaaattctgttgtattctttggaagagcattgttattatttgaagagggggtaaatgtggctgaattcaaacagaataattatcttccctacggtgggaaaggttgaaattctcattcagtcacacacacgtatgtatgtattgtatatagatgaatgtttctatgtaactatatataatattttatccagattgtatcattgttatctgtgagagtgttagtttagcaagctactccagtattaccggaagccagaacttcagttttgttttcttactggattttatgtaaatgagagtatctactatggatagttttacacctactttttctttttttcttttttagttatttg

SEQ ID NO: 1887571 - DNA, 4001 bp, Homo sapiens
atttcaggtaagcttctgatttactgttcattgtgctttctaacgaataatttttatataataatgccaccagtaagcaccaaacccttcttcttgggaatgcaattaagggaaaaaatagcaataaattgttttcagtacttaacccagctccaaatttatggctgctgaaatttattgtttcaggggcctgaaaaaatggcgattaattttattccatttcctgccattcaccctcaaaactgaaatataaataaggagctgttctcggcctcgggttttcctgcctgttagaaccctcaaaactacagctctccagacagctacctctgaaggctcctgaagcttagaaacagagaggaaaacacccctttatctgcacgtgtctccaccactgcaattgctggaagctccacgagtgccctcggtgcacagatgtgctttacaacagagtgactgtaaatgagaaaacactaagttaggctctgacggccaatgctggatgtatccgtttgccctataaataagcactgatcacctccattttattgaactcattttctaggcaagcaaagaccacaagattcttctgcacattttctctttacaccctctagtactgctgctactgtcagctccgacagatttatagcccattcattcatgggaacaaaaaccctgccacggctggtcatgggacacgcaatagcagttagttcaaaagataacagctgcaatacctcacctctccattcagcactacagagccagcactacttcggaggtaataaatgcttcttgttagtgtgctttgagtcataatcctggaataactgtggtcggccttaccccgggccccgcccctagggaaaccgctttctgccactccccaacacccaccccgcaccttcactccagcccctttctgccagaaaagaggggagtggggggttgaaggcagcccactgcgtaaccaaaaagtggaccctgtctcctttttccagtccacccaacacaagctgggttgctgaacctttgcaactcaagcacttaggcaacgctgaaaagccgagcttcctcgtggtaagtggcaatgtgggtatatacattctccttgcaaactgatcagaaacagagctcgggcatgagtcctgtcccgacaagaagaggcagctggtctgactagtccaccaccatcctcagagcctggacacacacaacaagcatgtattaaaagaatccatggattttttttttaagtagtgaatgacctggggaggaatagaggatcggttccaccccgctcactcagagcaggaaaaggtttaatgcaagaagcaatatagtggtgaagcgttctgcctcattttgaagtcggcctttcccacccacaggcctcagtttactcatcttaaaatggggatgttaactgtaccgattctaccaacaaatcagggatttgttgctagaattaaacataaaaagtaaatacctttaaaaatttatcacaatgctaaccaagtagtatgcgttatcaaataaattaattagtttagttggagaaatcagatatgcacacaagaaacttaaaggaagatcactagaagacaaggtcattgacgatcaaactttagggaaatgtcttccatttttgaaaccctccaacaagacacatacacctgcccccacctctacctccaccagcgctctgtggcctatattttgcagagatgtgttattgtcactgttagtctgatgtcccgacaattaaactgcaaagagaaaaaggccagtcatgcagaaatccaacagcctggcctctgggatccgcccaccctagcaatgggtccaggtgggagatgggtcatggagatatggctggcccaggtcaggcagttgaaatggaagttgagagcctccaggctccagaaggcaccagagagagaagcaaagtcaaactccccatgaagacacacagttcagtggggaaagagtagactgtgaaacgcatagaaaaagacactgggcattagttgctatcagtacattcctccctaatcaatcagctttattgtgacgcctctagctcggctcataaggcctcagctcataaggccggaaagccgcttcggcagcagtttaaaatgtttccagtttaataatccctgctaattgaaagcagctcagaaaagcggggaagatgggggttggaagcaaaccagcaccgtttatggcaacagtgctgttcctaggggaaacaaaataacctttgatgctgcagggggaacctgcctccccgtccccaaacaaactaattcccacaactgtcttctttggcacgagagctgtttcttcttacgttttaattgtataatgttatagcagccgaattgctgtgaaatctgtttttaatctgtggccccctgctgcaaaaactggattattttttcttcaacagagaattacattcatttttataattgttctttcctttcaaatcacctaatatgacaaatgctggacaaccttacagctcatctgctgaagagtgtctttatgagttgaggcttcaatgctttcatggagaaattgcctgatttaagtaaatcatgtcactttcacccttgcaatcgtatttgtttcagacgtctgctgacctaacctgcagagcaaaaacaaaacacgtttacatttctaggctgagatatttagttcaaacgatgtacaaataggtcataatgaaaagtaattttagtacacggcaaaggtatcatttaagtatacttttgacagtttttacacatacataattattccagtattgtaatttaaatggataaaagacagatcttagcacaaaagcctccatcctggtttctcggaattccctggcagagctacagttggggacatggatatagaagaaggatgtcatgtgtctgatgtaccatgaatcagctgggctcaaccttcaccctttggatccatgcaaacctaccctagaaggtggatccagacacctagatcttttttttttttttttggtattttctttttatttttgtgaatacacagcaggtgtatatgtttatggggtatatgagatattttggtataggcatgtaatgcataataatcacataatggaaaacccatcccctcaagtatttatcctttgtgttacaagcaatccaattatacgcttttagttatttttaaatgtacaattaaattattattgataggtcggacaaacacagcctgggtgacctggtcctgctgtgtccccacccaaatctcatcttgaattgtagttcccataattcccacatgttatgggagggacccactgggagataattgaatcatggaggggttcccttttagtgttctcatggtagtgaataagtctcacaagatctgatggttgtatgaggggaaacccctttcgtttggctctcattctcttctctcttgtctgctgccatgtaagatgtgcctttcaccttccaccatgattgtgaagtctccccagccatgtggaactgtgagtccattaaacctttttttccttataaattgcgcagtctcgggtacgtctttacgagcagtgtgaaaacagactaatacaccaagcatccacctgcggccacaagaggatggctttgtattgagagacatgatatgtaagtagcaacagaagtgtaaatctgagtattcctcctcccctccagaaagacttgaaacatggaactggagggcactgagttttttagggtgattgccagatgtgttgattagtgaattaaacaaggctgcattcacaggaaggcaatgtccgacactgagaggtgcccccccgtctgggctggagtagttccttttgcagggaaacaaaccagctgaagtatgcctgggaaggaggaaacaggacagttttccaagtgtcatagctgaacaacaggggaagaaactggagaagagagaactctaggaaatag

SEQ ID NO: 1887572 - DNA, 4001 bp, Homo sapiens
agccagttatcccagcagcacttattgaatagggagtcctttccctgttgtttttgtcagtgtcatcaatggcatggtttggatgtgtccccacccaaatctcagcttgaattgtatctcccagaattcccacatgtgggagggacaccacagaaagtcagaattattaattaaaagggaaacagaactaagaattttaaaaattcacagcctatctactttggaaaaaaaaattagaaaacctgttctggataaaacaacggtagagataagcaactgatttaggagattagtttggattggtcatgtcaacagaagccaggacctgctgtccattaacactggaagaatgaccccaaaggcatctaggagatcatagaggctgctcctcccaacacagacccagagtgcacggacctgggaagcagaagggacctttgatgccaagtgcccctaaccttttaggctcagttccctgcatgctacgattgagtgtgtcaatacatcttatctttcgggaaggcagagtagatcaaggatacagctataactggcatatgaatagtgatcactcaattttcagagagcggatgtttggcatcaaaagtttggcacagtcaccttatttttgtgtctaaacaaaattttgaaaagtttttagtttagaaaaataggtaaacagtagactccattttttttaaaaagaagaatattggtttataggccaatgtatgtttatagggagaaaaaaagttaccttcaaaagagcaggtttttagatgaattgtttcctaatttagctttatactgttattattttttaaccaatgccagtttttaaattgctaactataataaagaaattatgtttcaccaagaaataagaagaaacttaaaaaaaaaaatctttaattattgaggtatctgttgcctaggctggagggcagtggtggcatcatagctcactgcagcctcaatcaaactcctgggcttcagcaatcctcccacctcagcctcctgagtacttggaacttgtagtcccaagatcaggccaccatgcctggccagttaaaaaaaaatttttatagagacgaagtctccctgtatttccctgtctggtctccaattcctgagctcaagggaacgtcctgccctggcctcccaaagggttggcattacaggtttgagccactgcgcttggccaggaagaaaactctttataagacatgctccttcacctatagaatcctcccgttttactgcatttacaatctcaatgtaagattgataccaatgcctagctcttcatcagtcattattgctctgaggtactgagcaattcactacattcgctgaaatttgatgtttctacatctaaggagaaatatgaataccatgaaaagtttatgggaagatagctattccatgacgacaccgcttctccactagtagctgtgatcttaaatgggggtggcttttcctgccaaaccagtggtcccacagcttctggagtaggggctggtgtcttcctgctcctcattgcccctgccaaaccattccacctggctcatcctttaaaccgttagttttaacctcccatcgtcagattatcctaatccttgaagattttatctcctcgtttgttctcttcccaataacactcctgtcatcgtgggaggcgtttagacttcaggaattcctgtctatacactattttcgctcaaagactcaggaagagagacggacgactcacagggtcacagtccacattccccaccaggcgctcagagatatggaatacgttcccggtgggcactgcggtgtgtgtagtcaaggaccaccgcggagtccaacgcttcccgctgaagagtgagattatagacattttcctttggcattggaggaagcggagtccagacacactctgagtcgcgggcaagttggctcaggcgggtggacgagtgaattctgggaactgtagtccatcaacttcatggaatggcggaccctttggctcaagcagttgaaccggggaattctgggaagtggagtccagacgctctgtggagacgcgagcacttccggtgtgtgagcctgcggttgctacataaccgcgtagtttgagccatttctgcgtctggcgggtccttctgaacttgtcaccttcgcttggggtcgcaacgacccgatgatcgatgatccaagcaagggaaaagaagccttggcggagagcggaggtttggtgggggcggggaatggggtttttttcccgtccacggaagctttctgggatgggggtgctgtgctcgcatcccgggggttggaattggcggggtcctctgtgccctgctgtgagcgtttccaggactttgacctcgctcagcctgcctctctccaccctacctgtgcgaccgctttctcgcagtgtgacgtggagtgttactcaatgtccttatactttccattgctgtttttggtaatggggacattagaaccatcctagtagaatcgtttttgggaactgaaagagataacgcaaatgagaaccttaaagcagtccctgtcacttggtgactggtggtctcttgttaacttcccgaagaggtcaggtccccgggtggagtcatagcttcagctgcaggggccctggtccttctccctaatccctgcaggacgctggatgatcccgggaggccttctgacctctttttaggaaagcgagttgcgtccgcttccacgaagggcggggagcatttaacttttatgggggaccgcgatgcagtcagggtatttcacaactttcgccttccccagcctgacctttctaaaagagctgcagggaggggacttcttggctactgagggcaaatctctatgtgattggtccttggcttttttcctttatagagatgttcacccaaccgagagtgtgtcctcgggaatgggtgttgataatcattaagccgtaattggtaacttcattctaagtgctttatacaaataaatttaggccacactgtggctctgtgaagtattgcttttctttgttttaaaaatgagagtgagacacagggtgcatagcagccaactagtgagaggtagagctggggttggcacctaggcagtccaggtcagagcctgagttgatcacctcttggatacattctcattgaggcagaggaactagctggactcgtagggaaagcaagttaggacctgattgaaaggacgttgagagcaaggctcgtgggcttggacgtctaggaatttttaaaaatttctcaactattttgtttcatgttttccaagtatttcgtactgttgtggaactgtatcattgtggaaaagtctgaaataggagaaatgagagtagaaaaagttttttaattacccatgtatccaagatgtaaaggtagtaactgttaagcttctaattgatttcttttgtctttctttgtgtctacttctatatttgttgataaacatttttttaaaaattgttatattttaatgtgttttcccatatgtcttttaactatagaaaattttaaatattgctaatagagactaaactagtgaggctggttgtggtggctcatgcctataatcccagcactttgggaggccaaggcaggtggatcacttgaggtcagtagtttgagaccagcctggccaacatggtgaaaccccatctctaccaaaaatacaaatattagccgggcgtgatggcacgtgcctgtagtcccagctactctagaggctgaggcaggagaattgcttaaacccgggaggtggaggttgcagtgagccaagatcacgccactgcactccagcctgggcaacagagtgagactcaaaaaaaaaaaaaaaaaaaagaataaactagtgaactgccatattatataatgctcaattttattattcccattatccttatgactatttcctgatatctaaaatatttttgctgggcgcggtggctcacgcctgtaatcccagca

SEQ ID NO: 1887573 - DNA, 4001 bp, Homo sapiens
gcaccactgcactccagcctgggtgacagtgaaactccgtctcaaaaaaaaaatcaatggcttaataacctaaaaatatcagtgacctaagcattcacctcaagaagttggggggaaaaagctggaaaaagaacagcagatcatgccgggcgcggtggctcacgcctgtaatcccagcactttgggaggccgaggcgggcggatcacgaggtcaggagatcgagaccatcctggctaacacggtgaaaccccgtctctactaaaaatacaaaaaattagccgggcgtggtagcgggtgcctgtagtcccagctactcgggaggctgaggcaggagaatggcgtgaacccgggaggcggagcttgcagtgagccgagatcgccccactgcactccagcctgggcgacagagcgagactccgtctcaaaaaaaaaaaacaaaaaaacaaaaaaaaaaacagcaagatcaggggcttgagggcacatggctgtagtcccacctactcaggaggctgaggtgggaggattacttgagcccaggaggtggaggctgcagtgagctagggtcacattactgcactctatcctgggtgagaacctgtctcagaaagagaggaggggggaggggaggggaggaaggggagggaggaggggaggcagtggacgcggaggggaagggaggggaagggaggggaagggaggggaagggagggggaagggaggggaagggaggggagataaagggagggggaggggaagggaggtgggaggggagatgaggggaggaaagtggggggaggagaggagcagaggggaagagagggggaggggaggggaaggtacgggggaggggagatgaggggaggggagtgggggaaggggaggacaggagcagaagggaagggaggcgggaggggaggggaaggtacgggggaggggagatgaggggaggggagtgggggaaggggaggagaggagcagaggggaagggaggggggaaaagagagatggcacaaattattaatatccgtcaccacagatcttacagatattaaaaagattgggcatggtggctcatgccagtaaccccagcactttgggaggccaaggtaggaggatcatttgagggcaggagttcgagaccagcctaacataagaccgtgtttctccccctccaaaaaaagacaatattatgaactttatgcaaattatttgaaattttagataaaatggaaaaattccttgaaaaccacaacttaccaaaaccacaacttaccagaaataaaatagaacatctgaatagttgtatttttataaaagaaatagaatttgtaatttaaagtctttccacaaagaaaactctaggtccagatggctggtgacttcttccaaacacataaaaaataaataacatcaatcctacactagcactttcaaagaatagaaaaagagagaacacttctccacacattatatcagcatagccttgttaacaaaactcaacagggatctcacagaaaagaaaagaaaagaaaatatggcaatacataaaaaggacaggccaggcgctgtgtctcacgcctgtaatcccagcactttgggaggccgaggcgggtggatcgcctgaggttgggagttcggtaccggcctggccaacgtggtgaaaccccgtctctactaaaaatacaaaaattagccaggtgtggtggcgggcgcatgtaatcccagctactcgggaggctgaggcaggagaattgcttgaacccgggaggcggaggttgcagtgagctaaaattgtcccactgcactccagcctgggcgacagagcgagactccatctcaaaaaaaaaaaaaaaagaaagaaatgggggacggacaaggagtctctcagttcaattcccccttcctcagcccatttcaccaaagcctgaagcggaagagaaaaacacgagccccagcatggcgggcgcagccaccccctccttccaccaccagacaaactccgtggccacagcccacaccgccagcgcgcatgcgtgacacgcgtcggccgccggtttgcacctgcgtcttaagaggagtccgggcggggaggggcggggctcagacgctgcgcacgcgcactcgcgacccctcgcctccttttgctttttctggcgggaaaagctcacgcgcacctcccccaactcaactgccgttcgtcgttcgtggatgtccgttgtgtcccgagactaggacgtggctccaggtgcgccctgccccgcggcgaggttcccagaatggcccttcccagcccctaccgaaatcctagcgaagcccccccatattgtgggagagatacccctgcgtcagggccccccagatcctgaccacttgggaggccgaggcgggcggatcacgaggtcagaagatagagaccatcccggggaagtgaaaccccgtctctactaaaaatacaaaaaattagccaggcgtagtggcacgcgcctataatcccagctactcaggaggctggggcaggagaactgcttgaacctggaaggcagaggttgcagtgagctgagatcgcgccactgcactccagcctgggtgacaagagtgagactccgtctcaaaaaaaaaaaaaaaaatcctgaccacatcccctcagatatactgaaaggagtccaccaggaaatcttatagttgacccccgaaatcctgtcagaatcgtctagaaattgtcagacttctccctcagagcctgccagaaactttccccaaaatcctattactctccccagatcagcagagccacctagactcgtgtcagagatccccagaaatcctggcaggtcccctcccaaacccagtcggacctcagattccgtcagagagcacagaagtccatcaaagacaccccagaaacggagaccccgaaatgcactcagagacccccgcagaaatcaagaccctccaaatccagccagagacccccagaaatccagtcagacccctgcagaaatcaagacccccaaaatccagccagagacccccagaaatccagagacccccgcataaatcaagacccccaaaatccagagaccccgaataaatcaagacccccaaaatccagtcagagaacccccagaaatccaatcagacccccgcagaaatcaagacccccgaaatccagccagagacccctgaaatccagtcagagacccccacagaaatcaaaatctccaaaatccagccagacactccccagaaatccagtcagagacccccccaaaatcctgtcagagcccttgaaagcccgccaaggcccacaccacccagagctcctgccagggccccatcctgcttcagtgtccccgtctcagtcccgtcagacccccgagatcaaccaacacccccggggtccctcaggactccatcccgaacccactccgtgcgccagggcccagccaaggccatcgcccccctttgcaccctgcagggtgttccagaccctggaagggcctctcttcaaagacccgtgtttccagaacggtggcagcgggctcacgtggcttggggagagcaggcactgggggagctgggtgaggacaggcgagcccaggctcgactggtggccccaaggggcgcccgtgcccgctgtgatgatagcagcgcccaggtctctctctagcccccagagtgcggccactaaggttttgggtcggcctgggtggaatggaggcaggatggggccccccaaactcctgtcactgctgcagggactgcccagagcagctgcaagtggggctggcagggatgaggaggaggtggcctgggcttgggggaccatgtacatcctgagttggaacccaggggagcagcaggtttggggccatgatgaggagagacctaggggttgcccgacggagagaaaagggacaggaagaggcaggagcttcagagactactcaatgccactctagcctgagggactggaacttagtccgggggcattagggag

SEQ ID NO: 1887574 - DNA, 4001 bp, Homo sapiens
gggtttcaccatgttggccaggatggtctcaatctcttgaccttgtgatccacccacttcggcctcccaaagtgctgggattacaggcatgagccaccgcgcccagcccagagccagccttttcaggcatctgacatcactactgtttttttcctggcagggttggagacctccagagaaggaaggtgagaaaaatttgagttcctttctccctcaggacagaggaagatcctggacatgggagcccgaagggaaggtccagacatggagactccatgattattagctcccaaacctctctcttctctcctaacccaccttcacacatcagagaagctctttgctgatttggccctgccatacacagaaaaaccaaagaacttctcttcactctgatatctggcttccaaaactattccctatagttgtgagtaagcaaagcagggagaaggaagacatatgtatttttataatgctttatttaccaaaattaaagaagtactttatgcaagattgtgctacttgtgtgtttacctttctgtagatttggtaagcctgccaatcaacacatatttatcacctactgcgcgcaaagcaagtccacagtgcttttgaaagttgtacgtctttgccttcagggactcactttccatagtgggacctcagtatgcagtgaggaaacttatcctctcacctgctccctgcccacctccaatctgttctccacagggaagacagagtaaattctaaaaatccacttttctgctcccttcagtggcttcccatcacccaaatgggaatagcagaaattcttaagatgagtccaaggtgttacatgcagtatcatatatatgtatacatatatgtatacatatatatgtacatagtatatgtgtgtgtatacatatatatgtacatagtatatgtgtgtgtatacatatatatgtacatagtatatgtgtgtgtatacatatatatgtacatagtatatgtgtgtgtatacatatatatgtacatagtatatgtgtgtgtatacatatatatgtacatagtatatgtgtgtgtatacatatatatgtacatagtatatgtgtgtgtatacatatatatgtacatagtatatgtgtgtgtatacatatatatgtacatagtatacgaggagatggagttggaggttcagtgaagatgtgcaaacctggatttcctcggaccctggagcagagaggatgaggaacgtgtttgaggccaaaggggtcaacgggtgggtgggggtgtgggtgggggtggggggctgcagtcaatcactgactggcttatggatgattgacataaaggctgggttgccagggagcccagtgactcacagcgtgaacccgattacctggtctacacaggcggtaaccgtgtgactagcgactgagtgccttacaggggacgacctcctaagaggctgactggcaggagcccagctaactgctggccagggcaggccgtgggggcgcgttacctgattgtctgaggaactggctggcgcggggactgacgctgactcgcggggcgctgccctggtcacggcctcagctcctcaccggccgcctcactggggcgacggccgctggctgccctcgggctgagcaggtgactggcgtggtggaggcggaggaatgcgcggcgggctcctggtgatctcctgagggtccgcggtcttgcctcgtgactgatccagaatgggccttggaccccacaaggggctcgggggcctcgcgggcctgagggtgacactggcggcctcacgggcctgggctgccccacgctccaaggggtcagctgactgagggacgccctgctctcctggaagcccactttgcgcagtcccgatacaggtcccgcagccgaggactgccggggacgcccacaggccaggcactgctgtgaggccaggaatcctccatcagcgcgcggagaaagcggtgtgaaggctccgctgtcgccctgggcccagcccgcgcgcctcgcacgttgtgcgtctaccccacagccaatcagtggctgcacaggcctctttagtagccaatcagcagcttcaggtgcctattacgcagcagatctgcgaggcagatggagctttcccccacggacacttgcctctgggagctgacgcacagccaatcaggagctgaaagtgcaagtccctccccgcaccttcaggcccagaggaatcctacgggcttgagccaatcagcagccgcgggcggtgccaggaacgtttgggcgccaaatttcttctcagcgagtcctttcctgaccgcgttcttgaaaccacgctcctctccagccagccctgaggactccgttcctcttgattaaatctgctttattttctcacactttacccactgcacactttcgaaacacttcttgctactcaacaatatttttgtggccgccccgctaggatacaggcgcactgcgggcagaattttggccgtttttttctcgccgctgtttcccccacggcctttggctgcgccctgctcgctgctctgggatgaacttgcctttcaggcagccctgcccatctctcacctcccagctcacctgtcccacctgcccgcggatcctcaccctctccgctgggctcccacagccccgtcctccccgctggctcagcccggaccccgccaggctgtgcccgcctctgtctcccctgcccgtggccggtgcccctccaggctccgcctcgcccagcccagacgcccaggcggctccgccccatagatgggaggcaactgcccagggtgcaggggcagcgaggggctgcggctgagagccctgcccggtcctggggagggagggagagtgtgggtggagggggcagccctgcagatgtcagagacagggcggcagcagcacaggtttcctctggtgaggagcccttcccttcccttttctccttccatcctctgagcatcccatgttacaggctgtcccagacccctgtggggctctgcatccaccgcggtccacaccgggctgtgctcacaggaacacatcgaatcctctcgaccactccatggactctcttgccagggccgccttgagaaaggaacacagaccgagtggcttcaacaacgcctttgttttcccacccttctggaggctggaagtctgagaccaagctgtggtcagcgttgcttccttctgaggcctctcggtggcttgcgggtggcatcttctccctgtgtcccacgtggcctttcttctgagcatgtctctgtcctaatcactaatcgctcctttttttttttttttttttttttttttttttttttttttgagacagtgccttgctctgtcgcccaggctggagcacagtggcgcgatctcagctctgtagcctctgtctgttcaagcgattctcctgcctcagcctcccgcgtagctgggatcacaggcatgcgccaccatgtccggctaattttggtatttttagtagagacggggtttccccatgttggccaggctggtctcgaactcctgacttcaggtgatccgcccgcctcggcctcccaaagtgctgggattacaggtgtgagacaccgcaccctgcctgagatgatctcttggggtcacttttatctatatgtcttctgtttcccccaaaaaaatgtttcaagaaaacttacatgggtctaaggaggctccacctcccagggtcccccaccactccctctcagcctgcagccacacagttaaaaatagtcttctgtttaattcaggtgcacgtttcttctccaaaataatcctgcccagcactgagggtgtacgccccaggcctggggtcctcgctccatggctcctgttcacctggactcctgggagcagcacttgcaggagcaaagccctgggtccagcagacgccgcctgctgtggactaaccaggggaagtgtggctgaatgagatgccagcggtgaagaaacccctcctgatgtccaggtaa

SEQ ID NO: 1887575 - DNA, 4001 bp, Homo sapiens
tctatagcattatgttactggatatttctgtaaaatttaaaatgagggaggcagagagacagagagagatcaaactccagagttgggactctggaatcttgggtcatgagacaaattttagattaaactacaaaactccagaatttacaggtgtggtttttgctgataaagtacaattctaacattgtaaataattgcataatccttccctgggaatttaaatcattttaactggttctgctgtaatactagaaatacaagcatgaaaaattctaatggtttattagtcacaatgactctgaaaaccttaataatacctattaaatattttgcatattacacatgaagaagagtttgaatctcagataaaaacaataaaaatacatgaaaagtctttcacgttagcacagattttaggcatctcgtgttcaggaggttggatctgagacgtgttttgagttggtcatagtgaaggacgctaggtgtaaattctagtgagaacaatttccaggaagccgtgttccgctcttgagcgagcacccactgggcctcatgcaaggtagaatgagcctgcgtacgtcaccctcccatgatgtggtcaacatgtaaactgcatgggcagggcgccaaataacatcctgtgcgctgctgagctgagctggggcacggccgcctgtctgcaccggcagcaccatgtcgctcacggtcgtcagcatggcgtgtgttggtgagtcctggaagggaatagaggaagggagtgtggggttggagatctgggcccagaggtggagatataggcctggaggtggagttgtgggcctggagtggagatctgggcctggagtggatatatgggcctagagatggagtgatgggcctagaagtggagatctgggcctggagtgccgataggaacctggaggggagataggagcctggagtggagatatgggcctggaggtggagttataggcctatagtagagatatgggcctggagtggagatttgggccaggagtggagatatgggcctagaggtggatatctgggcctagagtggaaatatgggcctaggatggagatatgggcctggttgtggagatatgggactggagaggagatatgggcctagagtggagatatgggcttggggtggagatctgggcctggggtggagatatgggcctggaggtggagttacgggccttcagtagagatatgggcctggggtggagatatgggcttggggtggagatctgggcctggagtggagatatgggcctggaggtggagttactggccttcagtagagatatgggcctggtgtggagatatgggcctggattggagatatgggcctaggttggagatctgagcctggagtggagatatgggcctggattggagatatgggcttacagtggagatcttggcctggattggcgatatgggcctggattggcgatatgggcctatgatggaaatatcggcctggagtggagatatgggcctggagtggagatacaggcctagggtggaaatattggcctggagtggagatatgggcttgtggtggggatatgggcttgtggtggggatctgggcttggaggctgggtctctgcacagccgacagccctgttcttgggtgcaggtaggcactgagggtgagtttaacttcagtccaggaagggcctgcctaccaagactcacagcccagtgagggcagcaagggagggctggtttgcctgcagatggatcgtccatcatgatctttctttccagggttcttcttgctgcagggggcctggccacatgagggtgagtccttctccaaaccttagggtgtcatctccccacataagaggattttcctgaaacaggagggaagtcctgtcagggagcctctcataaactaggaagaggggaccctggggtgctcggcccacagttccgacctcgcctccctggcctttcattcccttggcagagtcaagttctgtggggaccagggttagactggggtgctcaaagctggggtgcgtggtggggaagtggtaggaacagcagatcctctgaggacaaaggtgttactcacacttcagcgtttccatgacggtaggggctgcagtgtggctgctgtcactccaccagaagaggtgggaaaccacagccatggccctgacattccaaatcctctgatgggggctcagttgcttattttcattcaggcatctgctgatattccattctcaaagacatgccctccaccccatgtctaccctgtgttgttttatgtgagtaatcttacagtattaaaatctagtaggagtctcttactcagcacttgctcaaagttctcagctgacacttttgttgtagggagacaccttgtgtttgcgggatgggtccttcctttagccctgggcaccaaggtgtgatagcagccatagaaacttggaaagcgaggagaatcttcagagcacagggagggaggggtggctccacatcctcctctctaaggcggtgcctccttctccccaaggtggtcaggacaagcccttgctgtctgcctggcccagctctgtggtgcctccaggacatgtgattcttcggtgtcattcttatcttgggtttaacaacttcagtctgtaaaaggaagatggggtgcctggcactgagctctacaacagaatattctggaagagccttttcatgggccctgtgaccccagcacacacagggacgtacagatgtcggggttcacacccacactaccccagtgggtggtcggcacccagcaacaccctggtgatcatggccacaggtcagagggctcctgtcttggattctcctttcccacctcctgaatcccagagcttctggtgggcgtgtccttgagggtcccatcacccaggccctgactatatttggggtaaagggggattgaatacagggaaatgggtgctgtggtgggaagaataattgtccccagtgatgactacattctaatccctggagtctgtgactatttatgttataggggaaggaactgaaggggaagatggagctcaggttgttgatgagttgaccttgagatggggagacagcctggactgtcccgctgggctcagtgtaatcacaagggtccacatgaaaggaggaggaagaggggagtggggattagagcagcgcaatgggagactccaccagctttgaaggtggaggaaggccaggagccatgaatgcaggtggcctgtagaggttggaaaagtcaaggaaatgattctccagagtctccagagggaacgaagccctgcagatgccttgattttagcccaggaaaaacagggtcctatttctgtctccagtagtgaaatgggtcagtgtgctctctcctgctgccatgcttctgataattttctacagcagcaacaggaaaccaacactggaacccaggtcaaggacaaggtaagaaacaacacaaggatagccgggtgtggtggcaggcgcatgtaatcctagcgacttgggaggctgagggcaggagaatcacttgaacccaggagacagaggttgcagtgaccctagaccacaccacttcactccagctggggtgaaggagtgagactctgtctccataattaattaattaattaaaggaaccaaacaaggggaaggttggctacaccgagatgagcaagtgtgggatgatgatgccaccaccaggctccatccacatagggaggggttgatactcctcaaaccagcaccaggagccagcctatggaagctggcaccatggagaaggcacaggcatggcaagagtggctcccagtcccgaccaggaacagggtgtgtggacactggtgcctgccttattcatcagttcatacctactgccaaggattccaattcatccaaaagagattgaaccaggctgataagaggctggatgtgcagcctatcctggttcctctttcacccccacataaacagcag

SEQ ID NO: 1887576 - DNA, 4001 bp, Homo sapiens
ggtttcactatattggccaggctgctctcaaactccttatctcagttgatccgcccacctcggcttcccaacgtgctggggaaacttgattttctatagcattatgttactggatatttctgtaaaatttaaaatgagggagggagagagacagacggaaaacaaactccagagttgggactctggaatcttgggtcatgagacaaattttagattaaactacaaaactccagaatttacaggtggggtttttactgataaagtacaattctaagattgtaaataattgcataatccttccctgggaatttaaatcattttaactggttctgctgtaatactagaaatacaagcatgaaaaattctaatggtttattagtgacaatgactctgaaaacattaataatacctattagatattttgcatattacacaggaagaagagtttgaatctcagataaaaacaatagaaatacatgaaaagtctttcatgttagcacagattttaggcatctcgtgttcgggaggttggatctcagacgtgttttgagttggtcatagtgaaggacactaggtgtcaaattctagcgagaacaatttccaggaagccgtgttccgctcttgagcgagcacccactgggcctcatgcaaggtagaaagagcctgcgtacgtcaccctcccatgatgtggtcaacatgtaaactgcatgggcagggcgccaaataacatcctgtgcgctgctgagctgagctcggtcgcggctgcctgtctgctccggcagcaccatgtcgctcttggtcgtcagcatggcgtgtgttggtgagtcctggaaagcaatagagggagggagtgaggggatggagatctgggcccagaggtggagatataggcctggaggtggagttatgggcctggagtggagatctgggcctggagtggatatatgggcctagagatggagtgatgggcctagaagtggagatctgggcccagaggtcgagatataggcctggaggtggagtgatgggactgtagtggagatctgggcctggagtggagataggaacctggaggggagataggaacctggaggggagatatgggcctggaggtggagatatgggcctggagtggagtcatgggcctggaggtggagttatgggcctgcagtagagatatgggcctgaagtggagacatgggcctggagtggagatatgggccaggagtggagatatgggcctagaggtcgatatctgggcctggagtggagatatgggccaggagtggagatatgggcctagaggtcgatatctgggcctggagaggagatatgtgcctaggatggagatacgggcctgggtgtggagatatgggactggagaggatatatgggcctggagtggagatatgggactggagaggagatatggacctggagtggagataagggcctggattggagatatgggcccagggtggagatctgagcctggattggagatatgggcctggattggcgatatgggcttagggtggaaatatcggcctggagtggagatatgggcctggagtggagatatgggcttgaggtggggatatggacctggaggctgggtctctgcacagccgacagccctgttcttgggtgcaggtaggcactgagggtgagtttaccttcagcccaggaagggcctggctaccaagactcacagcccagtgggggcagcaagggtgccctggtttgcctgcagatgggtcatccatcatgatctttctttccagggttcttcttgctgcagggggcctggccacatgagggtgagtccttctcccaaccttcgggtgtcatctccccacataagaggattttcctgaaatgggagggaagtcctgtcagggagtctctcataaactaggaagaagggaccctggggtgctgggcccacatttctgaccttgcctccctggcctttcattcccttggcagagtcaagttctgtggggaccagggttagactacggtgctcaaagctggggtgtgtggtggggaagtggtaggaacagcagatcctctgaggacaaaggtgttactcacacacttcagcgtttccatgacggtaggggctgcagtgtggctgctgtcattctaccagaagaggtgggaaaaccacagccatggccctgacattccaatcctctgatggggactcagttgtttattttcgttcaggcatcggctgatattccattctcaaaggacatgccctccaccccatgtctaccctgtgttgttttatgtgagtaatcttacagtattaaaatctagtaggagtctcttactcagcacttgctcaaagttctcagctgacacttttgttgtagggagacaccttgtgtttgcgggatgggtccttcctttagccctgggcaccaaggtgtgatagcagccatagaaacttggaaagcgaggagaatcttcagagcacagggagggaggggcggctccacatcctcctctctaaggcggtgcctccttctccccacggtggtcaggacaagcccttgctgtctgcctggccaagccctgtggtgcctccaggacatgtgattcttcagtgtcattcttatcttgggtttaacaacttcagtctgtaaaaggaagatggggtgcctgtccctgagctctacaacataatattctggaacagccttttcatgggccctgtgaccccagcacacgcagggacctatacatgtcggggttcacaaccacactaccccagtgggtggtcggcacccagcaaccccctggagatcacggtcacaggtcagagggctcctgtctgggattctccttgtcccacctcctgaatcccagagctcctggtgggcgtgtccttgcgggtcccatcatgcaagtcctgactgtatttggggtaaagggggattgaatacagggaaatgggtgctgtggtgggaagaataattgtccccagtgatgactacattctaatccctggagtctgtgactatttatgatataggggaagggactgaaggagaagatggagctcaggttgttgatgagttgaccttgagatggggagacagcctggactgtcctgatgggctcagtgtagtcacaggggtccacatgaaaggaggaggaagaggggagtggggattacagcagcataatgggagtctccatcagctttgaaggtggaggaagtccaggagccatgaatgcaggtggcctatagaggctggaaaagtcaaggaactgattctcctgagtctccagagggaacgaagccctgcaggtgccttgattttacccacgacaaacagggtccgatttctgtctccagaattggaaggggttagtgtgctctctcctggtgccatgcttctgataattttctacagcagcaacaggaaaccaacactggaacccaggtcaaggacaagttaagaaacaacacaaggatagccaggcatggtggcaggtgcatgtaatcctagcgacttgggaggctgagggcaggagaatcacttgaacccaggagacagaggttgcagtgagcctagaccacaccacttcactccagcctgggcaaaggagtgagactctgtcgccaaaattaattaattaattaaagaaaccaaacaaggagaaggttggctacactgagatcagcaaggctcagatgatgatgccaccaccaggctccatccacatagggaggggttgatactcctccaaccagcaccaggagccagcctatggaagctggcactggcatggcaagagtggctcccagtccctaccaggaacagggtgtgtggccactggtgcctgccttactgatcagttcatacctcctgccaaggattccaattcgtccaaaagagattgaaccaggctgctaagagcctggatgtgcagcctatcctggttcctcttccacccccacatagacagcaggaaagacatta

SEQ ID NO: 1887577 - DNA, 4001 bp, Homo sapiens
ctggagtgaagttatgggcctggaggtggagatatgggcctggagtggagatatgggactagagtggagataggggcctggaggtggagatctgggcctggagtggagatctgggcctggagtggagatctgggcctggagtggagatatgggcctggagtggagatatgggtctgcagtggagatatgggcctggaggtggagatatgggcctggagtggagttatgggcctggagtgaagttatgggcctggaggtggagatatgggcctggagtggagatatgggactagagtggagataggggcctggaggtggagatctgggcctggagtggagatatggccctggagtggagatatgggcctggagtggagatatgagcctggagtggagatatggccctggagtggagatatgggcctggaggtggagatatgggcctggagtggagttatgggcctggagtgaagttatgggcctggaggtggagatatgggcctggagtggagatatgggactagagtggagatacgggcctggaggtggagatctgggcctggagtggagatatggccctggagtggagatatgggcctggagtggagatatgagcctggagtggagatatggccctggagtggagatatgggcctggagtggagatatgagcctggagtggagatatggccctggagtggagatatgggcctggagtggagatatgggcctggagtggacatatgggtctggagtggagatacgggcctggaggtggagatatgggcctggagtggagatatgggcctggaggtggtgatatgggcctggagtgtagacatgggccgagtggagatatgggtctggagtggagatatgggcctggagtggagatatgggactggagtggagatataggcatggggtggagacatgggccgggagtggagatatgggactggagtggagatacgggcgtggggtggagatatgtgcctggaggtggagatatgggcgtgggttggagatatgggcctggagtggagatatgggcgtggggtggagatatggatctggagtggagacatgggcatggggtggagatatgggcctggtgtgtagatatgggcctggagtggagatatggccctggagtggagatatgggcctggagtggagatctgggcctacggtggagatatgggcctaggatggggatatgggcctggaatggagatatgggcctgggtgtggagatatgggactggagtggagatatgggcctgatgtggagatatgggcttggagtggagatatgatcctggagtgtagttatgggcctggaggtggagatctgggcctggggtggagatatgggcctggagtggagatatgggactggagaggagatatgggactggagtggagatatgggcctggagtggagatatgggcctggattggagatatgggccgagggtggagatctgagcctggattggagatgtgggcccggattggctatatgggtctagggtggaaatatcggcctggagtggagatatgggcctggagtggagatatgggcttggggtggggatatgggcctggaggctgggtctctgcacagccgagagcactgttcttgggtgcaggtaggctctgatggtgagtttcccttcggcccaggaaggggctggctatcaagactcacagcccagtgggggcagcaaggaaggccttgtttgcctgcaaatggatcttccatcatgatctttctttccagggttcttcttgctgcagggggcctggccacaggagggtaagtccttctccaaaccttagggtgtcatctccccacataagaggattttcctgaaacgggagggaagtcctgtcagggagtctctcataaactaggaagaggggaccctggggtgctcggcccacagttccgaccttgcctccctggcctctcaaccccttggcagagtcaagttgtgtggggaccagggttggactagggtgttcaaagctgggttgtgtggtggggaagtggtaggaacagcagatcctctgaggacaaaggtgttactcacacacttcagcgtttccatgacggtaggggctgcagtgtggctgctgtcattctaccagaagaggtgggaaaccacagccatggccctgacattccaaatcctctgatgggggctaagttttttattttcattcaggcaactgctgatattccattctcaaaggacatgccctccacttcatgtctaccctgtgttgttttatgtcagtaatcttacagtattaaaatctagtaggagtctcttactcagcacttgctcaaagttctcagctgacacttttgttgtacggagacaccttgtctttgtgggatgggtccttcctttagccctaggcaccaaggtgtgatagcagccatagaaatgtggaaagtggggagaatcttctgagcacagggagggaggcacagctccacatcctcctctctaaggcggcgcctccttcaccccaaggtggtcaggacaagcccttgctttctacctggcccagccttgtggtgcctccagaacatgtgactcttcagtgtcactctaatcttgggtttaacaacttcagtctgtacaaggatgatggggtgcctgtccctgagctgtacaacagaatattctggaaaagccttttcatgggccctgtgaccacgtcacatgcagggacctatacatgccggggttcacacacacactcccccagtgggtggtcggcacccagcaaccccctggtgatcgtggtcacaggtcagagggctcctgtctgggattctccttgtcccacctcctgaatcccagagcttctggtaggcatgtccttgagggtcccatcacgcaggccctaactgtatttggggtaaagggggattgaatacagggaaatgggtgctgtggtgggaagaataagtgtccccagtgatgactgcattctaatccctggagtctgtgactatttatgttataggggaagggactgaaggggaagatggagctcaggttgttgatgagttgaccttgagatggggagacagcctggactgtcccggtgggctcagtataatcacaagtgtccacatgaaaggaggaggaagaggagagtggggattagagcagcgtagtgggagactccatcagctttgaaggtggatgaaggccataagccatgaatgcaggtggcctatagaggctgggaaagtcaagtaactgattctcctgagtctccagagggaacacagccctgcagatgccttgattttagccctcgaaaaacagggtccgctttctgtctccagaatcggagggggtcagtgtgctctctcctgctgccatgcttctgataattttctacagcagcaacaggaaaccaacactggaacccaggtcaaggacaagttaagaaaagacacaaggatagccaggcatggtggcaggtgcatgtaatcctagcgactcgggaggctgagagcaggagaatcgcttgaacccaggagacagaggttgcagtgagcgtagaccacaccacttcactccagcctgggtgaaggagtgagactctgtctccaaaattaattaattaattaaagaaaccaaacaaagagaaggttggctacaccgagatcagcaagggtgggatgatgatgccaccaccaggctccatccacatagggaggggttgatactcctcaaatcagcacgaggagccagcctatggaaactggcaccatggagaaggcacagacatggcaagagtggctcccagtccccaccaggaacagggtgtgtggacactggtgcctgccttactgatcagttcatacctcctgccaaggattccaattcgtccaaaagagattgaaccaagctgctaagagccgggacgtgcagcctatcctgcttcctcttccactcccacataga

SEQ ID NO: 1887578 - DNA, 4001 bp, Homo sapiens
cagtctgattttcattgggggtccttcacagatgggacatggcttaggaggaatcccgggctgcgggcattccttggcccggtggccagatttccaaaacttgtagcaagctcctgggggaggaggttctggaggaacccctggcagctgcggttcaggcgtttggagttcttgtgttctggagatgtggctggggtttgtctcacggtggaggcaaggaattgcaactcagaaatacattgctacgtggctgcctctactcttattattgtacaccttgaaggcgaggttaattaagtcctgttgtggggtatgagggccggaatttaatttttggagctttatttaatgtcaggagcagattgggtaataaaataaaatgcattttgagaataagacggcattgtgacctttcagggtctagggctgtaaaacatctcaggattgctgccaaatgggccatgaactgggctgggttttatatttgatgaaaaagagcctaaacgctaactgatctgggagaggtcggataaagaaaaaggagcattaaccttgactgtgcctttagctccagccacctctttaagaggaaactgttgggcagatggaggagggctagtcacggaaagaaactgtaagctggactgggtgtgaggaggggaggtaataaaaggattatagggtggaggagcagaggctgaggaagaattgggacctagctcggcctggtgaggagcagcctgggaaggaggggagaagtcagatgggtttgtagaaaaggaagattcaagactcagcaacgcttggggttggaactgaggggacaggcaggagggaaagaaggaagatttgggatgaactgcattgggaacagagactagggagggaccgatgtataaaagaatgcctgaacgtcaggcacctcagaccatttgcccattttatgacaagaattatttagatcttgtaggatggaaaaattgaaagtgccattttttggctatttggaaccactgtctggtttgtattggggtcaagcggcattgcagaagaaaataagacatttaggttttaggtcaggcgagagttgaagaggttttaagttcttgagaacacaggctaagggagaggaaggaggaatggagggtggaaggttgcccatagtgaagtaggcaagtttaaagagaagggtagagacacggagagaaggggtgggggatgcttatcccccaggaaagtggagaagggatgggaggtgcttgccccccaggaaaatggaaacggggtggggggtgcttgcccctcaggaaagtagagaaggggtagagacacggagagaaggggtaaggtgagcagccaaagcaggcgtccctgcaattgacttgccaccaagggatgtgggtgaatgaccaaggcaggtgtccccgcggagatcagacacaaatggaatgtgggtgaataatcaggcagtcgtccccacaatgattaaacaccaagggaaggctgccttcccaagtccgtgaccggcgccagagttttgggtccacggataaaatgtgtctcctttgtctataccagaaaatgaaaggaatttaaattaagagaagggagagattgaaggatggtgccaagattgaaaggagaaagaggttgagggatagtgagagaggttggagaaggagtaaaagaggccacttacccaatttaaaatcagtgagatgttccttgggctggttggtctgcggacctgaggttgtaggtggatctcttcagggagtgaaggtgaggacaggggactgctgtcccgaaggagtcccgctgacccgggtcttcggcaccaaatgtctcatgcgtccgtgtgaagagaccaccaaacaggctttgtgtgagcaacgaggctgtttatttcacctgggtgcaggcgggctgagtccaaaaagagagtcatcaaagggtagtgggattatcattggttcttataggttttgggataggcggtggagttaggagcaatgttctgtgggcaggggtggatctcacaaagtacattctcaagggtggggagaattacaaagaacctttttttttttttttttgagacggagtctggctctgtcgcccaggctggagtgcagtggctctttctcggctcactgcaagctccgcctcccgagttcaagccattctcctgcctcagcctccggagtagctgggaccacaggcgcccgccactacgcccagctaatttttttttgtatttttagtagagacagggtttcaccgtgttagccaggatggtcttgatcttctgacctcgtgatctgcccgcctcggcctcccaaagagctaggattacaggcttgggccaccgtgcccggcctacaaagaaccttcttaagggtgggggagattacaaagtatattgatcagttagggtggggcagaaacagatcacaatggtggaatgtcatcagctaaggctattttcacttcttttgtagatcttcagttgcttcaggccatttgaacgtatatgagccggtcgtaggggatatgatggcttagcttgggctcagaggcctgaaaatcgcccccaccaatcacctgtttcccccaatctaccctcctgaaggtcactgacaaagacttcattgtctcctaggagaggctgccatatatccagggctgacgtaattccatcttaatatcagttacattataaaaatttacctcgtgcctgaggccccagagcccaagggtgcaaagcagtaattggtcaaagttcaacttccctcccactctgggctcaggctgtcccctgagggcctgtgttttgagtctctttccagaaccttggtgtgaacttaggtcttggcgtcgggatcccttttcgtcacactcaggtgacctacagggagctccgctcgacactgcaaggcttagaccagttcggtccaacagagaaagcaggcaaccaccatgtcatttgaaaacagtttcatcgggatataattcgcaacccatacagtgaatccatttaaggtgtgtaagtcaaaagtttttcgtgtattaccttatgtttatttatttatttatttatttatttatttattttgagatggagtctcgctctgtcccccagtctggaatgcagtggcactatctcggctcactgcaagctccgcctcccgggttcacgccattctcctgcctcagcctccccagtagtagctgggacaacaggcgcccgccatcacgcttggctaattttttgtatttttagtagagacggggttttaccatgttagccaggatggtctcgatctcctgaccttgggatctgcccacctcagcctcccaaagtgctgggattacaggtgtgagccaccgagcccagccttttattttatttttttaagacaaggtcttgctccatcacccaggctggggttaagtggcatgatcacagcttgctgcagcctcaaacttccagactaaagcaattcccccaagtagctgggactacaggcgcatgccaccttgcccggcaaatttttgtatttttagtagagttgggattttgccatgttgcccaggctggtctttttttaaaaaaattatttatttatttatttttgagatggaatcttgctctgtcacccaggctggagtgcagtggcatgatctcagcttactgcaacctctgcctcccaggttcaagtgattctcatgcctcagcctcccgagcagctgggattacaggcatgagccaccacactcggcttatttttgtatttttggtagaaacagggtttcaccatgttggccaggctggtctcaaactcctgacctcaagtgatccacctgcctcagcctcccaaagtgctgggattacaggcatgagccaccaaacccggctattatttatttatttatttttgagacacaatctccctctgtcacccaggctggaatgcagtggtgtcatcttggctcactgc

SEQ ID NO: 1887579 - DNA, 4001 bp, Homo sapiens
acctcaagtgacccacccaccttggcctcccaaattgctgggattataggcgtgagccaccacaccctgccaggtttctaagatattttcaggctaatgaaaacttcacaagccctggatactgtgctgataacaccccctgcataaaagtacagccctgagctctctccactctgcaaaccacatcttccactttcactaataaatttccagcctaatttcctgccttttaactgctttatttcctcaggaattctgaatcagatctcagatggaggcaactatattggttcatcattttttgctttttaaaaaataatttacaaaccatggaattcacccattttaaggtgtacaattaaataatgctttagtatattcacatagttgtacgtctatcactccaaaaggaaaccccgtgccaggaagagtcactcattccctgctcctctcccagccctgggcaaactctcatcttgtgtctctgtggatttccctcttctggtcatttcatatcaatggaatcatacaagtggccttttgtatctggcttctttacagtggataatgtttatgaggttgatccatgttgtagcacgtatcgctactatattcctttattccttttttttttaaattgagatggagtcttactttgttgcccaggctggagtgcagtggtgccatctcggctcactgcaacctccgcctcctgggttcaagtgattctcctgcctcagcctcctgcgtacctgggattacaggtacacgctattaccctgggctaatttttgtatttttagtagagacgaggtttcactatgttggccaggctggacttgaacccctgacctcaggtgacctgcctgctgcagcctcccaaagtgctagaagtacaggaatgagccactgcacctgttgttttttttttttttttaatgagacagggtttcactctgtcacccaagctggagactgcagtggtacaatctcggttcactgcagccttgacctcccaggctcaagtgatcctcccacctcagcctcccaacgggctgagactataggcttgtaccgccatacctatttaatttttagtatttctagtagtgacggggtttcgccatgttgcacaggctggtctcaaattcctgggttcaagtgagcctcccaactcagcctccctaagtgctgggattacaggcatgaaccactgtacccagcctgcattctttttttcatggctgaataatatttcattgtgtggatagaccacattttgtttacccattcatctgctgatagacacgtgggttgtctgcaccttttggctgttgtgaacaaggatacctacttcatctcttaccttggtcacaggcggcctacaggtcattaggcagcttaaagactggctgttcttcaaacgctagctcctggtccagtcagctgcaatggaggccagctgcttgggtcattcatccaggaccccggctcagaatggctttgcactcagtatagtgactcacagtcatcttgaaattcttaatttttgaacaaagcacccacattttcattttacacctgggcctccagataatcttggttgattccattttgacaatggggaataaagctaaagaacaaacctacattcttgggtgtctgctaagcagctgtcacctccaatagaaccaacaagtggctgataccttctgagcagggctgacacggatttcctgtgagccagtcgcgtccggcgaggggaaggggaggccgctgggtgtgctggtgagggagggctccctgcttcccgtggaccagcgggtctcaggctggtgccccgggtaacatccggctgtgtctgaagactttcttggttgtcacaactgcgggagggaaggcacctggcaggtaaaagcagggacgtcactgaacaccctacagcccacaggcgggaccccgatgtggaagtggccggtcccaccgtcagcagtgcctgcggtgagaaaatccacagtggggatgcggggaggagcccgccctgctcccgggagggtctcagggaagatgacgctctgctgccacccagcggccatcaggggaaactcaaccagggagctggcgtcccgcggggttcactgaccctggaattgccttcccaggaagcttctacgcagtgatctcaggtggacgttctgtgccatgcagctcaaagcatcagagtttgtgcggctccacacacaccccagctacagcgtggctggcaggtggaggtgaattctctatcgtttgactcacgggtgaggaaagggtccttcctcatagagataagagcccagatcagcagggagacagcgctcccacctgtcctacccacgatgtgatgcaccaggcagcgggggcctgggactccccacggttgccctccaggaccgggtccgttgccttcctgatgctcttccctccccgtggtacaaatgttaaaaacaaacaacaagacaaaacgaaaaactatgtaggaagggtacattttcatggtatgtcatgtcccaaacttgacgaaaaaccagcagtgcagaaaaaagtttttctcagacctcaaagatagctagtctagaaaaatagaatagtcctagtctcttgcgaacctgccattttagctgtgagaacagctgcaattcatgcatttgtccttcattagaaggtaatacattttaggagaacagggatctttgtcctgcactatcagcctgagggcagcggccagcacatagggttatagggtttatacagactcatcattacttcatcctctacgtttaggaatttagaataagaaacaaggagttgggtagaaatcaaggtatcatccctattattcaaagctctgaggccaggctgggtatggtcactcacacctgtaatcccagtgctttgggaggataaggcgggtggatcaactgaggtcaggagttcgagaccagcctggccaacatggagaaaccccatcgctactaaaaatacaaaaactagccaggcgtggtggcgggtacctgtagtccccactactcaggaggctgaggcatgagaattgcttgaacccgggaggcggaggttgcagcgagcctagattgtaccattgcaacccagcctgggtgacaagagcaaaactgtctcaaaaaaaaaaaaaaaaaaaaaaaaaaaaaaaaacaccaacccccgtccccccgcccgccaccacacacacacacagactctgaggcaagtggtctgtatctgcagcctcctagcacttcgccacaatcagtattccgcccacccatcccaccctcagcaaagcttgctgcatgaaagaggaaagtgtgtacacatctggagacaggaggcttgtgaagagcacttagaaggtccagttcctccctcctagccgtagcacctgggtaactccctctacccttggaaatggccaagaggctcaagagaaagaaactcttttccaacaggcagcagtgagtagaacacagctttctgccagtgtggagtagtgcatcagattctaggcggtttcatgatcctcatcctggtgttcccatcttgccagatccccttccctcaagtgtgggaggggcttgtgacttacttctatccaaacggaatgtggcagggttgatgggatctgacttctgtgatgccatgagattgtaagtctgtcttgctgagtgactgttttgctggctttgaagatccaatctgccatatggagacggccaagcagaaaagagctggggatggcctggggctgacagtcaagaaaccaaggccctcagtccagcagcctgaaaatggatgttcctgggacctgcatgaacttggaagaggtccttgtcccggttgggtctcagatgagaccacagccctggtcaacaccttcatcgcagccttgtgagaccctgagacagaggatccagctgagtcatatctggactcaaacaccgagatca

SEQ ID NO: 1887580 - DNA, 4001 bp, Homo sapiens
ctcatcagtcgcaaaataagaaatcacaaatctcttaacgtaaactgtatgctccaagaaaattgtggggcaaactgagactaataacaatctacatatgactaataggagctgccctacaactccaagttataacaaaaataaaaaactctccaaagccaagcagcgtctgaaaactcctgtaataggagacagcatatagtcggccaaaatgagaagaaaaataactgtacaaaagtaaatgtgcagcatcataactgggagaaaatgggaaaaaactcatcaaaacctagtcccttaaaatatatatttaaaaacttaaaagttttacagaaaattataaagttaagttaaccccccaaaagttaaaaactctctgtaaattaaaataaccctcttttagtattaaatagccaaccaaaggaactgtaaactaaaaaacaattagccatatatttaaggtggtgacaggggtcagaggacagccagggcacccagaccaaattcttttaaattgactcatggttaaatataatataaacaaaaccgacataaatccagccctgtttaatggcttattacaaaaagccaaaaataaaaataaaaacagcttcgccggcagacacagagttaaaggaaaagtcccagaaaaagcaaaagaagctagtttataggagccaccagagggaacaaaaattctccttccatatgtcccagcctacccccctttaccgaggccaacagctccagctctccagaaaccagattcaggagccagcatgctccaagtctcaccccaaagggaaagactggagcctcaagaggctaaggaaggaagtcaaaatagtcaagcaggccgtcccaaatctggttgtgctcgagctatacaaatgcctctcagggagatacgaagacccatctattataatgaccagggccacatcccagtggcgggggggcaacggactttcttctatcagcccttttcaaccactcatctactaaactgaaaacaccacacaccctcctacacggagaagccccaagctcttataaatctgatgcattccatctttctgacacataatctaacctggccaaattgcaggcagcttttcctaacgttgtttaacattaaagagtgccagagaatgacataagcagctctccgctagctagaagcccatgcactagcagaagcagtgaatgctcaagcacatgctcaaggctggttcccagaagcagaccccaatcaggacccagcttcagcgcctgcagaggtacaaagaggtcgcttttacaggggtaaagagctggtaaaaagagaacaattaatataaggaaaatttcaaaagtgcttcagagagctaacgagagcccaagttagttttataaaagactctgtaaaacattctggctttacaccccatttgaccctaaggctgccaaaaatcagcacgtggtgaacacagcatttgtcaggcaagcccagggtaacatcaagcagaagctgcagacatgaatgccacccaacttataaaagtggccaccaaggtatatgttaactgtaaccaaggaacaaaatgggaaagagcaaaagtaacaagctaggcacgccaagggttaagtccctctccccagcccagctctatctagaaaaagagggggcgggaaccagcgccaggagaagagcaaagaaaagaaaaaaataaaagtgtaaaaaaggaaaggaaaaagaaaaaaaaaattggaaaaaaatagaaaaaatagaaggcagtgcataggggcagcgcccgtgccgttgtccggccccaccagccagccgcaggagcaggagaactcaaaaagaaaaagaaaaatgtaaattaaaggcttaagaaaaaggccaatctgttggcaacagctcttataaaaagagaaattaacaatgtgagaggacgtggacgcgggcatagacatgaaagaggtcaagttaagcaaggattcgagagccagacaaggttaaaaaaaagatcaatgcgtgagatgcaaaaaaaaggacactaaaaaaaataaatgtccagaaggtaataaagagagtagtaaaggctgtggtataaaaaagtcaccagctaaaagctgtcacaccctaaaaaaaaaaaaaaaaaatactgatctaatccgggctggcaggggctaaaaaatataaagactagagacagactgagcaccttctcattaggcttccagaagcccacagtcacattacaagttaaaggcagcaggattctgccatatctggattccaatttctcactaatggctaagtcactatatgaagttacaaagtggggggaacccctcctctgggaaactaaacaggagaaagagccatgctttatgaaaacttgcttataaacttcataaaattgccccatgccagaggctatcggtacatgctagtgcttatttacaccttttcagggtgggttgaggctttccccaccaggacaaaaaaagcacaagaagtgactgaagtactgctaaaagactttatccccaagtttgaactccctctaactttaaagtcagacaatggccagcatttatagctaaaatagtgcaaaatttaacaaaactgttaaaaataaaatagaagttacacacagcctatcggccacaaagttcaggaaaagtggaacgcatgaaccagacactcaagcagctactaaaaaattattgccaggaaattaatctataataaaatcaggttttacctatgaacctcctctgagtcaggtacacccccaccgaacaaactgggtatttgccctataaaattttgttcggtcggccacccccaaatcacaaatcaaattaaaggtaatctccaagaactaggggaattaaccttcaaaaaaaaaatgcaggctttaaaaatagccatgcaagaagtccatgactgggtatgggaaaaaatgcctataagtctaacagacccagcacacccctttaaacctagtaactctgtttcagttaaaaagtaaaacccaacttctctaagacccatgtgggatgggccccatacagtaatcttgtccactgccactgctgttaaagttacaggaatcatgccttgaatccatcacaggcagctaaaaccggcagctcaggacaagtaaaccaaccagcaggacccagaacattcaacccggctaatcttgagacgagaccaagctgctgctgaggacaacaaccctgccctggtcactccggaggctgaccagtctacacacggctgaagcttgaggaaacaagccctgttctaatcacacattggaagctgactagtctacgcacggccaaagcttgaggactcgtcaagcaagtaaatgtaattaaaaatcttaaaactaatagtttttctgtaatactattttcctatttgttctgtcactgtgctcaacctcctcccccaagtaaagacctcctttgtccttactaaatataagtatgctgtacattgttttgctgttgttaccccccccttaaccatactaaaaaaaacacctatagaagggtgtccccactgtacacatactacttggtcagggaacagtacaactaaaaccctgttacactatatgtattataaatgtacagagactcgcttagaaacttgtacttacaatcagaccacctattcaattaataaccctggaaatggccagccttatatatgctataaccctaagtctttacctgggacttggtttaaaattcataccaagtcaaaggaaggaagtcttataagtggcgggggggctatatccatatactttaatatttgtcagttcacatccatgaacccaacctatttcacagtctctggtcctacagggtactatacaaactgccagtacaaaattatatatacaccccctgtttgtccctccaaggccctagcaatagtttgctggaactgcacaacgcagttcactgacggatcatcaccgaggcca

SEQ ID NO: 1887581 - DNA, 4001 bp, Homo sapiens
gagtgtgcttacaagaaacacaatctaacctgtttgctatgtcctcatcaccctctgtaccatccaagagctttatacaatatatgagagagtagtaattatttataaccttcatatagagaggagacccaggattttacccctttttctaagcctagctgtgagagacagtatctcttcaattggctagtacaaagtcttagagtcatcatcacacctgtgatctgggccaagatatatgttaccaaccaacctgttagcagaaagcatccaggagaatcacatctcctgggtgctggaccaatgatataaaaaatccttccctgagggcagtgaccaggcaggagaatcacatcacctggtttctcaactagtgataggttaccatttcttcctgaaagtaatgcacatggaggagacacacatcacctggtggctggaccctgcaatatgtcacaatctttcctgtgggcaggtagaaaaggagtcacatcttttatgtaatggatgcagataaatgtcacaaaaacccttgcagacagggctgaggcaggagcctcccatctttcaggtgtttggcccagttaaatgtcacaatacccaaaaatgtggttcgcaggcagaagagaagagtcacattgcctaagtgctagttccagtgatatgtctcaatctttccctttggcagggtccagggtgaagagaggattcacacagcctaagtgatgaaggaaaatatatgtcctaatatgcccaggagcagggcctatatgagacagttgcatcagctgtatgttgaacccagtgatatgtcaaaacatacaatttatgcagggcccaggcagaagagagtgtcataacctaggtgtcagtcccagtgatacatcacatacatcacaatgccttactttttgttgttgttttttttgttttgttttggcgaagtctcactctgtcaccacggcaacctccacctcttaggttcagcgtccagggatatgtcccaatccctctttttgtcaaggcccagccataagtagagagtagcatcacctgggtgatgaaagaaaagatatgtcatcatacccctgcaggcaaagcccatgcaggagagtcacatcacctaggtgtggggcccaacgatatattaaaatctcttcttgggtatatcccaagcagtagaggagagtcacatcacctaggttctcagtccagcaatatgtcacaaggccccttgaggggaaggcccaggcaggagagtcacatcacttaggttaggggccaagagatgtgtcacaatgttccctgtaggaagggctcaagaagaagaggagagtaacatgacctaggggcttggtcaagttatgtgtcacaatcatacctgtgagcagggtctaggcatgagaggagagtcacatcaagtaagtactgggccacgtacatgatgtatcacaataacccatatagacaggtcccaggaagatatcacctaggtgctaggtccagaaatgcatcacaatgtctctcatgggcaaacaccaggaaaaaaagggaaggggataacatgaacaatctgatgggccaagagatatgtcacagtgcccactgtgggcagggtccagccaggagacgcacatcaccttggtgttggacccaggaatatgtcataatgccttctgagggcaggcccaaggtgcccagcaacatgttacaatctcttctgcaggcagaacctagaaagaagagttgagtcacaccagctaggtactgggctcagcaatatgtcacattagtttttgtgagaaggaactaggcaggagaagaaagtcacatcacctgggtgatgagcaaagagatatgtgacaatgactcctataggcagaacccaaacaaattagttacatcacctaggttttggacccagcaacatgtcacaatggcccatgttggcagagcacaggcaagagagtcacataacttgtaggggacagcagcgatatgtcacaatgctcactgtggacagtaccaaggcagaaaacagaacttccatcatctgggtgctaggcccagtgatatgtcacaatgtcccatgtgaaagcacagaagcaagagaatacagtcacatcacctagtttctggtccagcgatatgtcacaatttcatctgtgggctaaatccaggcaggagagtaaactatacagaggcatatggcacaatcacccttgcgtatacagaggcatatggcacaatcgtgcttgcaggaaggtccacagatgagatcaacaattctgtacatatcctgcttctgtgggcaccaggaagacaggagaggagactcacattacctgggagcaaggctctgagatatgttacaatgtcctttttgggtagcaccaaagcaggagaatagagttacgtcacctaggtgctgggtccagcagtgtggcacaatcctatctgtaggctgtgctggtgctaaagagtcacattactcaggtgcaaggcagaggtgtatgtcaaaatcacacctgcaggaaggacaggggatgagatgaacaatactgtacatatcccgattctaggtatgagagtcaacacctcctgtatgttggttctaagtacactagtcacagtctctgaaatgaactgaatcagtgcatgagaaactcagtccctcttaccactgtgcctccttagtggaatcacagcctcacaggtgggtcaaattttagtctgaaagtcaccaacttacctttgaactggatccacatatgagagtaaattttccaccttgcaactgcatctgtgtgagattcagaacctcaacagtaggctgtgttcatgtgagaagatgacaacatttactgtcggctgggtgtacatatgagtgtcaaaatctcaactgtactttgggcccagttagaacatgctctgtaccagccaagtgttttataaggtatgcataagagtcacagtcctttgtgactgggagacattcgtgctggtttggactcatgattgtgcctgtggctctatgcccagttataagagttaacttctctgcaatggctcagtccagatataagagttgtcccctgcctataagcttggcttactaaggagtcaccacctctgctgttgcctgatgttcacatacgacagtcacaatttcaactctgcactgcatccacctgtaagatttaagacctcaccagtgggctctgtccatggatgagagtgacaatcttttttatttttatttttatttttatttttatttttgagacagagtcttgctgcgtcacccaggctggagtgcagtggcaagaccttggctcactgcaaactccacctcccaggttcagccaattctcctgcttcagcctccggagtagctgggattacaggtgctcaccaccacgcccaggtaatttttgtattttagtagagacacggtttcaccatgttggccaggctggtcttgaactcgtgacctcaagtgatccacccacctcggcctcccaaagtgatgggattacaggcatgagccaccaccccggccgacggtcttaacaattggcaaagcgtgcatacaaaaaacacaattgcacctgtttgctgggccctgttatgacactatattacccgagggtttatacaatatgtgagagagtgtaattttctctgaccatcctaaagaggagagccaggattttatccattttcctaagcctagctatgagaaacagcatctcttctattggctagtttgaggcatgagagtcaacatcgcacctatgatctaaacaaagatatatgtcacagtctcacgtgtggatagggcatgcacaggagagttacgtcatctgggtgctgggccagggatatgtcacaatcttccctgagaacaggaatcaggcagaagtgttatcacctgggtggttggtcagagatacgttacaatttcctcctgaaagcagggcacactcagtagagtcaca

SEQ ID NO: 1887582 - DNA, 4001 bp, Homo sapiens
gttacatcacctgggtattggacccagcaacatgtcaaaattgcccatatgggcagggcacaggcaggggactcacataacctgaatgtggtgccaagtgatatgtgacagtgccccctgtgggcagcatgaaggcagaagagactcacatcacctggatgcaaggccaagcaatatgtcacaatgttcccttttggcaacgctaaggcaggagtatgcagctgcatcacctaattgttggttttgatgaaattttataatttcagctgtgggctgggcccagggagtagagttaaatcactcaggtgatgggcagaatctatgtcacaatcatatctgcaggaatatccaggtatgtgattaacaatcccatatatgtctaggttctaggtgtaagattcaatagccggccaggcatggtggctcacgcctgtaatcccagcactttgggaggccaaggcagacagatcacctgaggtcaagattttgacctcagatggccaacgaggtgaaactccgtctctactaaaaatacaaaaattagccaggtgtggtgccaggtgtctgtaatcccagctactctactcaggaggctgaggcaggagaattgcttgaatccaggaggtggaggttgcagtgagccaagatctgccactgcactccagcctggggaaaaagagtcaggctccatctaaagaaaaaaaaaaaaaaaaaaaaaaaattcagcagctcatgtatgttggacctaagtaaaggagtcacaatctaagtggtagaataatctgtccatgagacccttaatccctcctgtgacctgcttctccttagtgaagtcacagcctcagacttgtgttgaatctgagactcaccatcccacctgtgaatgggatccaggtatgatagtcaattttctaacttttgactgccttcgagtctgagattcagaagctcaatcactggctgtttcatgagacagaatgacaatctttactgttgactgggtgtgcatatgagtggcacagtctcacctgtgtgctgggctctgttggaacacattctgcaccgcctgagggctttatgcagtgtgcctaaaagtcacagtctgctctgagacctttctgcttttatagacccatggtcatacctgtgaccctaagttcaggtgtgagcatagttggcagggttcaaattagagagtcctcactctctagtcagcagggtctagactggagagtcgtcacccacctgcgcactggatttattaatgagtcaccaccttaattgttgccggatgttaatatatgacagtaacaattccaactttgaaccatatccacctgtaagattcaggacctcaacagttggctgttgccatgtgtgagggtgacaatcataacagttggcagtttgtgcattgtagaaacaatctcacctgtgtgctaagccctgtgaagacactctttgtggcacccaaaagtttatagaacacactaaagattggtaattcattatgacattcatacaaagagaaggcccagggtcttgtttcctaatctacactacaagagacactatctcccctattggctgattccaggtatcatcatagcacctatgagttgggccaggatatttgtcacaatctcacctgtaagtagaaaatgagcagaagagtcacatcacctggatgctgtatgaggaatgtcacaatattttctggaagcagggcacaggcagaagagtcacataacctggtggctgagcccagtgatgtttcacaatgctccctgtgggaaaagacctgccagaaaagacacatcacctggttactgggcagagctatatgtcacaatcttctctatgtgcaggctgcaggcagaaaaagagtcacatcacttaggcgatagatgcagacatatgtcacaaggccgcctatgggcagggcttattcagtagcctctgatccaatcctgtaggtgttgggtccagcgacatgtcacaataccaaaaatatgcatggctcagcaaaagaaaagatttacatcatctaggtactggatccagtgatatgtcacaatcttcttttttggcatagctcaggaagaagtagagagtcacatcaccaaggtgttggatcaagccatatgtcacaatacacaataaatgcagggctcatgaaaagatgagagtcaaatctcttaggtgtggaacagtggtacatcacaatttctcctttgtcagagccacatcacctaggtggctggcccagtaatatgtcacaattcccttgagaggtgagcccaggcaggagagtcacatcatttcggtgagaaccccacagatgtgtcattattttccctgtgaatagggctcaggaagaaaatgacagtcacatcatttaaatgatgggcccagagatagattacaatggctcctgggtacaaaaaccaggcagaagaattacatcacctgtgtgctgggcccagtgataagtcactttcccttgtgtgggcatggcttcagcaggagagaagcgtcacatcactaaggttctggttccagagatatgtcacaatctctcctattgacaaagcatgggtaggagaggagagtcaaatgaagcagttgatgggcccagagatatgtcacaatgccccccccccccccgcccgtaggcagagtacaagcaggtacctcccaattctttagatgttgtggccagggacatgtcacaatacttaaaaaatgcaggacacaggcaataaaacaaagtcacatcacctaggtgctaggttcagcgatatatcacaatccctaattcaagaggggagataaaaagattcacgtaaccaaggtgttaaatgtaaagatatgtcataatattcctgtgggcagagaccattcaggagagtcacattaccttaatgttggacccagccatatatcacaatacacagcatatccagagttcaagcagggaagaaaaatcacatcatctagttgctgggtttgataatatgtcacaatcacttgtttttgtagaacccagacagaaaagaagagtcacatctcctggttgatggatgcagagataagccaaaagactccttgtggccaggacccaggcgggaggttctcatgccctaggtgtttgtctcagccatacgtcatattaccaaatatatgcagggcccaggcaaacaaggagagtcataacaccttggtgctaagtttagtgatatgttacgatccccacttttggcagggccgggacacacacacacacaaagtcacatcacctaggcagtataaaaaaagatatgtcataatacccctgtagacagggtccattcagaagagtctcatcacctagcttttagactcagttatttgtcacaatacacaatttatgcaagactcagtcaaaagaggaaagtcatgtaacctaggtgctgggtccagtgatacattacaatctctccttgggtaaagtccaagcactagaaaagagttacattacctaggtacttggtccaggaatatgtcacaatacctcctgaggaaagagcccaggaaggggagtcacatcacctaatcgtggggtccaaagatatttcccagtgcttcttgtaggtagagctgaggataagcaaaagagtcacataacctaggggctgggcccagctatatgtcacaactaccccaggtggcaagtctctggtatgaaaggagaatcacatcacatagatactgggccaagcaatatgtcacaatctccactgtaggaaggtcccaggaaaagagaagagtcacattatctgggtgacgggcacaggaacatatcataattaccctaagcatatgtgttactgtcatgcgcaaccgcgtgaagagaccaccaaacaggctttgtgtaagcaataaagctttttaatcacctgggtgcaagcgggctgagtccgaaaaaagagtcagcgaagggagataggggtggggccgtt

SEQ ID NO: 1887583 - DNA, 4001 bp, Homo sapiens
tcagaggtcctcgttcacccagcaagtgacttctgagtcagggcctgtgctggggcagggagctgtagcccagaactcttcctgaaggtccagatccactggcctgagtcaccactctccttgtccaactcatagaaccccttggtcacctctgtcaaaacagtcactacccatcaacctgctcctcttttcctgtccccacctcagagatggctccactgtcctccagactagagctctgggtctcatgctggacaaccccttgtcccatagcccatcaatccccactttctgttctctctgcctcctgaatctccttatttatttttctttctttctttttttttttttttttttttgagataaggtctcactcttgtgcaggttggagtgcagtggcaccatcttggctcactgcagcctcgacttcccgggctcaagtgatcctcctgcttcagcctcctcagtagcttggaccataggcatgcaccaccacacctggctaatttttcttttttttttttttattttgagtctcactctgtggcccaggctggggtgcagtggcgcgatctcagctcactgcaacctccccgtcctgggttcaagcaattttctgccttagcctcccgagtagctgggattacaggtgcccaccaccaagcctgtctaattttttgcatttttagtaaagacagggtttcaccatcttggccaggctggtcttgaactcctgacctcgtgatccacccgcctcggcctcccaaagtgctgggactacaggagtgagtcaccgcgcctggccacacctggctaattttttgtagagatgaggctgtcactatgttgcccaggctggtcttgaactccttggctcaagtgatcttcccgcctcaactttccaaagtgctgggattacagacacgagccacagcaccaagccttgcctcctgaatctctatcttatcccctcggcctcttccctgatccaggctccactctctcctacctgaatccctgccagagccacctcctgggctactggcttccagtctcattcctccagttctggaccaactatgaccttgtcctccactactctcaacccttccatggctctccactaccccctcaccctcaggacaaagtccaagctcctcagcctggcctctgctcatctcttcggcctcctccagccttacagttcccctgctggccatacagacttgactggccttccgcttaggcacctgcacgcagtactgctcctgcatgcctccctgtctttggtcacgctgaaacaccctccccacacccattttgcctggcatctccactttgcctggcaccttctgctcctccaagatccagctccaatggcccctcccctggaaaccctttcccgaccacgccaaactcaaaaaagtctctcctgggctcccaccgtctccgcacacccatgcccatcaacgtccatcctcccatctgacccgggctccttgagggcacggcccaggcctgactcatcttggtcaccagcatcgcccagcacgaggcttggcacaccagaagcctcaggaaatgtttgtctaactaataggtgggagagtgtgtgagtgagtggctagacgagggaatccgtgagtgagagaattgagggcaggaagggcagaacggatgaaggaacaggaaggcaggagcagacgagaatcaggcttagggtgggaggaacggatggatgaataacagatccagtatcccggtctcagtttctccaagaaagcaagatgggttcgccgggactgagctcctcccccctccgcctcaagcctcactaagcctcacggttttccacccgagctatgtgcagaatcctaatactaggcgtgctggaaagggcttacccggccagactcggagaacccgttccctcgcgagcccgctcgggcctctgcggagtggaccaggattccgatccctcaggttccgggtctattggccgactgactgggcctggcagagactggcgtctccgaaagcctatcgctgcccgagttgggctgtgggccccgcctaccaggcaaagggtcctgagtggcccagggaggtagaaggccgagtgtccattggctggaagatagtgactgacgtcatggatagctttcgccgccagactccaaagaagcgcctcgcgtgtcggacccgcctccggagggactgagtcggggtgggagccctgggcgtagacggtcgcagaatggtcgtgaatggagtttctggccccacatacctaggctgtttgctgacccgatccttgggtcttgaggaaggttggggatttgagagttcagactccttggttctgaaggaggagaagtctgggacccgaggaaggagggactaggggcccggactcctgggtcagagggaggagggggctggaaacctgaaggtttggtgtctaggagcgggaactccgggatcttgagtcactcgcccgcccagggatgacaggtttggggttcaggattttatgaggctatttatgggaagggagccaggccttacccccaggcaagtgttctgggtaatgaggcggagcttgtaatggagagggagaaggaagaggctcaggggaagctctggcctggatatgccctttcctcatcccgaaaagggaagtcagaggcaggtgctgtctgcaaaaggaacccagagctagaggagactggagactcacgtgagactaagagaaaaatagagataccaaaggggagatggcaaaaataaaacagtaataataacagagctctcttgtactgagtttactgtggcctggttctgtgctgagcattttacataattatctcatgtcttcctcgccacagctctgagagattggattattattagtagtattatccccagtttacaagtgagaaaattgaggcctagtgagggagaatccagatacagatgtaaagatacaagagagacacaaaacatagatggagataaacaaagagttacaggcccagagagaaaaaagaaaacgcaggcaacaaacaaaaggagaggggctgagagctgggactcctggggctggggaactggagagctggggacccggactcctgggtcctggggaaagcaggtccaaggatggggtctcccagatattttctcccgtgaatccacgatactaagcttgtccaacccttctgactgtgggcgtgagcctggttggggtcgaaaatagtgattaggaggtgcacttgcatcatgagcctattaggaggtgataagaacatgattcatggcggtctccttcgcctggaagggacctttcccccatggcctctgttctttgatctggacagatctggccttctctgtccctccccatcactgcatctcggtcactcagaactgtcactgaggcccattgtggaggcagtgggccaccttggggcagcaacagctttcctggtgggggtcatctctctgggtctctctgctttcccccagaccctgaaccgaccagaggtcctggcacattgcaggggctcaggaaatgctcatggaatgaatggacagagatccccgtctctgggcagctcttcctctgtcccaatccagccatcgtttttctgtgtcaccatcacgtctcttaccctctccctggcctcactggtcccctcccaccttccctttcaatctcctgtttctccttgagccactgggcccactatccccattagggagaaaccaaggctcatcttggaaggatctctcccaggggtcacctatgggatgttatgtaagggagtggcctcacagctgagagaagggttctcaagattccaattatagacacactcccagcacctcagaatcagaaatgcaagatcacaccaaacacgtgccatcacaatttgtgttagatttgatcttgcatttgcacccacacaaagaatcacacacatgcagcaatataatca

SEQ ID NO: 1887584 - DNA, 4001 bp, Homo sapiens
ctgccttgatctttcaaagtgctaggattataggtgtgaaccaccatgcctggcctctgtatcgctcttatttatttactgagacagagtctcagtcttttctccaggctggagtacaatggtgtgatctcagctcactgcaacctctgcctcctgggttcaagcagttctcgtgcctcagcctcctgagtagttgggattacaggcatgtgctaccatgcccagctaatttttgtatttttagtagagttggggtttcaccatgttggccaggctggtcttgaactcctgacctcaggtgacccacctgccttggcctcccaaagtgctgggattacaggcatgagccaccacacccagccctttcttatttacttattttttatttttgagacaaagtctcactatgtcacccaggctggagggcagtggcacgatctcgcctcactgcagcctctgcctcctgggctcaggcaattcttatgcctcagccacttgaggagccgggattacaggtgtgcaccactatgcccgctaatttttgtatttttagtagagactgagttcatcggtctggtagttggccaggctagtcttgaactcctggccttgagtgatcctcccacctcggcctcccaaagtgctgggattacaggcgtgagccaccacgcccggcccatagctcctcttgtaacctgttaaatatatgtgtttaaccaccctgtcatcatatctccacaggagctccaggtacaattgacagctgggaatgtgcctgacaattaagactaaatgctgtgtacacatctcagataattcagtaaatgtctcaatagccctgagagacatgcacctaaaaatcaaagctatgtctgaccccacattatcaccaggtcaatggttggcatcctgttgcaggtgaggactgttctcacctggaaagaagctatttacaactttggccctagttgcaatgatagacatacttctctgctgtggatttttctgctgtttcaccttctatatgggaatgcaagacagacttccccagagactttccagaccttacaccatattggtccaactactcataaatatttccaactccaagtggatcggttccattctgatgactaatcacaatgccctctttcagcaggaagtagccagcatgaatgtggcatccaaatcccatagaaatggaatggaatttgacagtgggaaactgtaattgagtaccacattttttttttttgagacaaagtcttgctgtgtcgcccaggctggagtgcagtggcgtgagctcagctgcaacctccgccttgtgggttgaagcgattctcctgcctcagcctcccaagtagctgggactacaggcacctgccaccacgcccggctaatttttgtatttttagtagagacggggtttcactgtgttggccaggctggtcttgaacttccgaccttgtgatctgcctgcctcagcttcccaaagtgctgggattacaggtttgagccactgtgcctggccagagtaccccatttttaaagaaaaaaaaggatttttttcctttttcttttccccccatctcctacttaactctttaggaatgcaactgtaacctccctacatggcaagcttatctaacaatatgtttacttagaagttccagggactgaaccttgaaacaaatcaggcacccccagaattctctcccatcagattgccttgagacaatggtcaatttctcttctcacgatggtgacagctagaacacctgatagataagacatcaaagcatgtcacatagaccccacacctccttgccccccacctttatgtcattcacatcaagcccccctttaaaagtccctgctttctgtcctgaaagctgaagcaatacccttaaggcaggaacctgtacctcttcccctcacctgagctctggaataaagtcaccttctttctaccagaacttgctcttgttaattggactctgcaagcgtggagtgactggacctgtgtttgggtataaaaccttcattataaattcactgttcccttataaaactctcaccctgtaaaacttctttgtcttctgtttttttttttttttttttttttttttcagagacagggtcttctctcccaggctgtaggagtgcaaaggcacaatcatagctcagtgcagcctcaaactcctgggctcaagtgatcctcctgcctcagcttcctgagtggctgggactacaggtgcacaccaccaggcccagctaactaaaattttgttttgttttgtttttgttttgctgggtgtggtggctgacgcctgtaatcccaatactttgggaggccgaggtgggcggatcacctgaggtcaggagtttgaggccaccttggctaacatagtgaaaccccgtctctactaaaaatacaaaaattagccgggcgtggtggcacgcacctgtaatcccagctacttgggaggctgaggcagaactcgggaggtggaggttgaagtgagccaagatcctgccactgcactccagcctgggtgacacagcgagactctctcaaaaaaaaaaaaaaaaaaaaaaaatttttttcttttggtagagatggggttttgctacaatgttgcccatgctggtcttgaattcctgggctcaggtgatcctcccacctctgccccccaaagtaaaacttctgttagctctctcactgttccttttataatatcctttacttcgtccctatgaatcctgcggggtcctgctgtaaacctttcctgttcgcccataagctccctgcccctttagctcctctaagaccttatttgaccacctattcactcctcttgctgggactataggcgcccgccaccacgcccggctaatttttgtatttgtagtagagacagggtttcagtctctacttctttgtcaccttacaaagtcctgccctgtctccctctaacacctctcaacttctgaaaccagctttctgactctttgaactccctctccaaccacgtacaacagccttcctgttctaaacccgtgcccttgtgacatatgtctgtgtccacttatatcacccctgaggttcctttatgataccctttctgctctcatcatttcccctctactctaacactcctcctcctactcctgccctcctggaacattcccaggagggcacctaggtctggcactatgctcttccttgatcaccaaccacaggggattaccatggcggccaggcaggccccgcctcctagcctgtctctctacttctactggccaattggaggtggtatgtcatagggtgggaaccaacacctggcttctgattggtttgatggggtgacagctccttctactctctcaagtgattggccaattgaggaatccctggttccaccttcaaaacagacctataaataagcctcatttccttgatcatctttgtttaaagattcctcctgagcatcttgagagaaaagcactacttggggcaagagtgatgtaggcctcggagtcttgtgtttcaggaaaaacacaatgcattttctctgctctcataccacaacagtcaacacagaagagttctttgatcaaatgtgtgggttcccccctttttccccaccccctcaagcccctccaacaccaagcaaacaatcatttcttttcttccttcctttcctttcctttctttccttcattctttcccccttcccttcccctcccctccctttccctttccccttcccttccccttcccctttccctttccctttcccttcccttccctcttttcttccttttccttctcttctttcttttccttctttcttcttgctctgtcttccaggctggagtgtggtgatgtgatcttggctcactgcaacctccgcctcctgggttcaagtgattctcctgcctcagccacctgagtagctgggactacaggtgcgcaccaccatgcctggctaattttt

SEQ ID NO: 1887585 - DNA, 4001 bp, Homo sapiens
cacaatatttgatatggaagaagaagcatttctaatggaaactggagggaattgctcttcaactcctaaaataagaacaagagacttcaagtacatctggagcttgtttccctactgtcttactatcttagcctgtttatgctgctataacaggataccagagactaggtaatttacaaaggaaaaatttaattggctcacagttctagaggctgggcagtccgagatcaaggggctgcatctggtggcagctttcttgctgcatcacctgtggcagaaggcaagagggcgaaagacggagaaaaagcaagagatggaactcacagcctcaggtccttttataatggacattaatccattcaagagtgtggagcccccataacctagacacctcccattaagccccacctcctgacactgttgagttggggattacatttctaatacatgctttgtgggaaacacattcagaccatcacatctgcctaggccagtgtccatctctctctgattcagggttctgatcccaagactcatggaagagccaaactacagattagacagaacagtctaatctccctcctggtattagcccccaggaacaggcatgtaatctcagcaatgctcacctctgcctgaaaggtaggactagcagagaactccaccaagcagtacagtgctcaggttagaagcatgaaattcgaaaccagacttcctgggctccaggcctgactctgccactcttagctctgtgacctttgatgagttacccaacttctctgggcctgtttcttcctctgtaaaataagggtttgtaagagtgcatgtcttatagtactgttataataagcaaatgggatgaaacaagaaagtcttagtacactgcctggcacacagtcatgcatattattataatccattaagcaattttatccatgtttttattttcaacttctaccatactgcatgctgggtctcacagatggattgcctaatttgcttatagctataatcttctcaccaccaaatatttctttcctattgtgcttttctatgttgggagatagtctgattttgcttcatctgtgatctcaagtatgtttaggggactgctgactttaagcaaacatttgccgtaaaaggatagttcaggggtggcaggtactaagtatcttttcttatacctgtggaagaactcactcacgcaccacagcactcttgttcaccaggtgtgagtccagcctgaactccttctcaatacaatgcctcagcattcaagagtcagagtcttaacccaggaaacagagccccaagcagagcggacatgctaatgctttattgggaggtgcaatcccaacaaccaaagtaagggacatagggaaataaagcaggaaggagagaaagcaaatacaaggtcatatgttaccaggatggccacagtttctccagagctccagctggttgctcaagtcatgtgggacatctccaggaagacatgtgaaacactgtggctcagaacagtctgtcataggggaggaaggccagatgatttatctgctggcttttttccattctctgtctcctactggtcaaagttcatgttacggaccatcaatgccttgcatgaccaggttgtgttaattgtgctaaccagcctccctgtcccaggacagccattgaggaggccaaagcctctatgaatccagtggagttaagctaggggcacaaaaactgttttcggtcccagcacagcaagtgcagtgggagccatgcaagcctggcagactccccaggggaggctgagcgcacttgggtggcaaagagtcaggccacaagcagtggtgcatctacaggaatttagccaaagttccagaaactgtaattgctgagtagagctggtggctcatagactggcttctgtgaaattggcatgtggcacaaaaccaatcttggcatccaatgtttcattgagaaatatcccaggaggctggacgtggtggctcacattgtaatcccagcacattgggaggccaaggtgggaggattgctttaggccaaaagtttgagaccaacctgggcaacatagtgagaccctatcttgataaaaataaatgaaaatttaaataaaaaaatttaaaaaagagaatagcccaggggctttggtcttcaaagtctttgtcccatctctttattatttccatctcttttccctagttccttaactttttgctaaagtgcagggaccacccctgcttagggtatgagatattcattaacctcttatcccagaccctagaggcccatgatgggaccacatgggagaggaacagggtggccactggtttcaaactgagacaccctgacgtcagcttctgtgtcctctctgctgtactatattcctctcttcatctctcatgatcttcttccacctgttgaggttgtatctcatatcaagcgtctcacctaatggtctctgcccacactatcttttttcagctcccagcaaagacaacactttgtgctgagatgtgtttggaaaacaactccactcctctttgtctggcaaactcctgctcatcctgccagtcttagcttcagaaagaccagcccagaccccaccatataagtctctgttgtccatcacatcgtatcatctttcttcatctgtaggagaatatttattggagtgattaccgaattcacatctgtgtcctccaccaagctgtatgaccccaggaaggcagggaatatgattattctctgcaccactgtgtcactggctcctgccctctggttcataataaatgtcacacccacccacacacatgcacactcacaataaaagaattagtgaacaaataggtgaacacctggatctctctaactttttgatcctttgtctccataagcctggaggctgacaagctaataattcctacagcaagtgcggggctgctatcattttctctaacagttgtcctgatggcctttcagaaagtaattgactttaattatgccctaaactgaccctttgagtagaactgaagaataactgaagagagaaaaatgattcggaatggtcctgttgggtccaattatcagtagagaaagggagtgaggatgaggcctggataaacctgggctccccggcgtgaaccacactgtctgctcattacgtgttccctgcagcctgtctgggcttttgggaaactcatctgtctattattcatgcccatttatcttccctgacagaggtggcagcaataggctccgagttgtgaaaacatagttgaaattccaggcccacaagattaagtgtcaacaatagctgttattcctctaccagtgccaaaatctacacttctccgggtttgggacagcaggtgttgtttgagtagccctgaccccagggccagagggcaaggagatagttgtcaaagttctctgcctctgatcttattataaagtgtgatctggtcagagttctttgcctctgatcttattataaagtgtgatctggtcaaagttctctgcctctgatcttattacaaagtgtgatctgcctgtagagaatgaggaagaggttaccatggacctcaagggacccagcggaaaaaaccatgtgcagaaaccgaaccacctccttggctgtcagatggcagagtccctattgcatagagctgtaattagggcctgaagaagaggctatgtaggcctcctggtgagccagttgtccctggccagttgaccctgggcacagaagtttatggggagcacagattggtatccataagggatggtgcacctatctaaaacttcagaacgttgatgttttcttcactttctgtctactggggctccatgcacccagctcggtttgttttgcaaagagcaatctgttcttttctcttaaaacttctgggatctgttggcaagcttgccatattctctcttcatccctctgttcgaagaagcctcaagagttgactcagataccttga

SEQ ID NO: 1887586 - DNA, 4001 bp, Homo sapiens; identical to SEQ ID NO: 1560637

SEQ ID NO: 1887587 - DNA, 4001 bp, Homo sapiens
tttccaacttggttccattctccccatcactttcaggtacaccaatcagacgtagatttggacttttcacatagtcccatatttcttggaggctttgttcatttctttttattcttttttctctaaacttcccttctcgcttcatttcattcatttcatcttccattgctgataccctttcttccagttgatcgcattggctcctgaggcttctgcattcttcacgtagttctcaagccttggttttcagctccatcagctcctttaagcacttctctgtattggttattctagttatacattcttctaaatttttttcaaagttttcaacttctttgcctgttgaaacttttttcaaagttttcaacttctttgaatgtcctcccgtagctcagagtaatttgatcgtctgaagtcttcttctctcagctcgtcaaagtcgttctctgtccagctttgttccgttgctggtgaggaactacgttcctttggaggaggagaggcgctctgctttttagagtttccagtttttctgttctgttttttccccatctttgtggttttatctatttttggtctttgatgatggtgatgtacagttgggtttttggtgtggatgtcctttctgttagttagttttccttctaacagacaggaccctcagctgcaggtctgttggagtaccctgccacgtgaggtgtcagtgtgcccctgctggggggtgcctcccagttaggctgcttgggggtcaggggtcagggacccacttgaggaggcagtctgcccattctcagatctccagctgcgtactggaagaaccactgctctcttcaaagctgtcagacagggacatttaagtctgcagaggttactgctgtctttttgtttgtctgtgccctgcccccagaggtggagcctacagaggcaggcaggcctccttgagctatggtgggctccacccagttccctcttccaggctgctttgtttacctaagcaagcctgggcaatggagggcgcccctcccccagcctcgctgccgccttgcagtttgatctcagactgctgtgctagcaatcagcgagactctgtgggcataggaccctccgaaccaggtgtgggatataatctcgtggtgcgcccttttttaagcccgtcggaaaagcccagtattcgggtaggagtgacccgattttccaggtgccatctgtcacccctttctttgactaggaaagggaactccctgaccccttgtgcttcctgagtgaggcaatgcctcaccctgattcggctcgtgcacggtgcatgcacccactgtcctgcgcccactgtcttgcactccctagtgagatgaacccggtacctcagatggaaatgcagacatcacccatcttctgtgtcactcacgctgggaactgtagaccagagctgttcctattcggccatcttggctccttccccagttgttttttttttaatctgtaaaaacggggatggtggcacttgggatttttttttttttttttttttgagacggagtctcgctgtgtctcccaggttggagtgcagtggcgcgatctcggctcactgcaagctccgcctcccaggttcatgccattctcctgcctcagcctcccaagtagctgggactacaggcgcccgccaacacgcccggctaattttttgtatttttagtagaaacggggtttcaccgtgttagccaagatggtctcgatctcctgacctagtgatccgcccgtctcggcctcccaaagtgctaggattacaggcatgagccaccgcgcccggcccgcacttgggattttttggtgaggactgtagttacctggaaaggccttaggatagtgcctggtacatagtgagtgctgcatcagtgtgagctattataattatgggaatagacaaaggtgccaccctggccatccagagtggggaggtattttccagtcagggtccaggcaggccagctggagatgaagctgattagtggggaagcttaacttccaggagtggaagaatttaggaggagtaaacagaatgcacaacattctgtaaacattcctttacccaacagtaggaatgctcatagtgggtgtggcttccgtgacaatcattatctcttgggaatttaagaatgtgtcctagagtcaaatggctttgatgtaagccaaacccagaaatgggcttcaggtctgccttacacatagcattcattcatcttgaaaaaggaaagcattcatcttgctaaaggaatcccctcttctggcccaggtcattatttttgtttttgtactgtcctaatttttaaggtgtaaggagaaagaccaaagaataaaataatgaagtacatgtatgaaataacagggtagaattgagactggtacgtgtaagttaagagaaattgtgtataaattttgtgtgaatagaaaaaggatttcttgttgcaaacagacctctctatataaataatacccattgccttcagtggatagcagactgcatcacaagaacattccagcagagtcacgagagaatgggtagtgtggcttctgtaattggcaggttagacagagtaagttactgaagagaaaggagttgaaggagaagatgggtgagggcaagaaaaatgggaaggtgaaaggaaagaactgaaaggaatgtttaccaagggctcatcaggtaccaggctctgtgattaatgtctcacacatgttaatttactcttccactgtcattttctgatgcagtaagagtcagtcttacactgcagatgaggaaagaggctgaaggaggtcaaacgagtggcccagggtcatccagccacttcatagcagagctagtgtgtttcactgtggtttgcgcagacagaaaagtgagacatggaaggaaggcaaaacatttttcttgtcggtgatgtttatgaaagtgacctgtatgaggcagaataatggcctcttaaaaatgtccacatccaggtcgggtgcggtggctcacgcctgtaatcccagcactttgggaggctgagatgggcagaccacgaggtcaggagttcgagaccagcctggccaacatggtgaaaccccgtttctactaaaaatgcaaaaattagctgggtgtggtggcgggcgcctgtaatgccagctacttgggaggctgaggcaggaaagtcatttgaacctgcgaggcggagattgcagtgagcccagattgtcccactgtactccagccggggcaacatgagtgaaactctgtctcaaaaaaaaaaaaaaaatccacatcctaactcttggaacacatttacttggaatgcatttacttttcttggcaaaaacactgttcaaagttgatgaagttgagtattttgagatggaaagcttattctggcttatctgggtggctccctgtatcatcataagggtccttgtgagtgaaagaggaaggcaggagggtcagggtgagaatgatgcagtctgagagactccactggccattgcttcctgtgaacatgtgtgataagacaaaattacaactaatttagttatagatgtaattggcttttatttgtgatttatgatttggggcagctctccctctacagatgcttcagcatcccaagtagctgggactatattgcaggatctggccagcagcctgcaatgcaacggggctctttctttgttcccaggcagattggcaggttgagaaataaaagacacacacaagatagtgaaagctgggtccagaggggtcactgccttctggtcctgcgatgctgccaatgcactggatataccagcatttattattaagtttagtgagagtgggggtaggttagtgagggatttagggtcatttataggctctccgtaagggtcacattccattcccagagctatggacatctgcttttctgggataggaatcttggtaatgtgaaacctccctgactgcatgtccgttcataggctctctgcagggggaa

SEQ ID NO: 1887588 - DNA, 4001 bp, Homo sapiens
ttgagacagagtcttgctgtgtcacccaggctggagtgcagtggcgcgatctcagctgaatgcaacatccgcctcctgggttcaagcgattctcctgcctcagcctcctgagtagctgggattaccggcacacaccaccatgcccggctaatttttgtatttttagtagaaccggaatttcaccatgttggtcaggctggtcccgaactcctcgcctcaagtgatccacccgccttggcctcccaaagtgctgggattacaggtgtgagccacctcacctggctcaatgcctgttctgagtaggtattccattgggtgttctggaagagacaggttttgggaagtactgatatgtgggggctggagggggtgtccatgaacagtccattggtttttcgcaactgccctttttacccctggtcccgtagagtatttagagcttgaggcatgcagagtccactgactcaggagggtggtgtggggacataaggccacctaccttgaagtaaagaggagtgttgctctggggctgtctccagacggtgaaagtgaatcccacaatgagcaccagcagcaacacagccgctgcgatgtagatcagctctccagagaacaggcgtttgggccaatgggccaataccaggcatagcatggacagcaggacaactggaaaagggtcaaggttggggagaacaggttcaacttcagaagctaaataagtgaagatctcgggccacatcctatcccccaaaccatatatatgggtatgggtgtgtgtgtgtgtgtgtgtgtgtgtgtgtgtgtgtgtgtgtgtgccagcctcccaagtagggactacaggcacgtgtcagcacacccaaatactttttttttttttttgagatgcagtttcactcttgttgcccaggatggagtgcagtggcacaatcttggctcactgcaacctctgcctcctgggttcaagtgattctcctgcctcagcctcccaagtagctgggattacaggtaactgccaccacacccagctaattttttgtattttttttttttttttgagaaaaagtctttctctgttgcccaggctgaagtgcagtggcgtgatcttggctcactggaaactcggcctctccggttcaaataattctcctgcctcagtctccccgagtagctgggattacaggcgtctgccaccgtgctcggctaatttttgtatttttagtagagatggggtttcaccatgttggccaggctgatctcgaactcctgaccttgtgatccactcccccccggcacccggcctcccagagtgctgggattacaggcgtgagccactgtgcctgacctaattttttgtatttttagtagagatggggtttcaccatgttggccaggctggtctcaactcctcacctcaagtgatccacttgcctcagccttctaaagtgagccaccacacccagcctaaacttttaattttatatatatatatttgtgtgtgtatatgtatgtgtgtgtgtgtgtatatatgtgtgtgtgtgtgtatatatatatatggctttttgtttgttttttgagatgggatctcgccccattgcccagactacagtgcagtggtgtggtcttgattcactgaagcctcgactgcccaggctcaagcagttgtcccgcctcagcctcccaaagtgctgggattccatgtgtaatccactgtgcccggccaaaagtgcgcctactaagaagggccaccacatcttcacaactcctctcaactaccaaagccccacactccctactcggccccctgccgcatgctatcaggttcaaaacaccccgcggagaaacgccactgctcaccaagcagaaaggcacatccatagacgatgcggccccatctcggggtggggatggtgctgacagggctccacagactcgccggagtgctggacgcttcaggaacacatgctggggattctgctttgggtacagaattcatctcaactacttcctccttcggcttctcgttcttgctgaaattctcgtctggctggtacctgaattagagagagtagggcaagattaacccaggtccctgttcatccaacatcagagagcctaatacacccacggtagctcccacgtatctgaggtttcatctacccgtatccactacagtccaaaaatagtaaatggaaaagtccagcagtaatttgtaagttttctttctttttttcctttttttcttttctttctttttttttttttttgagacggagtctcactctgtcacccaggctggattgcagtggcacaatctcagctcactgcaaccacccccgcctcccaggttcaagcaatctcctgcctcggcctcctgagtagctgggattacaggagaccaccaccacgcccagctaatttttctatttttaggacataccaggtttcaccatgttggccaggctggtctcaaactcctgacctcaagtgagccacctgtctcggcctcccaaagttctgggattacaggcgtgagccaccgcgccccgccgtaattgataagttttcaattgtgtgcagcttcaagtagcggcattccacgctgcccatgcccaggatgtaaatcatccttttgtccagtgtgtccatgctgtgaacgctaccggccgtgttaagtcacattaggcaactgagttatggatgggaaaatgatcatgtatagggactggtactatccgcggtttcgggcatgtactgggggtcttggaacgtgtcccccgtggataagcaggggctgttgtactcctcccactcctgtatgtgtagcaatgcaccgaggggccaggaggcaggcagaagagggctgggaaccccatcaatcctcacgtgtctaggaccccagtctcacctgaggacaagaacagaaaaagccaccaaggagtaagcaagcatagtcccgatggacaagaggctcacaaggtcactgaactcaaacaggaaagccatgattgctatagtcagggctcaaaacagggtgagttccaatgttccacagcactagagggtgactgtcgttaacaacttataagagctggaaaagcactttggaaggctaaggtgagcggatcacctgaggtcaggagttcaagaccaccctggccaacatggtgaaacgtcatctctactaaaaatacaaaaattagctgggtgtggtagcacatgcctgtaatcccagctactccggaggctgaggcaggagaatcgcgtggacctgggaggcggaggttgcagtgagctgagatcgtgccactgcactgcagcctgggctacagagcgagactctgtctccaaaaaaaaaaaaaaagagctggaaaaataggttttcagtgttcccaatgcaaggaaataatcaatgtttgaagtgatggttatgatattaccttgatttgattattacatcttgtatacatgtatggaaatatcacactgtaccccacgaatatgtacaattattgtgttaattaataataggaatgtggccaggtgcaggggctcatgcctgtaatctcagcacttagggaggccgaggcaggcggactgcttgagcccagaggttccacatcagcctgggcaacacagacccccgcctctacaaaatttgaatattagccaggtgtggtgccactgtacactggcatgggtaagagtgagatcctgtctcaacaacaacaaaagtcagattatgtacattttctttaattttttttttttaaacaggaatcatcatacctccctgcagccctaacctgctgcgctcaagccatcctcccacctcagcctcccgagtagctgggactacaggtgtaccaccacacccagctaatttttttttttttttttgagacggagtctcgctctgtcgctcaggctggagggcagtggcgcgatcttagctcacagcaagctccgcctcccacagccaactaattgttaaaaattttttt

SEQ ID NO: 1887589 - DNA, 4001 bp, Homo sapiens
gcaagggccctggggtagaagcatgcccagtgtgctgcattgtaggaaggagaacagtgtggctaggggagtgtgagctatggagaagacagaaaagatgagaagatgaaggaaaagggtgagcaggaagcagaaaggcagatggtttgaccttggcagccactgcaaggccactggtgtttatgccaagtgaaatgggagccactgtggggtttttcagcagtggaagagggatctgatttccctgagaaggatctctttgtcatgttgagaactgatgcctagaaagtgtctagtacatggaaagcatgtgaaaacatgtatctgtcgctcttagagtaataccaactcatgcagtgggcaagaaacacccaaccccacaaggcggtacagggataaattacttccagataattccctctagctacagggattctcccacgggcatcgctggtctccagcattagcctctgcttggatctggcatcaggaaaggagactgctacctctccaggtgggccactgcgcagtgggctagctctttcttcagaaccctgcttggaatcagtccccaaatgagcctgctttcctggaaccccgctgtggtcctgaatctgcatagagcggtgcaagtctgccctctcccttcagaagctgaggacagcaatggggcctggcagggtcttacattcgggggtccaaagtggtttctaagggcacatgggatttcctaggaaaagctcctgccatgacagaaggagctggcaactgcctctgtggagcccctagagaggaacttgagggaaaggaggaaagtcctataggacccccttcttccctttgcccccagcaggagaccttagaaaacaagggcttgatagatgagccacagtgagccagggggtgggagtgactcctgggccatagacgaggaaactgaaaggcaggcactggaggcaagaagggctggccccgggcacccgctggcgaggacagccttggagagggcctgcagctcctcccctctgagctgtgctgcgctggccgcctggaccagggtggctgctggagagtgttttccctctgggtttccttctccttggctcccagggaatcctctggcggtgcctccgggaggctggtagccggggaagcaggcacgtgaatccaccgggctgccccaccccaacctgaggtcagagctgaggcgtaggggccggggtaggggcagaggtgccgaaacgcactagctggggactcccgggggaaggagataggagagacccaaggcgagccttaggactcgcccctatgactatgactacgcgctgcgtccgaaccacatgtccaccccgcatttgccttcggggaccagaccgcgctccctcagatggctggggagggagcagactccgggtgaaggctgggggaggtaccgggatgccgagtacgccagagcaggcgggggatgggttccggcttcctgccgcctcggcatctcgctttgcaccgggcaaagaaggggccacgaccggcgaagagcgcgtggagacacagggacccgcgatccaggggcaggaaccccgccccctcccggaaacctcccgggccctgagtcgtgcccggcgctccccaccccaccccacccccgccgcccctgccgtcactcacggccgctgcgggctggctagcgtgtgcgctctccgcgccgcaggcacctgctcgctgggcgctgtgcgctcacttctccctcgcgcactgcagactcccggcgctgccgccgccacccagcgtagtctccggctgggcacagcgttccgcccttctcgcggccccgggcgcccacccatccgtcatggcccaggcctgggccaaacagcggggcagctggttgcccaaactggggtaaggagttgagggctgggagctgcagagaggaccgagggacacacggggagcagggatgagcggccgtctcgagccgtgcagactgggaagaagccagggagagtttgggtgggaggactcccaacccaagcgggtgcggggcggggctgtactccaaccagaaagacggtggtccctccgagcgacccccgaggagagagggggagcgctctggggcgggggcggggcgggctgtggcaggagaggggagggcgggggcgatgcagcggtggaggcggcttggcgcccagccactgaccgccccctcccttcccctcccctccccctctccccgcctctctccggctccgggtccgccacgccggacccgctctccccgcgctgcgctgggtcggacgccaggtctgcgcgccgcggctgagcgcccactcgccctgcggaaagagccgcggaggaaccggcgggggcggctgcgggagccgaaggaggtggcaatcgggagcagaaccagaaggagacagggaggcagaagctcgcggctccgtggcacgcactccctcggccagggatgggtcccggcgcggcccagcccctgcccggcccgccgggcagagactgaaccgcggatccccaccgtcctgtggacgaccggacagagagaggcactgaccgatcgccagcagcctcccggtgggaccgcgtctcctgcacaccccgcgcagcgccccccgccggagccgcaccgggcaagccggcgagggagcggggctgattggcggccgccggcggccaggggagggggcgccgcgcggggccatggcaggctcggaggcgtcctagcccgagccggagccgatccgagcccacgcggccgccgcctctccgctcccgggcccccgccgccaccgcgccccccgcgggagatggaacagcggaaccggctcggtgccctcggatacctgccgcctctgctgctgcatgccctgctgctcttcgtggccgacggtgagcgcgggaactttgctgccgctgtggactcgggggggtctttgctggggccgccaccgagaagaagaagaaagagaacgaaccgggaagcttcgcggtctccagcaatcccgctgtgcagcctgggcccggaggggtagggagaggcgagcggcgaagggtcgccgcagcagcagcgccgcgcccgagtcgttcccagtcccgccggggccccggctgcggaaaggatgcctgcggggagcgggagtaggcgcgccccagccaggctctggcggtgcggccaggggcgggggagaagcacgagtcgcccctgccgccccgccccatccggagggaagcagtaggcagccgatggccggtccctgcctcggccctgcagccgcttccccgaactttgctagcccctccggccgtgcgccagggagcagctgcggggtggggggcacaaggccagccagccagagaccgactgcctcgctttaggttgccccaggcccccgacctacagctggtcacgcctctctctctctccccacccccagctgcattcacagaagtccccaaagatgtgacagtacgggagggagacgacatcgaaatgccctgcgcgttccgggccagcggagccacctcgtattcgctggagattcagtggtggtacctcaaggagccaccccgggagctgctgcacgagctggcgctcagcgtgccgggcgcccggagcaaggtaacccgccgcccacgcggtaccggcgcgcgcccggctcgcgcccggggcggcgaaggctaacccagggagggaagcagcgggcttcactcgcgcagggcgccgccctgtggcgcagcccatcttccaccttcgcatcccaaagcatcttcaaagtcagcagtggttacccccaaacctgtcaattattttgacagcatcgctgttcccaccacctcccagaactccattcacgcccagcccctaaagagccacacctcagcctggtcgcttgctcgtgctcgctggctgcggccctctgatgggtgctgggtagtgaaggaagcccccttggtcccatcaggctctccccgccctc

SEQ ID NO: 1887590 - DNA, 4001 bp, Homo sapiens
tgggcgaacccaactgcttgcctgcctctctagctccaaaactacaatccccagaggcctctgcggtcacttccactacccaccctacacaccttctgtgtgtcgcgttaatgtcagaagcacttctgtttggtggccccggctggttaggctggttggcacccagggaggcacccaggtcttccccacacctctgcacctcattacctgaccggcttctggatccgcagcgtgcatctgcagtctgtgagtcccctataggcactcagtatgcccctctgcgtgtccctctgttactcatggggacacagtctgggagccgtagacctgtctcagaactagggcgccctcctgtgggcacctccaggccattttcctttcactggagcccaccgggttagagacagaccctcactctgttgcttggggacaaaggcttcactccctggcccgagcttggggctgagctagagggttcggggtcatcctgggcccctctggatgggaattggctgccctgttaatttctgtgacatccccgaccctaacagtgggtctctggagcagactgcgcttcaccccatgggaagggggtttccacctgagagtcaaaaaagaggtgagaattctctgtaattccatcttgactgtcaacaggatggattctgttaccatttcttgccctggaggctgccttgttggtattggggaaagttcattcctagtcctggaaaagtggctcattccaactggagtcctccctcagcattcctttctgctgcatccatcctgcagtcattcatgttgttaattgtaaacaaacacacatggaacagtttaaataaaactacacagatgtgtgtgcttaattgttcagtgatgtggatgaagggcagggacagcagagatgcctgtgatttcaagggcttggggaggactcgtacaagtagagctgtctcagctgcccctgaccggtttggtaccttggagattcgggggaaggcattgcactcggaggcagaaggaagcatagtctgaggctgggctcttgctacagggtaggaaggattatggtggccaagagccttcttaaggttgatttttaaatatgcataggtgaagatacagactagctgttcacacatagaataaggagaagctttatagagtgtgacctaaattttacatcacagaacactttcaccttccggcagttgggacatttcacccaaaatttgaaattccctcctactctgaaaatgaatctggcctaactctgcactgatgaattttttttttttttttgagacagttttgtgcttgttacccaggctagagtgcagtggtgcaatctacactcaccgcaacctctgccacacgggttcaaccgattctcctgcctcagcctcccaaatagctgggatttacaggcatatgccaccacaccgcgctaactgtctggtacttttttttagtagacgcggagtttcatcatgttggttaggctggtgtgatcccctgacctcaagtgatccatccgcctcagcctcccaaattgctgggattaaagatgtgagacacctcactttgccagtatgcattgttcttagtgtcagccgctgaaactgctacttctgcgttacgcgactacgagccaccggtgagagagcagcccacgggcacacaggcggacctgtgctcgtcatcacaagggctccacttttggggagactcacccgcacaccgtccgcgcacgcctgaggctgggatcccgcgctgcctcgccggcgatctgtctgaggtttcttcctcctggggtttcttcctgctggtggaccctccgcgaatcccggcctccggagaccgtcctggtaactaccctggccaggactggtctcagcccagactcagacgcacgatcacacagggctgctacttcgccaagtgtcagggacccatccccgggcaacggtggctttcactgtggcccaagcggcggctcgggcctcgcgcatgcgcactggcgaggccgactcccccgctccacccccccttactccgcagagtcaggctgcggaccctttaaaaaatggcggcgacgcggcggctgcggggcctggggcggcggtgctggaggttgcgtcggcggcggcggcggcacagccagaggcggcgggtgggaagaggactgccagaggggcctgcgggagacccagggtcggacccataggagtcctgtggtgaggacctccttgatcgctcttctgcttcggttcccgctgaaggaggagtttcgggatgccggctgggctgcgcggactcctcttggggtccgatgatggatccaaccgggtgatcgggaatggggttccaatgcagtgaggccgaaagggtctcgccggggcacagaaagatccccagggccgcaaggcgtgctgtcggctgcaaaggcaccgacccatgagcccactgcctccctccctcctggcaggagcaggggcctgccttcatctccaaggcccgagggctccggcatcccgacgcggcttccggcgacacgggcaaagagagacagaggcgagtccgagctggagccagcgtgtccacatgtggcactgtcgtcccccaagagcacatgcaggcagcctgtgtctttgaggctgtagggggcgacgacaagacggacagtgatgtccaggcgtgcgcccggggggccactggagaccggccccacaaagcgaggaaaagccaagcgcacctgaaaacctgcgagacagggcctgtgcgcgagtccacgccacgttcagggaggcccgccagaggagccgagaggtttggacaaagtacaccccacccccagcccgccgccggctaggtacccctgacgcaacctcccctgcacccagccaaaacccagtcccgttggctccctgacatccgtggcagccaaaagattcggtgctagaaggcactttccccaggagcggaggaaccggttggccctcaagaatcagagaggaagtgcaggtgggatgcaacaccgcctttcctagaaggccaatgtcaggagcggtgggcttgcctccgcctcttcctggaccgagcgtgcagccatcacttgggccatggagaccgagagagcttccctgtcccacacaggtatggaagcccagagctccaggatcaccacagctgcccaatcatccagaaagaggtgtggagagggaaacaatcatgacgcggaccgccacgaggtttctccctgatggacggggaagtcttctttgtggaagacactgagccacgctaagaagccgccaggcttctcagagacggggcagacacagcaagagggaggtcagagcagaggccagagcccaggcaggatacgggggggccatgccaccaccaccggcatccggggaggagtgtcaaacgggtgactcggccaggaaggccagcctttgagagacagacatgcttgccccatccccttgccggcttccttctccgtccctgcgtcgagctgtggctacatttctcgatgagggcagagggcgacaggcgtgacaaccaccttcttgaagctctgcgggcaccctcctgcgggtggacaatgagcgcctgggaggccgttgtccttggttggggagcgctcgtctggatccagcctagcaaagaggctgctccggatggggaggggatgaaaacccctgcgggttcgacgccgatgcccacgttgcccaggccttcacagacccccaaactggaactgccgggaccacgactgccaaccggccacacgacccaggcagagacgcggggacacgctgaccagaagaaaggccgacgtgcaagaaacccaccctccggcgcacagggcccatgtgtcccaaggcgcacgcacacacagacggacagagacagaaagagagggcgaccgaaagagcgagaagggagagagacaaagagagagagagagagagagagagagagagaga

SEQ ID NO: 1887591 - DNA, 4001 bp, Homo sapiens
gatgtgaaaatctttccactctagggtttccctcatggtcaccccacgatccaggacacccccaaggtcacctttccaagcacaggataccctgctgcacagagcaggtggggcagggatgggcaggcaggagcccggagtgccaggatggtaaattcaggccaatcaaaagctgaaactccagcgatgggaggcaggagtgaatcacagaccagaccttcaggaatgaagtcagggcaacttttatttacttgaacaacagacatgacacacagcacgatctctcctctccatcccatcccaagcttctgtccacgactacccagggtggggaaaaaggcaatggcccagccccgatgacctgggggacttcagtgtgcctcctcagtcccacccagaaaaaagcctcctcccatctgatttcaagatagtggagaaaagccaggcacggtggctcacacctgagccacctgtaattccggcgcattgggagactaaggtgggaggatggcttgtggccaggagttcgagaacagcctgggcaacatagtgagacctgcccccccatctctacaaaaattaaaattaaaaaaattagccaggtgtggtggcgcatacctgtagtcccagctctactggggaggctaaggcaggaggatcacttgtgcccaggaattcaaggttgcaatgagccatgatcacaccagcctggccaagatggtgaaaccccgtctctactaaaaatacaaagattagccgggcatggtggtgggtgcctgtaagcccagctactcaggaggctgaggcaggagaatcgcttgaacccaggaggcagaggttgcagtgagccaagatcacaccactgcacttcagcctgggcaacagagtgagactccgtctcaaaaacaaacaataaaaggccaggcacggtggctcacagctgtaatcccagcactttgggaggctaagacgagcagattgcttgaggtcaggagttcaagaccagtctgggtaacatggcgaaaccccgtctctacaaaacataaaaaaaaattggccgggcgcagtggctcatgcctgtaatcccaacactttgggtggctgaggcgggcagatcacctgaggtcaagagttcgagaccagcctggccaacatggcgaaactcggtctctactaaaaatacaaaaattagccaggtgcggtggtgtgcacctgtaatcccagctacttgggaggctgaggcaggagaatcgtgtgaactggggaggtggaggttgcagtgagccgagatcgagccattgcactccagcccgggtgacagtgcgagactccatctcaaaaaaaaaaaaacaaaaaaaaaaaaacagagtcctaactcttccctgccctgagaaccccctcaaggcagggaggatcagctattcccagcgcctcaggactaagcacacctgcttgtgtcccttctgggtccacaaggaacttgttccatgccccacatgtggggcgggtgtcactgctcctcccggcaagttagaaagctgcagggcccagcaagaaggggccaggtcaggtcaacccagcctgataccggaagccaggagttggcatttaacggtctggaggcccaaggcagcttcctcttgggtaactggctgctaggaaggtgcgggccgggccagtgcccctgccaggcttgggagaggaggggccaagcctccaggcccggaaaggacacagctggcttcccttttaatggaagggccacccactcacccacctatctatgctggcaccacagcccagcctgagctgtggccatgcaggggtccccagttgcagagttggggatcagggcctgcagcacacatttgggcccagccaaccccacccaccacatccctcctccagacacaggtctgattctgagtcctcatctctgctccaagcatcagcccacccagggaaggcaggggctgcaggctccaagggggcttgacccctgttcctgctgaactgagccagtgtacacaaaccaactgtgtttcagctcagtaggcacgggaggcagagcccagggaggccaggcagcaggatggcaggcagacaggcggcagcaggggacaggcggcaaggccagaggaggtgagggcctggggggcggaacttagccactgtgaacacgacttggtgtggaccctgctcacaagcagctaagccctgctcctcaggccaggcacaggcttcggggcctctctgccaccccgtccccgggcagcatcctcggtggcagagctcagggtcggttggaaatccctggcaatgtgatttgtgacaggaagcaaatcccatccccaggaaccccagccggccgtggcacaggggtgaggggggcaccgggcggggccagaggctggcacctggaggggagaaagagagagagagcaaaggaggtaatgagatttggggacacctcccctccaggtccccagatgcttcctttgatcacagggaagctcttttctcatatgcaggagccaccacacggggagctggagcctagctgtgccctccgttccagccccaggactggagaggcagagatacctagagggcccatgcgggacaaggaggctacagcaacttgcatggccaagctcccccctcattgagccctgggcaggccaaatggggccatggggagaggaagccaaggggggccaggcaggcgggtgaggaagtgatctcaccccagctggcgccacttcctagaagcctggagggcaggaggaaaccaccagggcctccccccccgtggcccggtctcctcagtggccagggcttagcccacacccaccagggcggatgccggcagcaaggcacccccctctctttctagacacgcaccccccgccccccagagcacaggatccaagctccaagatacaggcctctccacccaaacagcccaaggttcaaatccttgctccacagtttcccaaagactctccaaagcttcagtttccccatctgtaaaatggagccaagagcctcttttgcatagcccagtgagatgtcaccgagtatgtatgtcactcagtaagtgcccagcaccagggcaagatacaggattttcaggacccggtgcaaaatgaacacgtggtcctctagttcgaaaactaagaatttcaggccaagcatggcggctcacgcctgtaatcccagcactttgggaggccgaggcaggagagtcacctgaggccaggagttcaagaccagcctgcgcaatacgacaataccccatctctacaaaaaaaaaaaatattttttcttttttgagacagggtctcactctgtcgccacggctagagtgcaggggtgcaatcacagctcactgcagcctcagcctcccaggttcaagtgatcctcccaccttagcctccggggtagctgggactacagctatgcaccaccatgcccggctaattttttctttttcttttctttttttttttttttgagacagagtctcgccctgtcgcccaggctggagtgcaatggcgtgatctcggttcactgcaacctccacctccagagttcaagcaattctcctgcttcagcctcccgagtagctgggattacaggtgcccgccaccacgcccagttaagttttgtatttttagtagagacggggtttcaccatgttggccaggctggtctcgacctcctgacctcaggtgatccgcccacctcggctttccaaagtgctgggattacaggcgtgagccaccacacctggccctaatttttgtagagatggggttttgccatgttgcccagactggtctccaactcctgggctcaagcaatccgcctgcctcagcctcccaaagtgctgggcttacaggcctgagccacagtgtctggcccacaaaaaattcactaaaaaatcagccaggagtggtggtacacatctgtagccccagctactcaggcggctgagg

SEQ ID NO: 1887592 - DNA, 4001 bp, Homo sapiens
atggtgacagtgacgctgcagatccccagaccacacttttgagatgcacagcacaactatttgtggccctggcagagacaaccagggagactatttaggcttctaaacctactgcaaaccggaagtcttgctatataccaccactgcagtcacagtccattacaggagcccattccttttatagtacctccctggctccgggctcatatggccagaagtgtgagcaaggacctacactcattatccatcacctccatggttactttatcagaaccaaagactcattcttaattggcttattctccccaagacttactctcagcagtaggtcctacttaggaaaagtctcaaagcttcatcttgcttaggaatgtcttttcatagtattaaaaaaagcagctactgctgaattctactttctttttaactaagcgatgatatttcacaatggtcacatttcccccagagtgaaacaacttgagagaaaaaaaaaaacctataaaataagagggaaatcctatttaaggggaactcaattcacctatgtattcatgaaacagacacatgcacataaaggcatcttaacgtgaaaaataaacatacagtccttgccctcaagccaggcgacagaaaagctaccaacaaccaggctgaaacaagacaaatgccatctgaaaaaacagctgacatttgtttctatcaaagccatccagcagatacctcaacatctttccacagaacgtgtgctctttactaacaaccgacacacaaaggaggacgatctccaacagaggtgactaggaaaggcttcctggatggcgtaatttagtgttggagtcagaccaatgagccgccttttcacgggtggaggtcccagatggccatccctttaacaaaaatcaattaacatgtaaattatgtactgacaaatacaacgtttgatgggcccgctgcagtggctaaagcctgtaatcccaacattttgagaagctgaggcaggaggcctgcttgaactcaggagttttagaccagactggtcaacacaacgagaccccatcactataaaaattaaaatgaatctcagctactcaggaggctgaggaagcagggtcacttgggcacaggggactaaggttgcagtgagctacgatcacaccactgcactccagcctggacgacaaagcaagacccccatctctacgaaaaatttaaaaattagctgggcatagtagtgcgagcctgtggtcccagctactccggaggctgaggcgggaggatcgcttgcgcccaggaggccgaggttgcagtgagccgtgatagcaccactgcactccagcctgggcgacagactgagagcctcacctgtaaaaaataattttaaaaaaggttccacctagtgttttccgtggtgtgactaagaaaagtatctagaaataaagcacagtcagtacctgctctcaaaaaacggctgccaatctagtttggagacagaaaaatatacccgactgagaacacagaggagcctgttttcggaagaggggcgtctttggagacgcaaaatcctctccgcgggacgctgacgggcagtcggtaaaggacttccaagcactggtcagtgacaatcgggcgctggggctttgccaaggcccggaggcggcgcgccaaaccgggcaatgcgggaagcggggcaggcccgagtggccctactgctgccgtccctactgatccctgcgcatccgccacagagcagggaacggcagaaaggaggaaggagggggagttccgtaaatcaggccctcaggggctcccaggcccgcacccctctcaagccccggggaccaccgcggagccgctgctccgggccgtgcggctcgaggcgaacctgcctcagagccgccgggccctcctatcccgagccgtatctctagctccggcctgaggtggccggcgactgcgtgcgcaaacacaagatccgcaccccactccccgccactgcagctccgcggccgcgctcagagtctccggaacagaccggactcaatgcggaccaggcaagcggaagtgtgccgcttccttccggccagcgcagcacgagacgaggcggggaaccgcgggaggaggcggggcctagtgttgacgaacagctcccggggcctatgggcgcgggggcagccgcccggcctctccggcgcgccccctccccggggctgttgacgccccccagcccctcatttccacaaagctccgcggcggttctgccctccttgtacccgcggcgcgctgcggcccgtggcgcggccccgttcccgcctagccccgtcggcctccttcccctcccggagccgcgcgtgaggacggctgaggccgcaggtctgtggcggcgcgccgggacgcgcgggcgagggtctaccgagagggcgggcgggcgccggcggaaccctcggctacagccccgagcccctggggccgcccctccccgccgcgtggcgcagtcggggggcgcggccgcggcgtcggggcgtcgggaggggcggagcgcgggagtgtctgccgggacgcgggccgggctgggctccggaaggaccaagtttgcggagcggcttctgctcgtcggccgtgcggcgaggcagggcctgggctgcgaccccggcggccgctcgcggtcttgggagagctggggcgcgtgcctgaacttcccggctgcccctgtccttggagacctacctgatggggacgccaggtgtgcaggggcgtggcgcgtaggtaagcggacccggtgcctgcctcgtccaggggatgctcactagagcgctaggcttttttatttttattttttagagacaggggtctcgctgtctcgcccaggctggagtgcagtggcgttatcacggctcactgcaacctcgaactcttgggctcaagcgattctcccacctcagcctctggagtagctgggaccacaggcatgcaccaccgagcctggctattttattgtatagatagggtctcgctctgttccccaggctggtctcaaactcatggtctgaagtcatcctcctgcctcaacctcccaaagcgctgggattacatgagccgcctcgcccggctagcgctagtcgtccttattaataaagaatcgcttctggtcccttttcagttgtttacaatggcattccttttgatctgatggaggaactttttttcttagttcatgggactgttgcagtgcctgacacataattggtacttaaatatgtgttggttttctgccttaacatattagaatatatgaattgtttaaaaaagtcctctcacacttagggaggactctaggatgaggtcacatgggggataagcccatctgtggctgtaggactttgttaaacactcctcttctccctctctgttccagattctccatttccagtgcttgaaagcacagtacttaaatctggcttcctgcttttttttttttttttggtatgaatgaatacatgaattgtataatgttagttggtttgttctgtagagcaagttacccttaggaattaataaactgtggaaacaatcatgtcaggctactagtcacatttaagaaataattagtaagaggctgttcattattcagaggagtgaagcaagatgttctggaggactggaacccgcttactcactgccaccactcccccgcctcccacttgctgctgccaaaccaggctcctgctcccccccacccattactcccaccgacgctccctgggatagcagctgccctgattggcacacccccgcagtcatcaccactgaggcgtattcctgaagctgccagtgtgaattgttttatagaacactggtgttaaaattcaggtacctgagacaaaacaatattttaattcttcaaaatccggttgtcaacacatttactatggagtatctcccacgtggccacttctgtgggaggtactgaagacctactaccgcctatggaagtagaaaataat

SEQ ID NO: 1887593 - DNA, 4001 bp, Homo sapiens
agacttaacgttgtgttacaattgcctcaaattcagtatatgccgtacaggtttgtagctacaggctataccatatggcctaggagtatagtcaattataccatctaggtttgtgtaggtacagtctatgatgtttgcacaatgacgaaaatcacctaatgatgcatttctcagaaggtattcccattgttaaagcgacactggactgtattatatgtattacctatattctaccaatgaactatcaaaaattaaaatttaaaagattccatttacaatagcatttacaaaccccatagaatacttagaaataaattagcaaaagctgtggaagatctatgcacagacaactgcaaaacagttgcaaattttctcttaaaaagccagatagtatgaggttggtacaaaagtaattgcggtttgaaagtaatggcaaaaaccacaattacttttgcaccagcctaataagtagcatagcctttgtgggtcacgttgtctgtgacacagactctttgtgtttctgtgtattctgctgcaactctttaaaattgttaataggatccttcactcactggccttacatgtaggctacaggctaaatttgttggcccataggctgcagtgctgacccttgctgcgaaatatttctaggagaaaatactcaagacctaaatctatggagatatatatcatccctgtggcctggaaaagttaatattggcaagttgtccatcttggccaggaccctgaaagatagtctatgttattgtaagaaagattggtgtccttgggggcatgggcttttaagccagggtggaatctgcagaagtctgaggtgccatttcctgtccctatacctgggagaaaatagctctcagacagctgtgtggctttctgcaaagctcaattagaagagaaattatcaggcgtggtggcgcatgcctgcagtctcagctacttgggaagctgaggtgggaggatctcttgagcccaggagttcgaggttgcagtgagctgtgactccagcctgtgtgacagagtgatacgctgtctggagaaattcatcatggagatatgctgataattggtggtccctgcctacatcctcccaggagactgagccagacccggtgtggccaatggtccacttataaattgaaccatgttagacctcctaacagtgcaagtactcattacagctctgacatggtgctaagcaccccaagtattataaacaagtgtaatccattatgcacacacggtgaggctacaccaaagtctggtggttaaatgcatgatctgtggaatcagacagcatgggttcaaaccctggctggggtgagatggggaactttctaaggcttaaatgctgttttaccaaatattttaaaagaagtgaaaatacactgcctgttagaaagggaagttttggggtgaagcatgtgggcagtttagaatacctggtgtccacctcagaaaccatcacagcccagatgttataggttcaggcctttccagggcgggcacatagaatgtcctcgcctccaaggtttggagagctgcgctataaaggttcttgcaggcggtgtcctgagcccagagctgcctgcaggcgggcaggagttgtgggggtgttggcatgatctggtgtcctctgtggcggctgcctgaaaagaagaggccgagggttctttgtcctatgtctctccgaatcttaatacctgccctgcagcagactccctggctgccagggcacaccggtcaccccggtagacggtgccgccccgccctcgccaaccccttatcccaactcccatttccagccttccaggaagcccgatccccacccccgcaccatgtgagctgctcctctactccgcgtaggggaggctctgcctccggtgaccccgagggaaagagctagagcacccacaggtgctgactgctgcggcgctgaggacgctgcacacccgttcaccggctgacccagtgctgctgacaaccagcgtccgcggcccccaaccgtcgaacagagcgcgtgggaccatctggtgccaaacgcctgcaacggagtgcagaaggtcacgaggcgctagagaccggttgggggcaggcggttgggccttgacgctctttgctgggcgtcgttttttcttctcgcccccttcgctcctgtgcgcttagtgcacaagccctgggctcacacaccctttctctgtcacgtgttccaacagcatctcacctgcatcgggctgaacaggagacctcaattttctcctctactccaaggattcgccggctcacaattgctcttcatatcttcagcaagctttgtctgtgccctgcccctctgtcccccattgcctaccatacccgctcccaccaagcctgcatcacctcgctgtctctgtgcctctccccggcccccttccaggcctttctcccacaatttctggtctttgctcctgggtgttccgtcgaccctaagaggcggtgtctgatctggcaggctcaatgcctttctctggcgctgtctgcacctccaatatattcagtgactcaggaaggatccatcctgcagggcccagatagactctcctgtttgccacctgagcagaaaggcacctctgtgaggtctttgccacccagtcaccctaccagacccaatcagcacgtgggagacgtggatgacaggaggacagagatggagagggaccaaaagactacatggggccttgaaggatgtcataagaacgttgccttttactgagagatgggaaccatggagggtttcaaactgctgagactggcatgatatgacttagggcttttttgtttgtttgtttgtttgttttttcttttttgtgacggagtctcagagtcttcctctgtcatccaggctggagtgcagtggtgtgatcttggttcactagaacctctgtctcccgggttcaagacattctcctgcctcagcctcccgagtagctgggattacaggcacccaccaccacgcccggctaatttttgtctttttagatgttttatctcagagaaagagcttccatgttctctaactcttgtaaacaggtattcttcaagaaactttacaatataacattcatacacagaagtgtacaaatcatctgtctattcctcaatacatttttgcagaatgaacaaacctatgtaatctagatcaagaagcaaaacacaggcacctcagaatcaacctcatgctcattcctagtcactatgcccctcccaaatttttaacattatagattagttttgcctatttaaaaactttatataaatggaaccctaccatgtgtcctgtttgtggctgtgtcttttcattcaacacttcataaaattcatccatgttgttgcttttagcagcactttattcttttatattgctgtgtgatgttccattgaacaaatataatttacccattctattattgatggatgtttggctattagaaataataatgctactgtggctaggtgtagtggctcatgcctgtaatcctagcagtttgggagactgaggagggaggattgcttgagaccaagagttcaagaccaacctggccaacatagtgagacccccatctctctttaaaaaaaaaaaagaaagaaataatgctgctgtgaacattcatgtgtatgttttcgactacttctgaggtaggacgcaggactcgactccagagccggggcttggacactggagcaaattgaggactagctaaaacagggtcagggtggaagcagctttccatcagacacacccaccagtgtgctatgtcagtttacatttgtcatggcaacatgcaggaattactgctcctttccatggcaatgacccaatgacccagaagttactacccttttcctagaaatttcagcataaaccaccccttaatctgcatgcaattaaaagtagatgtaaatatgactgcagaactgccctgagctgctgctctctgcgccct

SEQ ID NO: 1887594 - DNA, 4001 bp, Homo sapiens
atttatcattgatgattatgacaccgattacctggctgatgtggtatttttctccagcgtaaagttactctttttctcccctttccacattgaactctttggagccaggtcattatttgcagcctgcattttaaaaagtgaggagttgggctttccttccttgatggtgctgtatttatatatattacttcgaattcttctgtattagagatttgtctcttctccccacttatttattcaatcatttatttataccagtaggaactcatgagtatttattttaaactttgggtttatcttagtccattcctgctgctataacaaaataccttagactgggtaatttataaacaacaaaaatttatctctcacagtttccggaagtttgaaagtccaaactttcaaacacctgcagagtcagtgtttggtgagggctgctctctgcttcaaagatgacatctttcactgtatcttcacatggcagaaaggggaaacaagaacagacttcctccagcacttttatatgggcactaatcccactcatgagggaggagccttcgtgacctaatcatctcctataaacctacctcttaacactgttgcattgaggattaagtttcaacgtgaatcttggagggacacaaaaattcagaccacagtagggtcataacccaataccaccgaattcatttcttgctcaaattgttccagctttggccactgggagctcttctgttggcccttgtgcccctttgacatattgtgatcaatgtggggttatatcattattgtaattgttattttcagcacttccttattttctggcacaagatgttccagattcatcgtgtatattttctgttccagatctagaatgtgccatttctccaaggactgtgcagtccttttttacacttctttccttttaaatttattccgtggttctagttcttccttgatcctaaaagtttaggtcaaattgtatacattttcccggttagttttatttagtaaatataaatatattatttagttttattataaatacattatttataataaatataaatacattatttataataaatataaataataaatatcctggtgttgtcaacttaaaatgcccagaaatatgtaaaagtgaaaacaaaactcttgatttaaagatacgtttcactctatctttcctggctgcccggcacttctacctatgcgtcttccctgttcactgacctagcttctgttcttttggtgctggaagcacaaagagggtgtgagattcctaacgttattgtgattatccatgggcttttcaaatatgtaaagcggattacctcaaaggccccctttggcttctttagagacacaaatgctgaggatctctcacctgagcatccctcgatgagggctgttgcgtcttgatttcatctgggtagttacaggcatcatccaccacgaagtttccaacccagagtcaggatgcagctgagcttgacgggcgtggtgcagacgtcggtgcagcgaaagctgaggagccgtgggcgttcacccgggtgccggtgtttctaaatcgcgggctgcgacctgcatactcaggtgccagctgggagcagaggcggatttgcgaggccaaaacctgggtgtgacttggaatctcagtcgcgctatgggggtgcacgctggctcaaatccccgtggaagatgcacctgtgacctgcccaggctgcaaaaccaggtgcgctgccatgggcacgactcactgggctccattttcaccacagggaacttggaccgcctgacattgaaaaagactgaggtagctcgggggcagccaaaagaaaccagaggcggggatcctagtatcattcaggaagtggacccagccgcaaactcaggagcgttccaagtgtccagagcgtctggtagtcgcaatagccagtgatcagtgacacccccaagaaagtgatagcgacagaaacatggcgactacttacactgccgcccccgtgcgcccctgcgcgagctctgctggaggcgcccgcgggagcgcctgcgggagcgctccactgcggaatccgccgctctcttctctgagcagtctcctactgccatctagggaggaatacggggataccggctggagtaccctctctatcttcttgcctgcaggggtcgcaggatagatgtttcgagagcctataaaagtcatacagtgctatggtgggtgcacgctaaacgtgcctttgacactgtgattaaatcacataacccatataaaaagtaattggaaaagacaacccccagaatggagagaatgtttaaaaatcgtatttctgataagagattaatatccagaatatataaataactcctgaactcaacaacgggaacaaataactcatttaagagacaagagaaggatttgaatagacatttctctaaataaaatacataaatggccaataattacatgaaaagatgcgcaacatcattgatcattagggaaatgcaaatcaaaataacatggagatagtacttcactccaactagcatggctattaacaaaaaaacagaaattaacaggtgtgggtaaagatgcggagaaattaacaggtgttgtgcattgctggtggtaatgtaaaatggttcagctgctgtggaaaacaatgggagtttctcaaaaaggtaaatatagaattaattaatatacgacccagcaatcccaatagtaggtatgtactccacacaattgaaatagggacgcaaaaagatatttgacatcaatgttcatatcagcattatttatagtagccgaaagatggaaataacccaagggtccatcgacagatgaatggataaacaaaatgaggtattttgatacaatggagctggctactaaccacctgctcctgtattacctaaaggccttcactccctaacccattggtcttttttgtccattattttttgtaggggttataacagcattcaagtgtggagtcaaggctcactttaaaatgcatcaaacatagctatgtatcaattcaccacagtccgtcaaaaggcctgtgacgcactctctctgggggtatttgagccgatatcccagtagtcaacactagatggcagtaggagactgctcagaaaatggagagcggcgcccaccttgcagtgcgcaggcgtcgtcagtagacatcgcgcaggcgtcgtcagtagacatcgcgcaggcgtcgtcagtagacatcgcgcaggcgtcgtcagtagacatcgcgcaggcgtcgtcagtagacatcgcgcaggcgtcgtcagtagacatcgcgcaggcgtcgtcagtagacatcgcgcaggcgtcgtcagtagacatcgcgcaggcgtcgtcagtagacatcgcgcaggcgtcgtcagtagacatcgcgcaggcgtcgtcagtagacatcgcgcaggcgtcgtcagtagacatcgcgcaggcgtcgtcagtagacatcgcgcaggcgtcgtcagtagacatcgcgcaggcgatgggtgaggcggctttggccgccatgttttcgtcgcagtaactgccttggtgtcagtagtcattgccagtttcgggcgttctggacaattgggatgctgcagagttcatggctggggctgctcgttgggtgggacaagaatcctctgcaatggtttgttttggctgcccaggaggtgcgtcaagtcgctgccgctcccctcgtgggcgtcaggcctcaagagttccccgcctagaaaatggagctcagcgagtcgtgcgtaccatggtgcacctggttttgcagcctaagcgggtcactttagtgcatcctcctcgcggattggagcctgtttgcacccctatagcccgaatgagacccaagtcacacgggctcagaagttctttgcccctggccatgatcccccagccagccacccgagtttccaggcctcaggcgctttggaaacgcctgtacgtcgcctgtacctgaatggcaggt

SEQ ID NO: 1887595 - DNA, 4001 bp, Homo sapiens
ttaaaactgctttacttttttttcactgtcactgaaccaccatgttcattggcattatgaaaatatcttttaatacatttatttaataagataaaaattatcagaaaatgagaagtaccatttatagttcacaagaaatgcaacatggaccccaatagaagtagatatcataactgatacttcctttgtttatgaccgcagacatgctaaaatgctaaagtaatgcttgcaaagaatatgaatgacaaatgttatccatcagctttttggtttaaaatgattgccaatgactagcagctttaatggtaacagtagggaggaagaacccttcaatacctaacaatgctgcagtctgctcctaagtggctttagttagagtcccttgttttaagggcaatactgcattgattctaaaggcatatgcagcaaaatgagcagggggagaaaaactggaagaaacataaaagttatatggttaatgtctttaaagtctaaaaatttaaactattgtttaaaaaacctaacatagttcagttactggcccacattgtaagcaaatatctgtgtgtgggatgggagccttcactttggagtggttttggtgactctgtttacattaaaaaggacagaagagtgttttgttgcattgacaaggtcccattcttttctatggagtatgatccttgttgtccgtgcgtctcttgaatttgagatctttccttttgatgaaaacactaattttgctggtttttgagcaggaaaggtggtatttctccagtctttgtagatgaaggtcccgtgacattataacccctcatttctccctttaagagaggatggctttagagtgctgaataccaatgaagttgatcagcgctgaaagaccttcttacagctgctccacacaagtctttgtcttcacataatctagaaatagcctctaggttctgtgctctttctttgctaagaggagcaaatagaaaattcaggtggtcatctgctaaggagcgatggtcaaggtagtgtttggcataaacactagcaggaacattaatattaaactgaagaagctccgaaaaatgcctttccatttcattcatgtcctcaactgtaatgtccttgaggatctggcagtagtccacattccatacagcctgatcatcccaaaccttggaggcaagaagagtggctcccagaacaatccttttctagttagtggggcaaatgtcgatttcagcataagttaaaagcctttctaagtaaaccagagttactgttgcacattcagctgttagctgtgcagcactaaaaagagtatgaacaaatctgtaaataaatttgtgctcaggatcatgcttaaactattcctgtggaactttttctcgtgtgaggggatgtgatctctcatcaaaaatatccagggatctgtttgcatctctgttctttatgtggtaatatatttctaaggtcacattttactgtggttctaaggttaggctggctgactgttctgtcacctagaaatattgttgagcatgagctatactttttagtaagctgccctggagatagatgatttaagtggttgctcttcctcttgtctcgcacatcggtttgagatttgctcaggaaacttgtgcttgcccttggatggtcagaagggtttgactccaaagctaaatcttagggcatctcgtggtcgctgatgtgctgcaggtggtggccctcgcccgctgcgaaatccaactggtaggctccacagaagcgggcgctaccgccaccgcatccccgggtgccgcctcgtagatgtcggttgcgcagtacagctctggcaccacgcaccggcccagcttgaggctggtactggggggacacgcaataggtcagcgtgttccccatggggcgtctctgctcctctgggccggggctggcgccttctctagccccctactcgccgccctcagcagccgcccctcccccaacaatggcgcagcccaggctgcacccgcgcaagcaggtgcctcctcgctggcagttcacccgcccaccccgcgacccgccccgggcagggctccggcctccctgcacgctcgccgcgctgccgctgcctccgcctccccaagctgactcatctggagataattatgtgtttttctctttcgttctctttatgtgatggattacatttattgatttacatatgttgaaccagccttgcatcccaggtatgaagccgacttgatagaggtggataagttttttgatgtgctcctggattcggttctccagtgttttattgaggtttttcacatcagtgctcctcagggatattggtctgaagttttctttttttattgtgtctcttcccagttttggtatcagaatgatgctgtttttatataatgagctgaaaaagaagtccctttttctcaatattttgaaataatattagaagtggtaccagctcttctttgtacatctggtagaattaatctgtaaatttgtctggttctttgctatttgtgattggtggccatttaagaccaattcagttttggcacttgttattggtctattcagggattcaatttcttatttgttcagtctttggaagatgtatttttgctccaaggttacagtcctcaagcttggcccagatgaactctctacttatattcatgttgcctcagttttttcttttagttagacatattatttagaatgtgccagagcagcctctatgaggggagctctcctttgattgtagtctgtttgctgtaacacccaaggatgcagagtcagattgatcccacctagaatctgcacataaggtctggcctctgcctaggatttacaagacagggccagaagactttggattgagaatgtactgaaaaccaacagaaggcattttctgtattgtgagatgtcagtgtagaaatcttgaagcccccatttgagagtgtggctcttcaagcttttcagatcttgtttagtgagtgacctgctacagttatgtgagagactccaggtataaatagaatttgatgacagaatctgtaagtgtaaacgagcatcttaagagtgagagatcaaggccacaaagtatccagagccatgaccacaactatacctacctgtaaaatatgatactggagtagagtattcttgtccttcttcttacccaaaagctagcaagtcaggataggtgatgcaggttctggagctccaccaaggcagttccattttctatttagaatcagcatgaatctctctcagcctggcttatcactgggccatcagcccagggtcagtaagaaccttctcacaatcacctagatgtctttgagacatttgaggatgtccagtgcagaattgtttcaggctgacgagtggttaattctgcttctgtctcggtgtaagagaaatgagtcattctgttttttttttttctcccttcatactcatacaagagataactttggttggtacccagatgagagtttctctagtttgctgttactttggtgaaacacaaagaggaggtccggtgactcaaaagataaactaattgcttccatttcataaggtcattcaaaaaatagatgaagcagtcacggtccctaccatccagaaacttttgctctagactagcaactggatacacggttgaattaaacatcatatggttggtacggtgaatagatgtgtgcaaagcaaaacaaaactttggcctcttcagtcgggagcagtggctcacgcctgtaatcccagcactttgggaggccgaggcaggcggatcacctgaggttgggagttcgagatcagcctgaacaacatggagaaaccctgtctctgctaaaaatacaaaaaattaactaggcgaggtggtgcatgcctgtaattccagctacttgggaggctgaggcaggagaatcacttgaacccaggaggtagagtttgcgttgagccaagattgtgccattgcactccagcctggg

SEQ ID NO: 1887596 - DNA, 4001 bp, Homo sapiens
tcttccaggatggagtgcaatgacatgatcttggctcactgcaacctccgcttcccgggttcaagcgattctcctgcctcagcctcccaagtagctgggatcacaggtgcccgccaccactcctggctgatttttgtattttttgtagagatggggtttcgccatgttggccaggctggtctcgaactcctgacctcatgatctgcatgcctcagcctcccaaagtgctgggattacaggcgtgagctactgcgcccggccgattttttttttttttaatgacaaagacatggctttaatgttatccaggagacagctgattcacatagggttattgaacactagaatctgatcttgactctctcatgtcaacaacagacaaacgcattacaatttagggaaagctgttttctgggtacctcccaggtgtttgcagaaggcggctagaatttgcttccaggcatctacctgggccttagaatgagccctggctccccaacccatatcacgtgtttgttcagtaatttgtgaagggaagctgggcacagggggaagtaaggaggctcagtgtaaagcccagtcccagggtaacagatgatctggggtttttcctttccatgggcccgtaaccgttcagagactgggcatacaactcactcctccagttatggtcatcctgaccaacaatgaaaatgatggggccctgggccttctccattgaaatcatgctggggttcttataccctcctacaagatcattctttatatccacgacgtccacgaggcctgagaaagctaccttgattctcctcaggtcatagcccaatggtggaatgctattctgcttacagtttatgcctctgttcccactgatcccggatccattgatggaaactgtgtctgagtcattcttcaagaatgaggccattgagagacaaatatcagctcctagagaaatgccccaaagcccagtgcctgggccttttacctggggatgttgaagcatgtagcatagggcttcttcgaagtactccaggggtatgttgtccacgttcttggggagatcttcaaagttataacaagctagagcgaacgtggcaaagccatggccagcaaggaggctggctcgatattccaacaggctccctccattaccaaagatgccaatgatccctaggaagggtccaggtcctggcggcaggaagagcgtggcgcgcacccggcccgcgcgcaccgaatcgctccgcaccccttgtgggaggaagtcgcgctcgtgccgcgcctgtcacaacagccgtccaggctcggggtcgtggccgtccagcacctccaactccacgataaagggaatctgtacgtcccgcttcagaaagcgccaaaaaggtttcttggattccagggcccagagcagccccatggactctagccccctaaagctgccgcccagcacgggcgcgcgctccaggtccagctcgccgcgggcgtcggcgcagtagcggaagagcccagccttctcgtcgcgcagggacgcgcgcgcagcgtgtccagcggctccgaagccaggccgcgcatggtgatgcgcaccggcttgtctcggcagccgcggcccgcgggctccaggatcagcgttgctgacatctcggagctggagcggggaatcttaaggtcgaggcccgaggcccgtccaagatcgtggcaagtgcgccgattgtccagagggcgtccggcgtcccctggtgccgggagcggccggtggctgagcagtcccagaaagcgcctgggactttagaccagttaacccggcgccctggactcgtctgaggcaaaaggagccagactcctctcctgggtcctctccttgggccccggggagcgcagacttttttttttttttttttcctttttttaattttgagacagggtctcgctctgtcgcccagcccggagtgcagtggccgatccatagctcactgtaatctcgatctcacaggctcaagctatcctcctgccttggccttccgagtatgtgggactacaggcatgagtcatcacgcctggcctaagccatcacgcctggcctgattttttttttttacttggaaaaaaatatatacttcactcccacaaagtattattttagactcctgccccgttattcctagagaattaaaatttccaagtaaagtaaaaacaaaaaagtagtgaagacagaagagtatttaaccatatcgctgtagaaaattgtattgaatattctaaggcatgtgcttgtcctttttgtgtctgttggtagaaaaagaataaacattaaactcagcttagtatttccaaagtagtaagaaacacttttgcacataaggatactttgggaaaccttgtttcccccactgtctttacactgagtgagtaacaaggctctgtaaagacgcaggggaattggtcactagcaggcaaggcagacatcaagcactgtaagaaatcagagactgacttcaaagaaaactcagcgtttactgataaattgtgttatattaccccatcaatggctagccttcatgccatgaaaatgcatccatgttaatgatgtcactgtcttacctaactgcaggtgacagctgccatgacatagaaatgacattgaacttaaggaaaacactatactgttgcaaaatccttgttaaaaccaaacatcttaaatgcatttgaagcagcgtgtctaagccacgtaaaatcaaacccttgatagttattagctggccttcttctataaagaaagctttcttttttctttgtgcttatttaatggggtacaatcaattatagacataattggtggcacagggaaaataattatttcaagtagtttttaaacactagctgtataactaagagggacatataaaaacagggattggcaaactttttctttaaagggcctgatagtaaatacagtcaatcttcattcacagattctgaatttgtgaattcatctacttgctaaaacttttttataaacccagagtcaatatttgcagcacctttgtggtcatttgtggacatccgaagagcggtgaacctttttgagtcccttaacaggcatgttctcagccaaagtcaaacaaagtgaccctctatcttcttatttcagctctcatactgtaaacaggtaccctttttgcagtccatttagtaccttggcttctcatatttttgttttttgctggtgattttgctgtttcaaagggaccccaaatgtagtagtactaaagtgctgttgatgttcctatgaatgagaaagcggtcatgtgtcttacagaaaaaatacatgtgttagataagcttcattcaggcatgagttatggagctgttggccatgagttcaatgttaatgaatcaataatatatattaaagtgtttaaatagaaacacaataaggccaggcgcggtggctcatgcctataatcccagcacttttgggaggccaaggcgggtggatcacctgaggtcaggagtttgagaccagcctggtcaacatggtgaaactccgtttctacaaaatacaaaaatcagctgggcatggtgacatgcatctgtattcccagctactctgggggctgaggcaggagaattgctggaacccgggaggcggaggaggttgcagtgagccaagatcccaccactgcactccagcctgggtgacagagcaagaccctatctcaaaaaaaaaaaaaaaaaagaaaaaaagaaaataaacacaataaaataagcttatgcattcatcggttgactaaaatgtgaccagatgcttacaggaaactaaccctgtatttcccctagaagcagtggaatggtattcactaattccgtgtttgtagcaagtttatagaccataactactgtgaatagtgagaactgactgtattttaggctgcgtgggccatctggtctgtgtaactactcgagtctgtccttgtagctcaaatatagcaatagacagtaca

SEQ ID NO: 1887597 - DNA, 4001 bp, Homo sapiens
gctgtgaaaaatacttaaggacacaggaaatatttcagatatactgtcaatagaaaaatcaggttggccaatataatcattattataaaacatgactatcaatacagagaagcagacgattactgaaatcagtaaacaaaaacttggaaggttatatggccacctattaacactatttttctttttgtttgaccttgattttaatttttaaagccttgttcataattattccaataataacaataggttaacttgaaacacatgtgggcttttttagtttttgttgttgttgttgttgttaacaggaagatgttcccccaaaagaaagggacttgagacaatgtctttgttctctacatttacgttgttatactaaatgtcttatcttttgtttcctttggatcctattatctgaacttacttgatcatttcttctcaggtatgacagaattctgtcttgaaaaaatggggagtagtccctgagtaatcttttgaataaactgatggcggtcaccacacagctttatttcagatcttctggacaaaaaggcttattttgtttctaagcctgtcagataagtcatgtcccctcagacagcttctgaattattattattttgttttatttttatttttgagatggagtctcgatctgtcgccaggctggagtgcagtagcgggacctcggctcactgcaaactccacctcctgggttcaagcgattctcctgcctcagcctcccgagtagtcccagctactcggactgggcgcacgccaccacgcccagctaatttttgtatctttagtagagatggggtttcaccatgttggccaggatgggctcgatctcttgacctcgtgatccgcccgcctccacctcccaaagtcctgggattacaggtgtgagccaccacgcccggccgaattactttattctattataatactttcattttgcatctaacctaattagaaggaaactgtgagccacgaaagttacagcacaaaatctatttattgccatagattcaacaggattggtataatttgttcatatcctgttgtgatagacagactgaagtgtatttccagcgaattcacgaggtaggatcacacactgcctaacacatattaatcctattcagatattaccttcactgacagataataaacattttaaaggacgcaataatgtctttttagtaactgtattgtcccaaatactacaaattccagagtcaccacaatgtagaacatttatgatcttacccttcaaggctccacttgcaagtacactctgccgcaatccccaggagggaatcctatcctagagtctatctgttaccaggaccccatctcagggcaattcctgatccataattcccatcctaacagcaagtccgtaccttcttgctggaaactcaggtaggactcaatatctgatttcctggatgggaccatttctctgtggcagtcatacttgactgagaggaggacaaaggaaacagcagggaagggttgctgacgccacggagccacagcaacgcacgctttgcaaaggacacgcactgcacatccaggttacgcaaggtcgaccacgcacccctcacagtcccacagctgcacccacgtcacacaggcacgcccggccctgtcgccgctgcgcggtctctcacactccccacctgtctcccaaagatgagcccccacctcggcagctccagcacccccgggcctgaggaggcgggagagagcccggcccgcgcctggggcctccgcgctctgaacgcctccagcagccccactctcacagccctgtagggtgccacgtgggctgcgggctggggctgtaggggctcccgcagcgacccacgccgccctcttgctcaggtgactgcaggtcacgcgcagcgcggagccaaaggaccaagttttctccgtcgtcagtgggaaacgtagtccacgacggaatatccagacccgcagtccctgtcgggaaatgaagtctaggggcgttaaaacctctgagaaaagccgtggtgaccacggcgaccgcccgccacgcccaccgccgagtcccggaggcttcggggagttgcagcctgggctaggagtgcgcatgcgcagagcggccaacccgtgagggaacgtttctgacgctaggtcaagggcggtgttcctgtgttcttagggccccaggaggcgagtctgagtggaacctggctggggtaggctgaaaggtgacttcgacgctcttctgaggcctcagacgtgtgtgatgactgccctgtagaatcagtgctgtgaccccgagtaacaacgcgcgcttgagttggtataaactcctgaaggtaggtttataatgtacaattctgtacgcttgtgtaatactttttgtattttgcatggatgggctttgctgcattttaaagcccatagactggagaaacatctttcattggtaatgcctggtcatgagatcccaagacagtgaagataaattgtggccaaacgcccaaaatctgggtagaaggtgctgtcagaagaattgagccaggcgtggtggctcatgcctgtaatgccagcactttgggaggcggaggtgggaggattgcttgagcctgggagttcgccaccagcatgggcaacatagcaagaccctgactctgcaaaaaataaaaaggttcgaacctgtggtcccagctactcaggaggctgaggtgggaggacggcttgagcctgggaagtcgaggctgcagtgccactctaaccttggtgacagagggagaccttgtcttaaaaaaaaaaaaaggaaccaaggttgtgtttatatgtatttatgttcatgaggacattgagcaaatgggaaacatactcatcaaaggatgcctatgttttagtcatcagcattattacgtattttaaatatgtaatacatacatagaataacagttcaataggtatgaaaaggtttaagtaaaaagataagcagcctttccttccacatagtccagtcatacagtagctaaccttagagtcaacatttttattttggtatatatccttccagagaaggtatttttatataaaaatatgcacatatacacacacatacaaatgtatttatatccatatataattccaaatatacatatatgtaacatgcgtttatttcgggggaaccagcccccaatatttcaacgtaggttcttttccattttccctaagtgttagccggtgtgagaaataaagagaaagagtacaaagagagaaattttacagctaggcctctaggggtgacatcacatatcggcaggttccgtgatgcccctgagccgcaaaaccagcaagtttctattagggattctggaaggggagcagatgtacgaacagggagtaagtcacaaagatcacatgcttcaaagggcaataaaagatcacaaggcaaggacaaaattagaattactgatgagggtctgtgtcccactatgcacgcattgtcttgataaacatcttaacaggaaacaggattcgagagcagacaaccagtctgactagaatttactaggctggaatttcccaatcctagtaagccttagggtactgtaggagaccagggcatatttcagtccttatctcaaccacataagacagacattcccagagtggccgtctatagacctacccccaggaatgcattccttccccagggtatcagttattaatattccctgctgggaaaagaattcagcgatatttctcctactcaaacgtccatttataggctccctgcaagaagaaaaatatggctttattctgcctgaccctgcaggcagtcagaccttatggttatctcccttgttccctgaaaatcactgttattctgttctttttcagggtgcactgatttcatattgttcaaacactcatgttttacaatcagatttcatattgttgaaacacacgttttacaatttgtacagttaacacaatcgtcacag

SEQ ID NO: 1887598 - DNA, 4001 bp, Homo sapiens
gtcgtggccaggcagaggggctcctcacttcccagtaggggcggccgggcagaggcgcccctcacctcccggacggagaggctggccgggcggggggctgacccccccccacctccctcccggacggggcggctggccgggcagaggggctcctcaattcccagtaggggtggccaggcagaggcgcccctcgcctcccggacggggcggctggccgggcgggggactgacccccccacctccctcccgaacggggcggctggccgggcggggggctgacccccccacctccctcccggacggggcggctggcctggcgggggtgacccccacctccctcccggatggggtggctgccgggcggagacgctcctcacttcccagacggggtggctgccggacggaggggctcctcacttctcagacggggcggctgccgggcggaggggctcctcacttctcagacggggcggttgccaggcagagggtctcacttctcagacggggcggccgggcagagacgctcctcacctcccagacggggtcgcggccaggcagaggcgttcctcacatcccagacggggcggcggggcagaggcgctccccacatcccagacgatgggcggcctggcagagacgctcctcactttccagactgggcagccaggcagaggggctcctcacatcccagacgatgggcggccaggcagagaagctcctcacttcccagatggggtggcggcggggcagaggctgcaatctcggctctttggggggccaaagcaggcggctgggaggaggttgtagcgagccgagatcacgccactgcactccagcctgggcaccattgagcactgagtgaacaagactccgtctgcaatcccggcacctcgggaggccgaggctggcggaccactcgcggttaggagctggagaccagcccggccaacacagcgaaaccctgtgtttggtggagaccaaaaaaatacgaaaaccagtcaggcgtggcggcgcgcgcctgcaatcgcaggcactcggcaggctgaggcaggagaatcaggcagggaggttgcagtgagccgagagggcagcagtacagtccagctttggctcggcatcagagggagaccgtggaaagagagggagagggagaccgtggggagagcatatatccttattattaaactatgcatgactgtgtatacaatacctttataggtcaaaagcagtcaaatactggccatgagatacacttagtccaagtacacaaataattgcagaaggagaaagtgaaactcctcttacttcctgccccactcatttatcacaaagcacacagaagtcagaataacacctgccctttgcaatttcagactcctctctttctgcctctccaaacctgtcccacgtttggcgattcctttcccttcgacctccccccatcaggtcgcaggttcctggtctacaccccttctgcgtccccaaccacttctgagtctcacaacctctggtcccataacccctctgcactaaggagcaataaacaaaattcacgcccgaacaaagaggccaaaacagcaacccaggatgtttgcgcctgcgcactctgggcgcacagtactcaggccggcagcccagcaccggcttatctgtgagagcaattaagatgactttcggagggtccaaccgccttcccagctccgaactacatctcccagaaggctcagttgtgcgattatctttccatgcagacttgtcctctttctgaggctgtccagcgcctgggggcagtaggacgggtccgggaactaagcccatctcaaacacgtcggagtggctttctttgggggccaaggcccgagcctgaggcgggactccatgaggcctctggggcgcgagcggtttgactagggggggcgatcctttcggcggggctgacgcaaggcgcggacaggaattctgacgatcgggaaccatcttgtccggccttgatacgtctctgactacgcttcccagaggtctcctcggcaagactgtacttctcgcggtaattcagcttccaactcacgcgctggcgggaccctcagggctttaccagcaactaccccagtgccggggagggttctgctgcttcgaaagctggtaaggcctgaggtgagaaacccgggagagggcggggccgggggccaagcctcggctttgtgcggcggtggaggtgagattgaaagcgtgcgcttgcgtctgtgtggaggtgtgtggtgaatgatcgcgcgattgtgacaggctgcccttgtgatgagtgtgtttccaacgctcacaccgtgtgcagcacggcctcggagactgtggctgctggtgtgtgtgtgagagggagcaggaccacgtgcggcattgtgtgtgcggctgtggggagcttgtgcctggttgagtgttactgcgtttgtccccgtagtggtgtgcgactatatgctgtgtgactgtgtgcggcagagttcaggtggggatacctgcgagtaactgcatgtttctatctgtgtgtgtggctgtggttaatgtgtgatcgtgactgtgacccggtacaggtgtgcgccgactgtgacaatgtggttgtgactgtgactgcctcctcggtaagcgtgcacttgtgcttatgtgaccgatagaggccctgcgtgtgcgaccctgttgctttgggcgtggattgtctgtagctgaatgtccccatggtgggagtgtgatcaggtttgtgtggcagggtaagtcacacagtgtgaggttttatcacttacgtatacttctctaggcattatactccagtttttccccgttttaaaactttatatgaatgttgtcatactgtctttggtttatttttacaattctgtgaatcatccctattagataaaatcgcggttaattcaatttctttgctatattctcccttctgaagtataccacaattattcatcctttctagtaatgatgccctattagttatttatagcttttcattttataaacaacacagccacattctttcacatggggtacacatgcttgagtttatttaccagcagaattgccggttcatatatcttccactttactaaacagtgtcaaaatatatacccgagtggctgcacaaatttgtacttgaacagcaatgtttgaaatatcttattgctccatatccctaccaaagcatagttccaagagttaaaaaaatttttgtaggccaagtgtggaggctcatgcgtgtaatcccagcactttgccaggccaaggtgagaggatcacttgaggccaggagctggagaccagcctgggcaacatagtgagaccctaactctaccataaatacatacatacataaaaaattagccgggcatggtggctggcacctataagtcctagctactcaggaggttgagatgagaggatcgcttgagcccagtgctttgcagctgcaggaagccatgatcataccactgcccttcagcctgggcaacagagcaggaggctgtcaatagatacatagagcctatataaagtgtgcaaatcttaagtgtacagctgtgtaacactcttagatctatacaaagaactttgccaggacctgagatgcttccctcataccacttctcagtaatttctcccccacacaatctattcagaattctatcattaactagttttacccattcttttttttttttttttttttttttttgagacagagtcttgctcttgtcacccaggctggagtgcagtgatgcaatcttggctcactgcaacctccgcctcctgggttcaaacgattctcctgcctcagcctcctgagtagctgggattacaggcacccatcacacccggctaatttttgtatttttagtagagacagggtttccccatgttggcaaagctagtcctgacctcaggtgatccgcccaccttggcctcccaaagtgctgggattacaggcatgagccagtgcatctggc

SEQ ID NO: 1887599 - DNA, 4001 bp, Homo sapiens
gtgcatgcctagtcccagctactcaggaggctgaggtgggaggatcgcttgagtccaggagttcaaggctgcagtaagccatgatcatgccactgaactccagcctaggcaacagagtgagactccgtctcaaaaaaaaaaaaaacacacacacacaatagaatagaaacacagtgggtgcacagtgacactcaactataaagatccacctatgagctcagagaggatcagccctaattttctccaggtagccctaggctaacctcaactttaatggaagacacaaagacacaggcgctgggaacatgtctccggaacccacccttctacgtgttggtccagctacttcctggctcacatcccatcccaggcatggagtccagggaccaggctgagggcaggtaagcagttcatgagccacctcccacaacgacttcccacccagttccaggtgactgggcctcttaggcacttacaagttcattcatcaactctctgctccacccatgcactctgctctgggccaaactttgtgcttcctccttgactcaccctaggcagcagaaatgcggaaataacacacaacactggccctgagagggggctgggtccacatgccaccctccccagatctctatgtagccccccaggccctgtggggatgacggctgagtctagaagaggcatggaactcaggctgggcttcatccccatttgacagatgagaaactgaggctcagagtagcagagggtctggcctgaggtgactggggagctgggaagaacgcccctcaaggacccttgtcctctgtttctgctgaaatgaagatgattcagaggccagagtggaccccaagccaagtcagaattctggggagctgagtgcttagtgaactgaggaaaagctgtggacttgaaaaaggaagagttggaggacacaagccctgttgagtgcctggcactgagtaggcactggtgagctgctgaagggttgaccagaaggtaaaaataaagatgtttctaggcactgtgctgggtgtttgctctccccagagactcctagactgggaggctcacatgagccaagtcaaccagttctaatctgggtctgggacaagctggactgagcctcagtttcctgagctatgaaatggggataaaagtggtgccttctgaatgaaacccttccctgcaatgagcatttcagcagccatggtggcctctgctctgctattacaggtctgtggggtaggacaccggtcagagagagtgacaacatagtggcaggtaaagggcagaaaaagggaatgcgagaagctcaaggctcctcccctccaccctaggcactgtcttataggagagcaagagggaattaagtcagacacccagaagaacttctcatgggaaccacagatgtttgatgaccaggaagtgagtccctgttccctggaacccccatggccctgaggtcttcaccattctccctttggggattggctaaaagcaacagatttgaaaaggagcccaaaagtaggtgtgaggccatctgtggcctccagcaggttcagggctcactggagttgcaggacccacagccccagggcttgggagcagcggtgcctcatctgtcctcacagctgctccgtttgtttctgggggaaaacccagccttcctcggagggttggcggaccagcgtggcctgagggaggggtccagaagccaggtgtgtgactgggctgtgcgtcccccacccccacccttccgctttctggaagctgagcctctttaccagctcttacctgtaaagggagtattgtaattcacaccagctttcagcagcaccaccagcaccaaaagcagaagtggcggcagctgggggcacgccattcctgcgccgggagggcctgccaccggctctgcacaggtgtgtggccaggtgtgtgcccaggtgccagctccttgcacctgcgtgtgcgctccctgctggcggagcgcggggctgtgcaggggcaaggcgcaggtggggctgcagggtgtgggacctccctggggcgctcctgttcccccgggtgcggttctcgccctcttcacctggactccaccccttctaaacacgacgacccagaagctctcaaagccagtcatccactaaagacaccctgcccctgccgtcctctttccccctgctcctggttccacagctgcccaaacccctgctgtcactccctctgcccctcgtccagccaggttgtcccctctgggagcaccaatttctcccacctccctccgatccctgaacccacagggctggggatgtccttgttctctgtcctcgtcctcctctgtcctctgtctcacccagactggggccttttggggacatgactgaaaccttctaaccttctagcatttctattatggatttctttttctttcttttattcttttttttttttgagacggagtcttgctctgtcacccagactggagcgcagtgatgcaatcttggctcactgcaacctctgcctcccgggttcaagtaattctcctgcctcagcctcccgagtagctggcgcccgctaccaggcctggctaatttttgtattttttagcagagacagggtttcaccatgttggccaggctggtctcgaactcctgacctcaagtgatccacccgcctcggcctcccaaactgctaggattacaggcatgagccaccgtgcccagccctttttttttttttttttaagagacggggtctcactctgtcgcccaggctgaagcacagtggcacaatcacagctcactgcattctcaaactctgggattcaagcaacctcccgcctcagcctcccaagtagctgcgattacaggcgtgtaccaccatgcccggctaattttttttttttttttttgagactgagtttagctcttgttgcccaggctggaatgcaatggcacaatcttggctcaccacaacctccgcctcccgggtccaagcgattctcctgcctcagcttcctgagtagctgggattacaggcatgtgccaccatggccggctaattttgtatttttagtagagacggggtttctccatgttggtcaggctgatctcgaacttctgacctcaggtgatctgcccacctcggcctcccaaagtgctgggattacaggcgtgagccaccgtgcctggcctttttttgttgttgtatttttttttagtatagatggggttttaccatgttggccaggctgatagctctaactcctgacctcaggtgacccactcgtcttggtttcccaaagtgctgggattacaggcatgagccaccacacccagccatcctgtaggattttttaggggtgagggacttgaggtgagtgctctgggccaggtcccaggcacatttctagagtgcactggggacagtttccatctgggacgggctggacaccaccccactacctgtacgtggatatggcagaggcacagctgagaccacattggcagtgcctgacctccaggaaagatttgaggtccccatgctggccacagaccccagatgcatactgcatggttggtaacttcagagttctcttccctctgggatgttccagattcccccactatacccaagccacttccattaacccagaacacatcacccaagatctaggctgtggaggactttattcattagacccagagagccatgagtgcctcccacgaagtccccactgcagggagccagggtcctagatgccaggccaatgcatgtgccgtgagctggccgaggggtctgctggtcccaagagcgcctctgtgttcttcagacagctccgggtatggtggcctcgccaggtggcttgaactatcttcgctgccatttgctgctgcctcatctgctggcggatcttaaagcccctccaggcggactggatggctgtggccgctttgtcctggcgatgcggctgcctgggactcagggcagccagc

SEQ ID NO: 1887600 - DNA, 4001 bp, Homo sapiens; identical to SEQ ID NO: 1560639

SEQ ID NO: 1887601 - DNA, 4001 bp, Homo sapiens
ttgagacagagtctcactctgtcacccaggctggagtgcaatggcgtgatcttggccctaatttttaattaattaatttatttttgaggcggagtttcactcttgttgcccaggctggagtgcaatggtgcgatatcagctcaccgcaacctctgcctcccaggttcaagcgattctcctgcctcagcctcctgagtagctgggattacaggcatgcgccaccatgcccggctaattttgtagttttagtagggatggggtttctccatgttggtcaggatggtctcgaactcctgacttcaggtgatccacccacctcggcctcccaaagtgctgggattacaggcgtgagccactgcacctgggcatatatatatatatatatatttttttttttttttgaggaagcaatttctttaattttatcagaatccaggacacaacaagaaaagcacccaaaaaccacatggagacagaagatgagacacaactcctcccccaccccttccctgctctagagtggggacaaagtcagagtgagacagcttgggggagacctgaacctcagtccagccctacaggctccaggcctgcagggaaggagggtaatggggaggcagggcccagccccccagtttggggaaacagctgagggaaggcccccctcaaaaggctccacctcctcaccagcactcctgcccagggacagggagcccacagcagcaaggggacctcagggccatggccaccttcatgactgagaagtagctgagtggaggcaggagacacacgattatctgggcagaatcagttagagcaggggcctggaagggccccatgggccaaaccctgaggtcacaggaggggccccaaagcggggctagtgagtgaggtcctgagtgagtgggtcagcagctgggcccctttctctagcttcctgtagcccctccaatactgctgccagggaggcctgcctccagggaaatgggataagaaagcagcctgcccctgctgcagacagagccaggtggctgaggccaggaaggaaagcccggccaggccttgccacctgccccagaggcctgtgggaaaaggacaggccaggaagggtggggacaggggctcgactggctcagatccaagatggtgccacgcttgcttgctgagtcccccatgagctggggcaccgcactggggccagcgactagttagacagaaggcagcaacttctccaagaaattccttcacagctgccatctcctgaggacagcagctgtgcatgacacccgagtatgtcttgaactggaccctggcaggtgtgacaacagccgtcagggtcccaaaccgtacgggcaccatggggtccagctccccatggcactggaggatggtcaggcccttgccactgcctttagctgcctgggggaaggcccggtgcagaggcagccagcagctcgatgctacgataccagccagcgggtgggggcaggtgagggccgtgtagagggacagggccccgccctgtgaaaagcctcccaggacgattcgattggcagggatcccgttcttcatttcatgctcaatcaaggccttgatgttctctgctgccttcttgatgccagcctcgtcctctggggcatctggactcagccccatcaggtcaaatcaggaaggtgtcaccatcttcatgttgagagtcacagggatcctaggcacatggggacagatggaattgacgtgagggagccggacggtggagagggcgtcagcccagctgtgccctgtgtctccaagtccatataaaaaactaaccgcggctgtttcccgctcagctccagacaccgcggcagcatcagtgagaggggcgtagacgtggtgttaccacacatacaccacatggctccacggcgggagcctccactccctggggcttccgaggccgcttgggcgattctcctctttctcccgcagacacacactcttccccctcggccacccccactccatatatatatatgtatatataaatatattatatatataaatataaaaaaatatataaatatattatatataaatataaaatatacatataaatatattatctataaatataatatatataaatatattatctataaatataaaatatatataaatatattatctataaatataaaatatatataaatatatttatatatatataatatattatatatatataatatattatatatatataaatatattatatatataaatataaaatatatataaatatattatatatataaatataaaatatatataaatatattatatataaatataaaatatatataaatatattatatataaatataaaatatatataaatatattatatataaatataaaatatatataaatatatataaatataaaatatatataaatatacatatattttttttttgagactgagtctcgctctatcacccagtctggagtgcagtggcgcgatctcggctcactgcaagctgcttcccaggttcacgccattctcctgcctcagcctcctgagtagctgggactacaggcgcccgccaccatgcccggctaattttttgtatttttagtagagatggggtttcaccgttttagccaggatggtctcgatctcctgaccttgtgacccacccacctcagcctcccaaagtgctgggattacaggcgtgagccaccgcgcccagctatatatatattttaaacagtgaggggctgttttgttttgttttgttttttggttttgtttgttcgtttgtttgtttggatggagtcctgctctgttgcccaggctggagtgcagtggtttgatctcagctcactgcaacctccacctcctgggttcaagtgattctcctgcctcagcctcctgagtagctgggattacaggtgcccaccatcacgcccggctaattttttgtatttttagtagagacaagttttcaccctgttggccaggctggtcttgaactcctgacctcacgtaatccacccgcctcagcctcccaaagtgttggtattacaggcgtgagccaccgcgcccagcccctaattttgtatttttagtagagacggggtttcgccatgttggccaggctggtcttgaactcctggcctcaagtgatccacccaccttgacctcccaaagtgctgggattacaggcgtgagccactgcagcccagccaatacatacttttttaaagctagtaaatttttgggtaatttgttacaaagtaatagctaactcacattccaaaatcttagaagctggatagtaaataacaagtactgaggggcgatgtggagaaattggaacacaggtgtcctgttgatgggaatgtaaactggtacagctaaacccagtgcagtagctcatgcttgtaatcccagcacttagggaggctgaggcaggccgatcacttgagctcaggagttcaagaccagcctggccaacatgacaaaaccccgtctctactaaaaatagaaaaattagctaggcgtggtggtgcatgcctgtaatcccagctacttgggaggctgaggcaggagaatcacttgaacccgggaggcggaggttgcaatgagccgagatcacaccactgcactccagccagggcgacagagtaagattccatctcaaaaaaaaaaaaaagaaagaaagaaaagaaagaaatatttgtaccctcgtgttcatagcagtagtattcgcaagaaccaaaaggtggaagcaacccccaagtgtccaccagcagaggggtaaatagataaaatgtggttcatccatgcaatggaatattatgcagccctgaaaaggcagaaaattctgatgcatgctgtgacatcgatgaaccatgaggacatcatgctcaggggaataagccagacacaaaaggacaaatcctgtgtgattccacttgtaggaggtccctagaggagtcagattcatgggaga

SEQ ID NO: 1887602 - DNA, 4001 bp, Homo sapiens; identical to SEQ ID NO: 1560699

SEQ ID NO: 1887603 - DNA, 4001 bp, Homo sapiens
gtgttgttaccgtcgagtcagagagtagtcctggagaggtggcctctgcgatgtgcccgcaggggcagcgtcctgcagatggtcctgcccctcctccccctaacctgtctgcaggcactgtccacctggaccctgccccatgtgcaggagctggaccctgaggtcccttcccccttggccaggactggagaccctgtcccctctgtgggaatccctgcccaccttcctctgggagtgggcactggaggccctgtctgcgagctggggctccccaggcagaacttgggccccgtagacctttctcactctcccctcccaccttgtgctcccagggtgattcagggggcccgctgatgtgtgatggtgtgctccaaggtgtcacatcatggggctacgtcccttgtggcacccccaataagccttctgtcgccgtcagagtgctgtcttatgtgaagtggatcgaggacaccatagcggagaactcctgaacgcccagccctgtcccctacccccagtaaaatcaaatgtgcatccaatgtgtgtcacgttctgccatcacctatctttccagatgtggtgcacctggacccactcggctgaggctggggccaccccagctgtgtcaatctcatgcctggaagtctgaggtcaccagcaggtggggaaaggaaggggctgtgacaggtgcagacaaacaggcagggaaaggctcagatcccaaagggcaagtcagggacgccagaacagttcactcacactaggatggaccctgccctggtggggaggtggggggcaatggaaggtctgaggctgagaggttttattgtggcggggaagccagaaaaggtacagagggatgttattgcaagccatgccttcccagggaggggcccgttctgcagaagggtggagttgcaccaaatgctgggcggtgctgtgtccacctggggacaagggtggacatcggagctgaggccggaactccgggaaagaagttccatgcagaccaccctggctgggcaccaggggcagggccacacaaactagccacactgccgagctcagcgggacgctggacaagtgtctgcagaacgggaggggatgctgggcctctggggtggaggtactgtgaggacccagtgggcagggacaaagccgcaaagggcgggccctagagcgagggctggagtttgccaccggtcccctcggagggcgtggcctgatatcagggggtggggcctcaggggaggtcgaatatccagggcgtggccacgctgaaggggttggccgggcatctggccatggctaccggtcggtgtcctgaagacctcgggtgctattccttggaggtgcttgggtctcatcctcgagggtgtatgaaatgggaaggcccggggtgcgctcggagtcagcgtctgagttccgctgtttggatgtccgcctcgctgcgccctgctgcacggcccacccgcggtagctcagccgccgcgcattcaagggctgccctctgcttcacatgcccactgggcttaggtaggacacggctcctgggagatggctaggtgggccgctgtactccgagtcccaccctaggccccacccgcttcccgaggccccgccctcctcccgaggccccgccctcaccggagtgcagcatcaagtcgctggcgtcccagcacaggtaggaggtcaccaggtaggacaccaccggacttgggtgcaccgccttgccgttaactgaaaagagcgtcaggctgaagagaaatcaggagccctgcaatggggtggggccagagacagaaggctggacagtgagccctatgacccccagtaagaaaagagggactgagacatcctctcccaccctccgtgacaagcagacacacacacacacacacacacacacacacacacgccctcacaacagacagaaagatacctggagagaggggacaaaaaaagaaagggaaacagagagtgggggagagagagacatcccacagatagagtagaactgagtcagagctccccagagacatgctaagacagaggccccgaggggagcagcacggaagtctagatacacctccagaaagccagagagcagggctggggttagggagggcccccgccccccaagccaacacctaccaatgccgaggcagaggaaactgaagacaaagtcggccatgttcaggcggaggaccactggccaggaggagagggccatgggcgggaggaggactcagcacagggccacggccagtaacatgaagcccttgctcatatggatgagaactggggagagggggacaggggccccagagtcaaccccagatacccctcttggtcaccctccaaagtcatctctgctgatacccacaagcagcccaacagacaaccccaaagtctggcacatcctcaaaatcacccctactcacctccccaaagtcacctcctagaaaccccaaagaaactccaatctcactcacaaggtcacccccagggacccctaaagtcatcccccagtcacacccttagagttgtcccaaatcacccctacttaacctaaaactcaattctcagacactctcataatcccacacaccccccaaggtcaccccacagaggaccccccaaaggtcatcccactcatcctcaaggttaccccacagaatcacctcaatcatttctttctttcttcttctttttttttttttttttttaagatggagtcttgctctgttgcccaggctggagtgcagtggtgtgatctcggctcactccaacctctgcctttgggctcaagcaattctcctgcctcagcctcccgattagctgatactacacgcagctgctgccacgccagcctaatttttgtatttttagtagagacatggtttcaccatgttggccaggctggtctcaaactcctgacctcaggtgatcggcttcccaaagtgctgggattacaagcgtgagccactgagcccagcctcgatcatttctagaaccacccccacagacacccctggtcaccctacttgaactcctaaaaggtgtctcataacaactcatgttagtatcctcagtttcactcccagacaccctcaacagcaccctcaaagttatccaagacaccacggtcaccccagtcctctccaaagtcaccctacttctgctctagtctctgctagtcaccccccaaggtcccctagtggccccattcacatgccgagaatctcctcagacatcctaatgtcatctcttgttcacacctgagagcccccacaaaacacatacagatttgcacacaagaaaaactttcaagtcaaatactctaaaaccaatgtgcccaaaagcttagttccagtttacagtggatatttatccaacttagacttccagcagaagagaggtttacctgtttccgagatgctacatctcctccttttagccctttttctactttgtctacttttcaacagtgcaaaattgttttagccaaataggccaagacctcatctgctttgtttctggcaaactgcacatctctaatacccaacaagaaagataaaggatcatcatatatacagaagagcaacagcactctgggaagtgggggaaatatcagaccccttggttttttgtttttgttttgttttgttcatagagatggggtctcactgttacccaggctggtctcagattactgagctcaagcaatcctccctccttggcctctcaaagtgctgggattacacgtgtgagccaccatgcccagccagttcccttagttctttctgctcattgaagagtcaagaagcagaggtcagggagaaggcaccaagccagaaaccaagaccttgaatggtgaatttggtctgcccagaacagcagcctgacatctcttggggacaccctccacccaactcacataaccctggatgagggattctcctggcatatgctggcctctgggccacagaggtaatcatgtg

SEQ ID NO: 1887604 - DNA, 4001 bp, Homo sapiens
gtccccaccctaccctaccccaccccaaagaccacggagacgagccgtttgcactgggctgattgtatttgcataaagccaaggaggggaaacggcagggccagcggtaggctgagctcactggcagtagaaatcccatttctgaaaaagagaaaggggaaacagtggaaagaaaaccagcggtcacaccacaaaggatctagtggttttagcaaaggctgcagctgcagggcccaggtctggccacacaagtgctatgcaaattagcctagagccctctaatctttgcacctcccaactggacccattttactggtgagaaaattgaggcagggaaagaatttctcccagcgcacatacctaggctgccagggagccaagtgtgggagcatttttgcccatccccacaacctaagggtcctccccccacatttcttgccagcccccatgacactcacgtctgtcttcacatcgactttgccaggtttcagggtctggtcctctcggacaatgctactggggaaatagcccaggcgagcagccagatctccatagtaatctccctgaacctggggaagaggagttaaaagctagggtctgggaagatggcaagcttgtgcctgctgaaggcctttgcattctcccttctccctgatctccacataactgctccatccttgtcatatgaatctcagcttaaatgccacctgttcagaggccctttctgaacacccaagtaagtctctgttaattctcacagcagcgcatatttgcttttattattattattattttggaaacagggtctcattgtgtcgcccaggttgaggtgcagtagcatgatcacggctcactgcagcctcaacttctgggatcaagcaatcctcccacctcagcctcccgagtagccgggaccacagacacatgccatgaagcccagttaattttaaatttttttttatagagatgggggtcttgctatgttgcccaggctggtctcgaactcctgggctcaagctatcctcccaacttggccttacttgggattacaggtgtgagctactgtgcccggctgctgctattttttatgccttgctttttgttcatttccctccattagaataaaaaggatcatttgttgttgtatcttggtgtctagaacagaacgtgggaccatatcaggtcctaaaattggtaaataaagtgaaaataggctggggggcagtggctcacacctgtaatcccagcactccgggaggccaaggcgggcagatcatgaggtcaggagttcaagaccagcctggccaatatggtaaaaccctgtctctactaaaaatacaaaaattagccaggtgtggtggtgcatgcctgtaatcccaggtacttgggaggctgaggcaggagaatcgcttaaacccaagaggtggaggttacagtgagccgagatcgtgccattgcactccagcctgggtgacagagcaagactctgtctcggaaaaaattaaaaaataataagcaaataaaataaagtaagtaacaatatccccccacaatgtctatttcagttcacccccctcaaatcttcccttcatggggataatgagtctaccccagctctgtacccttccctctttcactctcccaagactcacgctgcctccccagaagagccgcccacggcccttcagcttggagaagacatacaccacttggccccggtgaatggtcaggaatcggcagtcgggggccatgtagtcctgaagggccacagccatggagatagggtctagggaaggaatagaagggaatgcagcaccctccacacaggctaacgcccaagcccccaattctcccctccccattcttacggctgcactcctggtccgcacacagcttccggtcagccagcttgggcataggaccacccctgacaccaggtccggagaaggcagacagcaagatgatgacaccaaggcacaccagggaccgggccatcgtggactgtgagcaagagagtgagcaagggggtgctggggtctccaatttcctcccctccctctctcccgtagtacaaggaaacttgtgttcttggtcttgtccccgccctaaaccagtcccaaacttcgcccacaccacctagaagttgctatgaaaccagaaccatttcaaggatagggtaaaggctgtaagcccaaggaaattcccagataaggtccaaagcagctcacaactttcccagtgacagccccctcctcaacaatcacagaggcctagataaggtggttgaaatattcaattccatcttctcttgagttggcttaggtacctgggctcctccgctgtcccctctggccacagaagcggaggagcctgtaaagaaaaccaccttggaatttcctgtgctgtggggcaggagaacaaggcagccctttgattaccagaaacagcccagcccttgagtactgactgaatattgtatgctgaaccttaggctaggcaaagtcccaccatgatcactattcctctgcaccagacgcttcccactggatgacctgggctaagctatttctcctcacaaagcctcagcttccttatatgtaaaatgggaacaataaaaaagccaatagttacagagcattcaccaagtacatatttatgttatgaactcaaatggatactctgtatcatgtcaggaggagtgattataacccctcccttttttttcttttttgagacagggtctcaccctgttgcccaggtggagtgcaatggtgccatcccggctcactgcagcctcaacctcctagactcaggcaatcctcccacctcagcctcctgagtaactgggactacaggcacaagccacctatgcccaattaatccatttttttaaataattattttgaggtagagtcttgctctgttgcccaggttggagtgcactggcatgatcctggttcactgtagcccctatttcctgggctcaagcattcctcccacctcagcctaccgagtagctgggaccacagacatgtaccattatgcccagttaattttttgtattttttggtagagccggggtttcgtcatgttgcccagcctcgtctcaaactcctgggctcaagcaatctgcccaccatggccttccaaagtgctgggattacaggcatgagccaccaagcccagcctaatttaattttttgagacaggatcttgctgttgctcaggctgaagtacagtgatgtgatcatagctcactgcatcctcaaactcctgggctcaagaaatcctcccctctcagcctctcgagtagaatagtaggcaagtcaccattcttggatgatttcttttatttttatttttctagagccaatgtcttactgtgctgcctgggctggtcttgaactcttgtccccaagtatcctcccgccttggcctcccaaagcactgggattacaggcatgagccaccaatgcctggcctataaccccttgttacatggaaatggaagtgtggagttaaggaacttgtctaaggcttacagagccaggaagtggagaagtggagaggctaagacttgtatccaggcccacagccattgctatgctatctttttttttttttcttttttttctttgagatggagtctcatattgcagtggtacaatctcagctcactgcaacctccacctcccgagttcaagcaattctcctgcctcagcctcccgagtagctgggattacaggcatgtgccaccatgcccggctatttttgtatttttagtagagacagggtttgtccatgttggccaggctggtctcgaactccccacctcaggtgatccacccgcctcggcgttccaaagtgctgggattataggagtgagtcaccgcgtctggcctgaaagatttttttttttttacaggcagggtctcactctgtcacccagactagagtgcagtgccacaatcacagctcactcagccttgaacaactgggct

SEQ ID NO: 1887605 - DNA, 4001 bp, Homo sapiens
caggaccatgtaattgtcaccaaaaataagatagcatgcatgggattttgtttttgtttgcttgttttaatgaggatgttgaatattactgagagataaagtgagattaagagcaagtttcttggccacataaggaattgctgaaattgtcaagcaatttcagtgggtttggaagggatggaagcctgtggggcatatatgttagcaggagagaatgtatggtaaaaccattgagttagtgacagtagactgctctatcaagaggcattttcagggccaagaggtgctgagcaagggggtggtaactgcaggagctctgagagcatgtggtgtcttgtggaaattaatgattcaggatccggagagaaactggtattgcagatagaggcctttgaggagacagggggatgatggagtctttaaaatatattaaaatcacctacaaaaccttaactagacattaggatcccttgggaacctgaaaaacaaagatctctgtgggacactgggaatctgcattgtttaacagctctccaggtgagcctaatgagagtagccagatttgaaaatctgtaacctaagtcagggtactaccacattcaccttcaatattcctgctggggaatttgttttgaacgtgtattttcataagaagcacagtgttttcattcgtatattatgtttatgtggcactgctgggcaaaaagagactgttgatggtctagggagtctaaaacacataaagcagcttctcagtgtagcaagcaaccactgataactccttgagtataatataaagtttaatttggggtattaaagtctgtgtgctccttaggtaaacaccttttggtaattaaccacatcttacagattttttcctttaaagttaaaatcatacagcatttttattagtcagttaaaatcgcgctgtgtaaatttaccagaatacagtttaattcttttctgtggagcacatttttggtgataaaaatgatgctccgtgaatatccctgtatagaatcttctgtatatccctgtatttcctttgcttttttagttccttgagagtggaatagttggaccaaagagtacattagtgaacttttagtaattcattgattttactgccagagaagaaatacgtatttctgccaaggaaattcacagtatggatggcagaagggaaaaatccctcttccaccccacattccttgtccctagaagtaactcatcaacaatttcttgcctacctttccaacagttttacctatatttgggtttatccttaaaaaacaaataaatgagaaaacacttaccagttcgtttctacaaacttcagtaacttgtatatttcactaaatctactgagaattcaatccttaataatcccatacaattctacctcattatttttctctctcattttcttgctgttttattaaatggcaatgcagtgggcttacgcagtggaaggtctgtattgacggctgctgggaaacaactcagtagtgtgtgagactgcccgctcccctaaaccgcacgtgcccggtgtttcaggtttgcatttctttatgcaaacaggtcgtgatgtttccttcgcaggtcggccagccgtttggattttcttgcgaattgccagttttatcccttttgcccatttttctgtcttggtttggtctttatctcgttggtttccaagagctcttcatttattaaggaaattagctcgatgtctttcatgtgtcccaggcggaaaagtcttgtcttccctgcaggtctttagacgttaatgtatgtgtttttgcggccaggattttcatttttttcatttagacagatgtgtacatttgtccctttattcttcagcggttttacatttgagcatctcagtggggtttcctccatttcgacccccatttctttgggggctgcacccccaccacccaacccaccccccttttccagacctggctttggggtccctcacggccactccctgacgtcagcccccagccttcgcgccaaactgttgctgtggcaaccgcagcctgattggcacgtcacagggctgtggtgagggggcccggagagggcggtgaggctgctgattggctagcacagaagccccgcctctgcggagaagccctgacaaggaggcgtcgagctgcacctcggtgcagaagtctgggcagctgcgggaggagaggtttgggaggcgcgggagatgtccaccctgggctggtggcgccgccgggcgccgggcgccatgagggtgcgctaggcggctgttcgtgcccgaggctgcgcagcactgaggtgaggtgagtgcgccttcggccgccccgcgcgcctcctgcccgcgggaccttggtgtcgcgacggctctgggccagagtggccgtcttgccgcaagcccaagaccccgcggcaagccagcgacccttgtggcagggcgggctggcggacatggtacttggccgcccgctgcccagtccgagagtgggcacagtggcggccaggctgtggatggttggtgcctttttggggcaggggtgggcgcagcccgggctgctgcgttggtgccgccatcttgcagtccggggtctgaggggctgctgcagggtctccgcgcctttctgactggccgggggccaccgcagcaaaccgggggcattagggcagacagccgggggctctgccacggcaagtccagcaaggtcgacaccaatgctatccctgttgccacggcggaatgcggctctcgggagccctgggcctcctgggctgggtctgggggctgcgaaaatgccccttcctgcggggtgccatcggcctcgcggcgccggcgtgcccggctaccctctgggggcggggcttgtttgccgcagtggtggtgggaggggcgaagggctgtcctgcctgtaggggttttctttccccgccctctcgggcggtatcttaaataagggcggctgaggcttgctgcgcaggagctgccttggttggttggcggcagatggggcggggcaaggctcaagtgactgggtggcattggacgtaatcgtctgctcaagccccacccactgggtgccatcttttatgagggtggctgaggtttgccgcgcaggcgctgttctggttgattggtggcagatggggcgaggcaaagctgaatgactgtgggttgcattggatgtaatggtctgttccagccccacccattgggtgccatcttttatgagggtggctgaggtttgccgagtaggcgctgttctagttgattggcggcaagtggggcggggcaaggctgaagtgattgggtaactatccactcaggccccgcccgctttgacgccatgtttgatgggggctgctgaggtttgctgcgcaggtgctcccctggttggttggtggcatatggggcggggcaaggctgaagtgactgggtagcattagatgtgacgatctgttcaggccctgcccgcttggacgccatgtttgatgggggctgctgaggtttgctgtgcaggtgctgccctggttggttggtagcagagggggcggggcaaggctgaagtgactgtgtagcattggatatgacgatctgctcaggccccgcccacctagatgccatgtttgatgggggctgctggagtttgctgcgcaggtgctgtcctggttggttggtggcagatggggcggggcaaggctgaagtgacagggtggcattggacctagtggtttgttcaagccccacccacctgggcgccatctttaatgaaagtgcttgagatttgctgcgcaggcgctgtcctagttggttgggcgagacaaggcccgcccgcctgggcgccatctttgatgggggcagctgaggtttgccgcgcaggcgttgcccggattggttggcggcagatgcggcggggcaaggctgaagtggctgcaggtggcatgggcgggacggtctgttcaagccccgcccacctgggtgccatctttga

SEQ ID NO: 1887606 - DNA, 4001 bp, Homo sapiens
tttggagctttgaggaagtcttaaatatttcataataaaatgttacacacggcaagaaatagaagcgctagaactttcttcccacactccagtggcttgcttggcaggtacactacccaggagactcaggatttaaggaataggtctggaagtgggactgggagctagatgaagagactaatgccgtattccagagtattctggaaggatgggaaagggaccttctagttgtttctggataaatgatggggaattgccctatgggagggtggggtaagagatcctcactagaaggttctgagaggtatatgcccttcgtttaagagcacaacatggctgggtgcggtggctcacgcctgtaatcccagcactttgggaggccgaggtgggtggatcaactgaggtcggaagttcaagaccagcctgaccaacatggagaaaccctgtctctaccaaaaatacaaaattagccaggcatggtggtgcatcatgcctgtaatcccagctactcaggaggctgaggcaggagaatcacttgaacccgggaggcagaggttgcagtgagccaagattgtgccactgcactccagcctgggcgacaagaaggaaacttcgtctcaaaaaaaaaaaaaaaaaaaaaaaaaggaatacaacagacactggtatgtaatgcaggcacactcatttggggtagcaggaggttaaacctttaagtcttagtcatcccattggctcgtgagcactgagagggtggtgggacatggatcacccaggcttgggattctggggtctggattcgggacctctgttgtggtcagatagaagaaggggtggtgaatttagaatcagaccaggagagtccctggataagagcagggacaatttgggtcacagagtagctaacaggctggggacaaaaggtggggtgggtttggggttctgggcttgagttaggggagagtttccaatgctggctgaggctcatacaggaagccagtctgggaagtgggtggtgacagggtctgcaataccaagtaggagcaggggctctggctaggccggaagccacgtgggcaggatttcctggtataatgggaaatgggtctaccggaggccaaaggagaggctggaatgtgaggctctatcgggttggagctggtagttagatccagaggggaaccagattccaaaacccaagtactcggtgagactaaggatcctgaagggggacggttctacactctaggaagggggtcctgggtgtgggcagggacaggaatatcagagtagcacagagttccttgttccgtttagaaaaggagtggcgactccggatctgaatgggaaccccggatcaagatcccggaaagtagatcccgggacagaccaaagtattgggggtccagactacggaggtgggggggcgatgggagatcccagataggaagtgaatacccgaataggatgagggatcatctagaagaatttggggtccaaactttgaggcagagttctgggtataaatgttaactgccgaacagaattagggagaacccccaagactcgtctaggggactccagactatgaagaagttctagggggtgaatagggaatcccacgcaaaaatcggagcagggagtgggggagcggagatccagggcagggactcagggtcccaatggtactggggtcccggagttgaatcgaagctcctgaaaatccagactgggggggtgagaatcctaggtgtgaacagcggggtccctgggcagtatcggggatcacaactccgaagcggggtccgggagtggggaaagggatgggcgcgcgcgccttacctgatgccgccagcggaagagactggccgtgtcgatgttggggtgcgtctcgtcttcatcatcagacacctcaatgtggtcccacacgctgtagtccaccatcttgccttggcggcccagcccgctccggctcgggtggcggcgacggcggcagcagtggagactaggagcgcggagccccgccccttccgcttccgccgagcgcgggaaaccccgccctgtgtgacgtcacatccctagtaaccgcggcagcggcactagctacccagccagccttaaagggccctgcgtaagtgttccggccccctggagttcccgcagagactccgcgtcatcgggcgctggggctccgctaggtctcctgggggcatatgagtgcgcgcttcaactccgagcccccctcatctcccgccgctccacggtgggcgtttggggtggcagggaggggacggttgatgagactgagaggactgtcccctcagccacgccgcagtgacgtctgcaaggggtagggacacggcgggaaggccctccccctgcccttcgtaaacggggacctaagcctgcgctggagaggggcgcctgatgactcctcggactttctcagcccgaggaggactggacctgccctgggggtgtctaaatcgggggtggtatggccctccccttgcagggttaaacgtggaggggagactgtggccctgccttgggagctggggtttccccgcctcggcaacagccttctccttgtcttccacctcctgccattcgcagcgaggactcgcgcgagcgcgcgcgcgcacacacacacacacacacacacacacgcacacacacacacacacacactttggaatcacccggaccccctcaaaacgggtctcggctccccaccccgctggccgctgggtgtcgctagagtctagcccacggcgcgtattcctggccccgcgcttggtggggggaatcgtggaggggtggaagggggctttccttgtcgtcacagtctggggccacgcatagcccctccccgttcgtcttggggtacgcttcctccgccggggctctaaggactccattactctaagcatgcagggcctcgaccacctcacacttccatgcatcccaatccacgctttgataccaggataataggccgtgttgcagccttgggccaggattatctcagattaaagggtgctccctcgggggtcaggctggataggaggagctccagccactccggtgaggggcgcctcttcctagtctcccctggagccgacgttggaggcagtgcctggagagagcgagcgaagttctccagaagggggaggattccccggtgcatggagcgggaagggccatcggacaaaaacgtcctcccgctgccgcccttccccctcgcgcttcattcaaacccgcgagtgggcgggcaggggcgggggagtccccatctcctacccctccctcttcccctccaccctggcagtccagcacatcagtggccgtcacggcccgggcacgcgcgcgcacggacccacaccccggcggctctcacaatcgcacacacacatacacacacacaccagcaaacaaagggtctggacacccccgtcccctcccgccccccaggccagggagggcggggcatcccctccccaggccccccgcaaggtaagcttggggctgcgagctgcggtggggagggggacacggtgccacagtgggagggggccaggaaggtagggggttccccggctccccaggaaagtcgtacccccacccccaccgtatgccctttagggattcggccccgtcatcagcctgggggtgtttggagagaatcccagatgtcggggattcccggataggcgcgggggtctcttcctggctctggagactggagctgcccagcttcagcaaaacagggttcccggagcctcagcttccagaactggggatagagcgccggaagcttccccatcaaccccaagcatttcctaatctgccagcacagcacctccagccctggggactgaggagagagacccctaagttgctttgcactgtccctctgtccccggtccccatcccacccccatcggtgcaaaccctgctatgtctctcctgcctgtgtgtgtgtgtgggggggaggtttgcgg

SEQ ID NO: 1887607 - DNA, 4001 bp, Homo sapiens
gtgcccagcgcagggcacatcgttggcaccaataaatgttgacgaggaagcctggaaacgagagggtgtgaactcggtaagcgcgccacattttgcgcccgggccgccagggggcggtaggacctgggccaggccgtgtctggccgtgccgggggaggcgggcagccccagagcagggcggtaagggcgcattcccgcattccggcccgcacctcttggggttttctcgggcctccctcggcccgccgtgctcccgccccaccccagacgaagaggacccagaaaaaaacaggctgcagtgccctgaaagaagaggctttattgggggtggggggagtggggcaatcgaggcggtaactccggccctcttaacagtcaagggagagggtagttcagtttgcaattaggcagagaagggctgggcagtttcactggcggagttgtgggtggtggtcagtttcccaatgggggactgtaagttttatagagggggctggtcaatttcacaaaggcaagtcgatttcatcttccccaatgcagagagccgacccttctccaggcctaatgctagacgccccccgccctgttcctctgacgcgtacgttacttccggccgggggtcccagccttttcaaacctcaaggtttgcgctcctcctggggacagaggaccagaaggaaggccggcctcagggacctgcgcactgcatccaggctcggggtggcggtttgggcctcaagaccaccgtctcctcttcaccccggggatgcgtcccagactgagttctgaccagagtggccctccagggaggatgcacttttccccaccaagcgtcctggcaccggaggggtggggggaccgacaagcgctagaggcacacgggtaagggggctcccacctgctccaggccgttctccgagacctttctgcgggggggccagatcaccaccaactttccgtcgcccctgctcgctgcgggggaaggggcgctcagctcaccagctggcggcagccaggatgaaaggccggccgcaccccttaaacacacacaggcgttcaccctccgcctccccatgaaagcctccattcaactccaggcacccaggaacccgagggaggagggaggtgaacccagaatggagaagcaggagcccgaaaattcagagggaggacccaggagtgccagaacccagtcagggttccctggaacccgacaaaaaggaagacatctggaatgcccccacccccgcgcagcctgggtggtgtggatcagagagtccatcactcccggtggaggggtggatcacagcgagtaatggagctccagaaggggtaggcaagagacaaaattgagagggggtctgggagcttggagggagagaccccgagaatcggagggccacaggaggggccactgaagttgggcaatcggtgggggcggctggaaccctgggggtcccggcgttgctacgcccgcggcttaccggtgaggctcggcgtaggctccttgaactccgcggtgccatagacgctgcgccgctggcgctgcagttcctgctcgcgctcgcgcacggcgcgcacctcctgctccagcagtgacggagtgaaaggcggcggggcgctgcccagcacccggcacccgccctgcacggccgagcgcggccgtcccccaggctctggcagcctctgcgggcccgcgccgtcccccgcccccgccgaggagccgctccccgccgcggcctcgaagaagcgcttgagttcgcccagcggctgcggcggcgaccgggcgcgcggctcggggaccgcggggcgcgccagcgccgcctgccggtgggcctcccgctcgatgtcccgctgcatctgcgcgcccgcccgcgcccgctccagggcgcgcgggagcgcggggccaggacccggcaggttgagcaccggccgcacgcgcagctcgacgagttcacggcctgcgcggcccgggctcaggccccggctccggcgcaggctctcctcgcgttcgcagctgcggcggatttcgcgctcgatgggcgtctccatgaaccgctcctccgggggacgctggggagcctcggggcacggcggaaaacgcaggtggggggcttccgagcctgacctggaggaggaggtcttagggcctggagggggatgctgcccctggacctccgccctttgcgcttcggacggcccagggtcgtctctgcctggctcaggactctcaaagcccgcagctgtggacagcccggggctctctgcgtcctgctcgactgatggctcgaggacttcgctctcttgctccaggatctccacgtcctttgcggagggcttggggacctcggtgttcagctccgcagcagctctggggcttcgctgtctggccctggggactcctggccctcctcttcagacgaccccagggtttcgttctccggccggtgggggccttcgtgtccagggttggaagcagttcggaagcctcagttcccaaccggggttttgattcccagagcgaggacagagggcactgtgaggcacctgtggcggcagtggcggccgtgggttccaaggcgtcgcccgcaccggcggcttctctgacccgcctctggcctccaggaacggcccccgggggcagggccgggcaccgcccccggcacctgccaggaggactcccgccccgccctggccccgccctcgggacaggggcgcctcggtggggcactcagtttcatcaactagcgcgcccagtcacctcagggcacgggacttcttggaagagggcttccctagacccggccccgctctctggggggccattctgggtgctgggttctactgagcgcaccctggcactttttcagagccatgtccccgtcatcgtcccggagactgggcccagcagcgcgtcggactggggttctgaaccactagccgcttggtgaggtgtcccccgaagccgtattttcgggacccgggcagtcccgcttggtcgtgccagccggcaggcagcgactcctcaggcccctgggccctccctccgatccagccttgcagcgcacagctccggcccgagggggcgccaggagccgccttactggccgctggggtctccctaccaatgcttgggctcagcgaggttcccagccgcgcaccactgcccccacgccaagccgagaagcggcttcccctctcctcccggaaaaatccgggaggtgtccgctgccaagggcactcccggattgagggaggagggagagacggacacagtgcgccgtgggcgcagcttagcggttgcagttgaaaggcggtcaccttgggcccgggcgcctggggaggcccagacaggaaacaggaggcgtccagggtagggggaaagagcagctggggccggatcatgcggttcaagggcaggatcgatgcccttgcgcgggccaccctcccctagggacgttttccactttccccctaatggaagcagactcttcccagaacctgcccccaaccccaccattctggggtgcccagaaggaaaaatacagttaccggccgggcatggaggctcatgcccgtgatgccagcactttgagaggccgaggcgggaggatcacctgaggtcagcagttcgaaaccagcctggccagcatggccaaaccccgtctctactaaaaatacaaaaaaaaaattagccaggcctggtggtgggcgcctgtaatcccagctactcgggaagctgaggtgggagaatcacttgaacctgggaggtggaggttacagtgagccaagatcgcgccactgcactctagcctaggcagcaagagcaaaactctgtctcaaaataaataaataaataaataaataaataagctgtatacttctgggaaaaagttttctctatagcaccttccccactgcatcatctcctggtccttcctccagccatgccaactgggctgggttcttggccccctttcacgggaacatttttttctttt

SEQ ID NO: 1887608 - DNA, 4001 bp, Homo sapiens
ctgctgctgactgtgggtgggcgggcggcgcctgggagtggctcttgctcaggaattgataggaaccctaaaaactaggataccccctcctcggcccatgaggcacgcacagtgacttatttaagacttcccccttaatttatctgcccccaggatgcgtcagtctgttcagtggtcagcaggccccccaccccccgccgactgccctcgccatcgtggtcagacccccctcccaacacaacacgctgctggtctgtgtcagcctttgtaacgtgggaggctctgccgtgtcttccgggtgaactgtatttggattgcgcgcattgtcacggtccgcccctgggctgcaggcgccccttcctctgggcacccctgcattctgcatccccacctctagacgctgtaataaacagactgttttcactcggacctggtgtgaatggcagcctttcttccaggtggcatgaggcgtctcctggcggccagtgagaggccccggctagtgtgtcatcgccgaaacggggagtggagggcctaggggtgctcctagcagaagctccgggggctgacaccaggacaccctggccttggggaggcttatgagggcaccaggccacaggcaaggggaggcttatgagggcaccaggccacaggcaaagtgccttttgatgaacggaaaaccagatctgcgaccccaatgacatcggcaaagtccttttcacatcagatggaccaaagcccgcccaggccccagccacactccgggagggcccgtgaatgccagaggcaggaccccaggtcaccacaggattcctgataccacacagcagctctgttctccccaggcctgggtcccagcctccacctgtcctggctgggggttctagctctcccctcagtgcaggaggcccagccactgcctctcaggaccctgagccttacttcccttgggtgggggctccctggctgcccctcccctctccttcacttcaccgccatccagtgtggaaaagaggtacctttatttgaacagaacaagcaccctggccccagggcaaccacttccccaggtgcacagccagggccctcctgtctgcaggagaattcacagctggtgtgggactcagcccctaggccattcacagctttgtctggctctgtacattcattcagcacggggcaggggggccatgccaccagcctgggggctcaccaggcccctggatgcacacaactcaggcagggcacctgtgggaaggcgcatatcctggcggcagcagcacgtggcaccaggtgccaggccagttaggtggatcctggggccccagggagcgcagcttgctgggcagtttcataaaatgcagcccctgcccacacccacctggcttcaggctttggatgtctccaaaccaaaaacctcccactgaaaatccaggtgtgatggccgggtgtggcggctcatgcctgtgatccccgctacttgggaagctgaggcaggaggatcacttgagtccagaaggtcaaggtcacagtgagctgtggcaccactgcactctagcctgggcaacacagtgaaaccctgacccaaaaaccaaaaaccaaaacaaaacagatccaggcatggccaagcgattcatggctgggcagggccagtcccgtcccgctgcacgctgaccaccgtgccctgcgctcacgcctgcaagccactcagctggaacctggcctcctcggatatgccgaactgttccagggggtcctgtggggaggacgggtggccatgagccagggctggaggactgcctctgccacctgcagccccaccccggccctctgcagccctgcacacaccttgcccgtcaccttccggatttcgttcctgtagaagatgaggcttctccgcatgaactcgtagctggggaaaagggtggcacggggtcaaatgcccgctctgcatggctgctgtgcccaccccagcagtgcccaccaccgcctggccccacctggcccgacgcagagcctccatccactcctgacactgctcctcgctgctgcactcaaagtgatacttcctctcagggtcctcaatgaagcctggggatggaacacctgtggtcggtcctacccacagccacaagcagcttcctcttgccattgcccataaactgtcccttctctggcccccacaaagatgtgttcatgtcctgaccccccagaacccatgagtatggccctgtatataaacagggtctttgcatataaactagtcaaaatgaggttgtcgccaggtgcggtggctcatgcctataatcccagcgctttgagaggccaaggtgggaggattgcttgagctcaggagttcgagaccagcctgggtgacatggcaaaatccccatctctacaaaaacaaaaattagccaggtgtggtggtggggccttgtaggcccagccactccggagtcagaagtgggaggactgcttgagccaagggggttgaggctgcagtgagctgtgatcacgccactgcactccagcctcggaaacaaaagatcctgtctcaaaaataaagagggccgggtacggtggctcaagaccgtaatcccagcactttgggaggccgaggtgggaggatcacctgaggtcaggagttcgagagcagcctggccaatatggcgaaaccccgtctctactaaaaatacaaaaattagctgggcatggtggcgcgtgcctgtagtaccagctactcgggaggctgaggcaggagaatcacttgaacccgagagggggaagttacagggagccgagattgcaccactgcactccagcctgggcgacataccaagaccctgtctcaaaaaataagcaaataaaataataaagtgaagtaaaaaggggttgtcagggtgggccctaaattctgcttggcgtctgtgtagaaggggaaatgtgggcacagacgtgatgcaaggaggacaaggtgacgcttccacaagccaaggaacctggaggatactggccaccactaggaactgggagattcccctcggcctcagaaggattcggccccacccacaccttcatctaggatttctggcctccagaactgtagagaatgtttctgatatttaagccacctggcctgtggaattttgacagccactctgggcaaactagcagggactccatctttccccgcagaagggaatctcttaagacccaggagaacacccccctctcactcctcctacccccacctgggatttccagcccggggccatataacaatgctagacccatgctactcttggcagctggggaaacgctttgggtggggctggcccacctgccctgtaagtacagcctgggcccacagggaacaaagagcagagtctgggagggacccaagcttaagtggactcggcaggtgggaagggtggtgcccgccaggagaacttgaccttgagctgcccgtggacaatgcactcttgtgtttgaggagggtggcgccaggctggggacacagaggagaccttgggcgcccggggaggggaaagtgcggcgctgcgggtgccccgggctgcgggaagcgccgctggcttccctagccccactcactgatggagaaggtgccgggctcttcccggacgactctgcagcgctccagcagcagggctccgacgggctggaggagacacgggcgccgggacggggcagtgagcacccggcctccgaggggcccagcctgggacccgcccgcgcgcccgggacgcccctacctcggcctcgtctgtccgaaagtagaagaggaaattcaccaccagcttcaccagccgccgcttcagcactgcgggcacagcgcgcactcaggggcgcaggcagcccccgcccggaccccggcctcccgtccccggcgccccgacccggactccggcctccggcacccccgcccagaccccggccccggcctcccgcccctggcactgtctcggtctcccgggtcccgc

SEQ ID NO: 1887609 - DNA, 4001 bp, Homo sapiens
gaagcggaggagggccaagaaggcacggctgctgggccccactgtgatgcttggtggatgcgagttcagccgccagagactgcaggcctttggcctcaaccccaaacggctgcacttccgccagctgggccggcagcggaggaaacaacaggggcccaagaacagctcctgagcaccagggagcaggcaggggcctcaggctcctctcctcaaatcaagccctggacaggtctcgcacccacaagtactatctgctgcagagatcctctcatctgtggccaggcacgcctgtaatcccagcactttgggaggccgaggtgaaaggatcacttgagcccaggaattggagaccagcgtgggcaacttagcgagactccatctctacaaaatgtggtgacacatgcctgtagtcccagctactcaggaggctggggaaggaagatcacttaaggccatgagtttgaggctacagagagctatgattgcaccactgcactccagcctgggcaacaaagcaagaccctgtctcttgaaaaaaaaaaaaaaattaaaaaacacgtgtagctgtgggtaaggaagtcgtcccattttatggatgtggaaactgaggctgacttaaacttcccgtgacttggagctctcacctcgagacacctcccagaccccacatcccctcagaacgctgcgcccagccacacccacgatcaagttacacagctttattggcccccagcagccacagttcccccaagggggctttgggacagggagggcccgggcgtccagtgcaaactacagtacgtgagtcaggccctgaggggggtgcccggggtcctccttccctaccctgccaggagggccccgctggtgggagacaggtgtatgggctctgtgggctctgtccctggctgaatggccccagactggttgcagctgggcttgaggggctgacaacaggaagtaccatcatcactgccagagctcaagatcccacacccgacatgacataaataaaaaaataaatagtgttgtatctttcccctcatcccctccctttataaaaacacaaagtcctcagagctggggcgtttggccctgaggagccgccctgtgcgagggagccggagtgtgggctgggcgagctgggagcagaggtcgtccaggctgtggtcctgagcatggccctcggccagggtgaacatggggtaccgctctgtggctgaggaggagctgaggacctggcgggaagagggagacagggtcagccacaaacagtgccaagccatattccttagcccaggtttatttagtaggtgcttctcaggaccacctctccaggagagagcagccaatcagcaccttccatcccctggccacagtgattggctcagccatgagcatgtgacccagctcagccaaagactgacagtcctgggatttttgctgcaaaacctgcgtttcccttccagtgaccacagggtgggtgcccagaatggctggtggccatctctcgcccccataagggtagagtcctggtcggacagcagggccaagagacagggagggttcccaccacttgagcccctggatacagctgcctccaagggatgatgccttaacagtgggctttggcgttcccaccttttcaggggtggacattcttcacatttcccaggttaggacccctagcctggaagcagcaccccagctctgctggactcgaggcctctgttcctctttcacccccagccctgcccaaccgcccccctcaccccactccagctttcctcttgctcaccctggtcagctctgagcagagtgtctcaaactccttcctgtctccagcatagaagcccacggtacagcttgggtccatcttggcaaaggccatcttgcggggcgaggtgcagtggaaggactggggcagacagacgaggaaggctcagaggctgggctgcccacccgccatggccccaaccacacactggggctcccactcacctccagggggaagtcggcctggctgacatccacagtgggctggcagtagtgagggtccaggtacagcaggaagtcatctgcagggggtgcaggtgtgagtgggggtgcggtggggggtgggaggagtgaggagggggtgggcctaccttggtagccaatgaagtacagtgagtgtcgcggtttcccacccatgatgcccaggcacagctcgcaacgcaggagttcctgcagggaggagggtaggcaggtgctgtcaggcagccactcaacaaacgcttggcaaacacctcctctgtgagaacccagcctctggagggcagcagtgatcaagaccacaaaacccttgccctcaggagctgacatcctagtgtgagagactaacaaggaagatgattacatgaattttttttttttttttttttttgagacggagtctcactctgtcacccagcctggagtgcagtggcccaattggctcaccgcaacctccgcctcctaagttcaagcgattctcctgcctcagcttctcaagtagctgggattacaggcacccgccaccacacccgggttaattttttgtatttttagtaaaaatggggtttcaccatgttagccaggctggtctggaactcctcctaacctcaggtgatctgcccgtctcggcctcctaaagtgctgggattacaggctggagtgcagtagcacgatcttggctcaccgaaacctccatctcctgggttcaagcagttctcctgcctcagcctcccgagcagctgggattacaggcgcccgccaccacgcccagctaatttttgtatttttagtagagacgaggtttcaccatgttggccagactggtcttggactcctgacctcaggtgatccacctgcctcccaaagtgctgggattacaggcgtgggccaccacgcccagccaattacatgatttatctcatgtgttagaggtgataactatatggaaaagaataaaagagggaagggagccttgtgattttaagtaaagaggtcaaacattacagctcttttagaatttgtctcaggttttctggttctcactggaaaaccccccacgcaaaaaatattttaaaacaggagccaagcagtggctcatgtccataatctcagtactttgggaggccgaagcgggaggatcacgaggtcaggagatcgagaccatcctgattaacacaatgaaaccccatctccattaaaaatacaaaaattagccaggagtggtggcggacgcctgtagtcccagctactcgggaggctgaggcaggagaatggcatgaacccaggaggtggagcttgcagtgagctgagatcatgccactgcactccagcctgagtgacagagcaagactccgtctcaaaaaaaaaaaaaaaaaaaaagccacatgcatcactgctgaaagagtgctccaagcagcaggggcagcaagcgcaaaggccctgaggtgggagtgtctgaaataggtgaggaggcccctgtggctgcagcagagtgtgggaggaggatatgaggtcaaggtgggggatatcccgacatcaagaaggtggtgtggacaaatagtgccgggctctgtgggtcactgggaaaactggcttttattcggatgcaaatacataggggactttccagcctcagggtctctgtcttgctgttccttttgcctggagcacttctcctctggctcctcatttgcctggtggctgcagaggcgcttttctaggctctgctgctaccctcatctgcccttcattgggttactgtttttttaaagttgtgtagaggctgggtgcagtggctcatgcctgtaatcccaacgctttgggagaccgaggtgggtggatcacctgaggtcgggagttcaagaccagcctggccaacatgggaaaaccccatctctgctaaaaatacaaaaattagccgggcgtggtggcatacacctgtaatcccagctacttgggtggctgag

SEQ ID NO: 1887610 - DNA, 4001 bp, Homo sapiens
tcgcacagccacacacctcaaggctgtcacatgtgcctgtctcaccaggacagtcacaccttgtctcttttcactgctgtcacctgagtgatccactctgctgttcctgttttcccgccctctaattgcctcacacctcaaaaatgtggaatcactttataagaaatctgtgtgtgtgtgtgagtgtgagtgtatgtctctgagcgtgtctgtgtgcgagtgtgtgtgtgttctatcctagaggaagatgccttccctaagatcaggctcatcaggcagccccaacccctgcactgagctccatggccatcctaggaggcaagaagattgtcccactttacagatgggtaagttgaggccaggagaggggcagtgacacacccagaacttcatagccagtaagagtgtgagccatgcagccatggcagaacctatgcctacccgaccccatctggacttccagctctaggcaatttctgcagcgtcccttccccctcaccaccttcagcccctggctcttagagctgccttcagccttcgtttggacaagtagctgagctcaatgtcttcccagctttcccctcccggatcactgcccaactctgggggcctccttcctctgccctgggccctcccacatacccatttcttaggggctccaagtccacatctcccatctccccatccccacacactcaccctgggcagcagccagctcctgcagggcatgggtcatctgggtgaaggtgtcatgcaggtggcttctctcatcatagtctggcggtgagggagggagcaggggctgggggaggcagctccccgcaacaccatgtccctaatgcgaacattctgtttctgagtctctgccctcccaagtctgtatcctcccctctctgactctttgccccacagtcgctatgcttcctgagtccctcccaagtctctatcctccctgagtctctgcccccgaccagtcgctatcctgcttcccctagtctctgcctcatctctgtcctcctctctctgggtttccatcctctttgagtctccatcttccaccctctgagtctccatcctcccctctctgggtctctattccctctccagtctccaacctctcctgactctccatcctcccctttctatgagtctccatcctcctgactctccatcctcccgagtgtccatcctcccctctctgactctccatactcctgagtctccatctttccgagtctccatcttcctctctctctgagtctccatcctccccctctctgagtctccatcttcccctctctgactctccatcctcccctctctgagtctttgccctgctgtcttcccctgtctgtgtctctctgtccctaagtctctgttgttctcatggtctttgagcctttctcctctgactgtttctctctgtctgtccctcagcctgaccctctgggcctctcctgccctccctctgcaccttccccaggacactgatgaagtgtggatggtctcctcactgatttcggtgtcagagaggccctggaaggcggccgtgaaggcctcctcacactcttcaagcttggggctccgcatcccaacaaacatctggcagatgcggaggcgctcagagtaggttgtgaagcagaggagacaggcccaggcgggcaccctgaagacagccagggccagcagggcagacgggacggcactggccagagccagcagggccatcgtgtgggtctcaaggccaggggagaagctagtaacctttatgaagtcaccacagggcgggggaagggccagtggtctggggtcagaggtcaggtttcagttggtggtcaaatgtcatgctctggaggaagggtatgaggagtcaggggtcagaagtcaggccagcaattccccaggtgtgtggttgggccagacgccaggctcccaagaacctcacctgtgaccctggatgtcctcacaggttaaagggtctcagggacctagagactggcaacatggtgtgcggtggcccggtagaccctggggtgggggtcagagatggagataggcacagagacattctgagagccagagacagaaagaccaaaaacgacagaaatagagacacagagagatatcgggaggggcagagacctagaaagccagaataagagggagtcagaggatccactgtgaaagagacacagaagccacagagacacagcagagatggagacagacagggaaggaaaacagatttcaggggaaggaggggatgcagggacaaggacagaaaagagcccggctcttcctcccagggtccctggggcagcccagtggggctaagggtccctgagtggggctgggggtccccgccgggccccgtcccgtgcagggcgcagcctggggaaagctaggaggccgtatagtgatctccttgggtgtcctcctcaactatacaacctcctacctcagcccggggggcgcggcaggtggacagacccgacagacagacagacagggaccaggaggaccagggatgagggggagggccggggaggccccagccgcgatggtgagcccccgacacggacccacagacacgagcttgtgtgcggcgaaggccccgcaaggtcggttctacgggtgggtgccaggacccaggagtccgggcccccggcccctcctccccaaggaacccaggagtccaggccctcagccccttcctcatcagggaccctggagtcaaggctctcatccccctcctccctaaagaacccagaagtctaggcccttcctcaccacagacccaggaatccaggcctctggcccttttctccccaaatgttcctggaatccaaggactcagccccttcctccctcagactcatgagtccagatccaaagcctccttctccccagagacccaggagtccctgcccccagcccctcctccctccggccaggcaggcctcctggggaaggcatggcctgatagaaaacctggcttcctgggtgccggctgggagggaacctcatttgtctcgtaatttggccctttgggcacacctgcttcctacctaccctcctgtcagtctgcagagactccaggcccagggctaaggaggccaggggctagccaaccatcagagcctccctaggtgctttctttcctctctcctcccttctttgggtcatttacaactatgacagccacaatctcccagcgctgaccccataccaggccctgagcaccagtcctctccctgacacctcccactccagagagcgaggtgccctcagcatccccatttggcaggtgagggggctgagcctcagagaggggaagaggctcccaaagtctgcccagccccatctctgtcctccctcttgaatccaggaggtgtccccagccttctccagcttctggaccccgggacccagcacccaccctccccacccctgggctctgagcccctccagctggggtctctcccgtgcccagcccctcctcctggactgtctggttctcgctgcccctgctccaggcgcaccttccggttcctttctcgcagtccaggtctctctggccctgcctttttctctctccctctttctttccaccttccctggttcccagcctcctcctgcatcaggacatccctccctggctctgcgctggcttctctctctgcccatcgcctctctcctctccccgcttctgttttcttccttctctccccctctttctcctgcttttcctctaccttctgtctttcatcctccccttctcccccttccccctctttgtctctctcattctctctctggccctctctcagtctctctcctctttctcacccttctccacccccttttttcggatgtctttcctcacttcctctccctccgccccttccctctctccatccctcacctccgtctcctgctctctctcagtctctgtctctctccctctctctctccttccctccctcttaggtctctctctt

SEQ ID NO: 1887611 - DNA, 4001 bp, Homo sapiens
gcctcggtttccccatctgtcaaagaaaagggacccggctgcccgcgtcgaagccgccggccctgctgtggcacgacctggacgcgtgccacggacgtgctctgtgaccttggctctggctgggcggtggttcttgctgagccttagtttccttttctgcagaaaggcagcggtaatgccgccttcctgagggaagccattcttgtgacacatttatagaacgcctactgtgtgccaggccccgctgctccagggccctggggtggggcggggcgggggtgggtccctgccctggtggtggtgcctggagacagacagagacaaattcacaagctgaattcctggcaggtcagatggtggggacagttctgcagaaaaaccagccgggagaatggcagggtaggaaggtgcaaagttaaagaggtgggagggaggatcagagacggcttcctccacccctaaagcgacctgaagaaggagggagaacagggggatggggtacagaggtagtcagaggcaggaccaacaggtgcaaaggccctggggcaggactgtgcctggcagcagagtgcccggggggaggtcaggaaggccggagggaggcagggccgggggcttcgtgcttttgtccagggcccccccaccccacagcagggcttgtgcttgggttaatatttactgctgcattttgagatttctaatcatttttgaacaaggggcctttgagttttcttttgcactgggccctgctaactctgtagctggtgaagcaggccagtccagcaaggacttgtgggtcttggggaggacttgggattttgctctgagtgaggtaggagccctggaaggctgtgggaggaggagggacgggacctggtggttggttggtttgttttttgagatggagtttcgctcttgttgcccaggctggagtacaatggcacaatctcagctcaccgcatcctgggttcaagtgattcctgcctcagcctcccgagtagctggattacaggcacgtgccaccacgccccgctaattttggagttttagtagagacggggtttctccatgttggtcaggctggtcttgaactcccgacctcagatgatctgcccgcctcggcctcccaaagtgctgggattacaggcgtgagccaccgtgatcagctgtttgtttgtttttgagatggagtctcactctgttgcccaggctggagtgcagtgatgtgatgttggctgactgcagcctctgccacccggattcaagtgattctcctgcctctgcctcctgagtagctgggattacaggtgcgcatcaccacgcctggctaatttttgtatatttagtagagacaggtttcaccatattggccagactggtcttgaaatcctgacatcaggtgatcctcccgcctccacctcccagagtgcagggattacaggtgtgagccactgcgcctggccctggacttgggcttttgctctgagtgaggtgggaatcctggagagccgtgggaagaggagggatgggacctggtggcggttattaaaggatccctctctctgccacgcagagaacaggtcccaaagaggctactgaaataaggctatgacattaaggtccccctttggcaggtgcgaaacacagtctcttcatcatcgtcatccactaggcagcctgctcccttgaatgaatgcaattgatttgggccttgggtgttcccatctgtaaaatagacttggaaccccaggctccttaccttggcaggtaagggtgatagccttcagtgatcaagattaataatctttaaagcagtgttttaatatttttattaaaaaaaaattttttttttgaggtggagtctcactgtgtggcccaggctggagtgcagtggtgccatctcggctcactgcaagctccacctcccgggtttatgccattctcctgcctcagcctcccgagtagctggggctacaggcgcccaccaccacgcccggctaattttttgtatttttagtagagacggagtttcactgtgttagccaggatggtctcgatctcctgacctcgtgatctgcctgcctcggcctcccaaagtcctgggattacaggcgcgagccaccacacccggcctaaaaaaattttttcagacacagtcctctgttgcataggctagagtgcagtggtgcaatcatagctcactgcagcctcccactcctgggctcaagtgatcctccgacctcagcatcctgagtagctgggactacaggagtgcaccaccatgcccagctaattttaacattttttgtaagccgggagcagtggctcatgcctgtagtcccagcactttgggaagccgaggccagtggatcacaagctcaggagttcgagaccagcctggccaacatggtgaaacctcgtcactactacaaatacaaaaattaccggggtgttttggcgggcgcctctaattccagctacttggaggctgaggcaggagaatcgctggaagctgggaggtggtggttgcagtgagccaagatcgcgccactgtactccagcctgggtgacagagtgagactctgtctcaaaaaaaaaaaaaaaaaaaagatgaggctagaaaggattaggattttggatttttaagattactactacttggtggccgggtgtggtggctcacacctgtaatctcagcgctttgggaggccgaggcaggcggatcacctgaggtgaggagcttgagaccagcctgaccaacatggagaaactccgtctctactaaaaatacaaaattagcctggcatggtggctcacgcctgtaatcctagccacttgggaggctgaggcaggagaattgcttgaacctgggaggtggaggttgcggtgagccaagattgtgccactgcactccagcctgggcgacaagagcgaaactctgtctcaaaaaaaaaagaaacaaagaaacagagattaatactacttagtaacagccaagccttcaaccaaccgcaacacccttgtttttcctgcagggccctgagagactgcgttcctagactgcccctgaagccagtcctgccgctagcacccctgccaccccacccccactgccgtggggaccagacaccccctctcctgggaggccacctgccagtgtttatttaggcaggcgccttccggtatcagtgtgcccgcccagtgaccaaacagccccattttcgaagcccccacactgtcaggggaagcagaactggacacagataccttgagcacggtgaggtgagggctgggccacccacagggacctaggcctgtgaaggagagagtcattgtgaaatcatcgtttttagaaaataggttttttttctgcatagaaggcagcccagaatggtggcccacactataaataatcaaccaagccacacaggtctgtatgtttttgctccgcaccaggggctgccttaagcactttaacctttaggtacagttgtcacacccattttagagatggggggaaaacaggccggcagggtggctcaggcctgtcatcccagcactttaggaggccgaggcaagcagatcacttgaggatcaggagtttgatactagcctggccaacatggcgaaaccccgtctctactaaaaatacaaaaattaaggcgtggtggtgggcgcctgtaatcccagctactctggaggctgaggcaggagaagcgcttgaacccggaaggcggaggtttcagtgagccgagatcgtgccactgcactccagcctgggcgacagaatgagactctgtctccaaaaataaaaaataaaaaaaaagaaaacgaaaaaaaatggggaaagtgagtcacagagaagtgaagtgacttggccaagtgggtagggggcagaaccacgatgttatcccaggcctttgatcttgaccttgggcctttgagcactctgcagtgtggcttctggccgggacacgatggcagcacgtgctgctgggctg

SEQ ID NO: 1887612 - DNA, 4001 bp, Homo sapiens
tctcttatgtttattgaagtctgaggaccagttaaaagctttgccacattcttcacatttgcaaggtttctctccagtatgaattgtcttatattcacttagagttgaggatgcagtaaaggctttgccacattcttcacatttgtaaggtttctctccagtatgagttctcctatgtttatgggggcttgaggaccatgtaaaggtttttataccatttatagcatttctctccagtatgaattgtcttatgtatagtaaggtgtgaaaaatggttgaaggctttgccacattcttcacatttgtagagtttctctccagtatgaatcttctcatgttcactaagggttgaggataaaataaaggctgtgccacatttatcacacttgtatggtttctctccagcatgaattttcttatgcctagtaaggtgtgaggaatgggtgaaagctttgccatattcttcacatttgtagggtttctctccagtatgaatcttctcatgtttactaagggttgaggatgaaataaaggctttgccacatttatcacacttgtatggtttctctccagtatgagttttgttatgtgaagaaagggttgcaggatgtttaaaagctttgccacattctttacatttgtagggttgctctccagtatgagttatcttatgaatagcaagctgtgagggccagttaaaggctttgccacactcttcacatttgtaggatttctctccagtatggattatcttatgttcagtaagcgtagaggaatacttaaagccattgccacattcttcacatttgtagggtttctctccagtatgagttatcttatgtgtagttaggtgtgaggaccatctgaaggctttgccacattcttcacatttgtagggtttctctccagtatgaatcttctcatgtttactaagggttgaggaaaaaataaaggctttgccacatttatcacacttgcatggtttctctccagtatgagttttcttatgtgaagaaggggttgtgggatggttaaaagctttgctgcattctttacgtttgtagggttgctctccagtatgagttatcttatgaatagcaagctgtgaggaccagttaaaggctttgccacactcctcacatttgtgggatttctctccagtatgaattatcttatgtgtagtaagggtacaggagtacttaaaggctttgccacattcttcacatttttagggtttctctccagtatgagttatcttatctgtagtaaaggttgagtaccagttaaagtctttgccacattcttcacatttgtagggtttctctccagtatgaattttcttatgtgtagtaagggttgaggactggttaaaagatttgccacattctatatgtttcaaaggtttttttacagtacgtcttctgtctgtttgaatttgaaaattgatgaaagactttcacatatttatcacattgaaatattttgcaatgggtagttgtcaagcattggttaagcccattataacctcttttttgcaccttacactcatccacactttcacatcctttttttaactgtaaattgccatgtccacattttttatatcttctcagtatcactttttgaaaagaatcttttatgttctgctctagccaaagttcttgggcaaaatgagaacaaataactgaaagagacaataaaaacacaacacttcaactgctagactcagataaatatattttacaaatctaacctataaaatttcacagactacctaaggaagatgacatggcaaaataccacaagctgtaatttcttcctggacatataaatgtaacaaaaacatactgaccaaaatacaatttgtaaaaaatgtataagtgaattaagtgtgtgaagggtcccaggtgagcacaatgcaaagagccacatagaagataaagaaaagcctgttacttatacccaacacagctcttccatatctccagtataactctgtgcctttaaaagtaaattattggcctggtgtggtggcttgtgtctgtaaacccaacactttgggaggcagatgtgggtgaatcacttgaggtcaggagttcaagaccagcctggccaagatggtgaaaccccatctctactaaaaatacaaaaaattagccaggcttagtcatgggcacctgtaatctcagctactggggaggcggaggcatgagaattgctggaacccagggggtggaggttgcagtaagctgagattgcaccactgtactctggcctgggtacagagtgagaccccaccacaaaaaataaaaattaaaaaaaaaaagttaattgccaaccaggcatgatggctcatgcctgtaattccagcaatttgggtgaacaagatggaggacaaccagaggtgatcagcctgaccaacatggtgaaacctcatctctactaaaatacagaaaattagccaggggtggtaataggtacctgtaatcctagctacctgggaggctaaggcaggataattgcttgaactctggaggcagagattgtactgagccaaggtcatgcctctgcactccagactagttaatagagtgaggctctgtctcacacatacacacaaaaatgtaaattgccaactcctggtttcttttttaaaaaacaagaaaaatattgacacatacatctttatttctggcttctaggggcttttttagacactagttgatatgtcccatgacacaaaatgccaaaaaaaatggtgatatatgttagaatgacactttgagtctgaaggtaaattatagagaagcagagaaactgcagtaacccaaacagggaatgggtgtagtgaatgattacttattattaactaaacaataaacataaaattttaaacaagacacaccttaaaaacatgtttgaggaattctcagaatctagagtcaagacaattgatttcagactatgccaggacagagccatattataaagactgtaacaggtagctttttgttaatgtcctaatctcaatcaaaggttataatgtataccaaatattagagcaacatggccccatcaaaaaaattataaaattttcaaaagcaaccataaaaagtatgtaaagtaatttttaaaattccaaatgaattgaacagcccagtgttggtagctcattcctgtaatcccaacacactgggagatcaaggtgggaaaatcacatgaggtcagaagtttgggaccagcctgagcaacatggtgaaaccctgtttctgctaaaaatacaaaaattagctgcgcatggtggcatgtgcctgtaatcccaggtacttgggaggttgacacaggataattgcttgaatccaggaggggaaagttgcagtgagtggagattgtaccactgcaatgcagactgggcaacagagcaacactgtctcaaaaataaagtaaaaaaggccaggcacagtggttcatgcctgtattcctagcactttaggaggctgaagtgggtagatcatttgaggtcaggagttcaagatcagcctgcccaacatggtgaaaccccatctgaactaaaaatacaaaaaattatctgggcatggtggcaggcacctgtaatcccagctactcgggaggctgaggcaggagaattgcttgaaccaggaggcagaagttgcagtgagccgagattgagccactgcactccagcctcggtgacagaaaaatactctgtatcagaaaaaaaaccagaaacacagacaactattgaagatcagaaaaatgagaacaaaaagaaatactaaagtaaacacacacaaaaaattgtggatataaaaagtacaaaaaataactgaaaaatttattacaagaaaatacgtaaacatgaaaaagctgaaaaaacaaacttagatacacacaaatatatttataacacccaaataagcaaaatttcaaaaatcacatataagaatagaattttgggtgctgaagataaaaatgatgtt

SEQ ID NO: 1887613 - DNA, 4001 bp, Homo sapiens
gcacacacaaacatcctccaggagagaccacaggctacgctgtaaaagctcctcaataaaaaaatacacaagtacctgttgggtgcggtggctcacatctctaaccccagcacttcaggacgccgaagtgagaggatcacttgagctcaagagttccagacaagcctgggcaacatggtgaagcttcatctgtacaaaaaatacaaaagtgagccaggtgtggtggtgcatacctgtagacactaattcaggaggctgcggtggcaggtggaggttgcagtgagccaacattgcaccactgcactccagcctcggtgatatagtcaggctgtgtcttgtaaaaactagaaacacatacacacacacacacacacacacacacacacacaaagacacacactcaaagtgatagtctcctgcctcaccctccggagtagctgagactacaggcgtgcgccaccagccctggctaattttttgtatttttagcagagacatggtttcaccatgttggccagtctggtctcgccctcctgatctcaggttatccacccgcctcggcctcccaaactgctgggattacaggcgtgatccaccgcacctggccatacatcatatatttttgagaccctgtctcaaaagaaagaaagttccatatactgtatgctcacagaaagaataattcctacacataagtccttgctttggcagctcacacccccgtctctaaaatacaaaacctaaatcaagtgtgcgttgataacgtggtcatacaccctgtatttcagcttcatttacccaataaaaactcaaagcccatgcactccacctctgtgctcttgcgaagcaatgcacatcccatctgcaagggacactgaggttcccttcaactctacctcaagtcaagtcaagggaggttctgtaaaccagtgcaggcataacttccacggagtgaaaggtgttgagggctggacgaacaggcatcactcactatggcaacaagagcggatgcgcatcccacctgttactagggaggcccttctagggtcctcaaggtttttgtgaaagtatctgtggttttgtcccatgtgacatttatcactgcaactgagattcatcttgtctataatagcttgtttctcatattagccacagccaacatttcacagcttaccaagaaatttgcatttaaatgtgaggttttgcaggttggaatggtacactggaaaaattacctgcagaaaacaggataaacagtgcagctgcagtcacagcactcactacggttggcatgagtgggtgagggttgaatcaactacacccttcctgcagaaaaaggtctattccgagaaataagtggaagctgttaagcaagaaaaattttcgatgtcagggacgagcagattaaattaaaaagacaggaatgggccgggcacggtggcttatatctataatccccagcactgtgggaggccaaggaggcagatcacttgaggtcaggagttgagaccagccccgcaaacatggtgaaaccccgtctgtgccaaaagtacaaaaactggcaggtcatagtggtgagcatttgtaatcccagctactagtgacacggaggtgggagaatttctggaacctgggaggcagaggatgcaatgagtggagatcatcccactctactccagcctgggtgacagagccaggctccatctcaaaaatgaatacataaataaataaaaagaggatcacttgagcccaagagagctaggttggaagtgccaccgcactccagcctgggcaacggagaccctgtcttagaaaaacacaaaaccaaaacataaccccgctatcatccaagtctgatgataagcatgctctgcaaatgtattaccaagatcagcatcaacttcaacactgcttttctcaaaccgtaaccctcaaaagggaagcgctttctcttctttctgacaacagaaagcgctttcctttgtagactcatagcttgagatcttcttgctccagcactctgggtttcgtgttggaattttctttgaccaggtttaaatggacagaaaaataaagatgcatttagtggccctgtttgcatgttttctggaatccagaataaaacgcctgaaaaggaccatctccagttccttgcttcaaaggctcagcaggttagccttgttcatcaagggacaatcctcccgagttttgttctcaaacagaaaaagcaatgcctactagacataccttatacttaaccaagagaattggactggatttccagagaacagcaaatggattctgagccaagtgttcatttgagttccagtgcggagacacacagtcccattggaaacatccaaaatgtgatctaagatgttgaactatatacattgtcgcacacacaaacatcctccaggatagaccacaggctaggtggtaaaagctcctcaataaaatttgaacaggaatacacaagtaccagttgggtgtggtggctcatacctctaatcccagcacatcaggaggccaaggcaggagattcacttgagctcaggagctcaagaccagcgtgtacaacacggtgaaaccctgtctgtaaaaaaatacaaatgtaggccaggtgtggtggtacatgcctgtagacactaattcaggaggctggggtgggaggcgaaggttgcagtgagccaagactgaaacactgcactccaacctgggcgactgagccagatcttgttgcaaaaaaaaatttaaaagaacacacaagcaaaaaccaccccaaagtgatatcagtcatctctgtgtgtagaagagtattttttgtgtatataattatatatatggctatatgatgaaatatacatcatatataatatatatatacacacaaacacacccatatatatatttttttttttgagacagagtctctctctctatataaatatatatgtatatatatattttttttttgagacagtcttattctctcgcccaggctggagtgtggtggcgtgatcttggctcactgcaacctccatctgtccgttcaagtgattctcctccctcaacttccccagcagatgggaatacaggcgtgcgccaccatagctggctaattttttgtatttttagtagagacagggtttcaccatgttggtcaggctggtctcaaactcctgacctcaagtgatccactcgcctcaacctgccaaagtgttgatattgcaggcatgagccaccgctcatgtcgtatacacacaaaaactgctcatatactcatgcgcctggctgtacatcatttattttccagaccctatctcaaaaaaaaagaaagttccatatactgtatgctcacataaagaattactcctacacataaatgtttgctccacacataagaaatgaatggagtgacagagatcaccatggcccctgtgcagaggtgatgcccaaattcatgatgggtctcatattgaaaattaagatcaaaggccgggtgcagtggttcatgactgtaaacccagcactttgggaggccgaggcaggtggattacgaggtcaggagatggagaccatcctggtcaacacggtgaaaccccatctctgctaaaaatacaaaaattagccgggcgtggtggcatgggcctgtactcccagcaacacaggagactgagatgggagaaccacttcaacccgggaaggggagattgtagtgagcagagatcgtgaccctgcaaagaggaccacctgagcccaagagagctaggttggaagtgccactgctctccagcctgggcaaaagagaccccgtcttagaaaacaaacaaaccaggaacaaaagcccaccctcatccaagtctgatgataagcacgctctgcaaatgtattgccgagatcagcatgaacgttaacgttgcttttctcaaactgtaatcctctaaaaagatgcactttcttttctttcagacaacagaaagcgcttccctctagagggt

SEQ ID NO: 1887614 - DNA, 4001 bp, Homo sapiens
tccatatattatatgctcacaggaagaataattcctacacatgagtgcttgctttggcagtgcacataaaaaaaattggaatgacagagattaccctggcccctgcacaaaagtgacatccaaattcatgatggtctcatatttatctatttatttttatctatttaatttcatttttattatttattttatttttgagatggaatcttgctctgtggcccaggctggagtgcaatggcatggcttcagctcactgaaatctcttcctcctgggttcaagcgattctcctgccttagcctccaagtagctggaaatacagatatacaccactgcacccagctaatttttgtatttttaatagagatgaggttttgctatttcagccctgttagtcttgaacatgacctcaggtgatcctcccgtctcggcctcccaaagtgctgggattacaagtgtttgccagcgcacccagctgattttttacttttttgagactcagtctcactctgttgcccaggctggagtgcagaggcttgatctcagctcactgaaagctcagcctcccagcctcaagcaattctcctgcctcatccacccgagtagctgggattacaggcatgcaccaagaccacgtctcactaatttttttatttttagtacagacgaggtttcaccatgttggccagtctggtctcgaacaactgacctcaggtgatcctcctgtctccgcctcccaaagtgctggaattacaggcatgagccaccgtacctggactagtcccatatttaaagttaggaagaaaaaaaaagatgcccacacctaaacagcaaatcatttgttgttcaagtacatttcaaatacattgtttatctaaaatacatgtttaactggggtcaggtatgaaccaaagaacagtccttactttcttcttgtctgtgcatggggggttaatattcacatgtagtcccatgtaccaaggactggggaggggcagaggcaggaggatctaagcccacttcagcctgggcagcatagtgagatccccatctcatgcatttatctcctggtcacacaccgaagattttagcttcatttccccaataaacactgaagccccatgcactccacctctgtgctcttgctgagcagtgcacatcccatctgcaagggaaactgaggtcccctcaactccacctgaccccacgtgaggttctataccagtgccagaaaaatttccataaagtaagaggtgttgatggccacgcagtggctcatgtttgtattctcagcactttgggaggctgaggcaagcagctgacttgaggtcaggggtttgagaccagcctggccaacatggtgaaagcccatctttactttaaaaaaaaaaaaaaaaattcaaaaagtagccgggtgtagtggcaggtgcgtgtaattccagctactcaggagtctggggcaggagaatcacttgatcctgggtggcatacattgcagtaagccgagatcaagccactgaactacagcctgggtgacggtgagaccccatcttaaaaataaataaaaaaaaaacccaaatattatccaggtgtggggatgggcgcctgtaaatctcagctacttgggaagctgaagcaggagaattgcttgaacctgggaggcggaggttgtagtgagccaagatgggatgactgcacttcagcctcggtgacagagagagactctggcccccaaaaaggaccatttaaatccaagagacctaggtgggatgtgccaccgcactccagcatgggcaacacagaccctgttttagaataacaaagcaaaaccaaaacagaaccccgccaccgtccaagtgtgataagcatgctctgcaaatgtattaccgagatcagcatcaacttcaacgctgcttttctcaaaccgtaacactccaaagggaagcgatttcttttctttcagacaacagaaagcgctttcctttgtagactcacagcttgagatcttcttgctccagcactctgggtttcttgttgaaattttccttgaccaggttaaaatggacagaaaaataaagatgcattcattgtccctatttgcatgttttctggaatccagaacataaccccctaaaaggaccatctccagttccttgcttcaaaggctcagcaggttagccttgttcaagaggcagtcctcctgagtattatctacaaagagaaaaagcaatgcctactacacatacctttttattttttattttttgagatgaagtctcgctctgtcacccaggctggagtgcagtggcgcgatctcagctcactgcaacctccgcttcctgggttcaagcaattctcctgcctcagcctcccaagtagctgagattactggtggagccaccacgcccagctaatttttgtatttttagtagagatgggtttcaccgtgttggtcaggcttgtctcgaactcctgacctcgtgatcctcccacctcggtctcccaaagtgctgggattacaggcatgagccaccacgcccagcccacataccttgtctttaaccaagacaattggcctggaattcatgagaacagcaatggatgttgagccaagtgttcacttgagttccagtacaggggcacacagtccggatgggagcatccaaatggaatctaaaatgttgaagaatatacattgtcacacacacaaacattctccaggatagaccacaggctgggatgtaaaagctcctccataaaatttgagcagaaacacacaagagtagggcacgcttgctcacaccattaatcacagcagttttggaggcccaggcgggaggagcaattgagctcaagggtccgagaccagcctgggcaacatggtgaaacctcatctatacaaaaaatacaaaagttaggcaggtgtggtagtgcatgcctggagacaggtattcaggaggctgaggtgggaggtggaggttgcagtgagccgagatcgcaccactgccctatagcctgggtgacagagccagaccctgtctcaaaaataaatcaataaatcaataataaaaatgcaaaagttagctgggcatggtggcacagcctgtaaccccagctgctccggaggctgaggcaggagaattgcttgaacccaggaggcagagattgcagtgagccaagttcctgccactgcactccagccagggccacagagtgagactctgtcccaaaaagagggccacttgaacccaagagatctaagttggaagtgccaccgcactccagcctggggaacagacaccctgtcttagataaaaaacaaaaccccaccattatccacgtctgatgatcagcacgctctgcaaatgtattaccaagatcagcgtcaacttcaacgttgcttttctcaaaccgtaaccctctgaaaggaagcactttcttttctttcagacaacagaaagtgcttctttcctcgagaaggtcacagcctgagatcttgctccagcaccgtgggttttttgttggaattttcctagatcaagttaaaatggacagaaacataaagatgcatttattggccctgtttgcatgttttctggaatccagaatataaacccctaaaaggaggatctccagttacttgcttcaaagaatcagcaggttagctttgttcatcaaggggcaatcctcctgagttttgtctctggaaagaaaaagcaatgcctgctacacatatcttatatttaaccaagagaactgggctggatttctagagaagagcaatggatattgagccaggtgttcaccggagttccagcacaaggacacacagtttctacggaagcaatcaaaatggaatctaagatgttgatgaatatacattgtctcacacacaaacatcctccaggatagaccacaggctaggacataaaaaatcctcaataaaatttgaaaagaaatacagaagctgggcgcggtggctcatgcctgtaatcccagcact

SEQ ID NO: 1887615 - DNA, 4001 bp, Homo sapiens
gagaggagtctgttcccagaactgtagcacaaaagctagaggctgagtaggaacatcttaaactaagtcctcagtcttatttccagttttcttcctgtagatcggggcttaggacaccctgtcacattttcttcactcctccaccaggaattcctaaagtccatgctcttggatcctggcaaatccaggaggctgggggatgtggcaagcttcagcaagactgcctgggaccaaccctgcagccttaattcccaggcccgctcagcccagctggccagcaaaggcaggcagagcttctgtgtccacacatgagaatgacctgcagctgttctttgtccaggctgaggtccaggattcccactgcagctcctaggaaatctttaaaattaggtcggggatgagcctgtcagtagattaggtagggaacttttatgaagttgagggtgaaccatctggagggtgaactggctggtgtgattctagaactgggggtggtgcctagcagtgcatttgtgagaagacacagccaggcttggtatatgatgtggtgtgtgtgtatattcacaggcatcgtggagcatatacactttttttgtgtgtgttgaaataaaccttacagattacaaagtacttttttttttttttctgagacagggtctctctctgtcgcccagcctggagtgcagtggtacaatcatagctcactgcagcctcgatctcccaagctcaagtgatcctcccgcctcagcctcccatgtagctgggactacaggtgtgtgacaccatgactggctattttattttatttttgtagagatggaatctcacaatattgcccaggctgatctcaaactcttgggctcaagcagtcctctcgcgtcagcctaccaaagtgctaggattacaggcatgagccaccacgcccagccagattacaaaatactttgacatcttttctctacagccctcaaaaggaggcagggcaagcacaattaaatcccattacaaatggggtgactgaagctccattcatggcttgcccagggtcacacaaagaatgaatagcagagccctgagcctgtgtgcttccctctgtgccaggctgctttacccaggcatgggtgcaccttgtgcatgggacatttctcctttgttgtgtcctgagtaccttaagccactcagatattgctcaggtggagtgagggaaaaatgttttcaggttgtattagtcaaaacaaaataccacacactgggcgactttaaaatcatacatttatccctcacagttctggaggcttggaagtccaagttcaaggtggcagctggacgggttcccggtgagggctctcttcctggtttgcagacagccaccttctcttcgcatcctcacttggtgggaaaagacagaggagagaaagagagagagagaaaaatgagatagagagagagagagaaatgagatagagagaaatgagagagagagagagagagagagagagggagacacagagacaatgctctcttttcttaccagatctataatgagggccccaccccatgacctcatctaaccgtaattacctaccaaaggcccatctccacataccatcacattaggggttagggtttcaacataagcatttggagaggacataaacattctgtctacaacatgagtggagatccatctcttctttacctctggtaaggggaccacacgctgcagccagcgagacagtggcatgttcttgttacaactcgatctaactcccccagaagaggaggcagggaaggcggacaaaactgggagagggagagagtgttaggaagagagtagggtggccagaggcagcaaataaaatataaaatgcttaattctgaatctcagataaacaaccaataatgttttttagcataagtatgtcccaaactaagcttgggacatatttatgctacgaaattattcgttgtttatctaaaattcaaactagctgggcatcctgtcttttaatctggcaaccctaaaaggcaagggccaaaaatgccggaggcaagccaacggattccaggagggacaactgctggactttggactgatgatgctctttttatatatttaactttttaaaaaagcctcttttctttctttttaccagcttttcactagctttttaaaaattgtggtaaaacatacataacctaaaattcaccgtctaaaccatttttcagcatacagttcagtgggattaagtagattcacactgttgtgccgccatcactaccactcatttccagcacccttccatcaccccagcctgaaactctacccattgaacacgagctgcccaactccgccttgcttccccattcctggcgaccactgcttctgtctctgtgaattttgactattctaggcacttcacaaaactggactcatacgatatctgtagttttgcgtctggcttctctattgaattcttaaaggggggtgggaactaagcagatcacaagggagctgcccacagaggtaaagacaaggtcaggtaggctgagagacgcaggaaagcgggtcaaggcgtagggctggagggcaggggcgggccctgggcgtgggctgggggtcctgccccggggcgcaccccgggcgagggctgcccggaggagccgaggttggcggacagcttggccctgagcttgaggggaaggcagcgatgggacaaaggacggaggtctaggaagagggtctgcagagcagaaagcacgggtaggggcggcctgacgctcggaagacaacgcatgggagccgtgtgcacgtcgggagctcggagtgagcgtgagttccgtgcccaggcccgcgactcggcccgacaggacagcgctccgggtcgacggggtcctggagccgcgctcggggagggcgcagcggagggcgagcggcggcgttaggacccggaggcgcgggcggactgggggcggcggggctaggacccagcggctccggcagagcggaagcggcggcgggagcttccgggagggcggctcgcaggtaggaggcgtccggggccgcgggaagtagggtcgtgggggcctggcggggcgaagtaggggacccggaggggctggagggaggcgggcgggaggcccgggaccgttcctgaccgagaagcctgcgccaagctggtgttccgcggccgctgcccggtgcccggctccactgcgaacgccgccgctgggccccgaccgcccgggaggcgtcttgggctcgccccggagcttcctccctggagccgcgccctgcacccggccttgcccggccctagcagggaagccaaggcttgtggggcgcagggacccgggctctgcggggtcccggttccgcctccccactcctgcgtcttcccgcccctgccgggttctgggaagcctcgcgcggctcttccgcagctgctgcccgcccggagctcctggtccctcgtaggggaccccacttctctgacaccgcgttgggttcccggggcctacagcgaggcttgtaactccgggagagaccctggagcggggtgtgggagaacggtctggaggaagggctccgagcacttcgaaagtataaaccgcggtcccaaagaggcgtgctgtgtctgcattttcctgggagtgcacggtttacattctcgaaagcagtgctgtcgactagaaatattgagcgatacacatgtacaagttttgtcacttaaaaagaatttgaaaaaacttcatagatgcaaaaaaaaaaaaaacccaccattattaaagaatacttaggtatttgtggaatgcattgaagagttaacaaaatggataggcaggaaatatcgcagacctagaatgaattacagttacccactgtggaactgaggagctagggtttctcataaaactccctgatagaagacgacttttgataaatttttttttccgccaacaaaatcccctgtcttctcaactagttactgtctgtccac

SEQ ID NO: 1887616 - DNA, 4001 bp, Homo sapiens; identical to SEQ ID NO: 1887615

SEQ ID NO: 1887617 - DNA, 4001 bp, Homo sapiens; identical to SEQ ID NO: 1887615

SEQ ID NO: 1887618 - DNA, 4001 bp, Homo sapiens; identical to SEQ ID NO: 1887615

SEQ ID NO: 1887619 - DNA, 4001 bp, Homo sapiens
aatggagaaggaccaaagtacattatgttcaatcaccaccataaaatgcaattagaaatcattgttgaagacaggcacggtggctcacgcctcttatcccagcactttgcgaggcggaggtgggcagaccacctgaggtcaggagttcgagaccagcctggccaacatggtgaaaccctgtctctactaaaaatacaaaaattagctgggtgtagtggcgggcgcctgtaatcccagctactggggatgctgaggcaggagaattgcttgaacccgggaggcagaggtcgcagtgaggcaagatcacactactgcactacagcatgggtgacagagagagactccatctcaaaaaaaaaaaactctcaaatggtcaggcaggatggctcaagcctgtagtcccagcactttggaaggtggaggcaggaggattgcttgagtccaggagtttgagaccaacctgggcaacatagtgagaccctgtctaaatacatagagagataggcaggaaacatggtgaaactccatttctactaaaaatacaaaaaattggccaggggcagtgactcaagcctgtaatcccagcactttgggaggccgaggcaggcagatcacgagatcaggagaccgagaccaccctggctaacacagtgaaaccccgtctctactaaaaatacaaaaaaattagctgggcgtggtggcgggcacctgtagtcccagctagtcgggaggctgaggcaggagaatggcatgaatcaaggaggcggagcttgcagtgatccgagatcacaccactgcactccagcctgggcaacagagcaagactccatctcaaaaaataaaaaaaataaaaaaataaaaaaaaattagccgggcatggtggtgcacacctgtaatcccagctacttgggaggctgaggcaggagaatcacttgaacccaggaggcagaggttgcagtgagccgagattgtgccactgcactccagtttaggcaacaagagcgaaaccctgtctcaaaaaaaaaaaaagaaagaaaaaaagaaaatgcttagacatttacattgagactaagaaaaatggctccccagatcccaacccaggtctatggcaccaaacaaaatctgtgggtgggccccaacaagctgcttcagccaagcttctgggtttttgtcataaatttaagaacctctgggaatgggggcacgtgcatctgtaataccagctacttggaggctgaggcaggatgatcacttgagcccaggaggttgagactgcagtgagctatagtcgcaccattgtactcaaggctggaagacagaacccctggtccatgatatcctgggtagaaaccaggacatctactaaatagatggactggtatggggggcagaagggaaaggaaaccttcacaggaagcacttttttttttttttgagtctcgctctgtcacccaggttgcagtacagtgccattatcttggctcactgcaacctctgcctcctgggttcaagcgatgctcctgtctgcacctcccaagtagctgggattacaggcacatgccaccatgtccagctaatttttgtatttttagtagagacagggtttcaagtgcctcgcctgcctcccaaagtgctgggactacaggcgcgagccaccccacccgccttaggaagcacatactaaggagccaagttaactgcaattcctggggtctcagaacaatgttgcataacagacatttttgctttgcattagagggatttttgcctaggagagcgcttagaaaatggaatgcattcaacgtgagaaagctgattgcagtggagagaaaaagaaacaatagaaaagcaaaggccagtccactgggtgcatccatgtggtgcaatgcgatgggggactggggatgggttatgatgaggattcacaattgacatccccaaaactgggtgcactttcctttcaaaccacagaaaatgcccctcagttttgaggacctcagtctgaatgtcatgtctgacttcaaactcttcctacgtggttaactcacactagggttcgctgtcctcacactgcagatggaggacgttcacacagcactcatgcagaagctcccagccagatcttgaaaaaaaataacctcaaagaatcctcaggctgcccagggagttgctaggaaaaggcagacacaccagcatttacacaaattcagttacatcactagtggtaggtttcacataaaaacctttgatttatgagaaggctatgcacatgttacacatccagtcagaaccaatcatgcactctaatcatacactttaatttcaaatttttttttttttttgagacagagtttcactcttgttgcccaggctggagtgcagcggtgcgatctcagctcactgcaacctctgcaccccatgttcaagccattctcctcgtctactcagtctcctgagtagctgggacttcaggggcccgccactatgccaggctaatttttgtatttttagtggagatggggtttcaccatattggccaggctgctctcgaactcctgaccttgtgatccgcccgcctcagcctcccaaagtgctagaattacaggcaggagccacggcacccggccgtttttggttttaaatttctcagcattacctgtgaaagaatccaagtgtacatttccacagtcctgtctatgaacacagaagaaggagtgattggcagcaaactgatgcttcaatgccatgataggagcaagtgggcttcaaaactatcctaatacctgtcctttttttttttgagacagagtctcgctctgtcgcccagggtgaagtgcagtggcacgatctcggctcactacaagctccgcctcctgggttcatgccattctcctgcctcagcctccccagcagctgggactacaggcgcctgccaccacgcccggctaatttttttgtatttttttagtagagacggggtttcaccgtgttagccaggatgatccacccgcctcagcctcccaaagtgctgggattacaggcgtgagccaccacgcccgaccaatatctgtcttcttgatgcaaatccaagtttagcatcctcatttgggcattcatttgttaatctattctgcagtcttctgatctacctcttatgctactcttctttgcaattttactgtaaggcaagaaattcctagtcttcagtaacctggagttaagataccagtccccatcagttacaatcaaggactcacctcagcactgaaaatgcctgggtcccacacgtcacaggcaatgtgccagtatgttcttatcagactccagaaagcactcccagattgcatgtcaccaaggagacagtgatcacaagccccagggaaaacctgcaaggtagcatagaacccatgtccctccacaggcagtcctcctacagctcaacagaagacagtgttggaatgtgttgaattctgacattctgttctaccacctcacggggacagcgcctgtaaaagcctttgggagagtgtggctgggaaatgggcacattacttctcagtgcacatccagcaagtgatcctccatgtgtcaaaaaatcttatgcttgctgggcgcggtggctcacacctgtaatcccagcactttgggagactgaggtgggaggatcaactgaggtcaggagtttaagaccagcctggccagcatggtggcaccccatctccactaaaaacacaaaacataagccaggcacggctgtaatctcagctacttgggcggctgatgcaggagaattgcttgaacccgggaggcagaggttgcagtgagctgagatcactgcactgcactccaggctgggcaatagagtgggatcctgtctcaaaaaaaaaaaaagaaaaataaggccgggcgcggtggctcacgcctgtaatcccagcactttgggaatccgaggcgggcagatcacaaggtcgggagtttgagaccagcctggccaacatagt

SEQ ID NO: 1887620 - DNA, 4001 bp, Homo sapiens
attctcccctaattagaagtctcatggagagggccatgtacacaagttctcaccagctgtgtgaccttagaccttcattctcttaagagcccgttttcttatctgtgaaatggacgtaaagttccctacacagtgagaggacccatagttaaaggcattcgataaaaggtattcaccattgttataggcagcacctgcttctcaatgaagcatggattccacccctggcaacctcccaatcccacagtgagagcatcttcctaggccctcctcatgtcacggaggccatgggtctgggaggcggataaaggaagggggtcaggtgtggagatggttggatactgtgtatgaatgattgggtaaatgagtcattcaaatcatgggtgagtggatgggtgaggggtagagtgggtggagcaaacggcagacggataggttagcatttgctggatgtttgacctggtaggtgagtagctgggtagttggttaaccaggttgggtatgtctgcctagaaaaggcctggttcatagtaagaaaaaatttttttcaatgttgtgattatatatatcatatgtacatatgttgaggtctcctgagacgcctgagaactgggcagtggagaaacaataatgaactagacaggactcctggcctcatggaacttacatgttagtggagggaccaaatcaacagacaaactggtggatggatgtttggggggctgggcggaaagatgtgtgtggggatggttgggtacttgcttggttgtatggataaatgagtatttacttgggtgctggatgaatgggtgggtagatgggaagtgaatgggtgggttgagtgggtgtttgggtgaattaataggtggttggaggggtgggtggataggtgattagttcattggataggtagatgagtgattgatagattgaggaagtggatgagatagctaggtggttagatatctggatacatggtggataagacaagacaacaggccatgatgtgtgtctgatggggtagtcctggaagctgtgatcctgggaactgggtggagaaggtgacttaggactgaagacctagggcaactctagggacatggaggtgctgaagtccagtgtggatgattgggaaggagggagtgagcttgtggttggaaggtagctgatggggggcaggggacaaaaggctaaaaattggctgggtggagtcttcaatgacctatcaatgacccatcaatgacccatgggggaacttctctgcaccctccccactcttttagtgcttttagcgagcctaccattggaagtaccagtgggacgataaggagccattggggtgtgggacgacaagggtgttgtcatggtaacggggcctctccctggactcaggccgtgcgggccctttaagggtgacccgcttggccactcccaacatggcggcgcgcccgctggccgccccccccggggcggcgaggggggggggggtggggtggggggggcgccccggacctccccatcatggcggcgcggcggggctgtcgcgctgaggtcacggcggcgcgccgggggggcggggcggcggggggagcgatttaaagggacaatgtcccccgagcggtggaggcggcggcggctgcggaggccgcggcaccggcaccgggagcggcagcggcggtagcggcagcgacggccgcaccaaggaggggagctccgagccccggcacctggccggcggcgccgcctccccggtgaggcccggcccggcctggggagcccgcgggtggggcggagccgtagcggggcgggggaggccccgggccgggccgggccaggcgggaccccccggggcgggggcgggggcggggccttcaggggcggggcctggccgggggcggggccgtgcaggtggggggaggggcgggggtcttggggcaggtgtcccccctacctcggcgcgtcccgcggggtctcctgccccggggtgcacgggcggagggctcatcccccggaccctggacccccgaggagtgggcccgcgcggcgcagcccccacctctgcgacccctggggggcgtccgggtaggagccccctccccacgctgccaaagtgctccgaagttgcggtcccgcccgttccccgcgggcagtgcccacccagtggacaaccgcaggtgcttcctccgggcctgggtagggacccccaccaagactgccagcccacggaggagccccctgggaatccccaggcccccgagggcagcgcctgcaaccaggcctggcgccccggccccgccccggttgcctgggcccggcctccccaccatctccctggggagggcgcctcattcctgcccttcactttccgccgttaccttgaaggtatttataggtagagaggacaacccccgctccccagggtcctcatttctggaccaggagccctatcgttttctttcgcccgaggactagagcaatcttggttggggggtggggggaatggaggagcccaagctgggtatgcatgagggataatgttggggagaagcgaaagggttaatgctggggtcacttgaggctgtgtgtgtggaggggggtgaaggggttaatgctggagaaccctaaggtcctgtgtgggggaagggttggagtgtgggaaaagtgcagggatcattggtatgggacaacccaatggagaaaagtaaaggggtaatgatgggagactcctgacggtgtataggatcagagtgtacaagtggctgggattcttgccgaggaaacgaaggcatggcagtaggatgtgcgtgtgcatggatgtgagggcaggactggggaaagtgcagctgtgtgtgaatgaagggaggcgtctggagaaatggtaagattgatggaagaagaccaggtggctgagtgtgcatgtgtcaatatgggtaaactgaggcagtgcaggatctgtataaaggggaggagttattgatggggagacggaggcatgctgagggtaggggccattgggatagaaggtgtgtggaaaaggtctgaacaccattagctcccctgggctgggaggtaaactgaggcagtgagctgcaaagttgaggactgaggttttgagggatgggaaactgaggcagattccctttcctccatcccctaagcacttccttctctctatccccaggcccacaatgccccgctgagccggtgcagcagctgagtggatccaagcagagaaaatccgatggaggggtctctggcaggcagcctggctgcaccagatcgtccccaaggcccagagagactgcctggcccggcgccaagggagaacatcgagggtggggccgaagctgctgagggggaaggtggcatcttccggtccacccgttacctgcctgtcaccaaggagggcccccgagacattctggatggcagaggtggcatctctggtaagagaatgggccgtgtggcccccagggagcatccagcccattccccaaggctcagagagagtcaagtcacccagcgcagcagcggctgagctgggatgctgattccgcttgggtccagagccttttctttgtactctgtttagtttcttatttgacagttgtgaaaacaggtgtcctgggagccagtgaccagaccaaggctccccactgggtggtatggagctgggacttgaactcaggtcagcctggcttcctcctctgagcatactaattgggtccagaggcccatctcagcaccccagactccctgcccccagcccacttattccacaggtattccccactcccatcagtctatcccagctccctctggctgtctgggtgtatcctgttcctgaaccacgggccaaaacagcttctgtagtggctagggagaggctgggtagtcagcgatgctggctaccccttggtttacccagcaaaaaggtatctcacactctccccacctccagacgtgttattcattcattaaatactgagcaccttcggtgt

SEQ ID NO: 1887621 - DNA, 4001 bp, Homo sapiens
cctcagaaatgttggaattaaacgtttgttcattccctcagcatgttttagttagagcttatcacgtaccaggtgtggtgtgagatgtttggggttcagtggtgagccaggaacaaagtcctgctccctcagagggcaccttcaagcagtgtgggtgccagatgacagccaagtataaccagaatggggatgtgggcagctgatattggtggccctctgggcggggaggatcttgggagcaaggtgaggagtcctgtgggtggagaggagggtggcccaaactgatgctgagcgataagggacctgtggttgtcagtgctgcaggatccccctgctgctctgctggggaagggtggtgaggctgctgacaacttgggggcctccagtttgcttgtgaaatggagctcgtccaccccagcggtcctcggaggggtggtggcctgctctgtgtacagcgttgagcttggtgcttggcacaaaacttgtacgaaaggaggggacaggttgaattggcgagtagagcttggttggggtttggtggagccgaagcagagagcctttagcctggtgaaggggagggagggcctcctggggtctgctggggtggcccctcctgaggacatggccctacctgcctccacagggacgtccagatcggtgacatcgtcacagtgggcgagtgccggcctctgagcaagacagtgcgcttcaacgtgctcaaggtcaccaaggctgccggcaccaagaagcagttccagaagttctgaggctggacatcggcccgctccccacaatgaaataaagttattttctcattcccaggccagacttgggatcttccgcgcctttaccagagcattggtgggggtgggggtgtgcctcggggaattgggcagagctgctgtcagagaggctgcctgcccatgtctgtgggtgaggacagtggagcctgaactgagatgcctgccttcccctgggtctccttctttggtccttgtcaccttttcggtgtctgaataaggctgattacctggcgttgcgctgtccccccgccccctccggtctctggggaggaagtgagtgacggcggaggcccctgggtcctccaggccctggtctgtctctttcctgaccacctcgggtggggaggggaagaagctgcagcccccccctgctgtgggcatgggctcacccaggtagagtgggatgtgctgaggccctgttgtctggctgtgaagtgtaaaggtcttggctttagcctgggcctcctatccctccttacagccaaggatgggggccccatgcacgcaccacacacgcctagttgggcaccaggcctatctgcagatgaggaaactcatctgggagaggccaagccctccacctgaagtcccagtgagtagctgagttacaggtctcagattctagaaacttcctctgcgccagctgcctcaaaatcgcagtaaggaaattggtggtgtgggcaagtggcatcatgaggctcccctggagcctgttcagtggtaccggggcccaggctgctgggaaggaagtgggcaggaagcgtccggagacggcccaacacacacaggccgcagagatgggggccttgagaggaacaggacaggacacacggtggcccagggttgtggcacatggggaggaggggttttgcagagctggggagagcacagaccaccgcgagaggcaggtacaatagaaacaggtgtactttgcgcatcacacagaggtggggacgacaggcatggggtgggggcggtgaggcaggagcgcaccagaggatatgtgggacccgaaggggagagacgcataaaagccgcagcagagatgggagtacagggaggggaggtcccaatgcccgctcacctcaccccttggggcctgccggtgccggggtccccaggtccctgtcccccaggcctgtaccagggtctgagcccagcactggtacaagggttgggagacagggccatggggagaggagccgccgctgccgctgctgcctcggggacgctgcctccccgtgggcccagtccctgccttatacccaggtccagggagggcgggggttcctgccagaggaagtggggccgcatcaaagagggcaggaaggggcagggacaggttggggggacgccaccctgagtcgcagaaactgcacacccactccaccctatgctgggggcagtagagaaccagcaaggggcaaagagggagtgtggactccagagggaggggacggagacccagaggggaataggaggttgcggccccctcccctcagccgcaggtgtttccgttcgggtggggctgctgtgtttacaacaacagcccggctccccggtttcctccctgattgttggggcgtctccttggcaccccatcacgtcaggtggtgtgctgaggtcagagtgtgtgctggggaaggacctctgctgggcctgctggattgcaaagagcaagtttaaaagaccccctcggacctcttgacaggccttccacctgaagagtggggataaggaccataggttctttttatttttttatttttattttattttattttatttttgaggcagattcttgctctgtcgcccaggctggagtgcaatggcgcgatcttggttcaccgcaaccttcgcctcccaagttaaagcgaatctcctgcctctgtctcctaagtagttgggattacaggcatgcaccaccacacccagctaattttttaatttttagtagagacggggtttcaccatgttggccaggctggtcacgaactcctgacctcatgatccacccatattggcctcccaaagtgctgggattttacaggcgtgagccactgcaccctgcccacaggttatttgataacccaaggagatacagttcctaggtcagcgggttcccctgtctcccctcccacctgctctccctctcactcagccccacacccccagcacccaccagacctgctgttcctctgagcctcctcaccatctgttccctctatgtggaatactctgacctggagtttccacctggctccctccctcactctctttgtctttaattaagtgaatgaattaatttttttatttgttaattgtttatgaagagaaactatttcttagcccatatattcatgtgtcatcgttcaggaacaagtcagtgacaaacttctaggtaattcaacctgaagaaattctttatattccaagatcattgcactctgaaagataccagccttccagccaggtgcagtggctcatgcctgtaatcccagcactttgggaggccaaggtgggtggatcacgaggtcaggagttcgagactagcctgaccaagatgtgaaaccccgtctctactaaaaatacaaaaattagccaggcacagtggcaggcacctgtaatcccagctactccgaaggttgaggcaggagaatcgcttgaacccgggcagtagaggttgcagtgagctgagatcgcgccactgcactccagtctgggtgacagagtgagactccatctcaaaaaaaaaaaaaaaaagataccagccttcctcatctcaaaatctttcatggaatcgtaatttctgtagaaatctgcatatgccttctttcttggttcagccacagcaaacatatagaaagctgcagcccccagggataccatggatgcttcaacaatatgaaatcacagacgcttggccagaaggccacacatctgaggctttggcaaaactttggaagccatggtagttactgtccttgataacgtatgtcagcctcaataccaacgtccttcctgactgatggaaaaatggatggtgaaggaatgaattatgtgaagttgccacattctggctggggggaccttgacccctaggcttcaggggctcaataactggaagcagtaaagctgagccagaggccccagaggtagcagagacccgccgaggctcttttccaacttctggccctg

SEQ ID NO: 1887622 - DNA, 4001 bp, Homo sapiens
tgtgtgtccaggcgggaggttgctgatgctccagctgtctctgaaaggagtgtggtagtcccaggctcatgggctggttgcgggggtaggggggaaggatcatgccccccggcccccagctctggtctccctccaagagttttcacatcggttgtcttagtggaacccccattgaatggatgagcaaactgaggtgtgaagccacctgcccatccagttatttataaagacatgcaccaggccagggagtggtggctcatgcctgtcatcccaacagtttgggaggccaagacaggcggatcacctgaggtcaagagttcgagaccagcctggctaacatggtgaaaccctgtctctactaaaaatacacacacacacacacacacacacaaaattagctgggcatggtggcgggtgcctgtgatcccagctactcaggaggctgaggcagaagaattgcttgaacccaggaggcagaggttgcggtgagccaagatcaagccactgcactccagcctgggaaacagagtaagactctgtctcaaaacaacaacaacaaaaagcaccacatctgcctccttcttctagttactggggccccctgaggctaggtgctggggagggagccctttcctggcgggggctgcagaggggtgagaaagaaccctctggagttgggaggtgggggatagcaagttgggctgttaggaggggacccctagtacctacaggtcttcagtgtcctccccgagatgagatctcagctcagtcccaggaggggagggtgtgctcaggacttggacacagaggagagacgctgtgccgcttacacagctcatccacccatccattcatttaagaaacttttattggccaggcactgtggctcattttgagaggccgaggaggattgcttgaacctaggagttggagaccagcctgggcaacgttttgagaccctgttcctacaaaaacactttttcgaaataagctaggtgtggtggtgcgtgcccgtggttccggctactggggaggctgaggcgggaggatcaacgcttgactccagttattagaggctgcagtgagctaaggtcacaccattgcactccagcctgggtgacaagagcgagatcctgtctctaatttaaaaaacaaaactatggagcactccacggagcagaacttaccacccacatttcagaaaggggttttaggccaggcaaagtggctcatgcctgtaatcccagcactttgggaggccgaggggggaggattacttgaggtcaggagtttgagaccagcctggccaacacagtgaaatctcgtctctactaaaaatacaaaaattagcccactgtggtggcagatgcctgtaatcccagctacttgggaggctgaggccagagaatcactcaaaccctggaggcagaggttgcagtgagctgagattgggccactgcactccagcctaggcaacagagtgagactctgtcttaaaaaaaaaaaaaaaaggggattttagctgccctgccccagcctgtttacccccaaccctctaatatttagtcccaaatccagccagagcccatccagattccagacaccagctctcctctccaaagaggagtggttggggtcagggcaaaaaacaggctgagtgactgtggcggtggggggtcctgtccccagtccccattccccttaagccgtgtctggcccagccacagtgacattcatcccccggtgggtctggcctcagtcctcacaacccaccgacaacaatgaatgttgattgtgacctcggctgtggcctaggggaggggacgtgcccaggctggattgggggctccccaggcccccctagatctggaaggtcagagtcaccggcaggaggatggcaattccaggcctcagggtccactcaacggtcgatggtttgcctgagctgcccaaactcaccgacaggttgaatgttcccccaaacccttggcaaattttccgggacctggagtcgggggtggggtaggtggcagggaaccagagagcatgaagagggagaggaggagagagtaaggaaccccttttctctcatgaaataaacaaacgcttttcaggtgctgtttgcacctagatctgggaaaaacacaaggcaaatataaatgctagtaaataaaatgtagcctttgctatggggatggagatgtagcagtgcaggggagtgctggcctcaagcccgctccttaagtaattcacaaagtgatcctggaggtgcagattacccccctttgtcaactggggagactgaggccaaaggccactgctagtccgaggtggaggaggcattccaagtgttcccgggaagtctggcaacggaggatcctggccccgagggcattgatgcaacgtggagataaacaagccattttaatacaatgtaatacgttctgggagcttcactgagttccgggcacgatggtttaggaatcacaacagcgtgagtggagcgcttgggggtggggggtcgtcaggtctctccactttacaagtgcactggggccccactagacaggggagaggcaggaggttcagagagggcgccgctcgccccgcgtgcgcggtcacacagcatctgaactcgggcacttccggagggagtccgcgcagccacgtgggggctgccccttgggcctcaaaaccggctgcggcgccccctctccatttcctcatccctcaaatgacccccagtcccttcctccagtgatcgcacagagttcggcgaccacccccccgccccgggtgcccccaggcctacaggtacgcacccctatctcccaccccccgcaagccaagcagtgacgaccagggatgggcgagcgcgccttcgcccctgacctgggtctgcggacggcctaggaaggtgcacccggcatggccgggtgctgcggctcaggcctgtaattcagtattttgggaggctgaggcgggaggatcttttgagcccaggagatggagaccaacctgagcaacatagcgagatacctgtccctacaaaaaaattagctgggtgtggtgtagtgagcctgtagtcttagctacttaggaggctgagatgggaggatcgcttggaccccaagagttcgaggctcgaggctgcagtgagccgtgatcgcgccactgtattccagcctgggtcacaggacgagaccccgtcgtcgcaaaaaaataagtaatttcctggcccctggcatttcaccgaggggaatactgaggcccaaaataaccgcctggcataaccccaaggtagatgagggacccccaagtgtgccgagctgcgtgaaccacccccccaccacacccctcacggtggtggcaacggaacccggccgagcccccgaggacgcgcccccgagagccccgcccccgagagccccacccacagtctggagccaccagccaaggccccagcccaggccctgccccttagagccccgtcgcttttgacctgttccccagaacacactccctctaaaacccgcccatatagactcccacggagcccaccgccaaacccctaagccagtcctcaaagagcccagctcccttagggcccgcccccttagagccctccacaaaagcctgctctatagacgccccgggactgcgtcctgcccccacgaagcccaaccccccactaaggtccgccccgaccgggcacgcccccaaaccgaatttcgtagggcccctcaagcccgatcccggctaactcgccctcccgaagcccccctcccgcctcccggcaccttctagagccctttccccagagcccgccctctcacccgccccgggtcggggtcacgttcccacccctctgtctggagctggagtggggcgccctctctcgcagctcatccgccacgtccagcagatcctcccattcaggctgtggagtgggggggcctgatcggcttctctttatccgccacctccaccccaggtgtcca

SEQ ID NO: 1887623 - DNA, 4001 bp, Homo sapiens
gagtccttagccctccagccccactggaggatggggagaatgggttggaaaccccacccccaaagactagcagttaccagtaacttaaagaagttaacttagtaacttctttataactttttcttccttcccctgggcgggggagtggccaggtgcccctgggttctttgtgtgtgtgtgtgtccaggcgggaggttgctgatgctccagctgtctctgaaaggagtgtggtagtcccaggctcatgggctggttgcgggggtaggggggaaggatcatgccccccggcccccagctctggtctccctccaagagttttcacatcggttgtcttagtggaacccccattgaatggatgagcaaactgaggtgtgaagccacctgcccatccagttatttataaagacatgcaccaggccagggagtggtggctcatgcctgtcatcccaacagtttgggaggccaagacaggcggatcacctgaggtcaagagttcgagaccagcctggctaacatggtgaaaccctgtctctactaaaaatacacacacacacacacacacacacaaaattagctgggcatggtggcgggtgcctgtgatcccagctactcaggaggctgaggcagaagaattgcttgaacccaggaggcagaggttgcggtgagccaagatcaagccactgcactccagcctgggaaacagagtaagactctgtctcaaaacaacaacaacaaaaagcaccacatctgcctccttcttctagttactggggccccctgaggctaggtgctggggagggagccctttcctggcgggggctgcagaggggtgagaaagaaccctctggagttgggaggtgggggatagcaagttgggctgttaggaggggacccctagtacctacaggtcttcagtgtcctccccgagatgagatctcagctcagtcccaggaggggagggtgtgctcaggacttggacacagaggagagacgctgtgccgcttacacagctcatccacccatccattcatttaagaaacttttattggccaggcactgtggctcattttgagaggccgaggaggattgcttgaacctaggagttggagaccagcctgggcaacgttttgagaccctgttcctacaaaaacactttttcgaaataagctaggtgtggtggtgcgtgcccgtggttccggctactggggaggctgaggcgggaggatcaacgcttgactccagttattagaggctgcagtgagctaaggtcacaccattgcactccagcctgggtgacaagagcgagatcctgtctctaatttaaaaaacaaaactatggagcactccacggagcagaacttaccacccacatttcagaaaggggttttaggccaggcaaagtggctcatgcctgtaatcccagcactttgggaggccgaggggggaggattacttgaggtcaggagtttgagaccagcctggccaacacagtgaaatctcgtctctactaaaaatacaaaaattagcccactgtggtggcagatgcctgtaatcccagctacttgggaggctgaggccagagaatcactcaaaccctggaggcagaggttgcagtgagctgagattgggccactgcactccagcctaggcaacagagtgagactctgtcttaaaaaaaaaaaaaaaaggggattttagctgccctgccccagcctgtttacccccaaccctctaatatttagtcccaaatccagccagagcccatccagattccagacaccagctctcctctccaaagaggagtggttggggtcagggcaaaaaacaggctgagtgactgtggcggtggggggtcctgtccccagtccccattccccttaagccgtgtctggcccagccacagtgacattcatcccccggtgggtctggcctcagtcctcacaacccaccgacaacaatgaatgttgattgtgacctcggctgtggcctaggggaggggacgtgcccaggctggattgggggctccccaggcccccctagatctggaaggtcagagtcaccggcaggaggatggcaattccaggcctcagggtccactcaacggtcgatggtttgcctgagctgcccaaactcaccgacaggttgaatgttcccccaaacccttggcaaattttccgggacctggagtcgggggtggggtaggtggcagggaaccagagagcatgaagagggagaggaggagagagtaaggaaccccttttctctcatgaaataaacaaacgcttttcaggtgctgtttgcacctagatctgggaaaaacacaaggcaaatataaatgctagtaaataaaatgtagcctttgctatggggatggagatgtagcagtgcaggggagtgctggcctcaagcccgctccttaagtaattcacaaagtgatcctggaggtgcagattacccccctttgtcaactggggagactgaggccaaaggccactgctagtccgaggtggaggaggcattccaagtgttcccgggaagtctggcaacggaggatcctggccccgagggcattgatgcaacgtggagataaacaagccattttaatacaatgtaatacgttctgggagcttcactgagttccgggcacgatggtttaggaatcacaacagcgtgagtggagcgcttgggggtggggggtcgtcaggtctctccactttacaagtgcactggggccccactagacaggggagaggcaggaggttcagagagggcgccgctcgccccgcgtgcgcggtcacacagcatctgaactcgggcacttccggagggagtccgcgcagccacgtgggggctgccccttgggcctcaaaaccggctgcggcgccccctctccatttcctcatccctcaaatgacccccagtcccttcctccagtgatcgcacagagttcggcgaccacccccccgccccgggtgcccccaggcctacaggtacgcacccctatctcccaccccccgcaagccaagcagtgacgaccagggatgggcgagcgcgccttcgcccctgacctgggtctgcggacggcctaggaaggtgcacccggcatggccgggtgctgcggctcaggcctgtaattcagtattttgggaggctgaggcgggaggatcttttgagcccaggagatggagaccaacctgagcaacatagcgagatacctgtccctacaaaaaaattagctgggtgtggtgtagtgagcctgtagtcttagctacttaggaggctgagatgggaggatcgcttggaccccaagagttcgaggctcgaggctgcagtgagccgtgatcgcgccactgtattccagcctgggtcacaggacgagaccccgtcgtcgcaaaaaaataagtaatttcctggcccctggcatttcaccgaggggaatactgaggcccaaaataaccgcctggcataaccccaaggtagatgagggacccccaagtgtgccgagctgcgtgaaccacccccccaccacacccctcacggtggtggcaacggaacccggccgagcccccgaggacgcgcccccgagagccccgcccccgagagccccacccacagtctggagccaccagccaaggccccagcccaggccctgccccttagagccccgtcgcttttgacctgttccccagaacacactccctctaaaacccgcccatatagactcccacggagcccaccgccaaacccctaagccagtcctcaaagagcccagctcccttagggcccgcccccttagagccctccacaaaagcctgctctatagacgccccgggactgcgtcctgcccccacgaagcccaaccccccactaaggtccgccccgaccgggcacgcccccaaaccgaatttcgtagggcccctcaagcccgatcccggctaactcgccctcccgaagcccccctcccgcctcccggcaccttctagagccctttccccagagcc

SEQ ID NO: 1887624 - DNA, 4001 bp, Homo sapiens
gccaacgtggtgaaaccccatctctactaaaaatacgaaattagccaggtgtgatggcacagccataatcccagctactcggcagacagaggttgcagccagctgagactgggtgacaaagcgagactgtgtctcaaaaataaagaagaaaaagaaaacaactcctttacagaagaggtgggagagtcactagtcacaagaacagccctcgagggtggaagggcctggcctaaccacggtcccccaggagggccctggagagatgcagagcccagaaccgggaagggagccttgggatggagtcctctggggagggcccccacgtcctcatcccgggacctgtgcccttggccttgcccttcagcagaagcccaagaccagggtggcaggaaacccactccaggcaacctgcccccagctgctgggtcctgtcccgcaaggctcatcactttttctacttgaggtcaataaaaagtggggcctaaacacccctgggcctcccatttccaaatggggtcccgatgcaaccacagttgcccgagacgtgcgtgcactacacaatgtgtggcgtttcctggcaagggccggagcagctttccgtgtctgcactccatcctttgacgggcaacacacagcagctcccagtctctttaaccccctctcaccatctgtgtgcagtccctatctctgggcagggcagagagggaagccagctctgtgcacagggcccagctccacacagggctggggacaccacccactgtccgagaggcactagaagctgcaggatggtggcccatgatctggggctggaactgggaccccacagcaggtgtggcccagccctgggggagccagccctgggccagcttttgtgagggaaagtttcactgctctgttttctctgcgttgatgggaagagaatcagtcccggctgcagggacagtggcctccccggggcacatgcagaggcctcaccaggcaccaagaccaagaccaccacaaaatctaaaatccatacaaacatttattctgtccctgcctggaggtgagggggaagggggtccggagagccccgcagaggaggacggggctctagcgggaagacagtgtccggaggccggtgggctccctctagacggcagaccctggggctaacgaggggccagctgggttctcagaggtcacggagtgcaggggtggggcggcgagtggtggaagccggcgcccccgaagaccggccagcccctggagcacagaggcgggtccagcccacactgcgctgagtgtggccctggcccccactggggtctgtcccacccccaccccgcaggagggaaggcagcaggcccgctcttcccggtgggaaagatgctgtgcaagtcatcaggtttaaattaaaaataataaaaataacaatacaaaataaaaaaagactgtctcaaacaaacctgggacaagcccgccccgcgacccacgtgaggagcagaggtgccggccaccacccgggagggagggcctggcaggaggggcaggaggggctgcgggccgggtgggggcgggctctgtcctggtctccatcagcagcagtttctagagacgccagagggctggggggcagagggtggggaccggcggaggggtgcggcaggacgtgagcgggggtgggctgggctgggcgttctctggccgccagctcatcccgctgctctgggctgcctcggccaggtggacgggttaccggagatttattgcactgttttggaagaggcatggggctaaggaccagcgggacggcaggagaggcgggtgggaggcgggcaggcgtcatcgcttggtcttggcgtcttctcgaaccttccagatcaccaggtgcatgcaggcgccggcgtcctcgctggagctgtgcccatccactgcggggcagatgcggtgagcacccggcccctgcgcagggacggccccagggcaggcaccggcactcaccattgtcctggatgatctgtctgaggtagtcggccatgaggttccgcagggaccgcttgtaggggaggcccaggcggtgggggaagagcacagacgtgtccaccacggtgctgtggatgacctgtgggcagcggcagagatcagcgcacgtggggcctgcgcaggtcctgctggagaaccgcgcgggacccgggccggcagggcaccttcagggccaggaggtcgctctccaggctgtgtccgatgaggatggtgtcagcgctgaacatgctcagcagaacggcctggacgtcacgcagcgtgacacttgtgtcggcaaggtcagcctccgtcacccccgaaaacctgggggaacgggcaggaggggcaccagggctcagcctggaagcactggctggtggggcgggggagggtgggtccctggggagaggcggctgggagggctcccagctcgtggagggcactggccacacctggtgttgtagtccacgatctcgttgtcaggcttcacgaaggtgtcataaaccacgtgcacgtccgtgtcgaccaccgtgacgcgcgtcagctccaggccatatgtggtgtaggactgcgggcaagggatgcacctcagatgtgtcccaggcaccggcctccctccctccccttccctgcccctttgagtctccagagcccctccaggcagaggcagtgaccagagactctgtgggacttctaggagaggccgagtggggtgtgacctcagtaaccccctttcgcaaagccctcctgcctcccattcagaggcagagccggggcccagtgcccggtgtgcttggctctgctgggaagtatggggtgttggtccagggcaggagccacaggcaccggtgctgcgagagaaaccctgagcgctggccggtgagccaggcccagatggggccagatggggcggccgcaccaggccaggtcctccccaatcctgaacccgacgctgggcagagaacagcctcaccatctcgcagtccagggcgtagatccccgggtgggtgtctcctgagagctctttctcaaaggtcttcacgaagccctcaaggcgctccttccggccatcctgcacgtgttgctgggggtggagaaggcaggtgagggcagcttcggggtgcagtgggggcgggggtggcagcagcagcacatctctgagcccttcgggaccatcctatccatccatcacgcccattcactggttgggaccctggtgagcaggtggggaagggggcttgccaagaagacacagggaggacggcttcccaggatgggaagtggccagggacagggcctggggcctacgggtgctacgttctctgggtaacacaagaaaggctgcccgggggcccagaccctgagcccaggactgtgctgtgtcccgagaccccacaccaacgatggggaggcagaagtctgttgagaacaggcagaggggactgggacgccagggctcacctttgcgacttggcagccgacagagccggcggcagccgagcagcacatgtactgggtctcccagcctccggccactgcaggggacacagacacacagtcagggcccggccaggcccactccacagcccccggggcactgaccacctgcatctaccgagccctactagggagtgaggactgaggacaggaggcctcagcctcttggtggagctggaagcagaccaggccccggcagtcgtgtggcagccaggacgcccaggcctggatccagggagaccagtgccctctgcagaggcctcttggcagcgctgccccgggcagcaccctccaggtatccctgaggcgatggctttaggggccgccacagggctgtgcaaggctggccatgtgccctgagcgtggctgcgtggttgcctgggggattgaatagaaccaccaggccaagggtgggacaagcccctccgctcctggggccagcaacctccacatttccatggaccaagggcacaggaaggcagggacacagggccttt

SEQ ID NO: 1887625 - DNA, 4001 bp, Homo sapiens
agcccaggactgtgcctggctcactgcatgtgtcccaggttttgtcctggtaactaccagcatcaagtcctcccagctcctctctgtaggagggaacctacccacctacccccagtgcacagaggaggagctggaggctgtgtcaggtgcagggccagctggccagtccccatggtccctgggatggcacagccaccaactcagtccaggcaacctcagtggagaggctggggttgcctgaggcccctggagccgccctgcctggctctcttccccttgggtttgggggaatgctctgtaggagtgccccccactggggacttgctggcacccaacccagccccaggataggcaggactgggcttggaagtcccagacttagagagaaggcaggctggggggccccggctggccccagggagaagcaaagagaggcgggcctcttggctatggacccctgctctgtgctgggctcattggctaagagagcccactgaggccacacctgaggagaaccctactccccgtgaggaaaccctcacgcttgctattcgggtggctctgtggtcacccccatctaaggctctgagcggtgacttgccccacatcatggagcgggggagggtccccctggggtggaggcttccccagtgcacgtctgcgggcccatgctccctgacctgagggacaccccagcccgacatccgaacacctccgctgcagcccaggcctgatgtccccttgactgaggacattgggggtgaaaggatcatcccgctccacatgaggccagacgctcatctctggaatgttcctgaaacctcaggagccctgaggcttctgcgggactctggggcgctgtttctaaacccagggtggtggagtctgctgagccaccatacaagcatttctggggtccctgtggaagcttccagaacctcagatccagcgaacctcatggggttgggatgtgggaggagtgtggagccaggcgtggtctgcagccttctccccgcctcaggcacctctaggaactcacgtgtccagatcggatggctcctcaaaatggctggggtggggtagggtgccctttctctttttctcccctctttccgccttgcagtgagaaaccagcctgcgctgtggtgtgtgggctgtcaggccggctgagagctggtgccctgcctttcagttcagggctgtggggaccttccagggtcccctgggtgggaatgccaggcctggggcagcgagccttggaggagcctctgggcctgaacctcagcctggcagctctctgcctggcagcattgcaagtctagttttcagatctcctcttccttcacgtgaggggcccttcgtgtttttctcatctgagagttgaaagccagagcccccgaccctcccgtggagccccacactggagtctggagcagcagtgggagaagggccgggcgccggccgtaatgagaaacagccgacctgtgaaaggggccctgtgtgagccccagacacaaagcaggctccattcaggagggggcagccatggaacctgacccccgccaccacccaagttaggatcccagcagggacccttggagtcacacacgtggcagccacccctgaggaggaggccaccctcttagatgcctcagtgagacacaagacatcaatatctctttatttaaaaaataaacaagacatttacagccatggggtggggatggcagactgatagggccagggcctccaacccctcggccggcctcggggctccctctgcctttccccagtgcctcttctcccacccaggccctcgaatcttctatgcgaggctctgccacagtgggaaacggggtggtggaaaatgacactcacctgccggcgagtttggggggcctgtctcgacgagccgctcacccaagcccagcctaaccaatgtgcagactactgtacacattgagagcctcctgaacaggtagtctgaacactgggttggcggggccggctatccatcctgcagaaccccccaggcagacgctggggccaccaggccaggccgtgcctcagcacctctgagcagccaaggaaaccaccactcttcccgagacgatccgctctgtcccttctgacgtggcaaggctggggccggctcgcatctggagaaagttctgggttttcaggaaatcctaaagagtgggggaggcggagcaggaggcagggtttgggatcgtggcttctgggctcaggaggaatgtctgactctttgggggtcgggggtggggaggaggggcgcacacacacgtgtgtgtgtgtgtgtgcgcgcgcgcgcacgcgtgcgtgccggcagcaccaggaaggcggccactgatttctcggcggaatcgcactgtaaacagttccagatgtggcattagctggaatggcctgtgactcagttacttggccctgctggctggaagcttccggccgcgtgatatgatagggtcagggcagcaaaggcccttgggcaaacgtccgagccgggggcagggcttctgcagagccccctcccctagccccttctaaagcccccaaaactcttccccgaaaggtgggagggacccaggccctgtgttacccagccttgcctgggatgacgggtgcaggctttcttcatcaccttccctcccttgggtccgcagcggcatccctccctccatggccaccgggcccctctcctatgctctgctccctccatggccaccgggcccctctcctatgctctgctccctccatggccaccgggcccctcttcctatgctctgccctacttctttgcctagagcctggcaggctaatcctggagccgctcacaagagcaaccaaagaaaatcccgggtgctcatgggcaccagctctgcagtgggcaccaagctcctccatcctccttggatagatgaggaaactgagatgaaatgggaggtggcggggaagtggcttgcccgagggcacacggccaggaaagggcagggctggcatcacctcaaccatgctgagctcctaacgccctgaggctgagcccatgtgccaagcccactgcttcatcctggctccccttgcaaagtcctgacagtcccagctggcccccacttgccagggagcccccgctgccttctccacagtcactgtggctgctcctgaacttggaggcggcagccaggttaggctttgtgctggggcagcgcagtgaggggacatgagaggagtttccagagacggcccagggagaagaagggccaggggcactgtggggaggactgggctttgggtcacagagacctggcctctgaagtcctgctgtggcttgcgctgcctgccgtgtggccttcggcagccagcttccctctctgagctaggagggatccgtgaactgagaccaagcagtgcatggcatgggtccccaagagctgctgctgtggcgggtgggcacacacatcactgggtgagtgtgggactccagggtgccacccccagctccgtgactcgccagccccttgcccctggccgaggggcccacctctgagctgcctccctagcagtctggacagccgtggctggcacttggtgcttcctgaacagggccaaccttagaaagcaagtgatagggcaggtgcggtggtgcacacctgtaatcccagcactctgggaggctcgcttgaacccaggagtttaagaccagcctgggcaacatagcgagaccccatctctattaaaataatgataatgataataataaagaaagggagtaaggcttctgcagcacctggcccaggacctatccagccccaagatgtcctaaagcggccaaggttgaaatcccagccctgctcctctctgcctcagtcttcccctctgtaaaatggcatcacagaggtaactcactcctaggctcgtttcaaagatggagcccagataaaagttccattcacttcgtgcaaggcgaggggcagttgtgttgt

SEQ ID NO: 1887626 - DNA, 4001 bp, Homo sapiens
ttcagtgtgcctcctcagtcccacccagaaaaaagcctcctcccatctgatttcaagatagtggagaaaagccaggcacggtggctcacacctgagccacctgtaattccggcgcattgggagactaaggtgggaggatggcttgtggccaggagttcgagaacagcctgggcaacatagtgagacctgcccccccatctctacaaaaattaaaattaaaaaaattagccaggtgtggtggcgcatacctgtagtcccagctctactggggaggctaaggcaggaggatcacttgtgcccaggaattcaaggttgcaatgagccatgatcacaccagcctggccaagatggtgaaaccccgtctctactaaaaatacaaagattagccgggcatggtggtgggtgcctgtaagcccagctactcaggaggctgaggcaggagaatcgcttgaacccaggaggcagaggttgcagtgagccaagatcacaccactgcacttcagcctgggcaacagagtgagactccgtctcaaaaacaaacaataaaaggccaggcacggtggctcacagctgtaatcccagcactttgggaggctaagacgagcagattgcttgaggtcaggagttcaagaccagtctgggtaacatggcgaaaccccgtctctacaaaacataaaaaaaaattggccgggcgcagtggctcatgcctgtaatcccaacactttgggtggctgaggcgggcagatcacctgaggtcaagagttcgagaccagcctggccaacatggcgaaactcggtctctactaaaaatacaaaaattagccaggtgcggtggtgtgcacctgtaatcccagctacttgggaggctgaggcaggagaatcgtgtgaactggggaggtggaggttgcagtgagccgagatcgagccattgcactccagcccgggtgacagtgcgagactccatctcaaaaaaaaaaaaacaaaaaaaaaaaaacagagtcctaactcttccctgccctgagaaccccctcaaggcagggaggatcagctattcccagcgcctcaggactaagcacacctgcttgtgtcccttctgggtccacaaggaacttgttccatgccccacatgtggggcgggtgtcactgctcctcccggcaagttagaaagctgcagggcccagcaagaaggggccaggtcaggtcaacccagcctgataccggaagccaggagttggcatttaacggtctggaggcccaaggcagcttcctcttgggtaactggctgctaggaaggtgcgggccgggccagtgcccctgccaggcttgggagaggaggggccaagcctccaggcccggaaaggacacagctggcttcccttttaatggaagggccacccactcacccacctatctatgctggcaccacagcccagcctgagctgtggccatgcaggggtccccagttgcagagttggggatcagggcctgcagcacacatttgggcccagccaaccccacccaccacatccctcctccagacacaggtctgattctgagtcctcatctctgctccaagcatcagcccacccagggaaggcaggggctgcaggctccaagggggcttgacccctgttcctgctgaactgagccagtgtacacaaaccaactgtgtttcagctcagtaggcacgggaggcagagcccagggaggccaggcagcaggatggcaggcagacaggcggcagcaggggacaggcggcaaggccagaggaggtgagggcctggggggcggaacttagccactgtgaacacgacttggtgtggaccctgctcacaagcagctaagccctgctcctcaggccaggcacaggcttcggggcctctctgccaccccgtccccgggcagcatcctcggtggcagagctcagggtcggttggaaatccctggcaatgtgatttgtgacaggaagcaaatcccatccccaggaaccccagccggccgtggcacaggggtgaggggggcaccgggcggggccagaggctggcacctggaggggagaaagagagagagagcaaaggaggtaatgagatttggggacacctcccctccaggtccccagatgcttcctttgatcacagggaagctcttttctcatatgcaggagccaccacacggggagctggagcctagctgtgccctccgttccagccccaggactggagaggcagagatacctagagggcccatgcgggacaaggaggctacagcaacttgcatggccaagctcccccctcattgagccctgggcaggccaaatggggccatggggagaggaagccaaggggggccaggcaggcgggtgaggaagtgatctcaccccagctggcgccacttcctagaagcctggagggcaggaggaaaccaccagggcctccccccccgtggcccggtctcctcagtggccagggcttagcccacacccaccagggcggatgccggcagcaaggcacccccctctctttctagacacgcaccccccgccccccagagcacaggatccaagctccaagatacaggcctctccacccaaacagcccaaggttcaaatccttgctccacagtttcccaaagactctccaaagcttcagtttccccatctgtaaaatggagccaagagcctcttttgcatagcccagtgagatgtcaccgagtatgtatgtcactcagtaagtgcccagcaccagggcaagatacaggattttcaggacccggtgcaaaatgaacacgtggtcctctagttcgaaaactaagaatttcaggccaagcatggcggctcacgcctgtaatcccagcactttgggaggccgaggcaggagagtcacctgaggccaggagttcaagaccagcctgcgcaatacgacaataccccatctctacaaaaaaaaaaaatattttttcttttttgagacagggtctcactctgtcgccacggctagagtgcaggggtgcaatcacagctcactgcagcctcagcctcccaggttcaagtgatcctcccaccttagcctccggggtagctgggactacagctatgcaccaccatgcccggctaattttttctttttcttttctttttttttttttttgagacagagtctcgccctgtcgcccaggctggagtgcaatggcgtgatctcggttcactgcaacctccacctccagagttcaagcaattctcctgcttcagcctcccgagtagctgggattacaggtgcccgccaccacgcccagttaagttttgtatttttagtagagacggggtttcaccatgttggccaggctggtctcgacctcctgacctcaggtgatccgcccacctcggctttccaaagtgctgggattacaggcgtgagccaccacacctggccctaatttttgtagagatggggttttgccatgttgcccagactggtctccaactcctgggctcaagcaatccgcctgcctcagcctcccaaagtgctgggcttacaggcctgagccacagtgtctggcccacaaaaaattcactaaaaaatcagccaggagtggtggtacacatctgtagccccagctactcaggcggctgaggtgggaggactgcttgagcccaggagtttgaggctgccgtgatctatgaccatgccactgaactccagcctaagtgacagagcaagaccctatctctaaaataaacaaaaacaagtttaaaaaaagaaaataatttcaggctgagcgcggtggctcatccctataatcccggcacttcgggaggccaagacaggaagatcgcttggggccaggagttcgagaccagcctgggcaatacaagacaaaaaaattaataataataaaaaaaaattcatgaccccagcagtgcaacattaaactaacctccaggtccctccaagcagggctgccgtgagactgcccgtttcacaaatgcatgaagccagccctaa

SEQ ID NO: 1887627 - DNA, 4001 bp, Homo sapiens
cctttccaagcacaggataccctgctgcacagagcaggtggggcagggatgggcaggcaggagcccggagtgccaggatggtaaattcaggccaatcaaaagctgaaactccagcgatgggaggcaggagtgaatcacagaccagaccttcaggaatgaagtcagggcaacttttatttacttgaacaacagacatgacacacagcacgatctctcctctccatcccatcccaagcttctgtccacgactacccagggtggggaaaaaggcaatggcccagccccgatgacctgggggacttcagtgtgcctcctcagtcccacccagaaaaaagcctcctcccatctgatttcaagatagtggagaaaagccaggcacggtggctcacacctgagccacctgtaattccggcgcattgggagactaaggtgggaggatggcttgtggccaggagttcgagaacagcctgggcaacatagtgagacctgcccccccatctctacaaaaattaaaattaaaaaaattagccaggtgtggtggcgcatacctgtagtcccagctctactggggaggctaaggcaggaggatcacttgtgcccaggaattcaaggttgcaatgagccatgatcacaccagcctggccaagatggtgaaaccccgtctctactaaaaatacaaagattagccgggcatggtggtgggtgcctgtaagcccagctactcaggaggctgaggcaggagaatcgcttgaacccaggaggcagaggttgcagtgagccaagatcacaccactgcacttcagcctgggcaacagagtgagactccgtctcaaaaacaaacaataaaaggccaggcacggtggctcacagctgtaatcccagcactttgggaggctaagacgagcagattgcttgaggtcaggagttcaagaccagtctgggtaacatggcgaaaccccgtctctacaaaacataaaaaaaaattggccgggcgcagtggctcatgcctgtaatcccaacactttgggtggctgaggcgggcagatcacctgaggtcaagagttcgagaccagcctggccaacatggcgaaactcggtctctactaaaaatacaaaaattagccaggtgcggtggtgtgcacctgtaatcccagctacttgggaggctgaggcaggagaatcgtgtgaactggggaggtggaggttgcagtgagccgagatcgagccattgcactccagcccgggtgacagtgcgagactccatctcaaaaaaaaaaaaacaaaaaaaaaaaaacagagtcctaactcttccctgccctgagaaccccctcaaggcagggaggatcagctattcccagcgcctcaggactaagcacacctgcttgtgtcccttctgggtccacaaggaacttgttccatgccccacatgtggggcgggtgtcactgctcctcccggcaagttagaaagctgcagggcccagcaagaaggggccaggtcaggtcaacccagcctgataccggaagccaggagttggcatttaacggtctggaggcccaaggcagcttcctcttgggtaactggctgctaggaaggtgcgggccgggccagtgcccctgccaggcttgggagaggaggggccaagcctccaggcccggaaaggacacagctggcttcccttttaatggaagggccacccactcacccacctatctatgctggcaccacagcccagcctgagctgtggccatgcaggggtccccagttgcagagttggggatcagggcctgcagcacacatttgggcccagccaaccccacccaccacatccctcctccagacacaggtctgattctgagtcctcatctctgctccaagcatcagcccacccagggaaggcaggggctgcaggctccaagggggcttgacccctgttcctgctgaactgagccagtgtacacaaaccaactgtgtttcagctcagtaggcacgggaggcagagcccagggaggccaggcagcaggatggcaggcagacaggcggcagcaggggacaggcggcaaggccagaggaggtgagggcctggggggcggaacttagccactgtgaacacgacttggtgtggaccctgctcacaagcagctaagccctgctcctcaggccaggcacaggcttcggggcctctctgccaccccgtccccgggcagcatcctcggtggcagagctcagggtcggttggaaatccctggcaatgtgatttgtgacaggaagcaaatcccatccccaggaaccccagccggccgtggcacaggggtgaggggggcaccgggcggggccagaggctggcacctggaggggagaaagagagagagagcaaaggaggtaatgagatttggggacacctcccctccaggtccccagatgcttcctttgatcacagggaagctcttttctcatatgcaggagccaccacacggggagctggagcctagctgtgccctccgttccagccccaggactggagaggcagagatacctagagggcccatgcgggacaaggaggctacagcaacttgcatggccaagctcccccctcattgagccctgggcaggccaaatggggccatggggagaggaagccaaggggggccaggcaggcgggtgaggaagtgatctcaccccagctggcgccacttcctagaagcctggagggcaggaggaaaccaccagggcctccccccccgtggcccggtctcctcagtggccagggcttagcccacacccaccagggcggatgccggcagcaaggcacccccctctctttctagacacgcaccccccgccccccagagcacaggatccaagctccaagatacaggcctctccacccaaacagcccaaggttcaaatccttgctccacagtttcccaaagactctccaaagcttcagtttccccatctgtaaaatggagccaagagcctcttttgcatagcccagtgagatgtcaccgagtatgtatgtcactcagtaagtgcccagcaccagggcaagatacaggattttcaggacccggtgcaaaatgaacacgtggtcctctagttcgaaaactaagaatttcaggccaagcatggcggctcacgcctgtaatcccagcactttgggaggccgaggcaggagagtcacctgaggccaggagttcaagaccagcctgcgcaatacgacaataccccatctctacaaaaaaaaaaaatattttttcttttttgagacagggtctcactctgtcgccacggctagagtgcaggggtgcaatcacagctcactgcagcctcagcctcccaggttcaagtgatcctcccaccttagcctccggggtagctgggactacagctatgcaccaccatgcccggctaattttttctttttcttttctttttttttttttttgagacagagtctcgccctgtcgcccaggctggagtgcaatggcgtgatctcggttcactgcaacctccacctccagagttcaagcaattctcctgcttcagcctcccgagtagctgggattacaggtgcccgccaccacgcccagttaagttttgtatttttagtagagacggggtttcaccatgttggccaggctggtctcgacctcctgacctcaggtgatccgcccacctcggctttccaaagtgctgggattacaggcgtgagccaccacacctggccctaatttttgtagagatggggttttgccatgttgcccagactggtctccaactcctgggctcaagcaatccgcctgcctcagcctcccaaagtgctgggcttacaggcctgagccacagtgtctggcccacaaaaaattcactaaaaaatcagccaggagtggtggtacacatctgtagccccagctactcaggcggctgaggtgggaggactgcttgagcccaggagtttgaggctgccgtgatctatgaccatgccactgaactccagcct

SEQ ID NO: 1887628 - DNA, 4001 bp, Homo sapiens
aagtcagggcaacttttatttacttgaacaacagacatgacacacagcacgatctctcctctccatcccatcccaagcttctgtccacgactacccagggtggggaaaaaggcaatggcccagccccgatgacctgggggacttcagtgtgcctcctcagtcccacccagaaaaaagcctcctcccatctgatttcaagatagtggagaaaagccaggcacggtggctcacacctgagccacctgtaattccggcgcattgggagactaaggtgggaggatggcttgtggccaggagttcgagaacagcctgggcaacatagtgagacctgcccccccatctctacaaaaattaaaattaaaaaaattagccaggtgtggtggcgcatacctgtagtcccagctctactggggaggctaaggcaggaggatcacttgtgcccaggaattcaaggttgcaatgagccatgatcacaccagcctggccaagatggtgaaaccccgtctctactaaaaatacaaagattagccgggcatggtggtgggtgcctgtaagcccagctactcaggaggctgaggcaggagaatcgcttgaacccaggaggcagaggttgcagtgagccaagatcacaccactgcacttcagcctgggcaacagagtgagactccgtctcaaaaacaaacaataaaaggccaggcacggtggctcacagctgtaatcccagcactttgggaggctaagacgagcagattgcttgaggtcaggagttcaagaccagtctgggtaacatggcgaaaccccgtctctacaaaacataaaaaaaaattggccgggcgcagtggctcatgcctgtaatcccaacactttgggtggctgaggcgggcagatcacctgaggtcaagagttcgagaccagcctggccaacatggcgaaactcggtctctactaaaaatacaaaaattagccaggtgcggtggtgtgcacctgtaatcccagctacttgggaggctgaggcaggagaatcgtgtgaactggggaggtggaggttgcagtgagccgagatcgagccattgcactccagcccgggtgacagtgcgagactccatctcaaaaaaaaaaaaacaaaaaaaaaaaaacagagtcctaactcttccctgccctgagaaccccctcaaggcagggaggatcagctattcccagcgcctcaggactaagcacacctgcttgtgtcccttctgggtccacaaggaacttgttccatgccccacatgtggggcgggtgtcactgctcctcccggcaagttagaaagctgcagggcccagcaagaaggggccaggtcaggtcaacccagcctgataccggaagccaggagttggcatttaacggtctggaggcccaaggcagcttcctcttgggtaactggctgctaggaaggtgcgggccgggccagtgcccctgccaggcttgggagaggaggggccaagcctccaggcccggaaaggacacagctggcttcccttttaatggaagggccacccactcacccacctatctatgctggcaccacagcccagcctgagctgtggccatgcaggggtccccagttgcagagttggggatcagggcctgcagcacacatttgggcccagccaaccccacccaccacatccctcctccagacacaggtctgattctgagtcctcatctctgctccaagcatcagcccacccagggaaggcaggggctgcaggctccaagggggcttgacccctgttcctgctgaactgagccagtgtacacaaaccaactgtgtttcagctcagtaggcacgggaggcagagcccagggaggccaggcagcaggatggcaggcagacaggcggcagcaggggacaggcggcaaggccagaggaggtgagggcctggggggcggaacttagccactgtgaacacgacttggtgtggaccctgctcacaagcagctaagccctgctcctcaggccaggcacaggcttcggggcctctctgccaccccgtccccgggcagcatcctcggtggcagagctcagggtcggttggaaatccctggcaatgtgatttgtgacaggaagcaaatcccatccccaggaaccccagccggccgtggcacaggggtgaggggggcaccgggcggggccagaggctggcacctggaggggagaaagagagagagagcaaaggaggtaatgagatttggggacacctcccctccaggtccccagatgcttcctttgatcacagggaagctcttttctcatatgcaggagccaccacacggggagctggagcctagctgtgccctccgttccagccccaggactggagaggcagagatacctagagggcccatgcgggacaaggaggctacagcaacttgcatggccaagctcccccctcattgagccctgggcaggccaaatggggccatggggagaggaagccaaggggggccaggcaggcgggtgaggaagtgatctcaccccagctggcgccacttcctagaagcctggagggcaggaggaaaccaccagggcctccccccccgtggcccggtctcctcagtggccagggcttagcccacacccaccagggcggatgccggcagcaaggcacccccctctctttctagacacgcaccccccgccccccagagcacaggatccaagctccaagatacaggcctctccacccaaacagcccaaggttcaaatccttgctccacagtttcccaaagactctccaaagcttcagtttccccatctgtaaaatggagccaagagcctcttttgcatagcccagtgagatgtcaccgagtatgtatgtcactcagtaagtgcccagcaccagggcaagatacaggattttcaggacccggtgcaaaatgaacacgtggtcctctagttcgaaaactaagaatttcaggccaagcatggcggctcacgcctgtaatcccagcactttgggaggccgaggcaggagagtcacctgaggccaggagttcaagaccagcctgcgcaatacgacaataccccatctctacaaaaaaaaaaaatattttttcttttttgagacagggtctcactctgtcgccacggctagagtgcaggggtgcaatcacagctcactgcagcctcagcctcccaggttcaagtgatcctcccaccttagcctccggggtagctgggactacagctatgcaccaccatgcccggctaattttttctttttcttttctttttttttttttttgagacagagtctcgccctgtcgcccaggctggagtgcaatggcgtgatctcggttcactgcaacctccacctccagagttcaagcaattctcctgcttcagcctcccgagtagctgggattacaggtgcccgccaccacgcccagttaagttttgtatttttagtagagacggggtttcaccatgttggccaggctggtctcgacctcctgacctcaggtgatccgcccacctcggctttccaaagtgctgggattacaggcgtgagccaccacacctggccctaatttttgtagagatggggttttgccatgttgcccagactggtctccaactcctgggctcaagcaatccgcctgcctcagcctcccaaagtgctgggcttacaggcctgagccacagtgtctggcccacaaaaaattcactaaaaaatcagccaggagtggtggtacacatctgtagccccagctactcaggcggctgaggtgggaggactgcttgagcccaggagtttgaggctgccgtgatctatgaccatgccactgaactccagcctaagtgacagagcaagaccctatctctaaaataaacaaaaacaagtttaaaaaaagaaaataatttcaggctgagcgcggtggctcatccctataatcccggcacttcgggaggccaagacaggaagatcgcttggggccaggagttcgagaccagcct

SEQ ID NO: 1887629 - DNA, 4001 bp, Homo sapiens
cactggggcctgtcggtgaacatccacaccggggcctgtgccagcctgtgggcaccgcagccactgccacctcggtgaacatccacaccggggcctgtgccagcctgtgggcaccacggctgggagcccacccccgccacctcggtgaacatccacaccggggcctgtgccagcctgtgggcactgcagatgggagcccgcctgagcgccccctccctgtgggcaccgaggcctgagcgccccctccctgttggcagatcatggtggccgagggcatgttgtactgtctgcagtcccggctgtggggccgtgccggggggcccgccggggcggagggcagcatcaacgccggcggctgcaacttcaactccttcctgcggcgtacggtgcggtttgtgggtgagttgcgggacgcgccccgaccctgagctacctccacatgcagggggtggggctgtcccgggtccccagctccccgcctggccgagccttccgccctgcaggtgtccacgtgttcggcctgtgtgccacagccctggtgacggacgtgatccagctggccacgggttaccacactcccttcttcctcaccgtctgcaagcccaactacactctcctgggcacgtcctgcgaggtcaacccctacatcacgcaggacatctgctccggccacgacatccacgccatcctgtctgcacggtgagccggacccccaactcccctgactgggagccttcttccgccccggtgaacatgcggggaaacagagacacagagaggccactggagctggggtccccaggtgggcggggctcacgctggacgcctcttacaggaagaccttcccgtcccagcacgccacgctgtcagccttcgccgcggtctatgtgtcggtgagtccggcccctcactgcccttcccaggccctcttgctgacccgtggggagccctccctgaccccaacccccatgccccagatgtacttcaactcggtcatctcggacaccaccaagctgctgaagcccatcctggtcttcgcctttgccatcgccgcgggcgtatgcgggctcacgcagatcacgcagtaccgcagccaccctgtggacgtgtatgccggcttcctcatcggggcgggcatcgctgcctacctggtgagtggcaggttctgatgggggtcggcatgggttcccaggggatctgaggggggaggcatgagtgcccacagggcctgagtggggaggctggcccaggggtctgaggtgggaggcaggctcagggggtctgacaggggaggctggtagcctgaggggtgaggcatggttcccaggggttctggcggggggctggcccagagggtctgaggggggaggcatgggtgcccaggggctctaggggggaggcacgggtgcccagggtgtctgaggggatagacgtgggtcccgaaggggtcttagggggaaggcatgggtgctgaagtgtctcgcccttggaatgctggagtcagaatcccgtgggctcagacctgcccgatgtgctgggtcagcaaccttggggtgggaaccggtcccactggacaagagcttgccagcccccacccccggtccagagccccccgcggcaagtccaacgatcacaggggaggagccctctgagccccaggcctcacccccagacccctctccccgacaggcctgccacgcggtgggcaacttccaggccccacctgcagagaagcccgcggccccggcccccgccaaggacgcgctgcgggccctgacgcagcggggccacgactcggtttatcagcagaataagtcggtgagcaccgacgagctggggcccccagggcggctggagggcgcgccccggcccgtggcccgcgagaagacctcgctgggcagcctgaagcgcgccagcgtggacgtggacctgctggccccgcgcagccccatggccaaggagaacatggtgaccttcagccacacgctgcccagggccagcgcgccctcgctggacgaccccgcgcgccgccacatgaccatccacgtgccgctggacgcctcgcgctccaagcagctcatcagcgagtggaagcagaagagcctggagggccgcggcctggggctgcccgacgacgccagccccgggcacctgcgcgcgcccgccgaacccatggcggaggaggaggaagaggaggaggacgaagaggaagaggaggaggaggaagaggaggaggacgagggcccggccccgccctcgctctaccccaccgtgcaggcgcggccggggctggggcctcgggtcatcctcccaccgcgcgcggggccgccgccgctggtgcacatcccggaggagggcgcgcagacgggggccggcctgtcccccaaaagcggcgccggggtgcgcgccaagtggctcatgatggccgagaagagcggggcggcagtggccaaccctccgcggctgctgcaggtcatcgccatgtccaaggctccgggcgcgccgggccccaaggcggccgagacggcgtcgtcgtccagcgccagctccgactcctcgcagtaccggtcgccgtcggaccgcgactccgccagcatcgtgaccatcgacgcgcacgcgccgcaccaccccgtggtgcacctgtcggccggcggcgcgccctgggagtggaaggcggcgggcggcggggccaaggcggaggccgacggcggctacgagctgggggacctggcgcgcggcttccgcggcggggccaagcccccgggcgtgtcccccggctcgtcggtcagcgacgtggaccaggaggagccgcggttcggggccgtggccaccgtcaacctggccacgggcgaggggctgcccccgctgggcgcggccgatggggcgctgggcccgggcagccgggagtccacgctgcggcgccacgcgggcggcctggggctggcggagcgcgaggcggaggcggaggccgagggctacttccgcaagatgcaggcgcgccgcttccccgactagcgcggcggggccgggggcgggcggggggcgggccgagggcgcgggcggccgcgcggatgctcaataaagcggcagaaaccgaggtccggctcttggtcattcgctctggcccgcacgccccacgcagggacccccactctcagggccgggcccaccccgcccgtggccccacctggcgcttcggcggacacccgggcgggagtcggggccgcccgcggcacagaaagaggaagccagcaacgaaggcggaacggagcgaggatacagaagatttattcgaagtccaggtacagactggccaacctgcctctacagcgtccacagcgaacacagggctagacaagggaggagtttctcaaacggttttaatcggttctctccgcgtcacaagccatcgggtaaggcaacggaatgtgcgtggggtcccctgtggctccgcggtcacaatactgagcctggaattgctgttagcaaaatatacatttgtgtcaccataaaaaaccgcgccgccgcccctcgggtctcacaacaggtataaaaaattataaatatttacacccttgttacacgcttttacggaaaggggatcctaggagagcccccgggacaggacgcgggggcggtagaaagagcacagagaagacaggaggagcgcccgccttccgggtcccagcatcagaggcaggcaaaacacagaaatgagactttggtccaaaatttgaaggaagaaaaaaccctgaagtttgagagcaagttttctaggcgactgcaggtgaaggcgtggtgtaaggcaaccggaggcgatgccagaggcggcgacacgcccgccccttccctgaagctcaggggctctaagataggaccggggctccctgtgcctgacccactgggcggccccgcctgctctctggaaactgggtcctgcctgtgacttaattacaaggaataaaataaaagtaacagcatacaaggtaataccacaagga

SEQ ID NO: 1887630 - DNA, 4001 bp, Homo sapiens
acctggctaatttttttttcttttcttttttcttttttttttttgagacggagtctcgctctgttgcccaggctggagtgtagtggtgtgatctcggctcactgcaagctctgcctcccgggttcatgccattctcctgcctcagcctcccgagtagctggggactacaggcgcccgccaccatgcccggctaatttttttttttatttttcagtagagacagggtttcaccgtgttaaccaggatggtcttgatctcctgacctcgtgatcagcctgccttggcctcctaaagtgctgggatgacaggcgtgagcctctgcgcccagcctaatttttattttcaatagagatggggtttcaccatgatggtcaggctggtctcaaactcctgacctcaaatgcctgcctcagacttccaaagtgctgggattacaggcaggagtcaccgcgtgtggccgacaggccacctctcttggtgatgaggacagcctcccttatggccttcatgccccagttgggggcagagccaggtgagtaaggaggatagaaaaggagtaacgcatgcccactggccaggcagacaaactgaggctagagaccacccacacaagcaaccttttgttgcattcacctttattttttatttttttttgagactggagtctcactctgtctcccaggctggagtgcagtggcacaatctcagctcactgcaacctctgcctcccgggttcaagcgattctcatgtctcagcctcctgagtagctgggattacaggtgcacaccaccacacccggttaattttcgtatttttttttttttttgtatttttgtatttcggccagtctggtcttgaactgctgacctcaagtgatctgcctgcctcggcctcccaaagtgctgggattacaggcatgagccaccacacccagccccgcattcacctttaatactgagcatccattctatgcgaggccctgtcagcaggctcagcataggcaatgtccctgaccttcagggactatggtccactccatcattctggcagattcagaggctacaataaaggagtaaagtctgagggtggggcacttcctgaagacacatctttgcactgggggaagggagtaccaagcagagagcatagcacgtgcaaaggcccagaggtacgattagtcctgcaactgggaggccaaggatcagagagagtgaggggaaggaggtcagggaaaggagggtgtgggctccattcagacagaggtggggagctggaggggtgcatgcagaggctgtaggtcagatccagatgtcctaaggatcccttgtgagtattggtggggtgggtccatctctcctccctcacacccccttcccagccagtcttaatagtggctcattaagccctaacagccatgatagtggtaacaagcatgtaataattatacccggcattcctgcctcatcagcccagcccctggagttgggcaccctcgcccaggacatcacagccctggcagacctggggttaaaacgtgggcggcggaaggaaggggctgcgcaggggcctggactcccaggttctagggttctaagggtggacaagagctcaggcctagtcacagcccgggccctgctgtgactcctagctaactctcgggggatggtcactccacctctctgagcccagtttcccatctgtaaaggcaggaagtaggactcctggttctagaacgcactcagtgaaaatgatcaggatccaagcgctttcagcaacttctggcgaccctcctctcccctcccgtctcttcctgagcaatcacacgcggggtggagggagggagggaaggaaggagggagggtgaggaacgcagacctccccacacccccggcgagcccccggacacagccccaccaggcctccagccccgtatccgcacaaagcctctccagaaggcgcgctaggggaggccctggcggcacagcagagcaggaggcgccaaggagttatttagccatgcgggaccccatccccctccagtccccggaggccggcaccgcccccgcccccgcccccgcccggccggggccccacgcgcggacacggggcggggcctcggggcgggcgggcgcctggtggcccgggcccatcacgccacccgggacgtgccttggcggaggcggcgccggggagatcggtcgtacacagcggtcccggggcggggtgacccggcccgggcgcgcggccgcccccatgacgtcaacccacaaggcagcgcgctgttgtggcgtttaccgcgcgtcgccggggcaacggcggccgggcgggcgtcggcggcttggccccgcccctccatgcaaatgagcgacgtcacccgcacccaatggcgaacgggggcggtgagctcatcgcgccgagccgaggctataagagggcgcacaagtggcgcggcgcaggagccgccgccagtggagggccgggcgctgcggccgcggccggggcgggcgcagggccgagcggacgggggggcgcgggccccccgggaggccgcggccactcccccccgggccggcgcggcgggggaggcggaggatggaaacacccttctacggcgatgaggcgctgagcggcctgggcggcggcgccagtggcagcggcggcagcttcgcgtccccgggccgcttgttccccggggcgcccccgacggccgcggccggcagcatgatgaagaaggacgcgctgacgctgagcctgagtgagcaggtggcggcagcgctcaagcctgcggccgcgccgcctcctacccccctgcgcgccgacggcgcccccagcgcggcaccccccgacggcctgctcgcctctcccgacctggggctgctgaagctggcctcccccgagctcgagcgcctcatcatccagtccaacgggctggtcaccaccacgccgacgagctcacagttcctctaccccaaggtggcggccagcgaggagcaggagttcgccgagggcttcgtcaaggccctggaggatttacacaagcagaaccagctcggcgcgggcgcggccgctgccgccgccgccgccgccgccggggggccctcgggcacggccacgggctccgcgccccccggcgagctggccccggcggcggccgcgcccgaagcgcctgtctacgcgaacctgagcagctacgcgggcggcgccgggggcgcggggggcgccgcgacggtcgccttcgctgccgaacctgtgcccttcccgccgccgccacccccaggcgcgttggggccgccgcgcctggctgcgctcaaggacgagccacagacggtgcccgacgtgccgagcttcggcgagagcccgccgttgtcgcccatcgacatggacacgcaggagcgcatcaaggcggagcgcaagcggctgcgcaaccgcatcgccgcctccaagtgccgcaagcgcaagctggagcgcatctcgcgcctggaagagaaagtgaagaccctcaagagtcagaacacggagctggcgtccacggcgagcctgctgcgcgagcaggtggcgcagctcaagcagaaagtcctcagccacgtcaacagcggctgccagctgctgccccagcaccaggtgcccgcgtactgagtccgcgcgcggggcgcatgcgcggccaccctccccaaggggcgggctcgcgggggggtgtcgtgggcgccccggacttggagagggtgcggccctggggaccccccctccccgagtgtgcccaggaactcagagagggcgcggcccccggggattccccccccccgagggtgcccaggactcgacaagctggaccccctgctcccgggggggcgagcgcatgacccccccgccctcgcgctgcctctttcccccgcgcggccgccccgtgttgcacaaacccgcgcgtctcggctgcccctttgtacaccgcgccgcggaagggggctccgagggggcgcagcctcaaaccctgcctttcctt

SEQ ID NO: 1887631 - DNA, 4001 bp, Homo sapiens
cgcaagtgcaactccagctggggccgtgcggacgaagattctgccagcagttggtccgactgcgacggcggcggcgacagtcgcaggtgcagcgcgggcgcctggggtcttgcaaggctgagctgacgccgcagcggtcgtgtcacgtcccacgaccttgacgccgtcggggacagccggaacagagcccggtgaaggcgggaggcctcggggagcccctcgggaagggcggcccgagagatacgcaggtgcaggtggccgccggatcccagccgcactgtgggaagacagatagggaagctggtcacccacaggcctaccgttttccaggaacgagggtgcccatttcccctaacacgccaagctggatctcaccacggcggcggcgcctttgcacaagttatttcccctaccaagagcatttctccgtgcgggcgcggtggctcacgcctgtaatcccagcactttgggaggccgatgcaggtggatcacttgaggtcaggagttcaagaccagcctggccgatatgtggccaatatggtgaaacgcccgcttctactaaaaataccaaaaattagctgggcatggtggctggcgcctgtgatcccagctactcgggaggctgaggcagaagaatggcttgaatcggggcggtggaggttgcagtgagccaagatcgtgccactgcactccagcctgggcaacagaggaagactccctctcaaaaaaaaaaaaaaaaaaaaaaaaaagggcatttctccccttgaatctcctgaatctcagtatggctggctcctcctcttccttccagcctgcctaaaataggaagcaccctattttatttccttgtgtatcattcatattccctacttagaatcttagcttggttgacactgtgcctggcacacaataggtgcttagtaaatacttgaaggaattaatgtatatctgatattcaggcagcctgagattccaaccatggctctgcttttcttctggcagtcaaaaacttacttgcttcacttatttatttatttattatggtcttgctgttacccaggctggagtgcagtggggcactcatggctcagtgcagcctcaatctcctggattcaagtgctcctcccgcctcagcctcctgaataactgagactacaggcacacaccatcatgtctggctaattttttttaaacatttttggtagagatggattctcgctatactgcccaggctgcaatgttctggcctaaagcgatgctcccaccttggcctcctaaagtgctgggattacaggtgtaatcccgagaaatgaagagtgccaaacccatcacattccagactactgagcctctaggaatcacagcccctcaggctggtacaagtgttagggagactggggagactggggtttgagggtgccttaacctagttgctaggcttagcaagggtgagaggtttgccggagtcacacggcacagatgggtttagggcgggctaagagtgtgcccctctgcctgccccctcctgggtcccaccacagcccagacctcatccagtgccctgcacccctggagcctccatggagggcacagagatggggaaaatactctcctcctcccctaacaagtcgctcgttgcatgtgactttagcagtgccttgacaagcgatttcatcagattcagaaccagctccagctggctctgcccatcacaaacttctatccatgcaccacacccccattgtttctcttggatcctggccccagcccaggtcagggaccatgcccacaccgcacgcccgaccccgtccccgggtttcccaggtgctgtgcacattcaggagggtccctggcatccctgtacctcagtttccccatttgcaacttggggacaggttataacctcccacgttgtgggtgcaaatcaggcatcggctaccccatcagacccaaggggatccaggatattcctacccagggcacagatggggcaactgaggctcaaaggtaggtctgggcttttcaagatgaggaatccctgattagatatgggggctgcttggggggtgggaggggatctctaagatttcacttaccttctggcgtgagtatccggactgcaggggccgggacgaggtcggtgttcgaatcttcccagctctggttggcccgcagcctggttagcaggtcctcgtagcgtttccgcaactctcggaatctggagtcttcggagtgcaactctgagggtcccgggaaacttgcgcggctcgcctcggccagagacagggcgcccccatgcggcagccacgagagcaccagcaacaccaggagcatctgagagccattcaccgtcctgagttcttgcccgggcatggctgtgcaggttgcggctctgagctgggactgaccagatgctgccggaccggcctttatagtccccggactttgtccgtctccgcctgctcagtcccgccctcctccccctgcctgcagagtaaacactccaatgaccacagctgggcggggtctgggggtgtatttagggggaggatctttaggtgggggcgctcctagtaaagctagggcacatttctgggcctcagtatcctcttcctcgatatgaggacaccattccagcctgggagtctttttggaggaaaaaaagacattgttactatgtgaaaaattccagacaagagtttaagaggtggctgtctatgcccatgggatttcctctcttctctttttggttggggtcaaaggctaaagatggtgaaaaacaaaggaagcagaggagaacgggctagatggagccaggaagggcaaccttgatgtgtcatgcctctctgccatgcctgtttcctcaccaggaaaaaaaggactgagactctcactggagaggtggtcaaatgaggggtaaagcacagggccagacacataggaggcacttgataaactgggtgttattgcagttactcatcctcctctggagaactcctactcattcttcaaaactctacgcaaaaagcccctcttccaggaagtcttctccaacattatctttccagtctaagcagggtgctcccaaaccccatccttttgtctggctcagcgctcaccttgaagccatcctcacaggattcataattctgggggccaggcatggtggcttatgtcagtaatctcagcactttgggaggccgaggtgggtggattgtttgagcccaggagttcgagacaagtctgggcaagatggcaatacctcatctctaaaaaaaagaattctgcgccgggcacggtggctctcgcctgtaatcccagcactttgggaggccgaggcacgtggatcatctgacgtcaagagttctagactagcctgaccaacatggagaaaccctgtctctactaaatatacaaaattagctgggcttggtggtgggattacatgcctgtaatcccagctactcgagaggctgaagcaagagaatcgcttgaacccagagggcggaggttgcagtgagccaagttttcaccattgcacttccgcctgatcaacaagagcaaaactctgtctcaaaaaaaaagaattctggacagaaacttagttataattaagcactaatcaggctgcactttgacccacttccttgtgaccgcaagttgcttgtagcacctgataccgaccatttgctatagatgtgatttccgaccttagaatcataagactttttagaagaatttcttaagatgtttttgaaatccttaaccaatgacacccaccagtgtgaagaccccacagaggaacggaatctgcatgagaatacagtttcttactgtctgtgacttcacctcctgcactctttcaccaagcaatgacctccacacttcagcccactccaaaatccttaaaaattaaaactctagcccctggccaggtgcagtggctcacgcctgtaatcccagcactttgggaggccaaggcgggcggatcacctgaggtc

SEQ ID NO: 1887632 - DNA, 4001 bp, Homo sapiens
tgcaagtgggaggtggggtgggcggtcaggctggccagtcccgtgtgagtccttgtgtgtgtgctgtgggggcctcgctgtgcctcactgccctccctgtgtgcccgtcgctgtgttgggaaagttgtccccaccagcccatgctgtgagtcccaagtggagtgagtttgtgttgtgggactgtcacagccctcatacacacacctgctagacccctccatccgtcctgtgtgagccctgtccttgctgtgagagccgtcctgtgccccctgtccctcctgtgtgcccatcaccgtatgcacgggaggctctccaggccagccaggacccggtggtgtcatcccccggctgggcgtgtctctgtggggccgtcaccccctccgcatgcacacacacctccactcttctccatctgggtcctaaccccgggtaggctggaggtacagtgggccctggtacttccctgctgacctgctcctcctcccgtgtcccgcaggccccagggagcgccatggcccgcgcacgccaggagggcagctccccggagcccgtagagggcctggcccgcgacggcccgcgccccttcccgctcggccgcctggtgccctcggcagtgtcctgcggcctctgcgagcccggcctggctgccgcccccgccgcccccaccctgctgcccgctgcctacctctgcgcccccaccgccccacccgccgtcaccgccgccctggggggttcccgctggcctgggggtccccgcagccggccccgaggcccgcgcccggacggtgagtgcccgccccgcccccggggtgataggagccgggaagagagagggctggagactcggaggaactggagaagtgggagaggacggggggaggtggcgggcccagccgggccactgggagggtgtggccaatgtggtctttgtgttgcaagaagcaggaagacggaggctgggggtggagggggaggtcaagtgggaagtccctcctggaatctgactgcagtccccgaattgcagcccactgtctcttccgggcctggggcaacagctgcatcccagctcccctcccccagtctgggtcctctagaccccctggaggattcctgttgcagggagagtgggccgagcgggaggactgtcaactctggcctctggggaggggtcgagaggccttttgcttttatttgcatctctttggccaggggctgtcctcagcagtcccggcggaggaaggagagggggaggggccattgtgttgggaagtcccctcggggaggtgggggagtcttggggagggaagggttaaaggtcccctgcctgatgggctgttaaccctgtggtgcccgtggagccccatccctgccggcaggcgctctagggaaagtgtgtcctggtttcccatcccccatcttgtcccggcagcccaaggggagcgaggaaagagaaaacttccctaactcagttcctggaagccctggaaggggacaccgatttcaaggccaaggtcacagatgtggaaactgaggccctggctgtaggccttagggaaccctcaggccaggacctggtgggacgggagggcaggagcctcctagggcgctcagaagtggggggggggggggggcaggaaggcatctcccgcgtcccagccccccaggcccgcgctctgaagctgccacagtctctggccttctggtctctaggcctctgccacatccggaggtgtggcttccctgtggttggacacgagagggcaggagacctgaggcttgtgatctgggtggggtcagtcactgtatccctgtgtgaccttgggatactccctaagggcgggcctcagtttccctgcctgtcacatggaaaaggcaaaatgtggcccctttggaaaatagaggtcgttaagcctgaccacccccggggtcacctctctggccgtctaccttccacactgacaagggccgtggggacgtagctggccagacaggtgaccccagagcggcgtccccaggtacttcttgctttctggtgcctgtggaggagaagctgagaaattgactcactagcgatgggatcactagaaatgaggcggggagcagtggctgggaaagaggggagcaggccgagacacctcgaggcctggaggggtggtgggtgctgaccgcgcccctctgcctctccaaggtcctcagccctcgctctcgctggcggagcagcacctggagtcgcccgtgcccagcgccccgggggctctggcgggcggtcccacccaggcggccccgggagtccgcggggaggaggaacagtgggcccgggagatcggggcccagctgcggcggatggcggacgacctcaacgcacagtacgagcggcgggtgagtgctgggggtggggtagacggcaggtgggacttccgccggaggagggggcggcaggcggcccccgccagatgtgcggcagctgctgccctgcgcggctgggtcgctccgcggacaggcaggtggggggtaagtgggtgggggggaatcgcgcgcccgcagagccgcccaaggactccgcgccgcggctggcatagccggagcccgagccagggccagggccagggccagggactaggccgccgaggagtggagctgcgcgcccgtggcccgcggccgcggggactgagggcggcgctgggcggcgcggctcatatatcccgggctatttatagccggtgagtcagcagccgcgccgcgcccgccccctgccgtccctctcgcgcggcccgcagcgccacacagtttcccgggcgccggggcgggccggggaccgcaggggtgggctcgcagccccgccccgcgggaggccccgccccccagcccctggcacggcctcgattttttaaaacaaatattcgaagcccacagcagagaatgggaaatcacaaacatcatgcgcccaccaggcagctctgttcagtttgaacattacacccgcattgcttgcttattaagaaaccaaacaaaaccgcagaaacgcatgtggtgaagctccttactctccccatcccttccccctccttgcatccaaaggaaatctctcgagttggcctctctcaacccctgcaggtgttgcttttactccgtatttaccaggccagaaccagggcttagaatcatggagcattcttagcttagcgtatatgacatagtttttgtttctccccagaattcctttttccctcaatattaggcttcagattcaccatatgggcaaaagagcttccattcatctatgttcagccaggcacggtggctcactcctgtaatcccagcactttgggaggcggagatagaaggacgcttgagcccaggagttccagaccagcctgggccacataatgagatccccgttgctacaaaaaatacaaaaattagccgggtgtggtggcgcgggcctgtagtctcagctacttgggaggctgaggtgaaagggtcccttgagccaaggaagtcgaggctgcactgagccatgaagggtcactgaactccagcctgggggacagagcaagaccatctcaaaaaagaaacaacaaatacagccattttcggcctggtgcagtggcccacgcctgtaatcccagccctttgggaggcggaggcaagtggctcacttgaggttgggagtttgagaccagtctggccaacatggtgaaacctcgtctctactaaaaatacaaaaattaaggccgggcgtggtggctcatgcctgtaatcccagcactttgggaggctgaggagggcggatcacctgaggtcgggagttcgagacaagcctgaccaacatgaacaaaccccgtctctactaaaaatacaaaattagccaggcgtggtggcacatgcctgtaatctcagctactcgggaggctgaggcaggataattgcttgaaaccgggaggcagaggttgcggtgagccgagatcgtgccattgcactccagcctgggcaacaacagc

SEQ ID NO: 1887633 - DNA, 4001 bp, Homo sapiens
tcctgcctcagcctcccgagtagctgagattacaggcatgtgccaccacgcctggctaattttgtatttttagtagagacggggtttgttcatgttggtcaggcttgtctcgaactcccgacctcaggtgatccgccctcctcagcctcccaaagtgctgggattacaggcatgagccaccacgcccggccttaatttttgtatttttagtagagacgaggtttcaccatgttggccagactggtctcaaactcccaacctcaagtgagccacttgcctccgcctcccaaagggctgggattacaggcgtgggccactgcaccaggccgaaaatggctgtatttgttgtttcttttttgagatggtcttgctctgtcccccaggctggagttcagtgacccttcatggctcagtgcagcctcgacttccttggctcaagggaccctttcacctcagcctcccaagtagctgagactacaggcccgcgccaccacacccggctaatttttgtattttttgtagcaacggggatctcattatgtggcccaggctggtctggaactcctgggctcaagcgtccttctatctccgcctcccaaagtgctgggattacaggagtgagccaccgtgcctggctgaacatagatgaatggaagctcttttgcccatatggtgaatctgaagcctaatattgagggaaaaaggaattctggggagaaacaaaaactatgtcatatacgctaagctaagaatgctccatgattctaagccctggttctggcctggtaaatacggagtaaaagcaacacctgcaggggttgagagaggccaactcgagagatttcctttggatgcaaggagggggaagggatggggagagtaaggagcttcaccacatgcgtttctgcggttttgtttggtttcttaataagcaagcaatgcgggtgtaatgttcaaactgaacagagctgcctggtgggcgcatgatgtttgtgatttcccattctctgctgtgggcttcgaatatttgttttaaaaaatcgaggccgtgccaggggctggggggcggggcctcccgcggggcggggctgcgagcccacccctgcggtccccggcccgccccggcgcccgggaaactgtgtggcgctgcgggccgcgcgagagggacggcagggggcgggcgcggcgcggctgctgactcaccggctataaatagcccgggatatatgagccgcgccgcccagcgccgccctcagtccccgcggccgcgggccacgggcgcgcagctccactcctcggcggcctagtccctggccctggccctggccctggctcgggctccggctatgccagccgcggcgcggagtccttgggcggctctgcgggcgcgcgattcccccccacccacttaccccccacctgcctgtccgcggagcgacccagccgcgcagggcagcagctgccgcacatctggcgggggccgcctgccgccccctcctccggcggaagtcccacctgccgtctaccccacccccagcactcacccgccgctcgtactgtgcgttgaggtcgtccgccatccgccgcagctgggccccgatctcccgggcccactgttcctcctccccgcggactcccggggccgcctgggtgggaccgcccgccagagcccccggggcgctgggcacgggcgactccaggtgctgctccgccagcgagagcgagggctgaggaccttggagaggcagaggggcgcggtcagcacccaccacccctccaggcctcgaggtgtctcggcctgctcccctctttcccagccactgctccccgcctcatttctagtgatcccatcgctagtgagtcaatttctcagcttctcctccacaggcaccagaaagcaagaagtacctggggacgccgctctggggtcacctgtctggccagctacgtccccacggcccttgtcagtgtggaaggtagacggccagagaggtgaccccgggggtggtcaggcttaacgacctctattttccaaaggggccacattttgccttttccatgtgacaggcagggaaactgaggcccgcccttagggagtatcccaaggtcacacagggatacagtgactgaccccacccagatcacaagcctcaggtctcctgccctctcgtgtccaaccacagggaagccacacctccggatgtggcagaggcctagagaccagaaggccagagactgtggcagcttcagagcgcgggcctggggggctgggacgcgggagatgccttcctgccccccccccccccccacttctgagcgccctaggaggctcctgccctcccgtcccaccaggtcctggcctgagggttccctaaggcctacagccagggcctcagtttccacatctgtgaccttggccttgaaatcggtgtccccttccagggcttccaggaactgagttagggaagttttctctttcctcgctccccttgggctgccgggacaagatgggggatgggaaaccaggacacactttccctagagcgcctgccggcagggatggggctccacgggcaccacagggttaacagcccatcaggcaggggacctttaacccttccctccccaagactcccccacctccccgaggggacttcccaacacaatggcccctccccctctccttcctccgccgggactgctgaggacagcccctggccaaagagatgcaaataaaagcaaaaggcctctcgacccctccccagaggccagagttgacagtcctcccgctcggcccactctccctgcaacaggaatcctccagggggtctagaggacccagactgggggaggggagctgggatgcagctgttgccccaggcccggaagagacagtgggctgcaattcggggactgcagtcagattccaggagggacttcccacttgacctccccctccacccccagcctccgtcttcctgcttcttgcaacacaaagaccacattggccacaccctcccagtggcccggctgggcccgccacctccccccgtcctctcccacttctccagttcctccgagtctccagccctctctcttcccggctcctatcaccccgggggcggggcgggcactcaccgtccgggcgcgggcctcggggccggctgcggggacccccaggccagcgggaaccccccagggcggcggtgacggcgggtggggcggtgggggcgcagaggtaggcagcgggcagcagggtgggggcggcgggggcggcagccaggccgggctcgcagaggccgcaggacactgccgagggcaccaggcggccgagcgggaaggggcgcgggccgtcgcgggccaggccctctacgggctccggggagctgccctcctggcgtgcgcgggccatggcgctccctggggcctgcgggacacgggaggaggagcaggtcagcagggaagtaccagggcccactgtacctccagcctacccggggttaggacccagatggagaagagtggaggtgtgtgtgcatgcggagggggtgacggccccacagagacacgcccagccgggggatgacaccaccgggtcctggctggcctggagagcctcccgtgcatacggtgatgggcacacaggagggacagggggcacaggacggctctcacagcaaggacagggctcacacaggacggatggaggggtctagcaggtgtgtgtatgagggctgtgacagtcccacaacacaaactcactccacttgggactcacagcatgggctggtggggacaactttcccaacacagcgacgggcacacagggagggcagtgaggcacagcgaggcccccacagcacacacacaaggactcacacgggactggccagcctgaccgcccaccccacctcccacttgcacacaaacactgagatggccccagtctcggacatcactactcagtacacacaatacacacacacccccgaccaaagcag

SEQ ID NO: 1887634 - DNA, 4001 bp, Homo sapiens
ctgtaatcccagcacttggggaggctgaggagggtggattacttgaaaccagcctggccaacatggtgaaaccccgtctactaaaaatacaaaaattagccaggagtggtggtgcgcacctgtaatcccagctatttgggaggctgaagcaggagaattgcttgaacccaggaggtagaggttgcagtgagccaagaccacgccactgcactccatcctgggtgacggagcaagactctgtctcacacacacaaaacaatggagccacagggtctcatcacagaatggatggtcctcacctgtcatctgtcctcatagccaatgcaggtacatggccttcatctgtaggcagagccccgatttcaacattctcactcagaagcatgaataacagggacagaggacctatatagatcttgacacttgggctgaaccttgagacatcttggcttaaagaactgtatgttttggacaggcgcggtggctcatgcctgtaatcccagcactgtgggagggcaaggcgggtggatcatttgaggtcaggagttcaagaccagcctggccaacgtggtgaaaccccgtctctactagaaatacaaaaattagccgggcagtaatggtgtgtgcctgtaatcccagctactcggtaggctgaggcaggagaatcgcttgagcctgggaagtggaggttgtggtgagctgagatcgcgccactgcactccagcctgggtgacagactgagacgctgtctccaaaaaagaaaacctgtatatttttaaactatgatttaaggagatatgtatgggtgctgttatggactaaatgtctgtgtctcccccaaaattcttatgttgaaaccctaacctccaatgcaactatatctggagacggtgcctttatggaggtaattaaggttaattgaggccgaaagagtgtggctgtaatccaatgggactggtgacctttttttttttttttttttttttttttctgagacaatcgtgttctgtcacctaggctggagtgcagtggcatgatcacggctcaccgcagcctcaacctcccaggcccaggtgatcctcccacctcagcctcttgagtagctaggactagaggtatgcaccaccatgcctggccaatttgttgtattttttagagacggggtttcaccatgttgcccatgctggtctcgaactcctggactcaagcgatccaccatcctcccaaagtgctgggattataggcatgagccaccatgcctggccttccttataaagggaagagataccagggatctctctctccgtgtcccatgtgagcgcacagtgaaatgatggccctctgcaaggcaggaaagcaggctacaccagaaacagaaccctgccagaatctggatctttgtctttccagcctctcacaattccagggattttgagaagtaaatgtctgtcatttaagccacgcagggtggtattttgttaaggcagccctgacaaactaagacaggtgccaggttgacaagagatggaccctgatagtcatgttaatgtgtcagcttggctaggcgagatccacagttattcagacactaatctagatgttgccatgaaggttggtttgtttgtggtttttttttttttttttttttttgagacggagtctcgctctgttgccaggctggagtgcagtggcacgatctcggctcactgcaacctctgtctcctgggttcaagtgattctcctacctcagcctcccaagtagctgggactataggcacatgccaccacgcccgctaatttttgtatttttaggagagatggggtttcaccatgttggccagggtggtctcaatctcttgacctcatgatccgcctgcctcagcctccaaagtgctggggttacaggtgtgaaccactgtgcccagtcaaggtttgttttttcttttcaccttctcaacccagcttttccccgactccaggaagaactgggaagagaaggccccatggaggtattttcttttcttttcatttttttgagacagagttttgctcttgttgcccaggctggagtgtaatggtgcaatctcagctcactgcaagctctgcctcccgggttcaagagattctcctgactgagcctcccgagtagctggaattacaggcgtccaccaacacgccggcttttttgtatttttagtagagacggggtttcaccatgttggacaggctggtctcgaactcctgacctcaggtgattcacctgcctcggcctcccagagtgctgggattacaggcgtgagccaccgcacccggcccagtggaggtattttctggatgtgatgaaaatccataatcagctgactgtaagtgggagaggtgatcctgcttgttctaggtgggtctcattcaatcagctgaatgttttaaaaagcagatcagagacttttcggatgaagaaattccacctgtggacatcagcttcagcttgtgcctgagttcccacttgcccttcctgataggatggatttttttttctttttctttttattgttttgtttttgtttctgttttcagaaggagtctcactctatcaccaggctggagtgcagtggcacaatctcggctcactgcaacctcctcctctcaggtccaagcaattctcctgcctcagcctcccaagtagctgggactacaggcgtgtgccaccacgtccggctaattttttgtatttttagtagagacggggtttcaccatgttagccaggagggtctcaatctcctgacctcgtgatccacccgcctcggcctcccaaagtgctgggattacaggcatgagccaccgtgtccggcctttttcctgtttttgagccagggtctcgctctgtcacccaggctggtgtgcagtggtgcaatcagggctcactacagtgtcgagctcccaggctcaagtgatcctcccgcctcagcctcccaagtggctgggaccacaagtgtctgtcaccatgcttggctaattattttttgtacaggcagagtcttgctatgttgcccaggctggtcttgaactcctggcctcaagtgatccacctacctttgcctcccaaagtgctgggattactggcctcccccactgtgcccagccagatttgagttgcctagccagcccacacaattctgtaagctgattccttgcatataaatatctcaatatatatctcctcctggatgtttctctgcttgatccctaactgatagaggccccaccctcttcccccgccacccttctgctcccctaggctctgttcttaagcccctacttgtccctcccagctccacctcctaggctccgcccctagacctgagccccggcccagccccaccactccttccccaagctctgcttctgggcccatccttcttcccattattacttcctaggctgcgcccccagctctgagacccgctcctcctccccacgctgtccccgtgccaggaccattacgctccgcccccggtgcagagccccgccccaggccccgcccccaaccctttagctctcaccatcgcacttgaggccctggcgcactaggccgaagagcatctccccgcagtgatcacagaaggcaggcgcccgataggagtgcaccgtgagggcgtgcgggcggatctggaagtcctcgaaggtggccgaggctgtaggcggaaaataggggtggatgcttgaggcggggtaggccaaagcttttccagaccccacgttccctgatttctcacagtgctcccagccgcaaggtgtgatctttccttccttccttcatttgctctcatactacattctgcctgggttcaaatcccagctccacccctgaacaaaacacatatatccctacgccctgggcagggacagagcgggaattggggagttgtttaacgggcaaggagcttcagtttcgcaagatgacaacagttctggagaccggctgcacaacagtgtgcgtgaa

SEQ ID NO: 1887635 - DNA, 4001 bp, Homo sapiens
ggacatttgggacagattccaggggatatttccagctgcctcgagaaggctctgggcacccagaaggccaggccatttcaccaaccaccctggctcctccaaagaggaaaccaaggcccagagagaagcagacaaggaccgggttcctggggtgtggactccaagctcaataggattttaggaaaaagtttgggtcccagaatcaggattgttgtctcctacctataacctcagtttccttatctggaaaggaggtataataatttccaaactgtaggcctcagagctcttggaggccactagttgtaaaaaaataaattcatacctggaataacttacaacagtgtctgtcagatagtaagtgcttgagttattattttggatttttttttttttttttttttttttgagaaaggagtctcgctctgtcgcccaggctggagtgcaatagcacaatcatggctcactgcaacctcgacctcccaggctcaagtgatgctcccacctcagcctccagagtagctgggaaccacaggagcatgccaccatggctggctattttttttttctttttcttttcttttttttttttttttttttttttttgagacggagtttcactcttgtggcccaggccggaaagcagtggggcaatctcggctcactgcagcctctgcctcctgggttcaagcgattctcctgtctcagtctcccgagtagctaggtttacaggcacatgccaccacactcggctaatttttgtatttttagtagagacaggatttcatcatattggtcaggctggtctcaaactcctgacctcaggtgatctgcccacctcggcctcccaaagtgctcagattacaggcatgagccaccgcgcccggcctgctattttatttcctgtaaagacgaggtcttgctatgttgctcaggctggtttcaaactcctgggttcaagtgatccacccacctcggcctcccaatgtgctgagttagtgttttatcagtccctgtgcatggggcacatactatgagctcagtacctttacacattatttcacaggtctatggacctgagatcataaaattcatttttcagagtcaagacgacttttccagggtcacacggccaggtacgggctggactggggtttgaacccatctctgtcagactccagagcccgggcttccagccattcccaactctttttgctcaaatgcaccaatcccactctggccacatagcccttgaacgtgctgtgcttgttttgtgtgttgcccaggcaggtctcaaactcttggcctcaaacgatcctcccaaagtgctgagattacaggcctgagctgccttgaccgcctttctatttcctcctggggggatgggagcaccaaggagattccagcaaaaggatacacccactccagcttgagccggcaagaaggcagctccgagcgtgtgtccaggctgtaggtgggtgccagctcgtctgggatcatcatgggcacagggcggcccctcaggaacattttcacggagccatcctctgccaggacacccccagaggtcaggcactgacaccagccccatccctattccctctcctcttccagctttatttatttatttttttaaaggcagggaaactgaggccagagaggcaaagacccagtagccaagactcctgacctctggctccagcctgtcaccccaacaagcaagcttccaccgagcccttccccatctccccactcacccacactgaagataacttctttggttttgctgtcaggaaaggacaaagaaaaaaaaagggtcttagtattcagttcagaaaaggggagaaaccattcctccacccccaccgctccccggaggtctccgatgaaaacggggccgagtaaggggcagagcgctgcctctctgcaggccgtgtgctttgctcggttgatcttgcagagcctaagacacaggcccagagaggcagtgatcgccaaagatcacacagcacgaagtggcagggacgcgatcctggaagaagggagtcaccaaggacccttccctcctaatcagcaaggtgctccccagcgccccccacccgcagttcccccagcacaccaaacgtcaagcagagggagaaacggggagagtttaagggaaggggcgtgtccccacgccggtctgggtcccaggggttgggtgaaacctgagatctaagccccgggagcgcggagaggagatggggggtggtctgcgaaagggtctcacccagctccaaagctactcatggcggcgggtggcggagcttcggggccgggggtggagccgggaccggctctgccgcttccggccctgggaggcgcccgggccgccgcgcccctgccccgccctccacagccacccctggagccggagggtcccaccgggtcacacatcccgggctgtggactcccgatcccaggttctttcggggtgggtgggggagagtggttgagaacatggactcgggagcgcgcctgcttgagttaaaaccccagttctgctaattcctagcagtgtacacaggtcgtccaacctctgcctcggtttcctcatttaaaaaatggggataataagagtacccggccgggcgcggtggctcatgcctgtaatcccagcactttgggaggccgaggcgggcagatcacctgaggtcaggagttcaagaccagcctggccaacgtggtgaaaccccgtctctactaaaaatacaaaacttagcctggcgtggtggctggcgcctgtaatcccagctacttgggaggctgaggcaggaaaatcattcgaactcgggaggcagaggttacagtgagctgagattgtgtcattgcactccagcctgggcaacgagaacaagactccgtctcaaaataaataaataaataagagtactcacacctcccgggggtagttgcgagggtgaaattggttaattattgggaagtgcctggagtatacacaacgctgtatttgtgtttgctatgtttgagcagagttgaaatgtgcagcttttgaccttggtcttgcccttgcgtggcctcctagcgctgaccacgcccactgcaccataactccagccttagggtgatttttgttttgttttgtttttgatacagggtgtggctctgtcgaccaaactggagtgcaatggcgtgatcatggctcactgaaacctcgaatttcctaggcttaagtgagcctcctgccgcagcctcccaagtagctgggtctacaagcgaaggccagcacgcccggctattttctttctctctctttttttttttgttttttgttttttgttttttgtttgtttgtttaacggagtcttgctctgtcagcaggctggagtgcagtggcgcgatctcagctcactgcaacctccgcctcccgggttgaagtgattctcctgcctcagcctcccgagtagctgggactacaggcacgcgccaccacgcccatttttgtattattaatagacagggggtttcaccatgttggccaggatggtctcgatctcttgaccttgtgatccacccgcctaggcctcccgaagtgctgggattacaggcgtgagccaccgcgccaggcctaatttattttcatttttagtaaagacgagggctcgctattttgcccagcctggtctcgaactcctgagctcaagcgatgattcccgcctccgcctcccaaactgctagaattatatagccttagtttttgactctgtccagatcttcagtatggccccgcctctggagttgaccacgcctgtcattctgagcctcccttctaaccctgtccctgagttgactcagttgcttgagaattgactgctacctcccgccaacgctccttctccggcccgccaggcattctgattacgtccattttcacgtattccttatgtgaataccttcgaggcctccaagttggctgcacctcttggcatttgaccacgccc

SEQ ID NO: 1887636 - DNA, 4001 bp, Homo sapiens
ggtgccaccacacttcagcctgggtggtttttattttttgagacagttatcgctgtcacccaggctggagtgcagtggcacaacctcggctggctgcaagctccacctcccgggttcatgccctttctgcctcagcctgtgactacaggcacccaccgccatgcccggctaatgtttttgtattttttagtagagatgtggtttcaccgtgtgagccaggatggtcttgatctgacctcatgatcagcctgcgtcggcctcggcagtgctgccactgtgcccggccttactttttaaacttgtttgaagtttaaagagcagaactctcaaagagcataactctaagttctagcaggggtagaagggaagcacaaaatactgacaagtatttttaggcaatgtacttgggtcatagaagaaggttcagtaacgccagacatgaggctcatgcctgtaatcccagcacttgtgggtggcagaggaacccaatagaccagaaacacatgatgttgttcacattttattaaaaaaaaaagttaggaaaagtgagactgtggcattgtccgtgtagcagggtggaagcactccagcccatgctctggccaaacccacttcaagccttacatgcatgctgcctaccaaattcaggaacaggaccccaaattccctttaaggccaaccagattcccccgacaccccatcaagcttttcctgccctgttcatctgcaggtgaaccccgtatcctgcccaccccagaatatgccaatttttattatctaaaatggagcatacagactggtgccccgcagagaagcccgggaactccaggtcatagctgaagctgcagtcagacccgcaggctcccttgaagcaggatggttcgtgatgccctactcaaacagggacaccccaaaatcgaagcacttcccagtacagacaaaaaggaaagcgcccccattttgagtatcccagtatgagctcctcgcgaggatctgccatcactgtgactttcttgcctacaagaggttggcctccaatcatccaagcacatgttaaatgtcagcaataaacttgcttgctatgggggaagaggaaagttacatatcaattataacaccaacagcaaaaagcattcctttctttgtgcatacagccccttggtcacagctgctgtttttttttttttttttctttgagaatgagtcttgctctgtcgcccaggctggagtgcggtggcgcgatctcggctcactgcaaactccgcctcccgggttcacgccattctcctgcctcagcctcccaagtagctgggactacaggcgcccgccaccacgcccggctcattttttgtatttttagtagagacggggtttcaccgtgttagccaggatggtctcgatctcctgacctcgtgatccgcctgcctcggcctcccaacgtgctgggattacaggtgtgagccgccgcgcccggcgcaggcgcacagccgccctctgaaccttctcttcctttcaccatctaacccagattcccttagttgtgtcaggtgagagcccaggaggcccccttcccttccccaggttttccggagccattacagccagacgctgtaagggacctgtacccaagacagtttccggctgggaatcgaaaccacaggctctttagttcctgcagaagaccgagctccacggcatccgttgatatgggcgtcaccggtgacgctcaaatgtcgcagcactttccacttggacatcagaatagtgctccacatttgaggcccacagggtgagcagctccatctgcaagagccccggccaagaaatttatatcacgaggaaacggccataggcagggtctagggccatcctgctacccgccccctcacccaatcaaaatggtatcttctccgcaggttgagtcttctcaagcggtaacactcaaaagatggcggcactttcaccagagagcagaaagtgcccccacagtttgagtgccacaggctgaggggatgcggcaaggcggcgatcgcaagtggaagcacttacccatcagaagaggcttttaagcaaggaggtggagagtagcccttgatgagctgttgaaggtctacaaagcacgaatttaacgaccctttcttaaaaagtaaaaaacaaggctttccacgtatagatattcaaagcactcccccgcccatagcctccagatgcaagccatgaggactgagtacaatgcaagtaggaaggaacacgtgtgagggacagtggggccttcgtccttaagactgaaaaaaaatcacagaaatagaacaaaagtacagcccggctgggcggagtggctcaagcctgtagtcccagctactcggaaggctacggtggtaggattgctcttgagcccaggagttcgagaccagcttggataacatagaaaaccccatctctcctaaaaaaaaaaaaaaaaaagcagaaaaacgcacatgggaatggtggtgcgcgcctgtggtcccagctactggaggctaaaagggtgagtcccaggaggtcgaggctgcaaggcgccatcatcctacctgtgcacttcatcctgggcgacagtgagatcctgaccctaaaaaataaagtaaaatgaaagaaaataaaataacatagcaatactcacagaggccaatgatacgtccacacctcaggtctgccagaaagaacaaggttcactgcagctgcgttcttatatagggtgagagcccactcaactttgataggattaaagcccaccccttcccaccctctcattccccctggtctccgccccaagccaccctgctccctttgatcctagcttgccttagtcagacacaccttcataaactttttcaaacactgattcaaatagaaattaggtgatccctattactagtaacgccaacatgtattcgttataaatacattggaaaacacagagaaataaccagaagaaaatcattccaccagtcatccactcaacaaatatttaaatatagtattttggcagagcgcagtggctcacacctgtaatcccagcactttgggaggccgaggcggacgatcacttgaggccgggagttcgagactagcctgggcaacatggcgaaaccccgtctctaccaaaaaaatacaaaaattacccacgcatggtggtgtgcacctgtaatctcagctgcttgggaggctgaggcaagagaattgcttgaacccgggaggcagaggttgcagtgagccaagattgtgccactgcattccagcctggggacagagtgagaccgtgtctcaaaaaataaataaataggctgggcacagtggctcatgcctataatgccagaacttcaggaggccgaggcaggcagatcacgaggtcaagcgatcgagaccatcctagccaacatggtctctactaaaaatacaaaaattagctcggcgtggtggtggatacctgtagtcccagctcctcgggaggctgaggcaggggaattgcttgaacccaggaggcagaggttgcagtgagccaagatcgccccactgcactccagcctgggtgacagagtgagactccatctcaaaaataataataataaattttaaaaaaataaaaaagctgggtgcggtgtggctcacacctataatccctgctactcagggggctgaggtgggagaatcctttgaaccctggaggtggaggttgcggtgagccgagatcacaccactgcactccattctgggcgacagagtgagacttagtctcaaaaaaaaaaagagagggagaaaagaaaaaaacagtgcggcagtgaacatttttgagagcaactttgataaaaaagcggaaacatttctgattttatttaatgaaaccactagagttcctttgaccttgaggcatagagaggaactcaaaaaggtgggtgttggagaggtgaggaggggcttgaaaatggtaagtgctcaaaataatgaatgactcaaggaagggg

SEQ ID NO: 1887637 - DNA, 4001 bp, Homo sapiens
cccacctttttgagttcctctctatgcctcaaggtcaaaggaactctagtggtttcattaaataaaatcagaaatgtttccgcttttttatcaaagttgctctcaaaaatgttcactgccgcactgtttttttcttttctccctctctttttttttttgagactaagtctcactctgtcgcccagaatggagtgcagtggtgtgatctcggctcaccgcaacctccacctccagggttcaaaggattctcccacctcagccccctgagtagcagggattataggtgtgagccacaccgcacccagcttttttatttttttaaaatttattattattatttttgagatggagtctcactctgtcacccaggctggagtgcagtggggcgatcttggctcactgcaacctctgcctcctgggttcaagcaattcccctgcctcagcctcccgaggagctgggactacaggtatccaccaccacgccgagctaatttttgtatttttagtagagaccatgttggctaggatggtctcgatcgcttgacctcgtgatctgcctgcctcggcctcctgaagttctggcattataggcatgagccactgtgcccagcctatttatttattttttgagacacggtctcactctgtccccaggctggaatgcagtggcacaatcttggctcactgcaacctctgcctcccgggttcaagcaattctcttgcctcagcctcccaagcagctgagattacaggtgcacaccaccatgcgtgggtaatttttgtatttttttggtagagacggggtttcgccatgttgcccaggctagtctcgaactcccggcctcaagtgatcgtccgcctcggcctcccaaagtgctgggattacaggtgtgagccactgcgctctgccaaaatactatatttaaatatttgttgagtggatgactggtggaatgattttcttctggttatttctctgtgttttccaatgtatttataacgaatacatgttggcgttactagtaatagggatcacctaatttctatttgaatcagtgtttgaaaaagtttatgaaggtgtgtctgactaaggcaagctaggatcaaagggagcagggtggcttggggcggagaccagggggaatgagagggtgggaaggggtgggctttaatcctatcaaagttgagtgggctctcaccctatataagaacgcagctgcagtgaaccttgttctttctggcagacctgaggtgtggacgtatcattggcctctgtgagtattgctatgttattttattttctttcattttactttattttttagggtcaggatctcactgtcgcccaggatgaagtgcacaggtaggatgatggcgccttgcagcctcgacctcctgggactcacccttttagcctccagtagctgggaccacaggcgcgcaccaccattcccatgtgcgtttttctgcttttttttttttttttttaggagagatggggttttctatgttatccaagctggtctcgaactcctgggctcaagagcaatcctaccaccgtagccttccgagtagctgggactacaggcttgagccactccgcccagccgggctgtacttttgttctatttctgtgattttttttcagtcttaaggacgaaggccccactgtccctcacacgtgttccttcctacttgcattgtactcagtcctcatggcttgcatctggaggctatgggcgggggagtgctttgaatatctatacgtggaaagccttgttttttactttttaagaaagggtcgttaaattcgtgctttgtagaccttcaacagctcatcaagggctactctccacctccttgcttaaaagcctcttctgatgggtaagtgcttccacttgcgatcgccgccttgccgcatcccctcagcctgtggcactcaaactgtgggggcactttctgctctctggtgaaagtgccgccatcttttgagtgttaccgcttgagaagactcaacctgcggagaagataccattttgattgggtgagggggcgggtagcaggatggccctagaccctgcctatggccgtttcctcgtgatataaatttcttggccggggctcttgcagatggagctgctcaccctgtgggcctcaaatgtggagcactattctgatgtccaagtggaaagtgctgcgacatttgagcgtcaccggtgacgcccatatcaacggatgccgtggagctcggtcttctgcaggaactaaagagcctgtggtttcgattcccagccggaaactgtcttgggtacaggtcccttacagcgtctggctgtaatggctccggaaaacctggggaagggaagggggcctcctgggctctcacctgacacaactaagggaatctgggttagatggtgaaaggaagagaaggttcagagggcggctgtgcgcctgcgccgggcgcggcggctcacacctgtaatcccagcacgttgggaggccgaggcaggcggatcacgaggtcaggagatcgagaccatcctggctaacacggtgaaaccccgtctctactaaaaatacaaaaaatgagccgggcgtggtggcgggcgcctgtagtcccagctacttgggaggctgaggcaggagaatggcgtgaacccgggaggcggagtttgcagtgagccgagatcgcgccaccgcactccagcctgggcgacagagcaagactcattctcaaagaaaaaaaaaaaaaaaaacagcagctgtgaccaaggggctgtatgcacaaagaaaggaatgctttttgctgttggtgttataattgatatgtaactttcctcttcccccatagcaagcaagtttattgctgacatttaacatgtgcttggatgattggaggccaacctcttgtaggcaagaaagtcacagtgatggcagatcctcgcgaggagctcatactgggatactcaaaatgggggcgctttcctttttgtctgtactgggaagtgcttcgattttggggtgtccctgtttgagtagggcatcacgaaccatcctgcttcaagggagcctgcgggtctgactgcagcttcagctatgacctggagttcccgggcttctctgcggggcaccagtctgtatgctccattttagataataaaaattggcatattctggggtgggcaggatacggggttcacctgcagatgaacagggcaggaaaagcttgatggggtgtcgggggaatctggttggccttaaagggaatttggggtcctgttcctgaatttggtaggcagcatgcatgtaaggcttgaagtgggtttggccagagcatgggctggagtgcttccaccctgctacacggacaatgccacagtctcacttttcctaacttttttttttaataaaatgtgaacaacatcatgtgtttctggtctattgggttcctctgccacccacaagtgctgggattacaggcatgagcctcatgtctggcgttactgaaccttcttctatgacccaagtacattgcctaaaaatacttgtcagtattttgtgcttcccttctacccctgctagaacttagagttatgctctttgagagttctgctctttaaacttcaaacaagtttaaaaagtaaggccgggcacagtggcagcactgccgaggccgacgcaggctgatcatgaggtcagatcaagaccatcctggctcacacggtgaaaccacatctctactaaaaaatacaaaaacattagccgggcatggcggtgggtgcctgtagtcacaggctgaggcagaaagggcatgaacccgggaggtggagcttgcagccagccgaggttgtgccactgcactccagcctgggtgacagcgataactgtctcaaaaaataaaaaccacccaggctgaagtgtggtggcaccatcacagctccctgcaggcctgagctccctagatcaaaagatcttcccatataagccccccctcaccc

SEQ ID NO: 1887638 - DNA, 4001 bp, Homo sapiens
acagtaaagccccatctctactaaaggagggatgtttgattccccctaagtttcagaccaagctggccaatgtatgagaccccaatttctactaaacattagtggagcatggcggggacactcctgtggtgccagctactaagggtggggtgagggggggcttatatgggaagatcttttgatctagggagctcaggcctgcagggagctgtgatggtgccaccacacttcagcctgggtggtttttattttttgagacagttatcgctgtcacccaggctggagtgcagtggcacaacctcggctggctgcaagctccacctcccgggttcatgccctttctgcctcagcctgtgactacaggcacccaccgccatgcccggctaatgtttttgtattttttagtagagatgtggtttcaccgtgtgagccaggatggtcttgatctgacctcatgatcagcctgcgtcggcctcggcagtgctgccactgtgcccggccttactttttaaacttgtttgaagtttaaagagcagaactctcaaagagcataactctaagttctagcaggggtagaagggaagcacaaaatactgacaagtatttttaggcaatgtacttgggtcatagaagaaggttcagtaacgccagacatgaggctcatgcctgtaatcccagcacttgtgggtggcagaggaacccaatagaccagaaacacatgatgttgttcacattttattaaaaaaaaaagttaggaaaagtgagactgtggcattgtccgtgtagcagggtggaagcactccagcccatgctctggccaaacccacttcaagccttacatgcatgctgcctaccaaattcaggaacaggaccccaaattccctttaaggccaaccagattcccccgacaccccatcaagcttttcctgccctgttcatctgcaggtgaaccccgtatcctgcccaccccagaatatgccaatttttattatctaaaatggagcatacagactggtgccccgcagagaagcccgggaactccaggtcatagctgaagctgcagtcagacccgcaggctcccttgaagcaggatggttcgtgatgccctactcaaacagggacaccccaaaatcgaagcacttcccagtacagacaaaaaggaaagcgcccccattttgagtatcccagtatgagctcctcgcgaggatctgccatcactgtgactttcttgcctacaagaggttggcctccaatcatccaagcacatgttaaatgtcagcaataaacttgcttgctatgggggaagaggaaagttacatatcaattataacaccaacagcaaaaagcattcctttctttgtgcatacagccccttggtcacagctgctgtttttttttttttttttctttgagaatgagtcttgctctgtcgcccaggctggagtgcggtggcgcgatctcggctcactgcaaactccgcctcccgggttcacgccattctcctgcctcagcctcccaagtagctgggactacaggcgcccgccaccacgcccggctcattttttgtatttttagtagagacggggtttcaccgtgttagccaggatggtctcgatctcctgacctcgtgatccgcctgcctcggcctcccaacgtgctgggattacaggtgtgagccgccgcgcccggcgcaggcgcacagccgccctctgaaccttctcttcctttcaccatctaacccagattcccttagttgtgtcaggtgagagcccaggaggcccccttcccttccccaggttttccggagccattacagccagacgctgtaagggacctgtacccaagacagtttccggctgggaatcgaaaccacaggctctttagttcctgcagaagaccgagctccacggcatccgttgatatgggcgtcaccggtgacgctcaaatgtcgcagcactttccacttggacatcagaatagtgctccacatttgaggcccacagggtgagcagctccatctgcaagagccccggccaagaaatttatatcacgaggaaacggccataggcagggtctagggccatcctgctacccgccccctcacccaatcaaaatggtatcttctccgcaggttgagtcttctcaagcggtaacactcaaaagatggcggcactttcaccagagagcagaaagtgcccccacagtttgagtgccacaggctgaggggatgcggcaaggcggcgatcgcaagtggaagcacttacccatcagaagaggcttttaagcaaggaggtggagagtagcccttgatgagctgttgaaggtctacaaagcacgaatttaacgaccctttcttaaaaagtaaaaaacaaggctttccacgtatagatattcaaagcactcccccgcccatagcctccagatgcaagccatgaggactgagtacaatgcaagtaggaaggaacacgtgtgagggacagtggggccttcgtccttaagactgaaaaaaaatcacagaaatagaacaaaagtacagcccggctgggcggagtggctcaagcctgtagtcccagctactcggaaggctacggtggtaggattgctcttgagcccaggagttcgagaccagcttggataacatagaaaaccccatctctcctaaaaaaaaaaaaaaaaaagcagaaaaacgcacatgggaatggtggtgcgcgcctgtggtcccagctactggaggctaaaagggtgagtcccaggaggtcgaggctgcaaggcgccatcatcctacctgtgcacttcatcctgggcgacagtgagatcctgaccctaaaaaataaagtaaaatgaaagaaaataaaataacatagcaatactcacagaggccaatgatacgtccacacctcaggtctgccagaaagaacaaggttcactgcagctgcgttcttatatagggtgagagcccactcaactttgataggattaaagcccaccccttcccaccctctcattccccctggtctccgccccaagccaccctgctccctttgatcctagcttgccttagtcagacacaccttcataaactttttcaaacactgattcaaatagaaattaggtgatccctattactagtaacgccaacatgtattcgttataaatacattggaaaacacagagaaataaccagaagaaaatcattccaccagtcatccactcaacaaatatttaaatatagtattttggcagagcgcagtggctcacacctgtaatcccagcactttgggaggccgaggcggacgatcacttgaggccgggagttcgagactagcctgggcaacatggcgaaaccccgtctctaccaaaaaaatacaaaaattacccacgcatggtggtgtgcacctgtaatctcagctgcttgggaggctgaggcaagagaattgcttgaacccgggaggcagaggttgcagtgagccaagattgtgccactgcattccagcctggggacagagtgagaccgtgtctcaaaaaataaataaataggctgggcacagtggctcatgcctataatgccagaacttcaggaggccgaggcaggcagatcacgaggtcaagcgatcgagaccatcctagccaacatggtctctactaaaaatacaaaaattagctcggcgtggtggtggatacctgtagtcccagctcctcgggaggctgaggcaggggaattgcttgaacccaggaggcagaggttgcagtgagccaagatcgccccactgcactccagcctgggtgacagagtgagactccatctcaaaaataataataataaattttaaaaaaataaaaaagctgggtgcggtgtggctcacacctataatccctgctactcagggggctgaggtgggagaatcctttgaaccctggaggtggaggttgcggtgagccgagatcacaccactgcactccattctgggcgacagagtgagacttagtctcaaaaaaaaaaa

SEQ ID NO: 1887639 - DNA, 4001 bp, Homo sapiens
gggaggtggaagttgcagtgagccaagatcatgccattgtactccagtctggcgacagagcgagactccatctctttaaaaaaaaaaaaaaacaaaaaaaaaaacacaaaaacaaaaaaccctcaactaacaatccccaagctgcccgtagaaaagatgacaggaggcccaggtaggtcaaatataaagagaagtcttactggttaccgtggcggactccccaccagtggtggcggtattgggacagaggctacaactgctttatgaattgcgggtacaaatagcaaaacaaaactcccttgaatttgagatcttacttcagttcagatactgtggagtgggcaaagcagccgcaagggtttggaacacctacaggggataggaaaacttacaggggatagtggccagcagacccggaaaccagtgatagggcaaacagcaactaagaacctactgaaggccccacgtggtggctcacgcctataatcccagcactttgggaggccgaggtgggtggatcacctggggtcaggagttccagagcagcctggccaacgtggagaaatcccatctctaaaaaatgcaaaaaattagccaggcgtggtggcttatgcctgtaatcccagctacttgggaggcgggggcaggagaatcgcttaagctggcagaggttgcagtgaaccaagattgcgccattgcgctccaacctgagcgagagcacgagaccatctgaagcaaaaaaaccttccaaatatgaacttaggcctggcactgtggctcacacccatcatcccagggaggccacccagggcaagacagtaaagccccatctctactaaaggagggatgtttgattccccctaagtttcagaccaagctggccaatgtatgagaccccaatttctactaaacattagtggagcatggcggggacactcctgtggtgccagctactaagggtggggtgagggggggcttatatgggaagatcttttgatctagggagctcaggcctgcagggagctgtgatggtgccaccacacttcagcctgggtggtttttattttttgagacagttatcgctgtcacccaggctggagtgcagtggcacaacctcggctggctgcaagctccacctcccgggttcatgccctttctgcctcagcctgtgactacaggcacccaccgccatgcccggctaatgtttttgtattttttagtagagatgtggtttcaccgtgtgagccaggatggtcttgatctgacctcatgatcagcctgcgtcggcctcggcagtgctgccactgtgcccggccttactttttaaacttgtttgaagtttaaagagcagaactctcaaagagcataactctaagttctagcaggggtagaagggaagcacaaaatactgacaagtatttttaggcaatgtacttgggtcatagaagaaggttcagtaacgccagacatgaggctcatgcctgtaatcccagcacttgtgggtggcagaggaacccaatagaccagaaacacatgatgttgttcacattttattaaaaaaaaaagttaggaaaagtgagactgtggcattgtccgtgtagcagggtggaagcactccagcccatgctctggccaaacccacttcaagccttacatgcatgctgcctaccaaattcaggaacaggaccccaaattccctttaaggccaaccagattcccccgacaccccatcaagcttttcctgccctgttcatctgcaggtgaaccccgtatcctgcccaccccagaatatgccaatttttattatctaaaatggagcatacagactggtgccccgcagagaagcccgggaactccaggtcatagctgaagctgcagtcagacccgcaggctcccttgaagcaggatggttcgtgatgccctactcaaacagggacaccccaaaatcgaagcacttcccagtacagacaaaaaggaaagcgcccccattttgagtatcccagtatgagctcctcgcgaggatctgccatcactgtgactttcttgcctacaagaggttggcctccaatcatccaagcacatgttaaatgtcagcaataaacttgcttgctatgggggaagaggaaagttacatatcaattataacaccaacagcaaaaagcattcctttctttgtgcatacagccccttggtcacagctgctgtttttttttttttttttctttgagaatgagtcttgctctgtcgcccaggctggagtgcggtggcgcgatctcggctcactgcaaactccgcctcccgggttcacgccattctcctgcctcagcctcccaagtagctgggactacaggcgcccgccaccacgcccggctcattttttgtatttttagtagagacggggtttcaccgtgttagccaggatggtctcgatctcctgacctcgtgatccgcctgcctcggcctcccaacgtgctgggattacaggtgtgagccgccgcgcccggcgcaggcgcacagccgccctctgaaccttctcttcctttcaccatctaacccagattcccttagttgtgtcaggtgagagcccaggaggcccccttcccttccccaggttttccggagccattacagccagacgctgtaagggacctgtacccaagacagtttccggctgggaatcgaaaccacaggctctttagttcctgcagaagaccgagctccacggcatccgttgatatgggcgtcaccggtgacgctcaaatgtcgcagcactttccacttggacatcagaatagtgctccacatttgaggcccacagggtgagcagctccatctgcaagagccccggccaagaaatttatatcacgaggaaacggccataggcagggtctagggccatcctgctacccgccccctcacccaatcaaaatggtatcttctccgcaggttgagtcttctcaagcggtaacactcaaaagatggcggcactttcaccagagagcagaaagtgcccccacagtttgagtgccacaggctgaggggatgcggcaaggcggcgatcgcaagtggaagcacttacccatcagaagaggcttttaagcaaggaggtggagagtagcccttgatgagctgttgaaggtctacaaagcacgaatttaacgaccctttcttaaaaagtaaaaaacaaggctttccacgtatagatattcaaagcactcccccgcccatagcctccagatgcaagccatgaggactgagtacaatgcaagtaggaaggaacacgtgtgagggacagtggggccttcgtccttaagactgaaaaaaaatcacagaaatagaacaaaagtacagcccggctgggcggagtggctcaagcctgtagtcccagctactcggaaggctacggtggtaggattgctcttgagcccaggagttcgagaccagcttggataacatagaaaaccccatctctcctaaaaaaaaaaaaaaaaaagcagaaaaacgcacatgggaatggtggtgcgcgcctgtggtcccagctactggaggctaaaagggtgagtcccaggaggtcgaggctgcaaggcgccatcatcctacctgtgcacttcatcctgggcgacagtgagatcctgaccctaaaaaataaagtaaaatgaaagaaaataaaataacatagcaatactcacagaggccaatgatacgtccacacctcaggtctgccagaaagaacaaggttcactgcagctgcgttcttatatagggtgagagcccactcaactttgataggattaaagcccaccccttcccaccctctcattccccctggtctccgccccaagccaccctgctccctttgatcctagcttgccttagtcagacacaccttcataaactttttcaaacactgattcaaatagaaattaggtgatccctattactagtaacgccaacatgtattcgttataaatacattggaaaacacagagaaataaccagaa

SEQ ID NO: 1887640 - DNA, 4001 bp, Homo sapiens
atcttcacgcccacttcacagacaagcccgggacacaggcaagcgcgagcgcatgggaggctgagcccggcggggcaggggcctgggccgctccccgcgtccccaccagtccctgccagagccaggccgcctgcaacacagtcacttggacacaggaaaaaagatcatgggtttaaaaaataaaagaataaaaagaacaaaaaccaaaaaagtgatgcagagaaggggaaaaaatagacgttttcttcccaagtggccagattgtgagcgaggtggtggcggccgggccggtgcccaccgtccgcgctgtctgcctgccccccgactccccagcagttcagaagtcccgcctgcgagtctcagcgctccccagcatcacgacagcggcacacaggaacaagcagccggcgcagggaggcctcttcgtttaacctctggacccagcgaatgcttccctggcggtgcgtggggactcccggagacctccggccacacggcccccgctgcaggcatcaagggcacaccccgcaggggaaggggtttccggcgctacccactaaggcaggatggacggtggccgggggttggaaggagaaaggaggaggaggagggtggcaattcccacttgcctgctgctgtccctgctgcgtgggcggcggctgggggccgccaggacctggggtctgtccgtagtaagcggcctgctgtctgtaatattccgcccaggcggcactgtagtctggctgggagcctgggggagctcctggaccccctccggtggccacttgcgctgtgggtggacaaaggcaggtgagaggctgtgggtgagggctgcccctgcccctgtccccgcatggtggccactcaccttgcttcttgtagtactcctcccaagccttcgtgtagtcctgctgtgggggtgctccgggctgctggggctgctggcctgtgcgggcgccgagacaggtcagaaaccactcccccggcagggctggagcccccccgccaccctgcagactcaccgatctttttgtaatactcttcccaggccttagtgtagtccgactggccggtgggtgggggctgagggggctcaccctgagccggtggggccgcaggggccggtgcggggccggggacggggcccgggggctgctggtagtagtgtgagtagtaggcggcccacgcggcgttggggtccgcggccgctgcagctgctttgcctgcaggagatacctcgggtgagacggggggacagaacagggcctgccctccgccaggtggcccatcacttacttgggtcatgaggagcaggcggctgccactgggggtaggtattgccccagccctggggtgggtactggtgaggagggggccccccggcactgcaggagagaagaaagggatgcttgagcagtggtgcgggggtggccgcagccggaccacctggggtggggatgtttttcagtggggaggcgccagagacccagaccaccaggctcaacggggcgcctgggaaaggcctagacaagaagcaactcgaaggacgcgcagcgtcagcttgaggacatgaaagaagccgcgaaacttgcacgtgcacagagggatgctgaaaggcacatgctctaccagtagacaggagagggcctgttgatggtatccacaaaaatgggctggatgaggccccccgcctgcacttctagggaaagggaaatggggtctgctattcttcttgccagctcagtaagcccccggcctcaaaacccaggaggcagaggatactcactgtgggggagccccgggtggcccctggttgaagggcccaggattgaagggccccattgggccagcagggcctgggccacctgggcctggtccaactgggcagagaggaccctagaaggaaggagagtaaccaaggtaagtgggctgggatccgggctgtgagaccaaatccccagagcccgccccaacccacctcgatcttttcctcgataagctgcttggcgtggtcaatctgctggggtgaaccccggatgatgaacaacttgaagttggggtccccgttgggtggcagctgccgggagatctctacgaaggctcccgtctgctggtttatggctttcacattctcgccacctgcagaaacgcagaaggtgaaggtggcctgcagtgatggcccagggaagagggggcaagggatagggtgcagggggccacactcacctcggccgatgaccagcccacacttgtgagtggggatggagaaggtcatctccccgccagggggaccccaattgccttggcctcttcctcggcctcggccccccgggggcatgcctggaccccctggaggacctgggggaccactctgcaagacaagaggaggaggaggatgatgaaccctggaagccggtctggtcttgcactcccctggaggccctgccagccccttcagcacccggggccacctaccctgaggctctggaggaggtcgttgatgatccgggctgcgtgctcgcacctgtctgggggccccattatatgagcaatcttctcgggccctgtcccgtcatctgaggccagcaccgagagagcagagacacaagtttaaaagaagagcccaccccagagccctgcaacgccgcctccagcgcagacaccacgccggcctgagatctcagacgcgctgcgccgctcccagcctccactcgctcagggattgagggggaggcggcccacattcccagagaaggaaacccacggccaagccaggaggtggctcaagcttcttccagcacacagcacccccagcactgagagattttacagaacaataaatctctgaaaagccagaggggcccttctccccacggcaggcagctcagagactgcctgaggactggcaagagcccagagctgaggtggagtgccctgatccagcctgcggggcacccagggctgtcctgtcaggataggctccatcgtagggggaggaagaggagatctgatagggataggaacacacgttccccctggatgtggaaagccctcatgtgtctgtcccagagaagagaagggactggccatgttctgacggctggactaagagccgtgaggtgctatggaggccacctggctgaccacggtgcccagctccctcagagcctgcctcccaaagagggtgggggtgcactggccaggggcagggtgggccaggccctgaccttgcttgaactgtatccgcacgccagcatcattctggatcttcttgatcatctctccactccggccaatgaccacgccaacagaatgcctgggcactggcacctggggagggaggcagcagcgtcagctcggcccgcagctctgctgccctctgctgcccactggccacaaggagccactcaccccggcccctccctccactggcgggggagaggggggtgaaggcagggcccacactcacatcgatgcctccgccaatccgagatccgtactcattccggtccccaaagccgccttggtcacgttcccggaggatgtccatcaccatctcacaggcttgctgcaaacacacaggaagcagcccccatgggtgagccctgctgccccacacccccccacctcctcgggggtgcgggcctcaactaaggacccacgaaccctgggtgagcccagcacagcaccctactgagctctctacctgccactttaatggggaggcactaccagcagccccgtttccagataaaaaagcagaaggtcagaggtgaggccggtgcctcacacacacaaagctgggagtcagttcagggccatcctacgagccagcgctcttgcaagcctcttggtgttatgaccgactgttcacatatctctctggcggaatgcagaccccgagaccgctggccctgcccacctgcccgtgcctctccagaaccccctccaccaccccagggcgtgctcacctgcactttgtaaggatccccaatgatgcg

SEQ ID NO: 1887641 - DNA, 4001 bp, Homo sapiens
ccctcgcagaccggggacccaaggagaggcctcggagagaggggaagccgcggaaggagaagccgcggaaggaggagagacctaagaaagagaggccgcggaaagaggagaggccacgggccgccagggagccccgggaagccctaccccagcgctgggagtcacgcgaagggggccaccggccgtgggcacgggactccagggacgccgagcccaggaagaagcaggcctgggtgtccccgaggcgtcccgacgaggagcagcggcctgggagtcgccagaagctccgcgcaggcaaggggcgggactgagccggccccgcgccggagtccaggggccccttctggacgccccgcgactctggcgaaataaagcgagtgctgcggccgcagagtcacctgctcctttacgcctggacccggcaccaagtccggggcctgaaagacggtggtggggcgcttcaggcaggggagagacagcgagcgctacagggcggacccgggccgtgcgcgaggagagacggcaagggaggtcccacgggccccctaacacgcacggacaccccagccggttgcttgctggtctttattggggcgatgcttggggtccgaataaatatgggaaggggcgcgagctggggcgcgtccggaccctcggggcaggagtccgcgcggcgcaggggtcaccggcagccacactcggtggccaccatgttgggcacgtggtgcgcgctgatgcgctcctccgacaggctgatgagcagcttgcccgcgtaggcggtgggcacgcagcagggtgggcgcgccagggcggccccacggacctgcatcttcagcagcagcaccacgtggttgccgtagcgcgggttgcggtcggactgaggccagccgcacacgccctggcaattgttggcctggtaggtctcggggatgagtacggagcgctcggcgcggaggtctacgctgagctcgcgcagcgcgcacggcccgtcggcggcggtggcccccgcgctgcgctgtgcccgacccggcccgcgcggatcccgcccgcgccactccacgcgcaggccctgcagcgccttcaggagcagcagcgctcgcaggggatcgccgaggccgccggggccacctgggcagagcgcgagcaggcgcgccagcagcggggctgtggccggaggcagacccgggaggcttcgcagctcggcagccgccgcttgcagttcagcagccacgcggcgcgccagggccgtggcccacggcgccgacgtggggtcgtgcaggggcgcaggatccccggtggtggccgcagtgggcctcagcagcagcagcagcggctcctcgccgtcgagtaggcgctccagcgccgcggggtccgacaggttgactaggccctgcgggaagccggccagcgcgtccggatccagggccaggcgcggcgcggaggcccgggccggggggacccgcagcgcccgcaccaggcgcgtgagcgtctccaggaaggggtctgcgctgggtggcgactcctcgagttccgcggatggcctggaacccgcaattggaggagttgagagcggccacgaggccacgccgcccccgcccgctcctgccccgtgtcccggtgcctgcgcgcacctgggcggcgggaagggcacggtgtccagctggccgtgcgcaggcagcggcgcgggctcggaccgcggcagcaggagcagggccggggtcatccgtgtgaagcagcggtggtcgtcgccgaacagcagtgcctgcagccgggcggtactcagccgggagtctgcggtgggtgggcacgcggctggctcaggggctgggggcccgggggcagtcgacccggctccccgtccctctccacgcggacctaccctctccgcggggctgcagggtcaaggccagcccggagccgcgccaggcccccgcagggcggtccaccgctaacaccaggtagcgggtgtctcgggaggggcagaggctctgcggagaccagggctcagcccggctggatggaggcttacccagccccgctctaccggtccccttcctcccatcgccactggttctacgctgttctcagtactgcagaccctgcaacaaatccatgccccccgccacggcccgggcactgccccatgcaactccctggtacctgggcacccggcagcccagccctcgtcacagtgacctcagggccaggcccagggtacagcaccagcagcgccagctctggggggccagctcctccaggcgggggctcctggaacctcagcgagggtgttggctcccaggtcactgcagccgggacagcaggggacgcctgagccattgaaggccacaccccccgggaatctttgggatctgtccctgccgctctggccactgtgcaggggacctcaagcgggggacaagggtgcccctcttagctgccttcctgcagccagggagcggtgacggcaggggcaggcaggggctgcgtctgaggctgtgggtggggctgccgccctggggtctctgggttggggtgcccgatgaagccccttccccgcagggagtatcttaggccagcggccctgagaacaggctggggctgtgggaagaagggttccactggccccgagccctgcgtcgtcttcaggggtggggagaaggcagcagctctctccctggcaccgaggcaggggcaagtctaagagctgggcttcggggacaggacagagtgtggtgcccaccttccaggccacggacccgcaacccagtcctaggaacaagaccacagcctccctgcccagggtgggggctctgccagcccctgatcttccctaggaggacccggcccacctgaaggaagacggcggtgccaagcttggggctgggccccacataccttcctccaggtgtaggaccaccaggcgctgccccccagggtcccgcagccaggcccccagccgccgtagagagggcaaggcagcctgcctgtcaccggtgttgcagaccccgaaggtggccaggtctcgggggccccagcgggccctctgcacggcccccaggaaggcctgctcataggcgcttagagcccccaccacccgcaggggggagctgctgccattgctgtccccgcccagtgccaccaggcacagaggctcttgtgggctgcctggaggccagtccaagtcttctcggaagatgaggccactggtgcccacagctggctcctctgctctgagggcctcagtccccagcagagcccccagggcagacagcactagggccaggctggtgagaggcaggtcccgcatcgtgggtgctgccaggggctgggctgcctgccttaagtgagccgagtggaaggtggggtgtttgtgcaggacagacccctatctcctctgccgcgaccttgggggacagtgcccggcgcccccactccaggcagagtggccttctcaaagagccctttctgtccctggcagcctatctccctccccagtgatagagctgggcctgatgtgtcaacatgccgtccttgagggccatccccagaagacacaggagtgggaaccaggctgggagtgacggccaggcaaccaaactagacagcgctgggggcggggggcccagatgtcctgggtgctgaggtgtgggcctggaggaggagggtcccaagtcagtgggggcgccctgtccctgctcaccctccccacccctggtgggctatctggagaccccaaggatatcgtggagtctgctcttccctccccagaacaggaccccagatcccctcctagctggctggtggggtctgtcctccaccaggccatctccaaggtacagccatctctcaggcctcccacaggtgtctcctggcgggccccaggccctccccagtcggcccaaactgggggatggtgctgtgcctggcactcccacacacactgacacagtagggcggcgctgcggacatcagtgcactcagggctgggggaggctgtttaa

SEQ ID NO: 1887642 - DNA, 4001 bp, Homo sapiens
tgtcgaactgctggttacacacacacacacacacacacacacacacacacacacacacatcattcgatgaaggtgtagtgtccatcatttccgcaggcaggcacacagaaatgcccaggaattagtgaaaattggaaatctggatagaagactgggcccgacgctggaaggcaggcacaaactgggccccgccagaggggacagtgatctacagaggcaggaaagagtgtggagtgtccccagtcccccaagggaaacagggcagcacctgaattctggaggtcctatcaagggagagactggtcaggcacagtggctcacgcctgtcattccagcactttgggaggctgaggcagtaggattgcttgaatgcagcagttcaagaccagcctgggcaacacagcgagaccccatctctacaaaaaactgcaaaaaattagccaggcatgatggcgcacctgtagtcccagctactctggaggctgaggcaggaggctgaggctcccgtgagctatgattgagccaccacactctggcctggatgacagagcaagaccatgtctcaaaaaaagaaaaaaaaaaagagatcaattttgtctttgggacaggacatcgcacttagtaggaatttatttgttgggtggacacacagtaggcacttaatgcctatttgctgcgttgacacctagtaggtacttccaaggctctttgttgagtcaataaatgtgacctcgtgttttcttccaagtccagggtcccaggggtaagcccagaggtaacctggggttgaagacagttgtttcaggttgaggccacctggccaggagtactgtgacgtcaccaggctgcgtgacgtttcgcgccggccggttctcacgggtgggggctgggaggggcagagtgagagatcgggtggggggggcggacaaagggccctccgtgcagctcctgtcggcccccgcgtgcgccccggccagccggccggtcacatctggaattcattgcagccgccgccggaaaggggaggagaggagggcggggcgagcggggggcagaggcggcggctctccgcccccccctctgtccctcgtcccagccccgggacttagccgagcccggctggcaaccccagccccagccgcggccgccctggggacgcagacgccaaggcccctccggccagggccgggagccgggccggcctagccaggtgagcgcgcgtggcgacaaggaggcagaaaaggcgggcctggtcccctgaggtctcgggatccgagctgaggggccccaatcggggggctggggcgcgcacgcgccgcctgggttcctgctgcacggagcgggtggtcacagtgcgccctctccaagaatccgggcggcccccactgcctcggccgcgaacccgcagactgtgctccccgcctttctcagcggcaggaagttggcgccggggagaaggctgaatccgagcgctttcgactggagtctttgggaggcaggacgccgtgctcggggaccggggtcttggggagtgtgtttgggggggggcaacacccctcctggctgactccggctgagcgagggcaaaaggatgtgcgcgccgtggagcctccaagccaaggggcggcacccacggggagggcggtcggacgtcgggctttctgcctcggtttccccaagttgtttgcctcctccggtcccccggcggggggcgtggctttgttttgtaaggaaagagaaagtgactgcgtggctcagacgcctcctctttcaactccggctcagggatgggtcgtgggtgaaggcgcgcgtggcgcggacctcgcgtggccccgagccgggcggagcgtcggaactcgcccccttctcaggcacgggttgactcacccggggatttccaccccctcctctgtctctgtccttgtcagatgctccgggccccacgcgctgagcccacagtccccctcgtggggcgacacggccaggcgcggaactcgcggtgcagctgctgctgcgatctggtcccccacccccagtcttcccagaatctcgaggcgggacccctggcgggacggagaggaatccttccagtgccgcttggagacgtgggggccccgcgcgtgtggcggtctcgggggcgggggggagaggaggcgtggctcccgcgcgagcgagcgtggataccgcgcattcctaaaccagataaggaggccgagagtgcgggccagcacggggtcgggtcctgctgccatctccatggagacacgctgggctttgcctggttgatggtgggcgatgggggcgctgcccgcggaccagaggtgtctccaggctcctttgttgctgtttgggtctgggctgagcttaggagtttccacccttgggaacccactagggtctcctttgttcattggttcattcattcattcattcatttgcccattccacacgttttctgagtgttttatttgtgccaggcatccctgtaggggctgataactgacttgctccctggccttaggcattgactgtctaggtggaagccagacagaaaaggaaagatatcatgatagtttcccatagtggcaagcgctgtgcagataataaaacgagattctgtgattagaaaaggcttggagatggctgctattgtagactgggggtcaggggagtcccctctgaggaagtgacctttaaatagaaaggtcactttctataaggtagggtggctaccacgggctccatgggtgaccagggggaactgtaaccacagggcctgcctttctgaaagatggggagacagtcattcaaagatttgaggaaaggccaggcgtggtggctcacgcctgtaatcccagcactttcctaggcttaggcaggtgaatcacctgaagtcaggagttccagaccagcctggccaacatggtgaaaccccatctctactaaaaatacaaaaattagccaggtgtggtggtaggcacctataatcccagctactcaggaggctgaggcaggagaatcgcttgaactcaggaggcagaggttgtggtgagccgagatcacaccactgcactctagcctgggcaacagagtgagactctgtctcaaaaaaaaaaaattttttttttgagaaaaagagtgtgccccaagaagaacagcaggggtaaaggcttggaggtaggggtaggggtagcatggaggaggtttagtgtggttggagtggaatggccctgggggaagagtgggaggaggcttcatcggcaggggccatcctacttgggctatagggagccatggaagaatttggagttggggagtgacatggagttacaagtttaaaagctccccctggctgcttggtagagaatggcagggtagggggtcctgacaaccacagagaaaccaaaaggtagggtggctaccacgggctccatgggtgaccagggggaactgtaaccacagggcctgcctttctggaactgggagtgggtggagaggaccttggaagccactgaggcttcctccatccttcccctctcctaatctccagacaaacagtcgtctgagtctatctctcttcccttccttccaaaccccatcacttgtccctcctgttccatttcaggcctggacattctatgtgagcccagtggcctctttctgagcttctgagagggagtcagggcagacttggtgaaggtgaccgggagacaggctctgtgtccttctcaaaacctggtaaccttacacagggaggggacatgggctaggccacgccatccacctagggggtgactcttctgccagctccaacctcagtgccctgcttcctctttctgggaggcgtcaaccgcccaagtgcttgcctcagtaaagtcctagtggttaagatgagtcttggatagaatgtgggcctcagtttccccttctctaggagagctgcttctccctctgtgaatgccttagcctccccgggctgcagaaggtgagagtgcagcacc

SEQ ID NO: 1887643 - DNA, 4001 bp, Homo sapiens
acctcatttaagactcccatcaacactgctgagtgatagccatcaccatacagacatatacacattctactaaatgagccaacagctataaatcaccttgtacagtgcctggtgcacaatgttcactcagccaactgacatttggtggagaaggcatttaataagcacacaaacaaacacataatgaaattcccagcagtgatacgtgccgtgaagaaaagataaagcagggtgaggggactgagagtgacaggatcagtgccagtttagatggggaggtcagggaaggctgccctgaggaggtgacatctgaggtgaatgaagtgaagaagggagccaggcaatcatcaccccacaatgccacacacaacagccccctacactcacaagcacacagcagtcccactcagagcactcagaactactgcacacacacatgcacacgcacacctgtaccagatgtgcacacacacactcaaaagggaatgacatcccccaagtccagcaacttggcattccaatccctttgcagcccttatccaaggattgcccatgtcacccaccccactggttctccacatgagggcccgctaccaacacccagctccctccctcccgtccccagacccttcggaacagggcaacagagaagagaagatgttggaagttccggtgcctgatgtggaaagagagggcaaagaggagctgtgggggttagcggggacccggcatgggagagagggagttgctagagtacagaggagaaggacaatggagacagctgaggaggaggggcaggcagggcccgcagagcaaacctaaatgtgctgcctgtcctctgagcagtggcacaggcaccagcccccttacctggagcccccatgctggagtgaaccatgctgcccgccccgccagggctgggggaacaactgtgtcatctccccaccctctctgggggccgagccctccctgccggaagtcactcagggaggaaaccacagggccggtccgcccccttcagaagggaaaataccctggcccacagacccgccccggcagcccggcccaccccaaatcatgtgtgtgtgctggggggtgggggctagtggggcagaggataagcaggctggaagagccgactcctacggctgcgatccaagaggtgcctgcaacagttgccccccgacttctgtcgcccccatggaggcaaacaagtctggaacagggaatgggggtctgggagagaaggtgggtccacagcagtaacaacaataaaacactagccagcagcttattggagagagggctttgccgatgcctgaccctgtgcctcactcttgacaggtgccatctccaatgtggtggtcactcttatttgccccattttacagatgaaaagactgaggatcagagaggtgagcagtagctttcccaaaggcccagagccaagaagcgttgaagcttaaaagcacgccgcggcagggaagatcaagcaagccctgcgcctatctgcaggtgagctgttgggtgccaccattgggaggaagtggtgcccgtgggcagtggtagtggggacggtgggtcggggacttggcctggggctacaataagtcgccggccaaatgcgggcgcccgaggcggctccagtggaggggagcaccaggtccccgggctgccggctggctcttcgcgctgcggcgctcccatttcagcgcttccctccgtgcccgccagagggcggcagcgcccagccaatgggccggagggcggggccggctgcggagaagggagcccctccctccgctcccctccccaacaccctcccaacacctccgctcgcacacctgcgagggtcacacaaaggcgcaggactcccggcgcaccgcagctcagacaaaggcgcgcccgagtccgctgccctcttcctcttggtgcccgaggtctgaggctgtggggctgcctggcgtctccagacaccccacatgcccgcctgggccccgcaggacatcctgcgccccgtggctggggggccccctaaaccacaggtgcatgcacagacgcctggactcaccctcacacacacaagtatttctacagatgaaccccagcacttcacacacacacacgtgtgcacacacacgtgcatgaacacatctatgtgcacaggccccaacaccagccctccctgctgacgatggtcactcccatatactgatacctcctctactccctcacatggacccatgggcacaagggcacttctacacatatgtgcccaagcatacttcctggccactcgcacccactcacacacaggcacactcagaaagggtatactacaggcacaactacaggagtgccctcccctgactgcacacgtgccctgtgcacccagacacacccaggcaagcaggtgggcacaacaggaaggactggcagttctcatatatgcacacgagaggtgaccgtttcccggcatctacactccacaacatcccgtatcgtaaaggccatttcacagaggagatccacagaccacacagcaactggccacaggatttctatacatgagggtcttcccgacagcagcctggtagcagtggacactggagccttgtctcaaagcgacatttacgcagtaagctttgttttcagttaggatttgttttggggggcttggaaatggggctataggacattatgggggggggcaaaacctcaccagccacccttatgctccaccctggacagactcaacatcatccacgtcaggaacacgcttttggatgtgaccccattccagccccctagagccagcagagaaggaccacccacttccagtgcggccaggtctgcagttcagtcctggagccggggaaggctgtatacgctccctgagagatgaaacaaccccacacctctcgcctcccatgctggctccattctcagtgcctcagaccagagctgggcctggtgaggggatcttgaaggaggatgggcctgcctgagagaggatagaggggcagagtttggaacacactggcagctggaacagggaggctcaaggcagggggagatggtggcctcgttgccacagaagaggcctcgagccatgctgagggaggcaggtagggcatgggagctagggagcagtgggggccacttgaggtgcagggagctgggagggaggcggtacaggggaggccaggctgggctcagggctgagcggtaattaaaggagacgtagggggctccccagggccagcggggctggtaactgacacgcgggccccattgctccgctcatatttctcgccggatcgatacgtttgactcccgacaagacaataatcgcttgtacgcggccggcgagtcgatcaaatacattattagagcgaggtcccccgggggcccggcggggagtggtgggggggagcagccagcccaccggggacagcagagcgagattcttcacccctcagggccccccagccatggcctcttcctcttggccacccctggggaccctctctgtggctcagttccccagcctctctctgaatgtctgctgctttggtgatctctctactcagcccccagcatcatccttgctctgtgagggaacccaagggttctttccccataggcactgccctcatctgtagggctgtggcatgtgggagctcagagaggctcctcagacccctagcttggcaggagacagggagaccaagcctcaggccatactctgagtccatggctgggccaggagatgaacttgggcccaagactcaatgatacccacctccctctgcccagtccccttgctgcatctaagcacacggggcttcagcagcgcccaggccaggggcagcctctggggggttagggaaagctaacctagggacccaaacaagcaggaaaacaggatgataggggtggcaggaaaacaggatgataggggtggcagacaaacacatacacaaagagatgtgtgtctg

SEQ ID NO: 1887644 - DNA, 4001 bp, Homo sapiens
gtatgcgtatctactaagcaatatagtaaccactatcctgacttttatgatggttacctctgggaggcagtaaagagattatgattagaaaaagatacacagagagcatctagggttattctagttcttaatacaggtgatgtttacttcacggttcgttacacagtgcattgttttatacactttttttttttttttgttagaggaagggtctcgcccagctgatttcaaactcctgggttcaagcaatcctcccacctcagcctccctaagagctggcattacaggcgtgagccactgctcccggccttgttttatgcatttttccatatgtaggtaatagctcataataaaaggtttttttgaaaatacacaaaaaaactaccattacactcccaccagactggaaacaatttaaaagtccaaccaagtttaatcaagtgttgtgcaaaaagtagaacaaatggaagtctcacacatccctgatgggagggcaatgcattacgccactttgaaaaccagacaatatatgataaaattgaaggggagcacaccctactcagcaattcctttcctaactatatgctgtcaagaactcttgcacacgcacacatgtatattcccaggcatcttctagaagaaaatggtggttatttgtgagggttagggttactaggagaggtcgggcgcggtggctcacgcctgtaatcccagctctttgggaggcagaggcaggaggatggcttgagcccaggagttcaagacctgcctgagcaatatagtgggaccctgttctcaaaaatttaaattaaaaaaaaaaaatctgctgggagagagaggaagaggaggaggaagcaaaaaaaaagaaaaagaaaaaaaagaaaaagaaaaaaaaaagattactgggagaaattcaactcagggttgcctcctctggaaggccccatctgactagtccagacagaattaatggctctgtctcctgtcctcacccatcacttcagttaccagttagcacaagtttttggctgtctcattctcctttccttccccctccaaaattgaaaacttaatgaaacaaggactgtggtctgattcacctgtccaagtctctgttgtatagaaagaacacttcctaaatgtctgtctgatggatgtttttggaattaatgcctaaaaataagaaaaataagaaacaggggtgatcagacaatcaaggttctagtacagagaatccttttggagtttctgctagattgacagaaatccccaattcaggagttaacagttaagaatgggggccttagggcgcggtggctcacgcctgtaatcgcagcactttgggaggctgaggcgggcggattatgaggtcgggagatcgagaccatcctggctaacatggtgaaaccctgtctttactaaaaatacaaaaaaattagccgggcctggtgatgggcacctgtagtcccagctactcaggaggctgaggcaggagaatggcttgaacccaggaggcagagcttgcagtgagccaagttcgcgccactgcactccagcctgggtgaaagagcgagactccatctcaaaaaataaaaataaaataaaataatgggggccttctacttctccatttttccaaggatggccttggaagtctctgtgtggtatggtcttggatggtattttgttgtgtatctgggattagagaagccttcaatgtttgcaatttttagtacatccctgttagcatatccactctgaggtggatagctggcaatctctgagtttgaagatttatttctagggtgacaaaaggctctgagaaggataatatatgataggagattctattgtctccatttttagctatggggaaggtagagggcttgcaagtgcacccaaggttgaaatgtgtgaacatgggtctttgcagcacctttaaggttagggtctcagggttttaaagttccctggagctgagacccttaacaaaggggccggccttacctctcacagcagcgatgtgtgatgactgtcgcccagaagcccaggacacagaagttgaaagatgtgaaaaccaacaaagtgagcaggtttatcacagacacgagaaaggcatcactgagacagttgttggactggggcatgtaggaggctaaggaggcaacggagccaaggcctatgcctgtgttagacaaaacttgaccccctgctagagaccacacactcatattgtacacatccgatatctaaaagagagaagacaagcataagggggttgtaaaagaagaagcagaggacaactataatagaaatgttgcagggaggagagagggagatacaaaagtaaagaatggggaaaggaagctctaagaataggcagctgtggtgccctacaaggcctgacgggggagtgaggagatagatttcaccttggcaaccaccaactgttgaaggccaaattttgccccttccaggagtagagtccggatgaagaaaccgacaatgatgaaacaggggagcagtaccaagacatagattacctgaatcgagagtgggacatatcagcaaccgtgtaccagtaggggtcaaccaacagttaggagggatcaaaagttctgagtcagaaatgagtaggagttagaagaaagccttcagcaagagtcaggggctaggggagtaaaagccaaaggagtaagagattaggagatcaacaagtaacaaattgaggtaagggctaaagcatctgagaatttcaaggaatccaatactggtggctcaccttcccagtggacttgagcccattgatcatgaaagcaccaacaagacaccagcaaagaaagaagggcaggaccagactgtagactggtgacccgccatcctcgattctgtctgaggccttcaaggcctgctggtaccagaagtatatggagggtgttgtccgttcacattcaggatctggggggacctggctttagacatgcctgctagacaaggtaccccctcttcttccttatcccctcccccacctcccttttctctttccctctcccatttctttttccttcttcttcctcttccttgtccctccccactctctcctattccaaattcccttctacttctacttctccatttttcccttctcctcttctttcacttcctcctcaccaaagccactagagttcatcgttaagggacatttctcccatggaacgggaaactggaaggactggctcatgtagaagatgatccaggaattgaccacattgaagtacaggccgaggatgaagcacacctgggggccaaggaggatatggctggggaggaagagcagggacaggaaaagggaggggatttgacagaggattggggaaccaaagggatctgacccatggaggtattcacagggcgcatttcaggaggagggttgggatggcggtggggtgtaaaagtcaggcctgggcagccatgggctcctcaccatgaagctagaataccccacaccaccaatccagggggcaatgatcttccatacacccatgccaccctgacgcatgctctgaccagctgccatctccaggaagagaagaggaaccccgaccaggaacagcatgaagatgtagatggcagcgaaactgcctgtgaagaagattcagaagggactctgagaaccatgtggcctttcagtgcctggactccaggagcccaggaaaacattctccctaccagcgacctcttccagggccacaggcatcagggctcacccatgtctacatccctcacggtcccaagtgtccagtcctctggcccccaaatcctggaagacccaagtacctagtttccagcccatcttgggcccaggcctccagctttgccatccccatgttcagataccctgaacctctcatgatcctaagtgtccagggacctggctcctatcctgctcagagcaccaggtctttagtctctacatatctcagaaacattcatggttaaag

SEQ ID NO: 1887645 - DNA, 4001 bp, Homo sapiens
ccctgcagctggggtggggcgtcgccctgcattttcaggtgccttaaccgacccatttccgcagagcctcctgtcgctgagccctgacgtgcccgtgccatccgaccatggagggactgagtccagcccaggctggggctcctcgggaccctggagcctgagcccctccgactccagcccgtctggggtcacctcccgcctgcctggccgctccaccagcctagtggagggccgcagctgtggctgggtgcccccaccccctggcttcgcaccgctggctccccgcctgggccctgagctgtcaccctcacccacttcgcccactgcaacctccaccaccccctcgcgctacaagactgagctatgtcggaccttctcagagagtgggcgctgccgctacggggccaagtgccagtttgcccatggcctgggcgagctgcgccaggccaatcgccaccccaaatacaagacggaactctgtcacaagttctacctccagggccgctgcccctacggctctcgctgccacttcatccacaaccctagcgaagacctggcggccccgggccaccctcctgtgcttcgccagagcatcagcttctccggcctgccctctggccgccggacctcaccaccaccaccaggcctggccggcccttccctgtcctccagctccttctcgccctccagctccccaccaccacctggggaccttccactgtcaccctctgccttctctgctgcccctggcacccccctggctcgaagagaccccaccccagtctgttgcccctcctgccgaagggccactcctatcagcgtctgggggcccttgggtggcctggttcggaccccctctgtacagtccctgggatccgaccctgatgaatatgccagcagcggcagcagcctggggggctctgactctcccgtcttcgaggcgggagtttttgcaccaccccagcccgtggcagccccccggcgactccccatcttcaatcgcatctctgtttctgagtgacaaagtgactgcccggtcagatcagctggatctcagcggggagccacgtctcttgcactgtggtctctgcatggaccccagggctgtggggacttgggggacagtaatcaagtaatccccttttccagaatgcattaacccactcccctgacctcacgctggggcaggtccccaagtgtgcaagctcagtattcatgatggtgggggatggagtgtcttccgaggttcttgggggaaaaaaaattgtagcatatttaagggaggcaatgaaccctctcccccacctcttccctgcccaaatctgtctcctagaatcttatgtgctgtgaataataggccttcactgcccctccagtttttatagacctgaggttccagtgtctcctggtaactggaacctctcctgagggggaatcctggtgctcaaattaccctccaaaagcaagtagccaaagccgttgccaaaccccacccataaatcaatgggccctttatttatgacgactttatttattctaatatgattttatagtatttatatatattgggtcgtctgcttcccttgtatttttcttcctttttttgtaatattgaaaacgacgatataattattataagtagactataatatatttagtaatatatattattaccttaaaagtctatttttgtgttttgggcatttttaaataaacaatctgagtgtaagctgggatcctggcttcttcgcggtctagagacaggaatggagagggagggggtgactttttggaagctgggtgcagttaactcttcctctccgagccccgcggcgcttacctggcaggaagtgacgtcaccgggcctggccgttcacctgaaagggtgggaccaggtgaggtcaccagatgggaaccgggggagccagttcccgggcgtcgggggcgccgcgctcccgtcctgctgggctccttgacccagcttcgggcgggtgcggtcggggacgggatgtttccgtccccacggggccgcgggaggcgggaggggccgggtggggaggacggaatgtgctggggcgcgcgcccagagcgagcgggggcgggcgcggggcggggcagcctggggtagcggaacccgtttcgggactagaggttccgggggggcttcgacaccttctggatgttggggaagcgggtttagggtctcaagaggctaggatctcaacatttgggagtcacaggttgcatcccctagcgctttagactctagacccctggtggctcggagttgcagatttctggccacccgggaccctggagcccgggaattaccgggtcttggcatttccgaaccttggaagtccgaggcttcgcacaccgaccagggtcggccccgcgaggccagggcgtgtgggtaggggccgcgcgtctaggaggggccccgggggagccgcgtcttcagaccatacaaggccagcgtcgtcgggaccaaccccggggccccgcgcccggaagccgccctgcgtcagcgcctgcggctcggccctgccgcccagccttcgccccctgcgacccctcttttttctccttgccccgcactcctccctcctccctctcacttccctcttctctcctttccctaccctcacccttcctcctctttttcacttcctcctctgcacccttctgccccgccctacaccctttgccttctgttcttctctccccctccaatttgtcccctccctcattactcctctcccacttccagcctccccatcctgccgtctcttaccccctttctcctccttcccgtctcccttctctccctttttccgtccttctttccctctccaccctttccttgccctcccactccccattgtcctcttcccctcctccccctagccttactccttctcctcttctctctccctctgaagcccctttccctcctctcccttctctctaccctcctcaagcctccctcctgctctcaggcctccttggcccactccccttgctcactgacatttggtctcctcttccaggaaactgcttcccttgtgggaaagggctcaggccctaataagtagaagaggatcaggcgagagggagtcagaacccctgagatgcaaaggcagcagaggggcagagaccaagagcaagcagtgaagagacatttgcagaaacagtcttggagactgaaagaacaacatctctggtccttcctttagccagatctgattctctgccccttccccaaaaaatccctcatataagaaaacggcacttctcaccatctaccagggcttaagccagacacccaggagtatcccttgacaccttgttctcaaatccacaccccagtccaacagcaatcctgtctgatccacctgcaaaatagatccactatccacctgcccccaccatgacccccaccctggtcctagccaacatcgtctgccatttgcatcttcatagcagccccagccccagtctctgctctagcccctgccttcagtctctcctttctccactcccccacgagacaaccaaaggaagcctgttatgagacctgagtcaggtcacataaaagtcaaagtccgaagtcctccccacagcccacacaatctggcacccatcgcttaccctcccccttggccactctgctccagccacactggcctcctagctgctctaccaagtctggtctgcttcatccataggagctttgcactagctgttccctctgcctgaacactcccctggtgtccccatggctcactcccctccttcatgtctctgctcaaaagttgccttctctgtgagatcctccctgaccactgctgttgcaatccacaccccacctccaactaccccatcctccctaccttgctcgactttttccatgacatttatcatcaccacctaacattaaaatgtacttaattcttatgttgacagcaatctgcctccccactagaatgtcgcgtcctcag

SEQ ID NO: 1887646 - DNA, 4001 bp, Homo sapiens
cgacattgacacccacacatttatctccactgacagccccaggactctctaaccagtgctgtctaacagaaatagcatgcaagctgcatataggattttaaattctccagcggccaccccattaaaaaattaaaagaaagaggccaggcacggtggctcacgcctgtaatcccagcactttgggaggccgaggcaggtggatcacctgaggtcaggcattcaagaccagcctgatcaatgtggtgaaactctgtcttcactaaaaaatacaaaaattagccaggcacggtggcgggtgcctgtaatcccagctactcgggagactgaggcaggagaatcacttgaacctgggaggcggagattgcaatgagcgagattacgccattgcactccagcctgggcagcagagcaaaactccatctcaaaaacaagaaaagaaagagatgaaatttatttgtttatttatttatctatttatttatttgagacggggtcttactctgtcacccagactggagtgcagtggcacagctccctgcagcctcaacctcctgggcttaagtgatcctcccacctcagcctcagtctcctgagtagctgggactacaggcgtgtgacaccatgcctagctaatttttgtttttgtttttgtttttgtttttttgttttgtgatgaagtcttgctctgtcacccaggctagagtgcagtggcacgatctcaactcactgcagcctccgcctctcgggttcaagtgattctcctgcctcagcctcccgagtagctgggattacaagccctggccacagtgcccagctaatttttgtatttgtggtagagacgggatttcaccatgttggccaggctggtctcaaactcctgacctcgtgatccacccaccttggcctcccaaattgctgggattacagacgtgagccaccgcacccggcctatttttattttttctggagacaggatctccctatgttgcccaggctggtctcaaactcctgggctcaagtgatcctcctgcctcaacctcccaaggtactgggattacaggcatgagccactgtgcctggccaaaattaatttttaataattgcctttacttaacccaatatacctaaaatattatttcaacttgtaattgtttttttaaaattattcttgagatctttcccatttattttgtcctagtaaagcctttgaaatctggtgtgtatttcggcctggctatatttcgagtgctcagtagtcacatgtggccagtaggtgccatattggacagcacagatctagactaagctcccacatcatctacactggctcatccaaatactgtctacacacatacacagagcctgtcttaatttcgtcagctcccggggacacactgtatatgtgggggtgatctcacccccaccaccacattttcaacactggcccgacaatatagcatctgctgtaatattccaacaccctgtctacactgaacccatcagtaatatccacacaagctcttctagacatcattcatactgttcctcccaccattgtctatactgcttactccccgccaggcaattggtacacagattccctcaggtactgtctatactggagtccctcaacactgtcactgggtctgagcgaggaggagatctacactgactcctacccctcgcccccgaataaaaccctgtcccattggcctgcccccaaggacattgaaaggtcttcgctgtcaatcacgtatgggatggctgagcagcagcctagagcagggttatctgggactctttcctgcaggacttgtcagaaccttgaatacactgctgtgtgttgtgagtggtcattgcctatgagtgagaaaaggaggaggcattttcctgcaggacacccaagacatgcctggtccaggctacccaggaaagctagtggagaaaagcagctcctcagaagccttctccatgtccccactgaccaaggactcctaggcttctgctctctgtggcaccccatctacctagactcctcctaggcctctccagctcccgctgttttccaaatatccccgggccttttcctgcagtgtcgtgaatcccgcgtagccccaggccccccaaagcctcccagtctctgaacctctgtatccatttcctgcagaccccccagaggtatccatctctggctatgataacaactggtaccttggccagaatgaggccaccctgacctgcgatgctcgcagcaacccagagcccacaggctataattggagcacgtgagtcctgggtctcagggaggaggggctgggggtctggatttctagcactgagggaggaggggctgggggcctggactcctgggactgagggagaaggggctgggggcccggacccctgggtctgagggacgagaggctgggagcccggactcctgggtctgagggaagaggggctgggggtctggacccctgggactgagagaggaggggctgggcctggacccctgggtctgagggaggaggggctggggggtctggacccctgggtctgagggaggagaagctgggagcctggacccctgggtctgaggcaggacagactggggcctggactcctggtctaagagaggagggagattcagaaaagagaaaaagaggaggttgacttcgggcccccagtggggggcatctctgttttgacatctctgttttgcggttgaggcgtttagcaggtggttgaatcctggctggtggatgcacctgctttttggggtgtgcctgctctgtgcccggtacttcccccgaatcccatgtgaccccatgctgtgcacagtcagcagctgttgccctgcccaggttaaagaccagccacgagagggcagaagcggcccttgaatcagcgctcggctccaaagctggtcctccgcctcttggccaagcttgtctaacctgcaggccacatcatttgtaaactttcttaaaacattatgagactttttttttgcgaatttttttagctcattagctattgttagtgttagtgtattttatgtatggcccaggacagttcttcttcttccaatgtggcccggggaagccaaaagattggacacccccactctagactgtaaccacctcaccgtcaccttgtgtaacctacttggttatctctggatggagcaagtactatatatccccattgtctagatgagaaagttgaggctcacagcaataagatttccccagattcacactgaggctgagatcaagagcaaggtaagaaaaaggcaaagagataatacataattttataatacataattttacataaattacataattttactgaaccgccctttttttttaaagaaggggctctgttgccgaggctggagtgcagtggcgtgatcatagctcactgcagcctggacctccctgggctcaggtgatcctcccacctcagcctcctgagtagctgggactacaggcacacgccaccacactcagctaattttgttgtattttttttgcagagacagggttttgccacattgcccaggctggtctgcaactcctgggctcaagcaatcaacccacctcagcctcctaaagtgctgggattacaggcgtgagccacctcgcccagccttaggtctttttccttattacaaaaataacttgtgtccactgtagaaatatcaaacaatttagttatgagcaaaaagaagaaagtagtgcctatagttcaagtgtacccagccacctccagaaatacccagtgaccccttattatacatcctgtcttttttctctctgtttctaaacaaagactggaattatgctgtacatataattttgaaccttttcgtctgtcttgtgaatacctttccatgtcaaagcacatagatccacaactccattttcccccacgttgtattaggaagactgtcaaacatacagaaaaatcataggaattttccagtgaacacttaa

SEQ ID NO: 1887647 - DNA, 4001 bp, Homo sapiens
caggctctcgagccacaggggctgcccacaccccgccgcgctaaccctgtgtgtcccgctgaccagcagggcggcctgctggggctctgaactgcgcgccctgctcagctccaagtaatttttagattgcctttgggtaaccaaaaaataattcattctgcgtatcatgcaagagaaaacgcgaaccaagatgtgaattcaggaaaagaggaaaactcaagccatcttggaaaaggagggtctcagcgctgcagcagaggggctgccagggcagaggcgcagacacagcgaggggcggcgctgctccgggacccgagcccgagcacaacatcccctgctcgctcttccgggaggaacggcggcgcggaggaaaagcccacgtacctctgggttgaggttgctgaccagcaatacagaatttcctgcccccgccaggcccgggatggcgatccgacctgccgccgcagctgccgccgccgccgaggggatggccaggggggccagggcgccgtggacgttcggaacggaaaggcctggaaaagcaggaggtgagatgagcggcggcgcccccgactccaccgcagagtgggagaggccgacgctccccgtcctcatgcaccgaggagccgagccgcgcgggaggcggccctggctctggccctaccctgggtgcctgtggggtcgtccgacccccgcacagccacccgccggctcctgcaccagcgcccgcctctcctcacagcacgggccgggccgggcctgggctcatctgcatgcgccccgcccacagcacagaaaagctccggctccgccagcacagacacggggccctcggcaagcagggcccgtcccgggaccaccgcgcatgcgcgcccatgcctccatgcagacgaggcggccgccgggcggcacgcgctgctccgtccacggccagcactggggcggccgggccccggtcccagaagggaagcgggaggacggccacgcacacacgtcccgccgccggtcatgctgctcagcctcgggccgcgcgcttaccaggccactcaaattcaactactagagacatccctccaaccactggcggtcctcgcgctcgcccggaggtgcttgaagggaaccagaccacaaagactgtgcgattagcggcttctggctggcgccgtccacacgtgggcctccacagccctgtcctaccactgccctggccaagcctgctctgtggacgtggcgtcccctctcccgggaagggcccctgacctggcactcgagtgcccagtccgcccaggctgccgccgtggatgcggagctgcctgggaaggtggtgtgggcatgcagtcgctggggaaccaagaccaagcgtttgaatacctgcagcttgaggaatggcaaaggtgggagggaaaccagctcctgcatacggagaggctgagattataccaggtgcacctagaaataaatgagacactaatcatcgcacccacaacctccaccgcgagcgggcgctgtgctgcgggatgggccccaacccggccggcgggcggccccggcagagccttcgcgggcagatccgctgctccagggggggccgtggtcccgacgtgggggacactggaccgtgctgtgctggccgtgcagagagcagcaggtgcatcaccctggtgcagggccgggcccgtgccgccggggctccggactgagcggccctaatagaccactctgcacactggcgccgcgtcgggcagcctcttaccgaaggccgcggccatggtctggtccagcgagggctggctgtccccggaaggcaggtctgggcgtgtgtagtcacggctcttgtcattgttgtacttgacgttgaggctggtgagcttggaaaagtcgatgcgcagcgtgcagcaggcgttgtagatgttctgcccgtccagcgactgaggggagagggaccgtgagacgtcgccgggccagggccagggcgggcgccgtcccgggagccccactcaccagcttggcgtgctgggcgctcacggggtccgcatactgcagcagggcctggaactggttgttcttggtgaaggtgatgatcttcaacactgtgccgaacttggagaaaatctgcaggtcccgggccacagcatgagctcctgcccggtgcccaccagccctgccaggcccctcccgtgtgcctgtgcccacagcaatagcagccgacctgccctggcggtgatgggaccacctcacctggtgcagcacatccagggtcacagggtagaagaggttctccacgatgatcctgagcacggggctctgcccggccatcgccatccctgcgtccacggccgccgccgaggcagccaaggccaggttccccgactggaccgagttcaccgcctgcagggccgcctgggcccgctgtgggaggcacagccgtgagtccccggcccctgcggctgggcccacccccgaggtccccgggctgctggggtccgccgcggggccacgcaccgcctggttgggagagctgtcggtcttcagctccttgtggttggagaactggatgtagatgggctggccgcgcagcacaggggtcaccgaggtgtagtagttcaccatggtgttggcagcctcctccgtgttcatctcgatgaaggcctgttggggaggcagtgagcgctgggccctcctcgtccccgcctgcacggtgtgagcaccccggagaaacgcggctcaggtacctggtttttccccttcagcatcaggaggttggtgaccttcccaaagggcagccccagggagatgacttccccctccgtgacgtcgatggggagcttccggatgtggatcactctagaggggacgcctgcacttcggctgtcacctttgaacttcttgctgtcatttccgtttgctgaaaagggggtgccatgagatgcaggcaccaactcgcaggagcccacagaggaaggtccctgctatccccctagagccctgcctgctacggagaccaaccctgagccccaggagggtgcatgtgaaccagcagcgcgagaggccaagacctgcacagtcaggacccctgctcccgacagctcctgacaacccgcccacaggtccaagtgccagcctggaccatccatccagcgcctccctggaaattctctgcagcgagaacttggacctgggtctgtagcgtggaccatgggcccctgcagttggagatggaaagtagagtcccagaacaagaacgtaacgttgttccagggaaagacacccacgggtcttgccctgggccgagtcccggccttacctgcagaagccgagttgctgctcatgataaacggtccgttagtgacacaagtagagaaaagctcgtcagatccccgctgcaagagaagggacaacgcggagctgcacttcccaccaggccagagcctcccttccccaccggccggccctgctcccacttgggctgcctggggtcccagacccccaacccatacccacacccacacttccacggcagggcagcctgagcgcagacccagcccatggacgcgcacggcaccccacagctccacgaccaaaacactgctcctttttccaaattctggaagccctgggtactcagccagtgtggggctgggaggctctcagctacggagggcaccacgtacactatctccacggccaactctgctgtggacgtggcctcactgtgctgccagcggccctgggcacaggcctggggcctcagccaccagccagcagggcagaggaccccctccatggagccagcccccccagcagcacacggcagggcccaggcagccgtcctcacttctggtggcctcgcaagagaaccaaattatagcgctgcctccctcactctcgcaggagcccctcctctcctgttttccagcccggaaaagaaacccgacctccgtctctgcacacgcgagactgaggactagagacacggcctcccgcccagtgatccgctggta

SEQ ID NO: 1887648 - DNA, 4001 bp, Homo sapiens
gagggagcaccccgcaggagccccctgctggcactgcggcccttcagctctggctctccactcttccggcactgtggcttccccaccgctgtggttaattgtgcccttccagggctggtgggacggtgaggggttccgtggggctcctgctggcaccaggggtgggctccatggggtgtccgaggtgtgccttccacccggagatggtctgctgccctcgcgtcactgggccgcttcttccctctgactagaggccaagtgtggctgagctgctgttacctggagcaggaggcacagaggggccgggtgggcagcctgggctgtgccccactcaccttctccacctaccccaggtacctggacaacatccacctgcaccccgaggaggagaagtaccggaagatcaagctgcagaacaaggtgtttcaggtgggcgtgccttctggcccccggggcccaggctgggggtgggggcagctggcctgcaggagccggtggtggcccacaccaggcggtgggctccctggaggagctagcgagagttgagccacaagcagtgaagggttcggccagtagaaggtagcaggacaagatggagagcaagacttttatgcaccggtcaccccaaatcaacaaattctgcctctcctcacctgcatccttttcctcctcttcagctgggcttgtttgggaacatgtcgactctggggaggtttctcatgcaaaccagatgtctggttcttctgggggaaagggcagggactggggtcctgggcggtgttagcctcgcatcaggccccagcagtgtctggctcctcagcctcactcttcgtgcctggttgtgactctttcctctgtgcagagctgttggagactccacagcccccaccgtagaaaagcaggtttgcatccagcactgaggcacccccagggctgggccccatccaggggtcgacagctgctcccaatagcgagagccgggcccctggactgggtggggtgtggccaggccatggaggaagccaggggcccccagtgacgcccatctccacccccaggagcgcattaactgcctggaagggacccacgagttttttgaggccattgggttccagaaggtgttgcttcccgcccaggatcagggtaagtggacagggcctggctgagtagggaatggggacgaggggcctcggggcaggagggcccggcttgggggtctctccattgcacagtgacacccatgtcctgccacgctgtagaggaccccgaggagttctacgtgctgagcgagaccaccttggcccagccccagagcctggagaggcacaaggaacagctgctggctgcggagcccgtgcgcgccaagctggacaggcagcgccgcgtcttccagccctcgcccctggcctcgcagttcgaactgcctggggacttcttcaacctcacagcagaggagatcaagcgggagcagaggctcaggtgggcctgacgtccgcggagcagagtggggcggggcggggtggaagaaccccggccagccctcgtgacctggcccgcgtgtgcaggtccgaggcggtggagcggctgagcgtgctgcggaccaaggccatgcgggagaaggaggagcagcgggggctgcgcaagtacaactacacgctgctgcgcgtgcgcctccccgatggctgcctcctgcagggtgggcaccaacgatgcccgtggagggcggctcgggttggtagggggccctgggccccacccgctctgactcccccactccccaggcactttctacgctcgggagcggctgggggcggtgtacgggttcgtccgggaggccctgcagagcgactggctgccttttgagctgctggcctcgggagggcagaagctgtccgaggacgagaacctggccttgaacgagtgcgggctggtgagtgtcggcccgcaggagcaccgctgacccgatgcctctgcaggttctcctgggaccggcacagacacccccaggagggagcctccttgttctcagagcagggggcctgggcaggtccctgggtttgaatcctgctttcccacttactggcagcagggcctcgagcaagttcataactactccacgcctcagtttccccatcaaatgggagcggtgacgtgcgttagctagtgcagtaggtttaggcttaggtcctggagtcccggagggagagggcaggaggcctgggtgcgagccacagcctccaccagctgagatggcttccaggccggggcatccccgcgcccaggttgcccgctgagttccctgccgcggcaagggccgactctcggtctcagagtgacggcctacccctaccgcaggtgccctctgccctcctgaccttctcgtgggacatggctgtgctggaggacatcaaggccgcgggggccgagccggactccatcctgaaacccgagctcctgtcagccatcgagaagctcttgtgaaataaaagcagggttggcctcagccctgtgggtctgtctcatgctctccctgttcctctccccgccaccccagggcctccaagccacctctggaaatacttggctctgccccatgggcacgggaggggcgccagccgtggagctgtggaattgggccccgtggcagagcccccatcccttgggggctgtggggatgcgcccaagcccccgagggagaggcctggggacaccaacaaatctaagccctccctagctgcttggtaactgtgtcatgaagctgccggacagacacacgtggcatctccctgggcaggagagcaggcctgcagcatgggtcctgttcccgtgtgccgtgggtggcagtggctgcacctggcactagggctgctctgtggatgtgggtgacaacggcaggaggggatgctggccttcctgcacatagacctgcagttagtaaatcataagcccaaataaacaggttgtttgaatatagtttcttggttctccgttgaaaccgtgggacacagggcaggcccacctgctgaagagcggatggcttgggggctgggtgtggctccctgtcaaggtgggaccatgtggatacctgttctcaggccagcacctggccacaagtgcccgatgagccacccacctggggaggaagtcccgtgcgctaggggaggctgtgctgtgcccacaaaggcccagtccctgcaggggaggcgagtgctgtcacaggcctggcttccctgtggccagagggacagggtgtcctgagacggccacatcctattcctggaacctgcagatgcgcaacttcacctggcaagaggggcttgggtatgatgaaaggtcttgagctgggagatgatcctgggtggtccgggacccagtgtcctcacaagaggtggcaggagggtgaatcagagagagactggaagaggctgcgcatggctgtgaaggtggaggaagggaccccgagctgagggatgcagcgcctccgagcactgggaaactctccaggagggcctggtcctgcccacagcttgatgttagcctggcggggcatgtgtgcactctgacccccaagctgtgagatggtgacttgctttaagccaccaggtttgtggtacagcagccccaggagacacagggactctgccctgcagtgtggaaggcatgtgtgccccggccccactgctgacttggggatgcaggtctgcacctgggggaggtgcccggggcctatgctcgtgcccctgaccttgcattggtccctccctcgcccccggcactgccccagctggtgtgggcacccggcctgttgagaatggaggctgtcactccagtcctgcgtcctgcaggccccaggacctgattccgggttgtcgggagcccctgtaaagctcatcaaaggtgtggcacaggggcagcctctgcttcaggcacagctgaatcctgcttcccagcaggaaggcctggcccgggcgccctgccgtccctgactgggtggatggagg

SEQ ID NO: 1887649 - DNA, 4001 bp, Homo sapiens
ctcgtgtttatagacaacacgtcacgtactatcactcggccacaaaaaggagggaaattccgaccaggctacagcctgatgcacctcaaggacatcacactcagtgacgtcagtgaacagatgcaaaggacaaatcctgtgtgatcccattcctaggaggtcccccgagttgtcagattcacagagatggaaagtaggatgcagaggtgtcaggggctagggagtgagtgtttcatggagtcagagtttcagtttgggaagaggacaaagtgctggagatggttgcgtaacaacgtaaatgcgtttaatgccaccgaactgtgcgcttaaacatggttccaatggtaaatttttggccgggcgcagtggctcatgcctgtaatcccagcactgtgggaggctgaggcgggcgaatcacttgaggtcaggagttcgagaccagcctggccaacatggtgaaacccagactctactaaatatatatatatatacaaaaattagccagacgtggtggcgggcgcctgtaatcccaactacttgggaggctgaggcaggagaatcacctgaacctggaaggcggaggctgcagtgagccaagatcatgccactataccccagcctgggcgacagagggagactctgtcttttaaaaaaaaaaaaaaggtaaattttctgttacatacattttatcacacacacacacacacacacacacgcacacacacacacaaagaggcaagggagaaagaacaggctttgcaaaatgattctgcaaatggccaaataggaaggattttcagctttgtaggccgcatagtctctgttgcaactacacaactctgctcttataacacaaaagcaaccacaggtaataagataaaaatgggtgtgaccacgtcccaataaaactattagtcaaagccggcagcggaccacagcaggcctgtggactgcagtttgccaactcctaagcggtgtggtttggcgtgtatgtttatgaacagaatgtccctggaaagttggtaacagtgatgtcgccaaaaaggggaactgggtgaccaggcagaggagggagaaccttcatgtgtggtcttgggtgctttctattttgaccctgtgaatgggacctattcaccaaatttgaaacaaacaagagagaaaaagaaagcttgaggccaggcacggtggctcactgcctgcaatcccagcactttgggaggccgaggcaggcagatcacgaggtcaggagatcgagaccatcctggttaacggtgaaaccccgtctctactaaaaatacaaaaaaattagccaggtgtggtggtagacgcctgtagtcccagctactcgggaggctgaggcaggagaatggcatgaacccaggaggcagagcttgcagtgaaccgagatcgaaccactgcactccagcctgggcaacagagcgataaaaaaaacaccatgagaaaaaggaagtttgacaactctgcctgtcagggcctgggggtcagagacagttccctgggcagaggcactcaggggcacaaggtggtcggtcttagaaagatgctcagcagtgagcaggaacagaccccagaggggaggcaggaaggccaggccggaggctaagggcctcgcacacacagcgctggctggacggcttcaaagccagtccgggggccccgggaggggaggaaaggagagaggaagggctcgccccaggacgcgaggctcaccccagcaccacgttggcgtagagttcccgcgccgtcctggtctcgcgcttcctggagatctccgcgtcgtaccagaagccccgctccttggggttgtcggggttgtagttgagcatgaccacctggcccacctccaggtcctgccacttgatgatggtgcgggcgcgcgctcggacgtccctggagttcatctggaccacgccgttctccgggtagctgggaggaaagcccgggccttagaccccgtgctaagaccaagcctccttccctcaatgggaaacgagccgaggtgggacggcccctcccgacagtgtgcagaggcccctcccaacaggcttatatgctggtgttgagaacacacaggtatattaaggcacattccaggtacaaaattgttatgggttgcccgtgtcccctgcaaaaagagatgttcaaaggctgatccccagtacccacgaataggattgtttttggaaacagggtctttgtagatagaacctttgcagatgaaatcatattaagatgagatcacactgcagtagggtgggccccaatccaacaggactggtgtctttagaacaagaggagaggccgggcaaggtggcccacgcctgtaatcccagcactttgggaggccgaagcgggaagatcacctgaggtcaggagttcaagaccagcctgaccaacacggtgaaaccctgcctctactaaaaatacaaaaattagccaggcatggccgggcacggtggctcatgcctgtaatcccagcactttgggaggctgaggcaggcagatcatctgaggtcggaagttggagaccagccaacatggagaaaccccatctctactaaaaatacaaaattagccaggcgtggtggcgcatgcctgtaatcccagctactcgggaggctgaggcagaattgcttgaacccgggaggcagaggttgcggtgagccgagatcgcgccattgacgccagcctgggcaacaagagtgaaactctgtctcaaaaacaaaacaaaaacaaaaattagctgggcgcagtggtgcacgcctgtagtcccagccacttgggaggctgaggcaggagaatcgtttgaacccgggagatggagggtgcaatgagccaagatcacaccattgcactccagcctgggggacagagtgaaactgtctcaaaaaaataaaataagctgggcacagtggctcacacctgtaatcccaacactctgggaggctgaggcgggcggaacacgaggtcagaagtttgagaccagcctcacctacatagtgaaaccccatctcttctgaaaatacaaaaattagccaggcgtggtggccacacacctgtaatcccagctacttgggaggctgaggcaggagaatcgcttgaacctgggaggcggaggttgcagtgagctgagaccacgccattgcactctagcctgagtgacagagtaagactctgtctcgaaaaaataaaataaaaataaaataaaataaaaatacaaacattagctgggtgtggtggcgggcacctgtagtcccagctactcaggaggctgaggcaggagaatcgcttgaatccaggaggcagaggttgcagtgagcaagtcaaccaatgtccgtgtttaagccacaccgtctgtgaaatctcacgatggcagcacggacagacgcagccaccatctgtgtccactggtgtgtggaccccgaacttggcaggtaggaagtgcccagtaaacacttgtgcaaagactggagactgacgttaggggtggggatgagggagagatgacaaacccggaagatggaataaaacagaaaaactgatggggtggcagtttcagccactgatcgagcagaaccctccgcggagacacaggagggggcagccggcttcgggtccccaggctagtccccaagtgggcagcctcgtatgctgttaggaattcgaggatggggccccagatcctgatcaccatctcgagacagtgccaagctctggcctgaacacccgcagccaaggatgcgcgtcacagagcctgaatacccaggcccgcccacctgccatgactcactcgtcgtatttcacgtggtaaatgacgtcctcctccagcgccggcctggacgtggagctgcagggctcgtcccgggagggggccttccgcgtcaccctgaccacctgcgcctcaaaccacgcccccatgttcgtgtcccgagcatcgacgtactcattgacctgtgaggaatgagggaagtctggcatcc

SEQ ID NO: 1887650 - DNA, 4001 bp, Homo sapiens
ccagaccagcctgggtaacatggcaaaaccccatctctacaaaaatatacaaaaattagcgaggcgtggtagcacacgtgtatagtcccagctacctgggaggctgagatgggaggatcacctgagcctgggagttcgaggttgcagcaagctgtaatcaccccactgcactccagcccgggcaacagagcgaggccttgtctcacaagaaaaaaaagaaataacatcttaaaaacaagagcaatagggaagagctaaaatccactatcaaacgagtatattttaaacagttgggtacatcagggtattcatgtccagagagatcaatggaactgaaaagaaagtccaaaactacaccgagaaggaggtagaactgaaagttaacgcttcagtatatgggggagaaaagctggataattcaatacacactgttgcaaagaatccaagtggaatgcctaccattgcactcctggctaggtttttgttttgtggggttttttgttttgagacagagtttcactcttgctgcccaggctgaagtgcagtggtgcaacctcagctcactgcaacctccacctcctgagcatctgggattacaggcgtgcgtcaccacgcctggctaatttttgtttttttagtagagacggggtttcaccatgttggccatgctggtctcgaactcctgacctcatgatctgcccgccatggcctcccaaagtgctggaattacaggcgtgagccacagtgcctggcctgtgctcccttttctttgtagtggggttgtgcatgtttctcttgagaagcaagggagaggtgccggtcatctatcctgtagggtcttgtgggatgtgactgctcttcatcctcgccagatctctcttggatccaagagggaggagggaaacgaagacatgccaaggtgaggtcacagtaggagacccaagatctgaacctagatccctgtgaagccagagtcaccatcacctgtgtgacagcacaaagaaggaaacagcaggggccagtaaaaagcatctggcttggatttggcttgatttacttaattaagagatggagtctcgctctgctgcccattctgcattgcagtggcacaatcatagcttactacagctttgaactcctgggctcaagccatcctccggactcagcctcctgagtagctgggagtacaggcacgtgcaccatcacacacggatttttttttttttttttttttttaaagacagagtctcactctgtcacccaggctggagtacagtggtgcaatctcagctcactacaacctctgcctcctgggttcaagcgattctcatgtctcagcctctcgagtagctgggattacaggcatgcaccaacacacccagctaattctatttttagtagagctggggtttgatccacccgccttggtctcccaaagtgctgggattacaggcgtgagccactgtgcccagcctggataattttttaagagagagatggggtcttgctgtgttgctcaggctggtctcaaactctgggcctcaagccatcctcccaactgtgctttccaaaatcctggggttataggcatgagccaccacgcctagcctgggttcccgtaaaggaggaggagttgtgagtcattagtacgccaggaaaaagggtccagtgggagggcttctgaagcctgaggtcacaaaacgggagcaggcctacaagtgagctgagagtggaagcgccttcgttcttagaaacaggaaggaaggcagagaagggcagctgtggacatcagtgagtcaggaggaaggggaagaggcccatatcaccaaatcctcagcctggctagtgcccacagaccccaaaggcccttaggatccaagatggaggcctaacagtgtccaagggcagccgggtcggggtggctgtagtagggcgtggggttgggtagggtctgctttcctctctagcaccagcaaatcctccccaaacctcagccagccacagatttgcttctcagccccggatcttcacagctaaacagggttttgaatttagccctgacagcattcccctgggatccggggtcgcctcaccactcaatatctcagcagtgctgggggatgctggcaaccaaggtctgaacttttccccacatctatctcagacatcgaggtggaaaacccaggagtaaaagaaatgctctaaatgactgcggctaagcatgaagggaaaggcaggaggtgcccgcagcttagagtagatgccagaggggaggaatggctttaaaaaaacacaaaagaaggctgggcacggtggctcatgcctttaatcccagcattttgggaggctgaggcgggtggatcacatgaggtcaggagttcaagaccagcctagccaacatggtgaaaccccatctctactaaaaacacaaaaatcagctgtgtgtggtggcgagtgcctgtaatcccagctactcaggaggcagaggttgcagtcagctgagattgtgcccctgcactccagcctgggcaacaagaatgaaactctgtctgaaaaaaataaaacaaaacaaaataaaacctagccaggagcaatcgcacatgcctgtaatcccaaatacttgggaggctgagctcggaggatcacttgagcctgggagtttaaggctacagtgagctatgattgtcccagtgcactccagcctaggtgacagaataagacatcgtcaaaaaaaaaaaaaaaaaaaaaaaaagaaagaaagaaagaaagaaagaaagaaaaaaacttataacagcaagagtgaaccctgatgtcaaccatggatgtggggtggggtggtgacaatgggtcaacgcaggctcatcagttctagcaaatgcaccgctctgctgggcacgttgaaagtgggagaggttacagatgtgtgggctatagggctgataggaaatctctgtatctccctctcagtttggctatgaacctaaaactgctgctccgataaaataaaatgcttgaaaaatttttctttttttttttttttgagacagacccttgctctgtggcccaggctggagtgaagtggcgccatctcagctcgctgcaacctccacctcctgggttcaagcgattctcctgcctcagcctcccgagtagctgggactacaagtgtgtgccaccacgcctggctaattttttgtatttttagtacagacaacatttcactgtgttagcaaggatggtcttgatctcctgaccttgtgatccgcctgccttggcctcccaaagtgctgggattacaggtgtgagtcaccatgcccgacccaaaatatttaaaatatttttaaaataaaataaaaaatacttaggttactcctatcagaagatctgtacctgaacttgaacctgaacctgatctaattaccagctaacagagaacaataattggccaaatcccaaatgtgggatgtggtctggtttcttccacaaatgaatggtatagaaaaaaacaaatgggatggcaaggggaagtatttgaaaagaaatgtgggtatttatgtgtaaaatgctacaatgcctaggatttatagaatttttttttttttagaggcaagatcttgctctgttgtgcaggctagagtgtagtagtgtgatcatagctcactgcagcttcgaactcctgggctcaagcaatcttcccacctcagcctcttaagtaggtgggactataggtgtatgccaccatgcccagctaactttttaatctttagtagagacagggacttgatatgttgcccaggctagtcttgaactcccagcctcaaggcatcctcctgcctcagcctcccaaagcactgagattacaggcgtgagccacctcgcccagccagtgcctaggatttgtgttaaaatcttccaggaagatggccgggtgcggtggctcacacctgtaatcccagcactttgggaggccgaggcgggtggatcacgaggtcagcagttcg

SEQ ID NO: 1887651 - DNA, 4001 bp, Homo sapiens
agccacctcctgcttctgggcctccatcatctgtaaaaccgggtaatagtgcacacagttggtgccacataaaggctcaacagataaagtgctggtgcctcttgaggatggcgcatgggagaactaagcctgacagatgtgcctggctgtggtgtctagatgaagtggtgtgaccgtcccaaaaccccatgtcccctccccacaccgggccacccccacagtgctgtcccctccacgctgccggcctaacttctcaaccttggtgtccagcccagggatcacccgctcagggccctgtccctggcctccctggagccatgcacagtcagcctcccagggccatgcctggggggtgagtatggatgtccactttccctacagactgggtactcggggcccagatatggcaggccctcaacaaacggtgctgggtgaagggggaacgggtcacttaagagacctcatgccaggcacaagccctggtctgcccctggtctcctgagggagaagggaggccctagcggaacccagggcgctcaacggcagctgggacgggtagaggcagactgtcccaacagggaacagggactgggaatgtcccagagccaggtcctctgggcagacaactcgctcccaccccacccctgcctcctctccagcacctgccatctttcacagcccaagccccctttctgacctgccctgcgccagaatctcagtcacctgaacagcctcaccagctgggttcacccagcactcactaggtactaaagtcaccatctcaagcgctttacacaaattccctccctccagcctcccggtggccctaggaagcacggctcccctgtcctccctacctcagaaaatgtcatctctacccctcaaccagcccaaccctggagtgctgcggaagccgctctcagatcccttggcagccccccgggtccaggtcatggccgcgcctgccccactcagtccctgcacagccactggctggatacctgggtccccttggagccaggcctgaggacctactcaccgcgcctgcttcagcaccctcagctctgctccctcacggccagctcaggccactcggggaggttagcccattttacagaccagaataccaagccccaacgtgccactccctcctggctggctcttgtgcctagcacacccatttaccaggtccctgccatacgctatgtgtccccgacaggctcctgggccccaacagggctggccccagtccctccctgcactcacgcccccagggccacctcgaagctgggcacagatgcagaaactggaggcctctcaggctgagttccttcaccctgtgctctacggagggtgcctggagtcagtcatttccagatggggtccgagaggccacgagggctaccctcggccccaggggagaccccccgacccccgcctggactgtgtgagcagagcgctgcctccagctgtacttgtcaccacagtgctacaagggagcccgccccactcacgaagccgttgcccatgatgcggcagagccccttgagcgagtcgcagtctctgttggtgaagtggaactgtgccaactgggagttccggaacagggggcccagggtggtctgggggcgacaggacagacagctgggtcagccaggcatgggggtgctcagagtggatggggtgggaggggcgggtctcaccagcagctgctgagggatcagctgcatgatcagcttctgcggccactggtcggtctccctatgggaaggagctggtcagaaagggctgccctgatccccacggccacagccactgcccctgccaccgccctggctgccacgccccggcactcacaggttctcgccttggttcacgtaggcttggcagggcagggtccgcttcagctttgcagtggagtcagagtagggtctgcgcttctgtgggggcaggaggggcgtcactgtgcacagcctagatgccctggcctgtccccgcagggacaagacaagaccctggaggccagccgcagccccacagagactcacctcctgccactcgaggacgccgctccaagccagcagcttgttgctgagccggtgctcgctcacggccagacccccgagggtgagcccaggtgaggagggaccgatgggacccagtgccccgaagacccgagcaccttcctgcaatggagtgggggataggtgggaaaactgaggccggggcctgcaaggacaggcagtccccacacaccccagaggggacgtcccaatattcagccccaaatcccctgctggaagcccacggggccatgtccaaaccctctgctcacccctcaggacccccacacgctggtcctcatgtcctttcccgctgcccaccctcaggacccttccttcccagagcctgctgtcaccttgacactggcccagcagagtcctgaagccttcagccagccccacctccagcctttgccccagctgtgcgcctgatcgattcttgagacccaagttagaagccagctgtagggggctttccccgtgccccaggctgggcccagggcttccttgcagcctccacaggcacaagccggcttgcgctgtgtctgtcccacacaccagcttgccctgtctttcccaggctgaaactctcctaaagctccctgtcatcccaaagttcaattccttcctctggctcaggccagtgcccacctctctggccttataagtctgaccccggggggaggcaggaaggagatgacaagaaacacagaggggactaaaccatccaggagaaagacagcgaggaaaagggggaaacatttggaagacagctgggacaccacccccagaggggtctcacagaccaaaacatgtagaacaccaagagaaagttctagcaataaagccaagcaacgccacaaatgctactcacaggcactctccccactatttttattactattttttttttgagacagagtttcactcatttcccagactggagtgcagtggtgcgatctcagctcactgcaacctcgctcactgcaagccgcgccatcatgcccggctaattttttttttttttttttttttagtagagatggggtttcaccatgttggccagactggtctcgaactcctgacctcaagtgatccgcccgcctcggcctcccaaagtgctgggattacagacgagggccaccaagcctgacctcacttattgttttttaaaaccaaaaacatctcaaagcaaacaagggaaagctccgcaaacagcctggcagcaggaaacccacgagagtttccccgtaataggcgcctccaggcgggggaaaacaaattataagggtgatttatttttatcttattacaaacaggtattttccaaattttctatgaagcacaaggagatctttccttccagaatactagcaaacacaaaaaattttattttgtgagtgcttaaaaagagaaaaacctgaacaaacttgctctccacccacgcaggtgattctccacccacgcaggtgattcttcacccacgcaggtgattctgacttttgggcagtcgtcagaagatcagatagaaaacctgagtatcttggcgttagaatgagttggacagagagtggatgttgccccgggggcttcaggcaccataccggacatccagcatctgagatgagttaaaacgcacagctggaggtgactttcgagatgagggtacacttacaacatacaagttgtttatggcgctgggacctgaggtatctagtccgcatatacagtgacacgtatgcatttactgccacaaagatgggtaaaagtcaggagaacgcacttaagagcccaagcgacatacttaatgtctgcttgtctaggagagcaggttgactcaggacttcaaatatgctgggatctggagccatagtaaagaacacatatgcttgcctaaaacccagggataccttccacagcaggagcagcacatcaaga

SEQ ID NO: 1887652 - DNA, 4001 bp, Homo sapiens
ggtcggacgcggcggcagcgttcgccggcttgagccgggaagaggcgttgcgcttggcgctcgacgacgtggcggcattgcacgggcctgtcgtgcgccagctctgggacggcaccggcgtcgtcaagcgttgggcggaggaccagcacagccagggtggctttgtggtacagccgccggcgctctggcaaaccgaaaaggatgactggacggtcccttatggccgcatctactttgccggcgagcacaccgcctacccgcacggctgggtggagacggcggtcaagtcggcgctgcgcgccgccatcaagatcaacagccggaaggggcctgcatcggacacggccagccccgaggggcacgcatctgacatggaggggcaggggcatgtgcatggggtggccagcagcccctcgcatgacctggcaaaggaagaaggcagccaccctccagtccaaggccagttatctctccaaaacacgacccacacgaggacctcgcattaaagtattttcggaaaaagccgtgtggtccagcctcccccgtggctcagttacttccccagtttgcctgcatcggaaccactagccctgcagttagcaggcgccacgcccatcctggagcccccccaaaaatctgcccctcacttcttcctggacagtggggctccagaggagggtggggggtggtgcgcacagagggaaccggaaggacgccctgcaccaccgggaaatggcaatcacagcgaccacctctgtcacgaggctgaagtccagatgggccctaatgcaagtaacagaaagcccagctgacagtggctgaacaggaggtgatttttctcacaagcagcagctgggagggcaggctccccagagtgcatctctgcaggcccttccaccttggttatgtccgggaagtgttcccacacagctaccaggtcgccgccacagcccagagcaccctatcctcttccaaaaaccccaaatcaggccgggcgcggtggctcacgcctgtaataccagcactttgggaggccaaggcaggcagatcacctgaggtcgggagttcaagaccagcctgggcaacatggtggaaccccatctctaccaaaattacaaaaatcagccgggtgtggtggcacacgcctgtagtcccagctactcaggaggctgaggcagggtaattgcttgaacccgggaggcggaggctgcagttagccgagatctgccactgcactccagcctgggcgacagagcaagactccatctcataaaacaaacaaacaaaaaaacaaatcaggcaactcaggaagccctgcctccacaaaccccaatcattcaccctaggctctgcccagccaccatcccctcctcaaccaggtcagagcccacttggcagccttccccccaccaacaagaagccaactgcacatgagaagtgtcagtttaatgaagccagcttatcagcagggcggcggagcacacctgccccctcgcaggtgtgcctggctcgggctaaagtgcctgtgcagaacgaggctgcctggcggggttaggagtcggcgccctcgtcctcctcctcgggcaggatctccaggctgctgtcgggctgcggggctgtgtccgtggagggcggcggggtgggcggggcccgggtgggcgacagaggcagcggggaggcggtgggcgaggggctgtggggctctgcgggcggggccagccccaggatctcctgcacgttgtggggcagctcctggaggcacgggatgagagaagcgaaaagcggaaggtgaaggtgagaagggggcgggggtcggtcggggttcgggcggggcgctgcggggcggacggggactcacggggcaggcggttagctggcggtgcagggcctcggcgcgggtcagcacgtcctccacgctcagcttcatagtcagctcgttgatgtgctgcgggagggggtgggtcaggcgccagtcggcactcaaccacctccgcccgagcgcccactctgtgcttcgtgctgggaaacaatgaagacacaccgggctggccctctgggggctcagaagtgcgctgggcgagacatgcttctcaggcctccgggagcattctgagcacgtactcggggagggaaggtccccacccacctgcccggaggaccttgctgggagcaggcatggcatggggcagaagggaaacctacgcggccccacccccactgcgctcccaactaaccaggctttcaataatcccacactaaacacctgctccccggaggtactgcggccctgggcagcgcccagctcaggggggacagggcgggggcggggccggagcctcaccttgaggatctcattggagccgaagccggacagcatgagggtgtccctctccatgtccaggatggcgcaggccaccagcaggtgcagattggggccagggagccctgtccacagcacctgagggtgcgggacagagggagggagggaggtcatagcccagcctgggcctgaggtcccaccagggtctgtccctctccgcccaacctcccagggcaggtgagcccaccccttcaggcctctcgcccaaactggctggcccacctcccacagccgaaggacatccgggaaggggaattccctcttgaaccagatgagcagccaccggaaacagaagcagagagagccggagtcctgggaatctgggggatgacatggagcccactcagccttgcccagcgctgggactgagagtttgagaagtcatcctgactggaagaccttccccaagtctaggcaagtgacttatgcctggctggggaacctcggaggtgaggcaggagcagccctgaacgcgggccctgcccctccttcctcccactctccagaggaagtgtgctattatacttccacatctgccatggacatggaagggaggcaggacgcccagcacgcccgacgaaacagacctctgcccgctgctggtgagcgctaagggaactgacactcctagatacgctgtagcaaaaatttaagctgaaggccgggtgcgatggcgcacgcctgtaaccccagcactttgggagggtgaggcgggtggatcacctgaggtcaggagttcgagaccagccaggccaacatggtaaaaccccatctctactaaaaatacagcctggccaacgtggtgaaaccccatctctactaaaaatacaaaaattagctgggatggtgccacacccctgtaattccagctccttgggaggctgaggcaggagaatcgcttgaacccgggaggtggaggttgtagtgagccgagatcacaccactgcactccagcctgggtaacagagcgagactccatctcaaaaagaaaaaaaaaattaagctggtgttgaacctttttttccccccaagttaactcaaatgaaagtgagagtctgagcattctaacctttgaggaaagtaacaacggaggacaaactctccaaagctgtgtgaaaacaagcactgtcctgaacaaaattccacttcttggaagtgaacctaaagaagaaattacccagactatgcaccgtgatgaaaaactgcaaaggacccgaatctccagcaggtcaagttacatcaaatctaccacatcttgcaggtggacacaatgccgcgcagtcaagaaaagtgatgtttcagaagactttgaatgacccagaggcagcctctgtccttgtgccctaggaggtgatgcttttctatggcttagtttcctcatcagtaaggtgaggacagagtatctcagctccctcccccgggggtcctaaagcatcgaggaaatgttcatgaataagtttaacttattatcatcaccatctgcactcaagaaaaacaatgatatcaaacagcaactttaactttcttttttctttttttttgagacaaagtctcgctctgtcgcccaggctggaatgcagtggtgcaaccttggctcaagtgattctcctgtctcagcctc

SEQ ID NO: 1887653 - DNA, 4001 bp, Homo sapiens
gtgcacaccacctcacccactaattttttttctttttttttttttgagatggagttccactcttgttgctgaggctggaatgcaatggtgcgatctcagctcactgcaacctccgcctcccaggtttaggggattctcctgcctgagcctcccaagtagctgggattacaggcgcccaccaccatgcctggctaattttgtatttttagtagaaacagggtttcaccatgttagtcaggctggtctcgaactcctgacctcaggtgatccacccaccttggcctcccaaagtgctgggattacaagcgtaagccacagcacccagccattttcttaaaaattattttttgtagagatgaggtctcattatgttatccaggctgatttccaccttctgggctcaagcaattcacctggcaaagcctcccaaagtgctgggattgcaggcgtgagccactgcacccaccctgttatctttattactgtctttttcttttttttttgagatggagtattgctctgtcgcccaggctggagtgcagtggcgcaatctaggctcactgcaagctctgcctcctaggttgaagtgattctcctgcctcagcctcccgagtagctgggaccacaggcgcccgccaccacacccggctaatttttcatatttttagtaaagacagggtttcaccgtgttagccaggatggtctcaatctcctgacctcgtgatctgcccacctcagcctcccaaagtgctgggattacaggcgtgagtcaccacgcccggccctccccacctccccccccctttttttttttttttttttttgagatagcgtttcaatcttgtttcccagactggagtgcaatagaacaatcttggctcactgcaacctccgtctccttggctcaagcgagtctcctgcctcagcctcccaagttgccgggattacaggcacacgccaccacacccagctaattttgtattttcagtagagatggggtttcaccttgttggtcaggctggtcctgaactcctgacctcaggtgatctgcccgcctcagcctctcaaagtgctgagattacaaggccgcctctccccagctgcttctctcaaagacaagatgcacaagccagaggaaatgtttcgttttatttttgctcataacctcccaaaaaaatcagtaccccgccatccctcacccagacacagcccctctccaacaccttcacgaaacactgattttttttcttagagctaaaatgaacacccagtcaccaactacagccctgccctgcccctcctcccactggcctgctcatcttcccgcactgcaaacctggccgcctttagcctccctcccttagcgtagtgtcccaaggtcacctagcctgctttttgcctgtaggatatgggtccccttctcaaagcccgccctgacttacttcctcatttgcatagtccttcagctctatcctgtcgccactccacccaccccagacaaccacctgtaagaaaccaggtttgaaattcaagagaccaggtttccaagctcccagctgcttccctgtgggcctcggtgcctcggctgttatgtgacgggcatagacattgactaaggccaaacatttcatgatttggacgagaaaggagggaaggagatccagaaatacgcaagagaggtgataagcagagacagaggataaaaggataagagtagagaggagttgggtggtttggtggggaagaagggttgattttttttttttaatagagacagggtcttactatgttgcccaggctggtattgacctcctggcctcaaacgatcctcctgccttggcctcccaaagtgctgggattacaagcataagccactgcacccggccgagaggggtttggaatgaaggtagaggcagggggatgaaggcgccagagctgaagaccagcccccagaagccacacccctgcccttctagcagctacgggtcctctggctccgggccttgtaaacctcgatgagcaggtccttgacgtactggatctcgcgctccacggactctgcccgttccttcagctcgcgattccgtgcctccagcccctggcactcgccctccagggcctcaccctctgcccgcttccgctggcggtacctcagagccgccgacttgttctggtctctcttcttttgcttgcggtcccctcgggtggtggcaggatgtgggtagggggccaggcgagaaggttgaggtggagaaggaggagggggctgctgtggcgggggcagaggcggcatccccacttcctcctgcccggcctcgttgcggcagtagatggccagcaagtccagagtatccaagacagggggctgggggaggtcaaaggaggggagggacagggggagggagggggctggtggtagtggtggtggtggtagtggcggcggggagggtggtgggaggggcggggcatctaggaagaagtcttccatctgttccagctccttcttgaggagggaggccatagcttccaggtcaggtggggttggggaaggttgggggagggtgccggggggtaagggaggctccagagggaggagagctgtgaaatcaactcgctcagtcatccagtcagagaagccatcacctgggattaaagtggggagggacacaaaattccctgagttgctggtcttctgcgtagttgggtgctgactcacgtctcattcaggtgcatctgtcccattcattcagtaaaacaactaaccactgaatcatcaaaccagtcaataaaccaacaaaccagtgaagaaaccaataaaccagtcaacgaaccaaccaacaatcaaccatctaaccacccagtcaaccaaccaaccaaccaaccaaccaatgaactagtcgaccaatcaatcagggaatcggtcaaccaaccaaataaatcagtcaaccaaccaatcaacccattaatcaaccaatgaaccagttaaccaaaacccaacaaattagccaatgaaagaatcagtcttaacccataagagggtccaggagaaaaaaaaaattaaaaaagaaaaaaagaaccagccaaccaaccaatgactcaagcaacagtcaaccaagcatttcttcaaccattccaacatctcctttaccgagtactctgtatctgtggtgtctctattctctctttttaaaaggcaaactagatcacattacacacacagatacacacgcacatatgccttgtttcatctttactcattaattattgaaaacccactatgtgccaagcatttgggatacagtaatgaatgaaatgattcctgcctcctgagggcttctgcatatacagttccctccaactaaaatgctcttcccttgggtgttttcctcattccttccctactttttttttattttaagggatagggtttcactctgttgcccaggctgcagtgcagtggcatcatcttggctcactgcagcctagacctcccaggctcaagcgatcctcccacctcagcctcccaagtagctgtgactacaagcgtgagccaccatgcctggctaattttttttttcctatagatatgaggtctcgctatgttgcccacgtcctgaactcctggactaaagcaattctccccgcttggcctcccaaagtgctgggattacaggccatcatgcctggcttccttcccatcatttatgcctcagtcaacatgttacctacttggagaaggttttctggctacccattctatattaggtcccctttgtcattttgtagctcagctgctaggtgtttttgacttattccaatacactctcatttaatttatctctggtctactccccacagtgtgagctgctggaaggcacagaccatgttcttcttgttcccagccgtatcctcagcacctaaaacagtgcctggcacattgtaggcactcaatatttattgaatacatggatgagttcttcctcccccatcttcccctgccc

SEQ ID NO: 1887654 - DNA, 4001 bp, Homo sapiens
cagtgctgagtgtagcccgggtcactgagtcatcccagggtctgtccacaaacacagaagagggggagtcacagtctctaaggtcccacagtttcctccacttttttccttgttctgagagtgagacaaagggccatgactgttctgtgggttggacagatgcatgtttccacctgcaggctggaacccaagctgaggtcttgagcatccccaagtactgataaagcactttaggttgtttctagaaaacactgaaaaattaacccttttgctaaaagtgtagaaacaagccctcccctgaaccaaattcctgaaactctcaggttaaacttcgtaaccccatcccttcactgcagactcccaatagaaaagttacaggtgcaaggatgagatgactttggtcaaactcagaccccacagggccaggaaggcctgaaggagaggaggcccatgcttccacgtctcagataagaactgtttctaaggacttttaaaaaacccataagaaactcttccatgtccttcagccccttctgctttgacaaggtttatcactagatgttctttaggacgtcaggaattcagataagatgctctcaagagaaccattgaccagcaacagcatctcctccaatggactgacagcaactctggctttgaacctgtggaaccagggaactctgtttccaggcagctctgtcaggctctcccttgttgctgataagaacttcctttacctctctatgtacagagagctctctctacggtgcttttcctctactctcacgtcacaggaatcatcaacacagaaaaagacttctaggaccagatgtatggggtttttttccccagacgcagtagcgaacagcagctgggtgtcctctaagtcagctctggtgctgtctacccagagacagtcccggatcccacagattgaaggcccattccccaaaactgcccccaacaccattcccaagtccagacctccagaacttctgactgactggcttcaagttggggatcccatgccccactctttgggtttgattaatttgctgtagcagctcacagaactcaggaaacactgacatttcctggttgaatacaaagcacactgcagaggacacagatgaagaaactcataggaggaggcatgggggaagaggcccggggcttccataccctccctgggcgtcgccctccaggagccttagcatgctcagccacccagaaactcatgaaacccagtcctctggggcttttatgaaagcttcatgacatcagcatttcctcccacaaggaacagggtgagactgtcttctgggagggtcttaagatccactatcagaaaggcagggaacattcgagtcttactttgggttaggtgaaggaagggcaggaggaggtcagaggcctcccctgaggcccagcacagccaatgttataacaaaagactataacaagggctatgggagttacaagccaggaactgcgggtgaaaaccagcatatatcacaacatcacacttccctctctggacacactgtggcttgccatgccatgcactccatattgtaatccttgcttctcactcccaaataaactcaaaatccaggcaaccctggagcaatgcagccttgaattccaggggtctcttatatgcacactttttccaaacaaacggggatcaaaactatagcatttgtgagaaacaagacttgcgtatatgaacggcagacttttcctatatgcagacccagcagagacaacgtcagggctggagtacgagcaagtgttggtacatgtagggggtactgaaacgaattgcctgtgtatcccaagaaacaactgtactgagagatcatattttctaggggtttatttttggttttgtttttattttaggttaaagctttggatagaatacccagtgtctccttgtccatctgaagaacatgctgctatgtggaagcacatccttgagatccacaaggagacactgggcaagaagacaaggatgccccactgtgcagaggtccccctaataaatgctctatgaacaccctggtgtttagtgcttctttccttggaattccagcaggtctggacagtttggtgcactcccttgagggaattcccctgggctgcttggggtccactccagcctcaggtgtagctagaggacgcagcctcccaccttggtctggagccctgagcccctcactgtcattgcagatcccggggttcctctcccggctccactcagtggtggaaacctccaccctaatgagcccttgatggtcccgggaccctgtggcatctcacctctggcctctgttctttcttgtgagtccgtctacacttggggtttccacatgtctttttctgctcatgaccttgatactctgggtatttcagaaatgctacacatacgtttctccattacggtcagatgtgacatcttgagtggactcatcaatcacctacagaatgtggagtccaacagcaagatcctctcacgtcccaaagcctcaggtcttaccctggtctggaaatcaagcacaaatgagcccctcccaatgtcccaggcaccactgaccccacaaccactgtgacgagtgggattcatgacaacaatctgcaaaggaagaaactgaggctcagtgatgggacattacaaaccaaggtcacgtaggcagcggatgataaccagtcatcaaataaatatcaactccctcccccactccccaaatcaaagctcaaacataagtcattgttcccaaaatgttgaccaggaattgaggtgcagagggacggctaaggacgcaatgggcaccgaggaggcaggaaagactcagaggtttcttcccgggggggagggagtggacgctggagcaaaaacatttaaaaaggggaagttaagaggggactatttggttgaaagaaaacccacaatccagtgtcaagaaagaagtcaacttttcttcccctacttccctgcatttctcctctgtgctcactgccacacacagctcaacctggacagcacagccagaggcgagatgcttctctgctgatctgagtctgcctgcagcatggacctgggtcttccctgaagcatctccagggctggagggacgactgccatggtaaggaccccacaacgctgtgctgatggatgggctgaaggagggagggtgaccatgtgggaagctgtgagaaggaaggggaagccactgctaccctcatcaggaagggcagacacaagaagcaccagttctatttgctgctacatcccggctctcggtgagacgaggagaaaccagacagacagtggctgggggtcaggaaagaccccattacagtctgaaatgtctgcagagggcccagtgcctgcccccacctcagctctaaaagaatgagagtcaggctcctgggagggcagttccgcttcttgtgtggctgcagatgacaacaccccatgagaaggacccagcctctgagtgtccacacagggtgggaaggaggggaggctatttctctctgtgtgtctctgtcccgccagcaccgagggctcatccatccgcagagcagggcagtgggaggagacgccatgacccccatcgtcacagtcctgatctgtctcggtgagatttgaagagagaggggagcttctaacctaggagggacctcaccccacagccaaactctggtccctaaggagaccccaggggctcacaaagatcccagggaggggaggacctgctcaggcttcagggggcaaatccctcacagggaactctcttccagggctgagtctgggccccaggacccgcgtgcagacaggtgagtctgtccccagctctcccaggtccctcctcctcactggggacaaggggccacctccgtgcagctggggatggggattagaagttctggactgactgatgggggcatctggagggtcctgggctgagagctgagatctgttgggtgggaaa

SEQ ID NO: 1887655 - DNA, 4001 bp, Homo sapiens
ccagaagtgaggagtccagtctggggccggccactcaggatggacacaatgtaccagaagtgaggtagatctctgcagagtctctggggtcctcatccagtctgaagaacacagcaccagcagccctagatctatgaggtcagactctgcatcttatcgtagcaccttggggacctggggaggctggaccaccctggacctggtggcgggggtggggggtgcatgagtctcggctctgcagtattcaccacgccacacttgagggcacctgccctctgcagcacgatgagtcattctcatgaggtctgtaaagatgtccattatcaaatgaccatggtagccaggccacagggttcacattgacgttgcctcattgcattctcatttccacactgaaggggaaaacaggttcagaggggtgggctcactgtcctgatgagtgctgcctgttttctcccaccctccctacaaccagcacccccatgcccctcactcaagaccagggagaagcccacctagcccctcctgcaaccacacagaccccagtgggagccccaaggctgctactctgcacaggatggagggcaggggtaaaggccattaggcggtggcagtaggccgtgcccctcaccagaggctgaggtctgaccccttgaccagcccagcttcagggcatgtgtcctttcatgagctgtgactgaccacagtccaagggcccactgtggggagtcctcagcatatttggacagaaacgccccagaattggggtaagaagagcctttacagtcaggcagtgaagaaacacagctgctgggcacctgctatgtgcacgcctcagggatgggagtagggggcaggcccagccctgggacctgggtcaggtggctgggcccttcggatcccgagttggagggataaccccttggaggcagagatgggcatcagagacagggcggccccaggtggtcctggagtcgcctcgtaaaggttatgtctatgcctgctgcaggcagagacacagtcaaagtagttgctacctctggaaagtcccagttctgctcatgagcctagatctaagaggctgggacaggcagaggggtatgaaggggtcatgggcaggcagactgtccacactggctgccagggtggccaagtgagtagagtgagctggggcactcactaccgtgccaaccccacgcacggatgaggaccccgggtcgaaggcccacatcctcaatcccacgcaatagttcaggccctgtgagagggttcgctgtctgctcccagccagggctgagctgttcagaggccctacctgttcagaggcagctgggggaagggacagaagttggggggcaggggattgtgtgctggcgggaataatctccttcatctcatggctaaatcttccatccctcctttcaacctttggccagaaacctacgtttctgacccttggagaggtcggccagttcaagaggcacccctgagagccacgtctgcagacacgagggcctcgtgacgtgagccctgagggcagggggctgcaacccctcgcgcgggctccccggccgtggaggacacaaggacaaacacgaagggtccccgacctgccgaccccctcctcccggacaccgcgcgtagcctgtaggctacctccgcgctccacccagagacgggtcgcgctgctcccgccgccgcaaccccgggccctcgtgccggcggtctcccctcttccacgggcgagattactgcatagcagaggtgaagggcgcggaggctgtgggggaacccagcgtggtatggcaggaaaggtcgagcagggaaacaggcccagccagaggctcgggatccggggctcgcgagcgtggtgctcctgggccgggcggtgggggaggggccgcgtgtggcaggcacatgcgcacggcaacctggacctgcggagggcggcggtgaccactgggcctcactccgctaacccaggtccgcatcaggcgcgtgccggtgaggcggctgtggccgcggcgaggagtcagagggaactgaactggctactcccgcggcaggtgggatttaaggtcagcagctgaacaaagaagcgagcgctggccagacttttttctttattagacatggctgcgttggtctcacggaaatctctgcgcttttgcaggcgcccacaagacagggcaactacggggtagcggacatccgccaggcacgcttctagggccgcttctgcaactgcgcatgcgcttgggctgcacccattccgtctagcccaaaaggttcctctacaaccttcctccggattggtctatagggacacgatggccttttacgcaagcgtcacccgtgctgacccggaagttttcttcccagttaaaagtgttggcccgcggcgcgcggcctcttcctgtctgtaccagggcggcgcgtggtctacgccgagtgacagagacgctcaggctgtgttctcaggtgagaccgccgcggggccggggatcctagggacggttcatggtctttcggggatagtgccccgcggcctgggccttttctcattaggtctcatttctgtctctggaaaagaaaatgtagaagaaacgggcgcgggccgagttactcttgacttctttctggtgctccgccgcttctagcttttccccatagcggggcttggggaacttggtttgaactatgcggttgtactctgagataggaagtttccatttcttagggacacgatgccctcttttgctctgtgtaactttccccccgtaatagcagcccctagagccttcatactgtcggtcaagaatcgaaacctttgggttgattgtgccacacggtacctaccgtggtccttgatgtcatataacggtcccgcctcacggccaaagaaacagtccgagacggaacgttgacttgggtcaaagaccatgtaaatcgcgagattgtggtttgaattacagcccatgcagtgtgaggacgtatggcatctgctgagccattataccttggtcccagtgcagcagctgttgactggtggctgccaagtcttgggcccaggggttctaggtgaaagacagatgcttcttgctgacagctgagtaatttttctagtgcttgaaaacacgttcacggcctttcttggtcctttgcgaccccccagttcatcactagatggcggctagcctcagagttgggaatgagtgcgcctttgctccatgctagctgagctctgacgtttttttcctgtcatcaccctgtcccaggatgaccgagtgggagacagcagcaccagcggtggcagagaccccagacatcaagctctttgggaagtggagcaccgatgatgtgcagatcaatgacatttccctgcaggtgaggggaacttggtgattggccttcctggctgggggcggacattattccaggaaggcacacatcaaacttgttgctgtgccattaagtcaagaatagagatcataacaggtaaagaagggatcccttgaccaccacatctaccacatctgctcttacgtcctgttcaaagatgactacaacttctgtcatgagaggactccttcaccagaaggagcatcacatctcacatatggtatttttgttactgtttttgtagtaaaatacataacatccagtgtcattcttttgcatgtgaatatccagttatccagtaccatctcctaaagagatgttttttttccctcaattgaatggccttggccacttgtcataaatcagctggccgtagttttttttttttttttttttttttgagacggagtctcactctgttccctgggctggagtgcagtgacgcgatctgcctaccgggttcacaccattctcctgcctcagcctcctgagtagctgggactacaggtgcccgccactgcacctggctgatttttttttttttatttttagtagagacagggtttcaccgagttagccaggatggtctcgatctcctg

SEQ ID NO: 1887656 - DNA, 4001 bp, Homo sapiens
ctcccaccccagcctctgcagtagctggggctgtgtgtcccactatgcttgatcatgtcaactatctttaaaatgggcacggtggctcacacctgtaggattgcttgagctcaggagttgagaccatcctggccagggtgaggccccatctctacaaaaaattgaaaaatctaccaaatatggcggcacacccctatattatagtcccagctactcggcaggctgaggcatagaggaccagttcatcccaggagttctaggttggaagggcaactgcattccagcctgggtggagaccctcatcttggagtaaaaacaaaacctcacatcacccaagtctgattataagtatactctgcaggtgtgttacaaacatcagcatcaacctcaaggttgcttttctcaaacagtaaccctcaaaaaggaagcactttctttcctttcagacaacagaaactgcttccatcttgagggtcacagcaggagacagtcttgctccagcactctgggtgtttattggtttccttggattctaaaaccttgaccaggctgaaatgaacacaaaaataaagatacagccaaacattcatttgccctgtttgcatgtgttctggaatcccaaattataagcccattaaatgaacatctcgggttccttgcgtgaaaatctcaacaggttgcccttatgaatcaagaagcaatcctcctgagttttgtcccccgaaagaaaaagcagcgactactatacataccttaaatttaaccaagagaactggctagatttatagagaacagcaatgaattttgagccaagtgttcacctaagttccagtacacctaagttccagtcctgatgggaggatccaaaatggaatctgagctgtttaagaatatatattgtcagtcaggcgtggtggtgcacacctgtaatcccagctactcgggaggccgaggcaggagaattgcttgaacccaggaggcagaggttgcagtgagccgagatcatgccattgcactccagcttgggccacaagagtgaatctccgtctcaaaaaaaaaaaagtacaaaaattaggaatatacatggtcagcctgggcagggtagctcacgcctgtaatctcagcactttgagaggccgaggcgggactcctgaggtcaggagttcaagaccaccttggtcaatatggcgaaaccccacctctactaaaaatacaaaaattagccgggtgtggtggagggtaatcccggctactcgggaggctgaggcaggaaaatcgcttgaacccgggaggcggaggttgcagtgagctgagattcatgccactgtactccagctagggcaacaagagtgaaactccatctcaaaaaaaagaaaaaaaaaaaaaaatatatatatatatatatatatacacattgtcatgcacacaaatattctccaggatagaccacaggctaggccataaaacctcaacagaatttaaagagaaatatacaagtatgagtagggagtggtggctgacacctgtaattccagcactttgggaggctgaggcaggaggatgcttgagccccggaggttgagaggctgcagtgagctgtgaacatgacactgcacaccagtctaggcaagagtgagaccgcatctctatttgtattaaataagctatattaaaaaaaaattacactcctgaagacctttcaggcagggaaattctcaggcaatttactcactgtagcttcatgaaattaccaagacgcttatgactatttccgttaaaatgaattttctaagtacatttcctggatcaacagcatccagaagtaaacacaggaatctgatttcatgcttgtttaaaaaactattaacattgccatcaacttccttagacgattgctctcaaactgtgagcttcaagctctggaggtgcttttcatccagttatagaaaaacgccccctggcttgaaatcacagcctgagcttcacttcccaaggagggtttggggcttgagcattctcagggtccatctgaaatcagagtgcaaacaaaaggcatcccagagcagtccactctcaataataagcagaattaggcagaagtaagtagaagtttcaaataagtttgcaaaccaactcaatggacatctactgaaccctccccaacattcaaatgcacacatagcataggacgggacagacgttatgagacacataatacacgaggcatacaatggagaaggaccaaagtacattatgttcaatcaccaccataaaatgcaattagaaatcattgttgaagacaggcacggtggctcacgcctcttatcccagcactttgcgaggcggaggtgggcagaccacctgaggtcaggagttcgagaccagcctggccaacatggtgaaaccctgtctctactaaaaatacaaaaattagctgggtgtagtggcgggcgcctgtaatcccagctactggggatgctgaggcaggagaattgcttgaacccgggaggcagaggtcgcagtgaggcaagatcacactactgcactacagcatgggtgacagagagagactccatctcaaaaaaaaaaaactctcaaatggtcaggcaggatggctcaagcctgtagtcccagcactttggaaggtggaggcaggaggattgcttgagtccaggagtttgagaccaacctgggcaacatagtgagaccctgtctaaatacatagagagataggcaggaaacatggtgaaactccatttctactaaaaatacaaaaaattggccaggggcagtgactcaagcctgtaatcccagcactttgggaggccgaggcaggcagatcacgagatcaggagaccgagaccaccctggctaacacagtgaaaccccgtctctactaaaaatacaaaaaaattagctgggcgtggtggcgggcacctgtagtcccagctagtcgggaggctgaggcaggagaatggcatgaatcaaggaggcggagcttgcagtgatccgagatcacaccactgcactccagcctgggcaacagagcaagactccatctcaaaaaataaaaaaaataaaaaaataaaaaaaaattagccgggcatggtggtgcacacctgtaatcccagctacttgggaggctgaggcaggagaatcacttgaacccaggaggcagaggttgcagtgagccgagattgtgccactgcactccagtttaggcaacaagagcgaaaccctgtctcaaaaaaaaaaaaagaaagaaaaaaagaaaatgcttagacatttacattgagactaagaaaaatggctccccagatcccaacccaggtctatggcaccaaacaaaatctgtgggtgggccccaacaagctgcttcagccaagcttctgggtttttgtcataaatttaagaacctctgggaatgggggcacgtgcatctgtaataccagctacttggaggctgaggcaggatgatcacttgagcccaggaggttgagactgcagtgagctatagtcgcaccattgtactcaaggctggaagacagaacccctggtccatgatatcctgggtagaaaccaggacatctactaaatagatggactggtatggggggcagaagggaaaggaaaccttcacaggaagcacttttttttttttttgagtctcgctctgtcacccaggttgcagtacagtgccattatcttggctcactgcaacctctgcctcctgggttcaagcgatgctcctgtctgcacctcccaagtagctgggattacaggcacatgccaccatgtccagctaatttttgtatttttagtagagacagggtttcaagtgcctcgcctgcctcccaaagtgctgggactacaggcgcgagccaccccacccgccttaggaagcacatactaaggagccaagttaactgcaattcctggggtctcagaacaatgttgcataacagacatttttgctttgcattagagggatttttgcctag

SEQ ID NO: 1887657 - DNA, 4001 bp, Homo sapiens
ggtggctcatgcctgtaatcccagcactttgggaggccaaggcaggaggattgcttgagttcaggagttcaaatccagcctggccaacaaggcaagaccctgtctctggaaaaaaaaaattagctgggcatggtggcacacacctgtgatcctagctcctcaggaggctgaggtgggaagattgcttgatcccaggaagttgaggttgcagtgagctatgatcgcaccactgcactccagcctgggtgacagagcaagactcagactccaaaaggaaactttaaaatgaccaatccaagttttcttttctttttttctttttttttgagtcggagttttgctctgctctcccaggctggagtgcaatggtgtgatcttcgctcactgcaacctccgcctccctggttcaagtgattctcctgcctcaacctcctgagtagctgggattacaggcacctgccaccgcgcccggctaatatttttgtattgttagtagagatagggtttcatcatcattatcatgttggtcaagctggtctcgaactcctgacctcgggtgatctgcctgcctcggcctccaaagtgctgggattacaggcatgagccactgcacctgacctccacgttttattttctgtttgtgctttacttggccctttttctgcctgtaaaaccaacctacctgctcagctcatgggaaaattagtttcattttgtgaaatgaagtgttgcccgattgtagaattgcaaataaaatcaattaagatctttaaactaaatgtgttgtaattttgtttttttgacagatgcccaatgaacaccctgggaatgagatccaagaggcgataatggcatctgctctaataactagtacattgactctaggcttagattattcaccactgaataaataaacgtatttattcagcagtggggaacttacagcaatgatggggacagatacagtccctgatgtcatcaggctgatatgctgctgacagaggacaaaaaacaaacagatcaatgggtcaggaaagcaaggcttttttttttttgagacagggtcttgctctgttacccaagctggagtgcagtggggtgatcatggctcactgcagcctcgatttcccaggctcgaatgatcctcccgccttggcctcccaagtatctgggaccctggcatgatgcaccacatctggctaatttttgttgttgttcttttcttttttttccttttctcttttttttcctttttttctttttttttttttttttttgagagactgggttttgacatgttgcctaggctggtctctagctcctggcctcaagtgatcctcccacctcagcctcctcaaagggcatgtttttaggcataagccaccgcagccagccaaaacaaacaaacaaaaagtaacgtatactttgtgttaataattttgcatagtatattgaaaatttgccaagaaagtacattttagatactctcactacacacacagttaattatggaaggcaatggataggttaattgcttaactctcataattggccatgtgtggtgaaaatgcctgtaatcccagcactttgggaggccaaggtgggcgaatcacctgaggtcaggagttcgagatcagcctgaccaacatggagaaaccccgtctctactaaaaatacaaaaaaattagccaagcatggtggtgcatgcctgtaatcccagctattcgggaggctgaggcatgagaatcgcttgaacccgggaggcagaggctgcagtgagccgagagcacaccattgcacttcagcctgggcaacgacagcaaaactccgtctcaaaaaaaaaaaaaaaaactgtcataattattatttcactgggtacatgtgtatcaaaacacacgctgtacaccctaaatatataaaacaaacacatactgtattgtcaggtagtgataaatcctatcactacctgacaatacagcagtatgtgttttattttctatattacctatttttatattttacctatgtggcaaaatataggacaaaagaggggtagtggtaggaggtcctgttggagagcattggtatccagtaaggatttaaaagtatttatttaacaaagaatagcagaaagtggacggttgattcacacttggtgcaatctcggctcactgcaacctccacctcccaggttcaagcgattctcctgcctcaacctcctgagtagctgggtttacaggcaccagcgaccacgcccgactaatttttgtatttttagtagaaacggggtttcaccatgttggtcaggctggtctcgaactcctgacctcgtgatccgccagcctcggcctcccaaagtcctggaattacaggcgtgagccaccgcgcctggctgatctggttattttcaaaagattccatgagacgggtttcttcagtttacagaggaggaaactgaggcacagaaggataacccagtgagtcccaatatagagatggagactgcaaccgagaaaggggacccagcgctgaggtccccggaaatggtcatttatgggcttggggggcgaccagggcagcgcgcgctgacctatgacgtcatcgggacgttaagcatcgtagcattacctggacgtagccccatttctcttcccggacaggtcctctgatagtcgggtaggttctcaatcaagcctctcattagttatttggtctgtcaatccatttcattcctgcagtcttccgccccgccctcttgagctcgcccctgataggctggcgcgtccgtcacttcaaaaaggtccgcattccttccgcctttctccaggacaccgagggcgaggagggtggtaccaagcggcgcccaccctcagagcactacttccatctctgattggcttcgctgggtgcccgtcgctactccactcgccgctgataggccattcaaccgccgctctgcgcggcgccggctccgcccccgtcgggtgtttgtggtggggctgcggagtcgccgatcccgccggaagcgccaggacaatggggacccgggacgacgagtacgactacctattcaaaggtgcggccggtggggcacagacgggcgaagtcgtggcggcgaggcggcgggcagacgggccaaggccgcgctccaggccgctgggcccaggccggagcccggggcttggggcccggcgggtcaggcagccgggaaggccggagccgaccgggcagcatcagcttcgggctaggatgcgcggctatacggagccggaggcccggagagacctgggggacctaggacgcgccggggcggggccagagcctagagggggtggggcccggagcggtgggagaggctgttagggcggggcctccgcagggggtggagctttcccaagatttggcgggccgggctgggctgaaagcgtgattcgggatgggggcggggtttttaggggcggggctaaggcgtgatgggcgtgaccaataggtgggttgggcctgggcaaacggaggcggggctctcacgaggcttgtcctgattggggcagcgtgtttgggggtggggcccgggagaggcggggcaggcaatgggggctgggccgagatgagggcctgggggtgaggtgtgtggtggtgggagccttggattggggtgcaaagctgggattgagtggaaaggcacccgtgtgtgcagcaagaattccatctcttcactcagaactctcaacagtgctaagccagtacttgcacttttctgagcactttacccgaattaactaaaatcctcactgcagccctttgaggttgatactaaccagcctctctttttacacgttgggaaactgaggcccagagtgacaaagacacagtttataagtgttggaacccgattgagcccaggccacctgtaggccttaccacttaggaagcgtgtcttagggggcttgtggccagcatctgggactttgggttgttggaccaacttcttccaacacgtg

SEQ ID NO: 1887658 - DNA, 4001 bp, Homo sapiens
cctggaccccagcccacgcgagctgcacccgtcccgctggggcctcaccagccacttgtcccgggcatagagcacggtgttgagcatggactcgtagaagaggcagtagcccatccactcgctgatgatgatgtccaccttctccactgggagctccacctcctccaccttccccttgatgatggtcaccactgcgggcggacaagggtggccacgtcagcccccgggaggcctgcccctcacctcacctcccccgggggctagagcctggggaccccacttcagttcagagaactgcgtgagcagaagccatgaacccttctaacagttttaaaattcatacatcgttctggacatttttgaggcaggagcagaaattttatgtggactgggtatcaggtgatgttactttttttttttttttttttttgagacggagtcttgctctgtcacccaggctggagtgcagtggcgtgatctcagctcactgcaacctccgcctcccgggttcacgccattctcctgcttcagcctcccgagtagctgggactacaggtgccagccaccaagtccggctaattttttgtatttttagtagagacagggtgtcaccgtgttggccaggatggtcttgatctcctgacctcacgatccgcccgcctcggcctcccaaaatgttgggattacaggcgtgagccactgtgcccggccgcgattttgtttttaactgggtggttttgatataataagtaacagcatgatcacattctcaaaacagcctttatctattagataagacacaagcagacgcatttaccgggaaaattacatcacagtgggaatttgcttcaaatggactcgtgcgttcattataataatctctttttaaaaatcacttcaggatggcacggtggctcacgcctgtaatctcagcactttgggaggccaaagtggatggatcacctgaggtcaggagttcaagaccagcctggccaacatggtgaaaccatgtctcaactaaaaaaatacaaaaaaaaaaaaagttcacacctgtaatcccagcactttgggaggccaaggcaagcaggcagatcacgaggtcaggagatcgagaccatcctggctaacacggtgaaaccccgtctctactaaaaaaacaaaaaaattagccgggcgtggtggctggcgcctgtaatcccagctaattgggaggctgaggcaggagaatcacttgaacccaggaggcggagcttgcagtgagctgagatcgtgccactgccctccagcctggcaaaagagtgagactccatctcaaaaaaaaaaaaaaaaaaaaaaaaatgctggggatgtacctatgatggtggtcatgcaaaagagcggatgccgcaacatcctggaaagtgttaaacgacatgacaagcaggtgtaagaagccaagggcaagaggctggtatgaaatgctactggcgtgaaaattatgcacgagaatgtaaatgcatttacgtatgtatgtgtttgtaggtccagacttctctggaagttagtgttggttaaactcagaggagggcagctgggaaacagggaaggcttctcactgtgggccttccgtggccaaccacgtgactctattactcattcaagaaactagagagtgcttcttgccctaattttaagactgcggtgctaagcctgtgattttgacactcagattctcaggcggccggcagcccaaaagaccatgggttgggagctgctgaatctgtggtcatctgtagaccccactgctcttcagagggccctggggaagcagggcatcaccccctccactcccacaaacccatcctctttctgggctcaccgtggtctaacttgttggctttgacgatcttcaccgcataatcagagatactggaacactcgatctgagggcccaggaagaagggagggtgagacccatcccctgcccccatcacctccatccaatccctgagccctgatgggctcccctccatccctcaggcccggccccgcctggccaccctggagactcaccccgatgaccttgcgggccccggccttggcagcaaacatgcagaggatgccggtgcccgagccgacgtccagcaccaccttgtccttgaagaggtgccggttatgaaacatggagttgcggtaagtgagggtgcgcacctcgtccttcagcatctcctagggcaagaatggcacagagacgccgtgaggggccccatatccccagctggagaacagcgtgtcctgagagctcggagggccagagctcggccctctcgctttcttccatgcacctcagtttcccttttatatttattcatttatttatttttattttattttattttttgagatggaatctcactctgttgcccaggctggagtgcaatggtgcaatctcagctcactgcaacctccgcctcctgggttcaagtgattctcctgcctcagcctcccaagtagctgagattataggtgcacaccaccatgcccggctaatttttgtatttttcatacagatggggtttcaccatattgcccaggttggtcttcaactcctgacctcaggtgatccacccacctcagccccctaaagtgctgggattacaggcgtgaaccactgcgcccagccagtttccctttttaaaaaatcagattagatggtctaaactccaatcttggccggacttcaccactgctacctaagaaccagtgaaccctggcttttaaaagtcctcaggctgggagcggtggctcacgcctgtaatcccagcacctcaggaggccaaagccggaggatcacttgatcccaagagtttgagaccagcctgggcaacaaggcaagattatctctacagaaaaataagaacatcagctgggcgtggtggcgcgcgcctgtggtcccagctactccgaaagtggaagtggggggatcacctgagccggggaggtcgaggctgcagtgagccatgattgcaccaatgcactctagcctgggcgacagagcgagaccgtctctaaaaataaaaaatggcaattttatgcatattttgccacaattttatgaaaaaggcctcagggggaaaagaaaattccttagaatgccaccccagcttcgttctgggatttcagtgtcttcagtcagatctgaagtgtgcagaagctgttagggcgggagcagccggggcgcagtcccaccgccggtcactagagggcggcagagaccagtgggccctgcccgacctctggctaaggccccaggcacgcatgcgctctcccaccccagccttcggcgcgaggcccctgcagagattcaggctaacctcggtctccaaggcaacggcttggcgaggcgaccctaggaagtgcgcagcagaggggcaggggggcggcctgcggccaggggaagcagtgcgcatgcgtgggaaaacaggttccaccccttccccaacatttaagcccccctaagattggggccttggggactgtccccactgacctcgtggatgccaaagtgtgcgtaggagtcaaagtagtaatctttggatgtcatgtcctcagcgttgggcttctcactgctttccgcctggccacaggacacctgggagggggccgatgggatcatgggtcagatctgggggctccccacagcctcttaaacctccagcgccctacttttccctgaagagtagtatagaacccccaaaatcataccatgacaaccctacagcccccgcctgccatcttgcccccccaggaaccccaaaacctaacaaccccattttccacttccaggacccccccagagcaccatccaggggagcaccccgatacctcagccacgcctaccatctctccagtctctctgaccccgtctctagctcagcccacagctggggaggggaggggaaggaaaatgggggcagacacagggaagggcaaaggggggttggaggtggagttaaggaagt

SEQ ID NO: 1887659 - DNA, 4001 bp, Homo sapiens
cctcatgatccgcccacctcagcctcccaaagtgctgggattacagacgtgagccaccgcacacgtccagcaccttttaaattacgtggacaggcccggtgtggtggctcacctgtaatcctagcagtttgggaagccaaggcagaaggattgcttgagcacaggacttcgaaaccagcctgggaaacatacttagcccccttatctacaaaaaatgcaaaaattaactgggtatggtggtacgtacttatagtcccagctactcaggaggcggaggtggctcacttgaatctggaaggcagaggttgcagagagccaagatctggccactgccctctgggcaccggtgtagtctcagctactcgggagactgatgcagaagaactgcctaaacccaggaggtggaggttgctgtgagttcccacaactgcactccaggctgggcaatagagtgagatcctgtctcaaaaaatgaaaaacatttttgctctacaagattacatttaattggcaactacctagctttgaaccagcaaggggaaaagtaacagaacggcatgtctgtctcactaacttcttgtttttttgagacaggttcttgctctgtcccccagactgcagagcggcaacacagccgtcggctcactgcagcctcaacgtccctggccatacacaactgcagcattttggctaaaccagcatggcttacagagaacaagtagttctttctctctcttttttaagacaagcgtcttgctctgttgcccagactggagttcggtggcgcgatctcggctcactgcaacctccgtctgccgggttcaagcagttctcctgcctcagcctaccgagtagctgggactgcaagcctgtgccatcatgcccagctaatttttttgtatttttagtagagatggggtttcaccatgctggccaggctggtctcgaactcctggccttgtgatccgccctcctcggcctcccaaagtgctaggataataggcgtgcgccactgcgtcctgccacaatagttctttcaatggtaagactagttgaaaacctgagttagatgtgtatctctaatcttagtgatatttaaatgtaaataaaaatgttatgtctggaacacacttgggctgcttgggatatattcagataaatactattatacataatttataaataaatactatttatttactaatagggtatcagaaaggtacaatccctatgtctccaggttgacatagaaattttctactggtccgaaagttgcatctgtacgactggccagttgcttctggttcaacaaggacctaacctgccaatcacacaggacagctgggggctgacattccaaattgtaatctttactaggcacagaggcttagcaggcctctggtttaataacacacgaaagtaactgcttgaagtagcaaggcactcactcacaaggcacctatagagttggtacttatggtctggaaatagccacattgtaagctgaccaccagttataattaccaaatattggcagggcacaggggatcatgcgtgtaatcccagcactttgggaggacgaagcaggaggattgagcccaggcctcagcttgcttctttcgctgtgttgtgacttgcctcgaaattctttccagcaagagatccaagaacccgcttttggggtctggattggttgcctcttctctggcaatggtgtgacccaggctatccctgaatccaagcattatagctgctacggaacccagcctcacaacccagagaccgtggtcatttccttaaagctgggctgaagtccagtttatggcgcagaacaagcaccacggtttagcttttacctgcagtggctcctggagccccccgccccccctcccccccatggtgtttcttcggtgctcgcctcagtcattggacctcagctatgacagcactttcattctggcaccagaaagtgccctcaaggctgagtgccacagactgagaagtaccctccctgtattgtccagtacctggaaactgcaggcacatcctctatgcagaagataagagatttaaaactgacttctgaatgttgctcaatagcgaaaggtagattgagcactctctccagttctcaggaacaatgcagagccttgtaatgcaaatcctaggcctgccctggggctcatgcctgtaatcccagcactttgggggtccccagcctgaataacaccttttacattactttgttttctttttctttttctttctttttttttcttagtcttgctctgttgcccaggctggagtgccatggagcgatcatcagctcactgcagcctccgcctcctgggttcaagcaattctcctgcctcagcctcctgagaagctgggattacaggcgcctgccaccacacctggctaatttttgtatttttagtagagacagggtttcaccatattggccaggctggtctcgaactcctgacctcgtgatccgcccacctcagcctcccaaagtgctgggattacagacgtgagccaccgcacacgtccagcaccttttaaattacgtggacaggcccggtgtggtggctcacctgtaatcctagcagtttgggaagccaaggcagaaggattgcttgagcacaggacttcaaaaccagcctgggaaacatactgaggcccccttctctacaaaagatttaaaactcagctgggtgtgtttgtgcacacctatagtcccagctactctggagacgaaggtggatcacttgagtctggaaggcagaggttgcagagagccaagatctggccactgcactccaccctgggcaacagagtgagaccctgtctctttaaaaaataaagaaaaggaaaaagctgcctttgtggacacctaaataaaaaataaaatgaacctaaaacctactgggtgcagtggctcagaggccggggtgagaggatgtttgtgcccaggtgttgatgaccagcctagacaatggtgggagaccccaaccctacaaaaaaaaaaaaaaattagctaagcatggtcctgtatgcctgccatcccaactacacgggacgctggggtgagggaggttgaggctactgtgagtcacgatctcaccactgcactccagcctgggagacaagcccatctgggcaacacagtgagactcaatcactaattgaacaaaatccaaaaattttaaaaaatcaataatgcggtccaggaatggtggctcacacctgtaaacccagcactttgggaggctgaagagggcggatgactcgaggcttggagtctgagacctggccaacatggtgaaaccccacctctactaaaaatacaaaaacaatcaactgggcatggtggtgcatgcctgtaatcccagctactcgggaggctgaggcaggagaattgcttgaatccgggaggcagaggttgcagtgagccaagatcacaccactgcactgcagcctgggcaacaagagtgaaactccgtctcaaaaaaaaaaaaagagtattaggggcagagaatcaaggtgtcggagtcatgactacaaatagagaggactcagtgttggagattttagggggagtcttacaacctaaatgtgaggctcatatgaccccgggggaagtgcagaaacaccatgggaagccaatacttactgaactctgtgaggacttcccatcctgaggatgaaaggcagggcaggggccctggagctcttttataccctagggaccaccccacagatggagaatggattaaagtctggccacacccactctttgccctccagcctcctccctgaatttgattttcctagcttctgtaaatgcatttctttttctttttctttttcttttttttttttttgagaggtagtctcactctgtcacccaggctggaatagcatgatcttggctcactgtgacctccgccccccaggttcaaatgattctcctgcctcagtctccagagtagctggga

SEQ ID NO: 1887660 - DNA, 4001 bp, Homo sapiens
agagtctcgctctgtcgcccagggtgaagtgcagtggcacgatctcggctcactacaagctccgcctcctgggttcatgccattctcctgcctcagcctccccagcagctgggactacaggcgcctgccaccacgcccggctaatttttttgtatttttttagtagagacggggtttcaccgtgttagccaggatgatccacccgcctcagcctcccaaagtgctgggattacaggcgtgagccaccacgcccgaccaatatctgtcttcttgatgcaaatccaagtttagcatcctcatttgggcattcatttgttaatctattctgcagtcttctgatctacctcttatgctactcttctttgcaattttactgtaaggcaagaaattcctagtcttcagtaacctggagttaagataccagtccccatcagttacaatcaaggactcacctcagcactgaaaatgcctgggtcccacacgtcacaggcaatgtgccagtatgttcttatcagactccagaaagcactcccagattgcatgtcaccaaggagacagtgatcacaagccccagggaaaacctgcaaggtagcatagaacccatgtccctccacaggcagtcctcctacagctcaacagaagacagtgttggaatgtgttgaattctgacattctgttctaccacctcacggggacagcgcctgtaaaagcctttgggagagtgtggctgggaaatgggcacattacttctcagtgcacatccagcaagtgatcctccatgtgtcaaaaaatcttatgcttgctgggcgcggtggctcacacctgtaatcccagcactttgggagactgaggtgggaggatcaactgaggtcaggagtttaagaccagcctggccagcatggtggcaccccatctccactaaaaacacaaaacataagccaggcacggctgtaatctcagctacttgggcggctgatgcaggagaattgcttgaacccgggaggcagaggttgcagtgagctgagatcactgcactgcactccaggctgggcaatagagtgggatcctgtctcaaaaaaaaaaaaagaaaaataaggccgggcgcggtggctcacgcctgtaatcccagcactttgggaatccgaggcgggcagatcacaaggtcgggagtttgagaccagcctggccaacatagtgaaactctgtctctactaaaaatgcagaaaacaggctgggtgcggtggctcacgcctgtaatcctagcactttgtgaggccgagacgggcggatcacctgaggttgggagttggagaccagtctgaccaacatggagaaaccccgtctctactaaaaatacaaaattagctgggcgtggtggcgcatgccagtaatcccagctactccggaggctgaggcaggagaatggcttgaacccgggaggcagaggttgctgtgagccgagatcgtgccattgcactctagcctgggcaacaagagtgaaactccatctcagaaaataaaaagaaaaatagtgatctcaggtgatccatccacctcagcctcccaaagtgctgggattacaggcgtgagccaccgcgcccggcctcagcttgcttctttcattgtgttgtgacttgcctcgaaattctttccagcaagagatccaagaacccgcttttggggtctggattggttgcctcttctctggcaatggtgtgacccaggctatccctgaatccaagcattatagctgctacggaacccagcctcacaacccagagaccctggtcatttccttaaagctgggctgaagtccagtttatggcgcagaacaagcaccacggtttagcttttacctgcagtggctcctggagccccccgccccccctcccccccatggtgttttttcggtgctcgcctcagtcattggacctcagctatgacagcactttcattctggcaccagaaagtgccctcaaggctgagtgccacagactgagaagtaccctccctgtattgtccagtacctggaaactgcaggcacatcctctatgcagaagataagagatttaaaactgacttctgaatgttgctcaatagtgaaaggtagattgagcattctctccagttctcaggaacaatgcagagccttgtaatgcaaatcctaggcctgccctggggctcatgcctgtaatcccagcactttggggatccccagcctgaataacaccttttaaattactttgttttctttttctttttctcttttttttttcttagtcttgctctgttgcccaggctggagtgccatggcgcgatcatcagctcactgcagcctccgcctcctgggttcaagcaattctcctgcctcagcctcctgagaaactgggattacaggcgcctgccaccacacctggctaatttttgtatttttagtagagacagggtttcaccatattggccaggctggtctcgaactcccgacctcatgatccgcccacctcagcctcccaaagtgctgggattacagacgtgagccaccgcacacgtccagcaccttttaaattacgtggacaggcccggtgtggtggctcacctgtaatcctagcagtttgggaagccaaggcagaaggattgcttgagcacaggacttcgaaaccagcctgggaaacatacttagcccccttatctacaaaaaatgcaaaaattaactgggtatggtggtacgtacttatagtcccagctactcaggaggcggaggtggctcacttgaatctggaaggcagaggttgcagagagccaagatctggccactgccctctgggcaccggtgtagtctcagctactcgggagactgatgcagaagaactgcctaaacccaggaggtggaggttgctgtgagttcccacaactgcactccaggctgggcaatagagtgagatcctgtctcaaaaaatgaaaaacatttttgctctacaagattacatttaattggcaactacctagctttgaaccagcaaggggaaaagtaacagaacggcatgtctgtctcactaacttcttgtttttttgagacaggttcttgctctgtcccccagactgcagagcggcaacacagccgtcggctcactgcagcctcaacgtccctggccatacacaactgcagcattttggctaaaccagcatggcttacagagaacaagtagttctttctctctcttttttaagacaagcgtcttgctctgttgcccagactggagttcggtggcgcgatctcggctcactgcaacctccgtctgccgggttcaagcagttctcctgcctcagcctaccgagtagctgggactgcaagcctgtgccatcatgcccagctaatttttttgtatttttagtagagatggggtttcaccatgctggccaggctggtctcgaactcctggccttgtgatccgccctcctcggcctcccaaagtgctaggataataggcgtgcgccactgcgtcctgccacaatagttctttcaatggtaagactagttgaaaacctgagttagatgtgtatctctaatcttagtgatatttaaatgtaaataaaaatgttatgtctggaacacacttgggctgcttgggatatattcagataaatactattatacataatttataaataaatactatttatttactaatagggtatcagaaaggtacaatccctatgtctccaggttgacatagaaattttctactggtccgaaagttgcatctgtacgactggccagttgcttctggttcaacaaggacctaacctgccaatcacacaggacagctgggggctgacattccaaattgtaatctttactaggcacagaggcttagcaggcctctggtttaataacacacgaaagtaactgcttgaagtagcaaggcactcactcacaaggcacctatagagttggtacttatggtctggaaatagccacattgtaagctgaccaccagtta

SEQ ID NO: 1887661 - DNA, 4001 bp, Homo sapiens
gatccgcccacctcagcctcccaaagtgctgggattacagacgtgagccaccgcacacgtccagcaccttttaaattacgtggacaggcccggtgtggtggctcacctgtaatcctagcagtttgggaagccaaggcagaaggattgcttgagcacaggacttcgaaaccagcctgggaaacatacttagcccccttatctacaaaaaatgcaaaaattaactgggtatggtggtacgtacttatagtcccagctactcaggaggcggaggtggctcacttgaatctggaaggcagaggttgcagagagccaagatctggccactgccctctgggcaccggtgtagtctcagctactcgggagactgatgcagaagaactgcctaaacccaggaggtggaggttgctgtgagttcccacaactgcactccaggctgggcaatagagtgagatcctgtctcaaaaaatgaaaaacatttttgctctacaagattacatttaattggcaactacctagctttgaaccagcaaggggaaaagtaacagaacggcatgtctgtctcactaacttcttgtttttttgagacaggttcttgctctgtcccccagactgcagagcggcaacacagccgtcggctcactgcagcctcaacgtccctggccatacacaactgcagcattttggctaaaccagcatggcttacagagaacaagtagttctttctctctcttttttaagacaagcgtcttgctctgttgcccagactggagttcggtggcgcgatctcggctcactgcaacctccgtctgccgggttcaagcagttctcctgcctcagcctaccgagtagctgggactgcaagcctgtgccatcatgcccagctaatttttttgtatttttagtagagatggggtttcaccatgctggccaggctggtctcgaactcctggccttgtgatccgccctcctcggcctcccaaagtgctaggataataggcgtgcgccactgcgtcctgccacaatagttctttcaatggtaagactagttgaaaacctgagttagatgtgtatctctaatcttagtgatatttaaatgtaaataaaaatgttatgtctggaacacacttgggctgcttgggatatattcagataaatactattatacataatttataaataaatactatttatttactaatagggtatcagaaaggtacaatccctatgtctccaggttgacatagaaattttctactggtccgaaagttgcatctgtacgactggccagttgcttctggttcaacaaggacctaacctgccaatcacacaggacagctgggggctgacattccaaattgtaatctttactaggcacagaggcttagcaggcctctggtttaataacacacgaaagtaactgcttgaagtagcaaggcactcactcacaaggcacctatagagttggtacttatggtctggaaatagccacattgtaagctgaccaccagttataattaccaaatattggcagggcacaggggatcatgcgtgtaatcccagcactttgggaggacgaagcaggaggattgagcccaggcctcagcttgcttctttcgctgtgttgtgacttgcctcgaaattctttccagcaagagatccaagaacccgcttttggggtctggattggttgcctcttctctggcaatggtgtgacccaggctatccctgaatccaagcattatagctgctacggaacccagcctcacaacccagagaccgtggtcatttccttaaagctgggctgaagtccagtttatggcgcagaacaagcaccacggtttagcttttacctgcagtggctcctggagccccccgccccccctcccccccatggtgtttcttcggtgctcgcctcagtcattggacctcagctatgacagcactttcattctggcaccagaaagtgccctcaaggctgagtgccacagactgagaagtaccctccctgtattgtccagtacctggaaactgcaggcacatcctctatgcagaagataagagatttaaaactgacttctgaatgttgctcaatagcgaaaggtagattgagcactctctccagttctcaggaacaatgcagagccttgtaatgcaaatcctaggcctgccctggggctcatgcctgtaatcccagcactttgggggtccccagcctgaataacaccttttacattactttgttttctttttctttttctttctttttttttcttagtcttgctctgttgcccaggctggagtgccatggagcgatcatcagctcactgcagcctccgcctcctgggttcaagcaattctcctgcctcagcctcctgagaagctgggattacaggcgcctgccaccacacctggctaatttttgtatttttagtagagacagggtttcaccatattggccaggctggtctcgaactcctgacctcgtgatccgcccacctcagcctcccaaagtgctgggattacagacgtgagccaccgcacacgtccagcaccttttaaattacgtggacaggcccggtgtggtggctcacctgtaatcctagcagtttgggaagccaaggcagaaggattgcttgagcacaggacttcaaaaccagcctgggaaacatactgaggcccccttctctacaaaagatttaaaactcagctgggtgtgtttgtgcacacctatagtcccagctactctggagacgaaggtggatcacttgagtctggaaggcagaggttgcagagagccaagatctggccactgcactccaccctgggcaacagagtgagaccctgtctctttaaaaaataaagaaaaggaaaaagctgcctttgtggacacctaaataaaaaataaaatgaacctaaaacctactgggtgcagtggctcagaggccggggtgagaggatgtttgtgcccaggtgttgatgaccagcctagacaatggtgggagaccccaaccctacaaaaaaaaaaaaaaattagctaagcatggtcctgtatgcctgccatcccaactacacgggacgctggggtgagggaggttgaggctactgtgagtcacgatctcaccactgcactccagcctgggagacaagcccatctgggcaacacagtgagactcaatcactaattgaacaaaatccaaaaattttaaaaaatcaataatgcggtccaggaatggtggctcacacctgtaaacccagcactttgggaggctgaagagggcggatgactcgaggcttggagtctgagacctggccaacatggtgaaaccccacctctactaaaaatacaaaaacaatcaactgggcatggtggtgcatgcctgtaatcccagctactcgggaggctgaggcaggagaattgcttgaatccgggaggcagaggttgcagtgagccaagatcacaccactgcactgcagcctgggcaacaagagtgaaactccgtctcaaaaaaaaaaaaagagtattaggggcagagaatcaaggtgtcggagtcatgactacaaatagagaggactcagtgttggagattttagggggagtcttacaacctaaatgtgaggctcatatgaccccgggggaagtgcagaaacaccatgggaagccaatacttactgaactctgtgaggacttcccatcctgaggatgaaaggcagggcaggggccctggagctcttttataccctagggaccaccccacagatggagaatggattaaagtctggccacacccactctttgccctccagcctcctccctgaatttgattttcctagcttctgtaaatgcatttctttttctttttctttttcttttttttttttttgagaggtagtctcactctgtcacccaggctggaatagcatgatcttggctcactgtgacctccgccccccaggttcaaatgattctcctgcctcagtctccagagtagctgggattacat

SEQ ID NO: 1887662 - DNA, 4001 bp, Homo sapiens
tcgctctgtcgcccagggtgaagtgcagtggcacgatctcggctcactacaagctccgcctcctgggttcatgccattctcctgcctcagcctccccagcagctgggactacaggcgcctgccaccacgcccggctaatttttttgtatttttttagtagagacggggtttcaccgtgttagccaggatgatccacccgcctcagcctcccaaagtgctgggattacaggcgtgagccaccacgcccgaccaatatctgtcttcttgatgcaaatccaagtttagcatcctcatttgggcattcatttgttaatctattctgcagtcttctgatctacctcttatgctactcttctttgcaattttactgtaaggcaagaaattcctagtcttcagtaacctggagttaagataccagtccccatcagttacaatcaaggactcacctcagcactgaaaatgcctgggtcccacacgtcacaggcaatgtgccagtatgttcttatcagactccagaaagcactcccagattgcatgtcaccaaggagacagtgatcacaagccccagggaaaacctgcaaggtagcatagaacccatgtccctccacaggcagtcctcctacagctcaacagaagacagtgttggaatgtgttgaattctgacattctgttctaccacctcacggggacagcgcctgtaaaagcctttgggagagtgtggctgggaaatgggcacattacttctcagtgcacatccagcaagtgatcctccatgtgtcaaaaaatcttatgcttgctgggcgcggtggctcacacctgtaatcccagcactttgggagactgaggtgggaggatcaactgaggtcaggagtttaagaccagcctggccagcatggtggcaccccatctccactaaaaacacaaaacataagccaggcacggctgtaatctcagctacttgggcggctgatgcaggagaattgcttgaacccgggaggcagaggttgcagtgagctgagatcactgcactgcactccaggctgggcaatagagtgggatcctgtctcaaaaaaaaaaaaagaaaaataaggccgggcgcggtggctcacgcctgtaatcccagcactttgggaatccgaggcgggcagatcacaaggtcgggagtttgagaccagcctggccaacatagtgaaactctgtctctactaaaaatgcagaaaacaggctgggtgcggtggctcacgcctgtaatcctagcactttgtgaggccgagacgggcggatcacctgaggttgggagttggagaccagtctgaccaacatggagaaaccccgtctctactaaaaatacaaaattagctgggcgtggtggcgcatgccagtaatcccagctactccggaggctgaggcaggagaatggcttgaacccgggaggcagaggttgctgtgagccgagatcgtgccattgcactctagcctgggcaacaagagtgaaactccatctcagaaaataaaaagaaaaatagtgatctcaggtgatccatccacctcagcctcccaaagtgctgggattacaggcgtgagccaccgcgcccggcctcagcttgcttctttcattgtgttgtgacttgcctcgaaattctttccagcaagagatccaagaacccgcttttggggtctggattggttgcctcttctctggcaatggtgtgacccaggctatccctgaatccaagcattatagctgctacggaacccagcctcacaacccagagaccctggtcatttccttaaagctgggctgaagtccagtttatggcgcagaacaagcaccacggtttagcttttacctgcagtggctcctggagccccccgccccccctcccccccatggtgttttttcggtgctcgcctcagtcattggacctcagctatgacagcactttcattctggcaccagaaagtgccctcaaggctgagtgccacagactgagaagtaccctccctgtattgtccagtacctggaaactgcaggcacatcctctatgcagaagataagagatttaaaactgacttctgaatgttgctcaatagtgaaaggtagattgagcattctctccagttctcaggaacaatgcagagccttgtaatgcaaatcctaggcctgccctggggctcatgcctgtaatcccagcactttggggatccccagcctgaataacaccttttaaattactttgttttctttttctttttctcttttttttttcttagtcttgctctgttgcccaggctggagtgccatggcgcgatcatcagctcactgcagcctccgcctcctgggttcaagcaattctcctgcctcagcctcctgagaaactgggattacaggcgcctgccaccacacctggctaatttttgtatttttagtagagacagggtttcaccatattggccaggctggtctcgaactcccgacctcatgatccgcccacctcagcctcccaaagtgctgggattacagacgtgagccaccgcacacgtccagcaccttttaaattacgtggacaggcccggtgtggtggctcacctgtaatcctagcagtttgggaagccaaggcagaaggattgcttgagcacaggacttcgaaaccagcctgggaaacatacttagcccccttatctacaaaaaatgcaaaaattaactgggtatggtggtacgtacttatagtcccagctactcaggaggcggaggtggctcacttgaatctggaaggcagaggttgcagagagccaagatctggccactgccctctgggcaccggtgtagtctcagctactcgggagactgatgcagaagaactgcctaaacccaggaggtggaggttgctgtgagttcccacaactgcactccaggctgggcaatagagtgagatcctgtctcaaaaaatgaaaaacatttttgctctacaagattacatttaattggcaactacctagctttgaaccagcaaggggaaaagtaacagaacggcatgtctgtctcactaacttcttgtttttttgagacaggttcttgctctgtcccccagactgcagagcggcaacacagccgtcggctcactgcagcctcaacgtccctggccatacacaactgcagcattttggctaaaccagcatggcttacagagaacaagtagttctttctctctcttttttaagacaagcgtcttgctctgttgcccagactggagttcggtggcgcgatctcggctcactgcaacctccgtctgccgggttcaagcagttctcctgcctcagcctaccgagtagctgggactgcaagcctgtgccatcatgcccagctaatttttttgtatttttagtagagatggggtttcaccatgctggccaggctggtctcgaactcctggccttgtgatccgccctcctcggcctcccaaagtgctaggataataggcgtgcgccactgcgtcctgccacaatagttctttcaatggtaagactagttgaaaacctgagttagatgtgtatctctaatcttagtgatatttaaatgtaaataaaaatgttatgtctggaacacacttgggctgcttgggatatattcagataaatactattatacataatttataaataaatactatttatttactaatagggtatcagaaaggtacaatccctatgtctccaggttgacatagaaattttctactggtccgaaagttgcatctgtacgactggccagttgcttctggttcaacaaggacctaacctgccaatcacacaggacagctgggggctgacattccaaattgtaatctttactaggcacagaggcttagcaggcctctggtttaataacacacgaaagtaactgcttgaagtagcaaggcactcactcacaaggcacctatagagttggtacttatggtctggaaatagccacattgtaagctgaccaccagttataatta

SEQ ID NO: 1887663 - DNA, 4001 bp, Homo sapiens
gtttggtgtacatatgactacattatatacatgataagactatatgattaaatatacatcatatattgttgagaccctgtctatgaaaaaaaaaaaaaagaatatactgtttgctcacattaaaaataactcctcaccgggtgcggtggctcatgcctgtaatcccagcagtttgggaggccgaggcaggtggattagttgaggtcaggagtttgagaccagccggaccaacatggcaaaaccccgattctaccaaaaggacaaaaattagccggggtggcggcatgcacctgaaatcccagctactcaggaggctgaggcaggagaatcgcttgaacccggaaggcgtaggttgcagtgagccgagatcatgccactgcactccagcctgggcgacaagaatgagactccatctcaaacaaacaaacaaacaaacaaacaaaattcctacacacaagtgcttgctttggcagcacaaaaaaatacaaataataattaaaaaaaaaaaaaaaaacaccctgcagtccgagcagggtggctcatgcctgtaatcccaccactttggaaagcagaggcgggcagatcacctgaggtcaggagttcaagactaacctggccaatgtggtgaaactccatctctgctaaaaatacaaaaattagccaggcgtggtggcacgtgcctataataccagctacttgggaggccgaggttgcagtgagcagagaatgtgtcactgcctgcccgcctggcccacatagtgagactctgtctcaagaacaaaaacaacaaaaaaagtaggggggaccaactagcctaagaggtctaggttggaagcgccaccgcactcctgcccgggcaacagaaaccctgtgttgcaaaaaaactaaacaaaaacagaaccccaacatcatgcaagtctgatgataagcacgctctgcaaatgcgttaccaagatcagcatcaacttcaacgtggtttttctcaaacagtaacactctaaaaggaggcactttgttttctttcaaacagaaagtgctcccttttggagaatgactgcatgagatcttctcgctccaaaactctgggtttttgttggaattttccttaccaggttaaaatggacacaaaaataaagatgcattcattgtccctgtttgcatgttttctggaatccagaacataaacccctaaaaggaccatctccagttccttgcttcaaaggctcagcaggttagccttgttcacgaaggggcaaccctcctgagtattgtctccaaagagaaaaagcaaagcctaccacacataccttatatttaaccaagagaattgggctggatttctagagaacagcaatggattttgagccatgtgttcacttgagttccagcacagggacacacagtcccgatgggagcaaccaaaatggaatctaagatgatatttaagaatatacgttgtgggccaggcacagtggctcatgcctgtaatcccagcactttgcgaggccgaggcaggtggatcacctaaggtcaggagttcaagactaatctggccatcatgatgaaactccgtctctgctaaaaatacaaaaattagccaggcgtggtggcatgtgcctgtaataccagctactcgggaggcagaggttgcagtgagcagagaacataccactgcactccagcctgggccacagagagagactgtctcaagagaaaaaaaagggggagggggtgggggcagggaccaactgagcccaagaggtctaggttggaagtgtcaccgcactccagcctgggcaagagaccctgtgttgcaaaaaaactaaacaaaaacagaaccccaacatcatgcaagtctgatgataagcacgctctgcaaatgtgttaccaagatcagcatcaacttcaacgtggtttttctcaaacagtaacgctccaaaagaaggcactctgctttcagacaacagaaagtgctttcttttggagaatgactgcatgagatcttctcactccaaaactctgggttttttgttggaatttaccttaccagattaaaatgaacacaaaaataaagatgcattcattggccaggcgcggtggctcacgcctggaatcccaacactttgggaggctggtcaagagaccacgaccatcctggccaacatggtgaaactccgtctctactaaaaatacaaccatttgccgcctgtggtggcatgtacctgtagtcccagctactcgggaggctgaggcaggggaattacttgaaccaggaggcagaagttgcagtgagccgagatcgtgccactgcactccagactggcaagagtaagactccatctcaaaaaaaaataaaaataaaaataaaaaaggtgcattcattgcccctgtttgcatgttttatggaatccagaacataaacccctgaaaggaccatctccagttccttgcttcaaaggcttagcaggttagccttgttcatcaaggggcaatcctcctgagttttgtccccaaagagaaaaagcaatgcctaccacacataccttatctttaaccaagagaattgggctggatttctaaggatgttgagccagtgttcacttgagttccagcacagaaacacacagtcctgatgggaacatccaaaatggaatctaagataatgtttaagaatatacattgttgtacacacaaataccctccaggacagaccacaggctaggccgtaaaagctcctcagtaagatttgacagagctggggggaaaaaaagaatgtacattgtcacacacacgaacattcttcaggatagaccacaggctaggctgtaaaacctcaataattttttttcttggagactaagttaggaaaaacaaatgcccacacctaaacaaccaatcatttctagttcaagtacatctcaagtatactgttgacctgaaatagaaagttaaccgggtttccctgctctgggaagccccctttggtaattcagttaagggtctcctttggaaggtaatgggtaggaacatggagatgtcagccaagggaagtgactctcagggatttctatggattatgcagatgccctgccagatcccaaacttccccaaaagatcctaagtccaggcaggaaggaccactggggtccagaaaccaaatgaagtggccctgggcaggagtctctgttgtcagattccatgactaagacagccagggagcagagtgaaaatcccaggggctctctctccaggagacacctgctccatccagatcaaacccaaaatgtccccagccagtgatgcctggctctcctttcccctcggctcatcctgcctgcatcggtgcagtgccctgacgttcccagtccagagggtggaggttgcagtgaggggagatcacagactgtcagagccttcctctctccttgcctatgcatgggttaatattcacctgaagtcccagctactagggtacgcataggagcacagcccagtttagtctgggtgacacagtgagacccccatctctaaaatttaaaaattaaatcaaatgtgcaattttttgacctgttcatgcacactacatttcggctgcatttacccaataaaaactcagagcccatgcactccacctccgtgcgcttgctaagcagtgcacatcccatcagcaagggacactgaggtcccctccaactctacctcaacccaagaggtgttctataaagcagtgcaggcagaacttccatggagtaagaggtgttaagggctggacgaacaggcatcgctcactgtggcaacaacaagagctgctgaacatcccacctgttactagagagacccttctagggttctaaaggaccctatttttgcgaaaatatctgtggttttgtctcatgtgacatttgtcactgtgattgagatggattttctttacaatagtttatattaggcacagcaaacattttagatcttgccaagcaacctgtattcagaggcgaggt

SEQ ID NO: 1887664 - DNA, 4001 bp, Homo sapiens
ctcatattgaaaattaagatcaaaggccgggtgcagtggttcatgactgtaaacccagcactttgggaggccgaggcaggtggattacgaggtcaggagatggagaccatcctggtcaacacggtgaaaccccatctctgctaaaaatacaaaaattagccgggcgtggtggcatgggcctgtactcccagcaacacaggagactgagatgggagaaccacttcaacccgggaaggggagattgtagtgagcagagatcgtgaccctgcaaagaggaccacctgagcccaagagagctaggttggaagtgccactgctctccagcctgggcaaaagagaccccgtcttagaaaacaaacaaaccaggaacaaaagcccaccctcatccaagtctgatgataagcacgctctgcaaatgtattgccgagatcagcatgaacgttaacgttgcttttctcaaactgtaatcctctaaaaagatgcactttcttttctttcagacaacagaaagcgcttccctctagagggtcacaggctgagatcttcttgctccagcaccattgattttttgttggaattttccttgaccaggttaaaatggacacaaaaataaagatgcatttattggccctgtttgcatgatttctggaatccagaacataaacccctatcagggccatctccagttccttgtttcaaaaagcaatgccgactatacataccttatatttaaccatgagaattgggctggattctagagaacagcaatagattttgagctaagtgttcactcgagttccagtacagtgacacacagtcccgacgggggcatccaaaatggaatctacgatgttgaagaatatgcattgtcacacacacaaacaccctccaggagagaccacaggccaggctgtaaaagctcctcaataaaatgagcagaaacacacaggtacaggtgaggtgtggtggctcacacctctaaacccagccctttaggaggctgaggcaggagtatcacttgagttcaagagtttgagaccagcctgggcaacatggtgatacctcatgtgtagagaaaacagaaaagttagccgggcgtggtggtgtgcgcctgtagacagctactcaagaggctgaagtggcaggtggaggttgcaataagctgagatggcaccactgcactctagcctgggtgacagacccagaccttatctaaaaaaaaaacaaaaacatacacacacaaacaaaaaattacccaaagtgatacgagagtattctctgtgtatagaagagtgttttgtgtgtatatgactatgttacatgtataataagaatatgataaaatatatatttttgagaccgtacatcaataaaaattaagttccatatactatgtgctcacatgaaaaataattcctacacatatgtgcttgcattggcagcacacattaaaaaaaattggaggctaggctgggtggcttacacctataatctcagcattttgggaggctgaggcaggcggatcacctgaggtcaggagttggagactaacctggccatcatgatgaaactgcatctctgctaaaaatgcaaatattagccaggcgtcgtggcacgtgcacctgtaatcccatctacttgggaggagaggttgcagtgagcagataacatgccactgcgctcaagcctgggccagagacagagactctgtttcaagaaaaaaaaaaaaagcaagcacgggaccacttgagcccaagagatctaggttggaagcgccaccgcactccagcctgggcaacagagaccccatgatgcaaaacaactaaacaaaaacagaaccccaacatcatgcaagtctgatgataagcacgctctgcaaatgtgttaccaagatcagcatcaacttcaacgtggtttttctcaaacagtaacgctccaaaagaaggcactctgctttcagacaacagaaagtgctttcttttggagaatgactgcatgagatcttctcgctccaaaagtctgggttttttgacggaattttcctcacctggttaaaatggacacaaaaataaagatacatttattgactctctctgcatgttttctggaatccagaatataaacccctaaaaggaccatctccagttccttgcttcaaaggctcagcaggttagccttgttcatcaagagacaatcctcctgagttctgtccccaaagagaaaaagcaatgcctaccacacataccttatatttaaccatgagaattgggctggatttctagagaacagcaatggatttgaagccaagtgttcacataagtcccagtacagggacacacagtccccatgcaagcatccaaaatggaatctaagatgatgtttaagaatatacactgttgtacacacattctccaggatagaacacaggctaggccataaaagctcctcaataaattttttttttttttttgaaacaagtctcactttgttgcccaggctgtagtgcagggccgtgatctcagctcactgcaagctctgcctccaggtttccagcaattctcctgtctcagcctctggggtacctgggattacaggcacgtgccacgatgcccacctaattttgcatttttaaaatttttttttcttttttttcttttctttttgtggagaacagggtctcactgtattgcccaggcaggtctcaaactcctgggctcaagctatcctcctgcctctgcctccctaagagctgggattacaggcgtgagccaccgcgcccggctaatttttgtacttttagtagaaatgaggtttcaccatcttggccaggctggtctcaaactcctgactccaggtgattagcctgctttggtctccaagagtgctgagacgacatgcctgagctaccgtgcctggcctgcagacagctattccagaggctgcggtggggcatgggccaagactgcaacactgcactgcagcctgggtgacagagccagaccttgtctcataacacacacacacacacacacacacacacacacacacacacacgaaggaaaaaaaacccaaagtgatacaagagtattctgtgtgtgtagaagagtgttttgtgttaatcattatattatctatagaagatgatatgataaaatgtgtatcatatataagacactgcccccagaaaaggaagttctatatactgaatgctcacacgaagagtaatttctccacctaagtgccttctctggcagcatatgttaaaaaaaaaaaaaaatgacagcgattcccacgtcccctgcacaaagtgacacccaaattcatgatggtcccatatttaaaattagaaaaaacaaatgccgacacccacagccaatcatttctacttcaagtacatctcaagtatactgttaatctgaaatacaaatttaaccaggtttccctgctctgggaagccccctttggtaattcagataagggtctcctttggaaggtaatgggtaaggaacatggagatgtcagccaagggaagtgactctcagggatttctatggattatgcagacgcccagccagatcccaaacttccccaaaagatcccaagtccaggcaggaaggaccactgggctccagaaaccaaatgaagtggccctgggcaggagtctctgttgtcagattccatgactaagacagccagggagcagagtgaaaatcccaggggctctctctcccagaagacacctgctccatccagatcaaacccaaaatgtccccagagaatgatgcctgcttctcctttcccctcggctcatcctgcctgcatcggtgcagtgccctgacgttcccagcccagaggccttcactccttccagtgccccaggagggtcaccttgcagttctcagggaggaagatggggtcttccacccttgtgagcttcccagacatcagggtctgcccgccccactccattcccaaaggatgttccgcccagttctcccagc

SEQ ID NO: 1887665 - DNA, 4001 bp, Homo sapiens; identical to SEQ ID NO: 1887663

SEQ ID NO: 1887666 - DNA, 4001 bp, Homo sapiens; identical to SEQ ID NO: 1887664

SEQ ID NO: 1887667 - DNA, 4001 bp, Homo sapiens
tgcagtaagccgagatcaagccactgaactacagcctgggtgacggtgagaccccatcttaaaaataaataaaaaaaaaacccaaatattatccaggtgtggggatgggcgcctgtaaatctcagctacttgggaagctgaagcaggagaattgcttgaacctgggaggcggaggttgtagtgagccaagatgggatgactgcacttcagcctcggtgacagagagagactctggcccccaaaaaggaccatttaaatccaagagacctaggtgggatgtgccaccgcactccagcatgggcaacacagaccctgttttagaataacaaagcaaaaccaaaacagaaccccgccaccgtccaagtgtgataagcatgctctgcaaatgtattaccgagatcagcatcaacttcaacgctgcttttctcaaaccgtaacactccaaagggaagcgatttcttttctttcagacaacagaaagcgctttcctttgtagactcacagcttgagatcttcttgctccagcactctgggtttcttgttgaaattttccttgaccaggttaaaatggacagaaaaataaagatgcattcattgtccctatttgcatgttttctggaatccagaacataaccccctaaaaggaccatctccagttccttgcttcaaaggctcagcaggttagccttgttcaagaggcagtcctcctgagtattatctacaaagagaaaaagcaatgcctactacacatacctttttattttttattttttgagatgaagtctcgctctgtcacccaggctggagtgcagtggcgcgatctcagctcactgcaacctccgcttcctgggttcaagcaattctcctgcctcagcctcccaagtagctgagattactggtggagccaccacgcccagctaatttttgtatttttagtagagatgggtttcaccgtgttggtcaggcttgtctcgaactcctgacctcgtgatcctcccacctcggtctcccaaagtgctgggattacaggcatgagccaccacgcccagcccacataccttgtctttaaccaagacaattggcctggaattcatgagaacagcaatggatgttgagccaagtgttcacttgagttccagtacaggggcacacagtccggatgggagcatccaaatggaatctaaaatgttgaagaatatacattgtcacacacacaaacattctccaggatagaccacaggctgggatgtaaaagctcctccataaaatttgagcagaaacacacaagagtagggcacgcttgctcacaccattaatcacagcagttttggaggcccaggcgggaggagcaattgagctcaagggtccgagaccagcctgggcaacatggtgaaacctcatctatacaaaaaatacaaaagttaggcaggtgtggtagtgcatgcctggagacaggtattcaggaggctgaggtgggaggtggaggttgcagtgagccgagatcgcaccactgccctatagcctgggtgacagagccagaccctgtctcaaaaataaatcaataaatcaataataaaaatgcaaaagttagctgggcatggtggcacagcctgtaaccccagctgctccggaggctgaggcaggagaattgcttgaacccaggaggcagagattgcagtgagccaagttcctgccactgcactccagccagggccacagagtgagactctgtcccaaaaagagggccacttgaacccaagagatctaagttggaagtgccaccgcactccagcctggggaacagacaccctgtcttagataaaaaacaaaaccccaccattatccacgtctgatgatcagcacgctctgcaaatgtattaccaagatcagcgtcaacttcaacgttgcttttctcaaaccgtaaccctctgaaaggaagcactttcttttctttcagacaacagaaagtgcttctttcctcgagaaggtcacagcctgagatcttgctccagcaccgtgggttttttgttggaattttcctagatcaagttaaaatggacagaaacataaagatgcatttattggccctgtttgcatgttttctggaatccagaatataaacccctaaaaggaggatctccagttacttgcttcaaagaatcagcaggttagctttgttcatcaaggggcaatcctcctgagttttgtctctggaaagaaaaagcaatgcctgctacacatatcttatatttaaccaagagaactgggctggatttctagagaagagcaatggatattgagccaggtgttcaccggagttccagcacaaggacacacagtttctacggaagcaatcaaaatggaatctaagatgttgatgaatatacattgtctcacacacaaacatcctccaggatagaccacaggctaggacataaaaaatcctcaataaaatttgaaaagaaatacagaagctgggcgcggtggctcatgcctgtaatcccagcacttcggtaggccgaggccagtagatcatgaggtcaggagtttgagaccagcctggccaccttgatgaaaccccatctctactaaaaatacaaaaaattagccaggcgtggtcgtgggcacctgtaatcccagctacttgggaggctgaggcagtagaatcacctgaacccgggagggggaggttgccgtgagctgagatcatgccgttgcactccagcctgggtgacagagcgagatcccatctcaaaaaaaaaaaaaaaaaaaaaaaggccgggtgcagtggctcacacctgtaatcccagcactttgggaggctgaggcagggagatcacgaggtcaggagatcaagaccatcctggctaatacggtgaaaccccgtctctactaaaaatacaaaaaattagccaggcgcggtggtgggcacctgtaatcccagttacttgggaggatgaggcaggagaatcgcttgaacccgggaggggtaggatgcagtgaaccgagatcgtgccattgcactccaggctgggtgacagagcgagaccccatctcaaaaaaacaaaacaaaaaaacaaaaaagctgggtgcggtggctcaagcctgtaatcccagcactttgggaggccaaggcaggcagatcacgagctcaggagatcaagaccatcctggctaatccagtgaaaccccgtcttcactaaaaatacaaaaaattagccaggcgtggtggcgggtgcctgtagtgccagctacttgggaggctgaggcagaaaaatatcatgaactggggaggcggagcttgcagtgagccaagatcgtgccactgcactccagcctgggtgacagagccagactccatctcaaaaaaaaaaaaaaaaaaagaaaagaaaagaaatacacaagtttgggtgagggacagtggccgagacaggagcatcacttgagctcagtagctggagaccagcttgggcaatatggtgaagccctgtctgtaaaaaaactacaaaagttaggtggccaggtgcaatgtctctcacctgtaatcctagcactttgggaggtcgaggcaggtggatcacttgaggtcaggagttcaagaccagcctgagaaagaaggtgaaacccatctctactaaaaatacaaaattagccaggtgtggtggtgcatgcctgtaatcccagctacttgggaggctgaggcaggagaattgcttgaagccgggagtcagaggttgcagtgagctgaaatcaccccattgcactccagcctgagcgacaaaagcaaaattccttctcagaaaaaaaagtgagccaggtgtggtggtgcatgcctgtagacactaattcaggggactttaggtgggaggtggaggttgcagtgagctgagcttgcaatactacactttagcctgagcaacagagccagacgttgtctcaaaaacaaagaaacaaacacaaaacaaacacacaaacaaaaaaacccaaagcgatataagaat

SEQ ID NO: 1887668 - DNA, 4001 bp, Homo sapiens
cccagctactcgggaggctgaggcaggagaatggcgtgaaccccggaggccgagcttgcagtgagccgagatcttgccactgcactccagcctgggcgacagagtgagactccgtctcaaaaaaaaaaaaaaaaaaaaaaaaaaaaattaaaaacttagccaagtgtggtggcatgccccatgtagtcccaaaacttggtaggctgacttaagaggaccacttgaggccgggcgcagttgctcacgcctgtaatctcagtacttgggaggcaagggaggtggatcgcttgaggacaggagttgagaccagcctccccaacatggtaaaaccctgtctctgctaaaaatacaaaaattagccgggtgtggtagcccacacctgtaatcccagctactcgggaggctgaggtgaaagaatcacttgaaccggggaggggaaggctgcagtgagctgataatgcaccactgcactccagcctgggtgtcaccaccagactctctcttgagaaagaaaaataaaaaaagacctcttgagcccaagagatctaggtgggaagtaccaccgcactccagcctgggcaacaaacacactgtcttggaaaaaaaaacaaagcaaaaacagaacccaacatcatccaagtctgatgataagcatgctctgcaaatgtattaccaaaatcagcatcaacttcaacgttgcttttctcaaacagtaacactctaaaaggatgcactttcctttctttcagacaacagaaagcgcttccctgtagagggacacagcctgagatcttcttgctccggcactgtggattttttgttggaatcttccttgaccaggtcaaaatggacacaaaaataaagatgcatttattggccctgtttgcgtgttttctggaatccagagcataaatccctaaaaggaccatttccagttccttgcttcaaagaatcagcaggttagtcctgttcatcaaggggcaatcctcctgtgttttgtctccagaaagaaaaagcaatgcctactagatatatattatatttgcacaagaggattaggctggatttctagagaacagcaaatggactctgagccaagtcttcacttgcgttccagtacagggacacacagtccccatggaggcacccaaaatggaatcgaagatgttgaagaatatacattgtcacacacacaaacatcctccaggacagaccacaggcgaggccataaaagctccttaataaaatttgagcagaaacacacaagtaagagtagggcacggtggctcacaccattaatcacagcagtttaggaggcccaggtttgaggagtacttgagctcaggggtccgagaccagcctgggcaacatggtgaaacctcatctgtacaaaaaatacaaaagttagcaaggtgtggttgtgcatgcctgtagacaggtattcaggaggctgaggtgggaggtggaggttgcagtgagccaagatcgcaccactgcccgacagcctgggtgacagagccagactctgtctcaaaaatcaatcaatcgatcgacaataaaaatgcaaaaattagccaggcgtggtggcacatgtctgtaaccccagctgctcgacaggctgaggcaggagaattgcttgaacccaggaggcagaggttgcggtgagccgagttcctgccactgcactccagccagggccacagagcaaagaagactctatcccgaaaagagggccacttgaacccaagagatctaggttagaagtgccaccgcactccagcctgggcaacagataccttgtcttagataaaaaaataaaacaaaaacaaaaccccaccattatccatgtctgatgatcagcacgctctgcaaatgtattaccaagatcagcgtcaacttcgacgttgcttttctcaaaccgtaaccctctgaaaggaagcactttcttttctttcagacaacagaaagtgcttctttcctcgagaaggtcacaacctgagatcttcttgctccagcaccgtgggtttttttttttggaattttcctagatcaagttaaaatggacgaaaacataaagatgcatttattggccctgtttgcatgttttctggaatccagaatataaacctctaaaaggaccatctccagttctttgcttcaaagaatcagcaggttagccttgttcatcaaggggcaatcctcctgagttttgtctctggaaggaaaaagcaatgcctgctacacataccttatatttaaccaagagaattgggctggatttctagagaagagcaatggattatgagccaagtgttcactcaagttccagtacagggacacacagtcccaatgggagcacccaaaatcaactctacgatgttgaattgtcaaacacacaaacattctctaggatagaccacaggcttggtcataaaaactcatcaaaatttgaacctaaatcacaagtaccgatggggcatggtggctcacacctctaatcccagcactttaggaggccaagacaggagaatcacctgagctcaggagttcgagaccagccccggcaacatggtgtaaccccatgtgtacaaaaaatacaaaagtgagccgggtgtggtggtgcatgcctgtagacactaatgcagcaggcttaggtgggaggcggaggttgcagtgagccgagaacgcaccactacactccagcctgtgtgatagagctagaccttgtctcaaaaataaccaaccaaacaaaatacacacacacagaaacaaaaaatacccaagttgatatcagagtattctctgtatttagaacagtattttgtgtctatatgatattttatatataaagaatatatgataaaatatacattatatatgtttgagactctgtctcaaagttccatatattatatgctcacaggaagaataattcctacacatgagtgcttgctttggcagtgcacataaaaaaaattggaatgacagagattaccctggcccctgcacaaaagtgacatccaaattcatgatggtctcatatttatctatttatttttatctatttaatttcatttttattatttattttatttttgagatggaatcttgctctgtggcccaggctggagtgcaatggcatggcttcagctcactgaaatctcttcctcctgggttcaagcgattctcctgccttagcctccaagtagctggaaatacagatatacaccactgcacccagctaatttttgtatttttaatagagatgaggttttgctatttcagccctgttagtcttgaacatgacctcaggtgatcctcccgtctcggcctcccaaagtgctgggattacaagtgtttgccagcgcacccagctgattttttacttttttgagactcagtctcactctgttgcccaggctggagtgcagaggcttgatctcagctcactgaaagctcagcctcccagcctcaagcaattctcctgcctcatccacccgagtagctgggattacaggcatgcaccaagaccacgtctcactaatttttttatttttagtacagacgaggtttcaccatgttggccagtctggtctcgaacaactgacctcaggtgatcctcctgtctccgcctcccaaagtgctggaattacaggcatgagccaccgtacctggactagtcccatatttaaagttaggaagaaaaaaaaagatgcccacacctaaacagcaaatcatttgttgttcaagtacatttcaaatacattgtttatctaaaatacatgtttaactggggtcaggtatgaaccaaagaacagtccttactttcttcttgtctgtgcatggggggttaatattcacatgtagtcccatgtaccaaggactggggaggggcagaggcaggaggatctaagcccacttcagcctgggcagcatagtgagatccccatctcatgcatttatctcctggtcacacaccgaagattttagcttcatttccc

SEQ ID NO: 1887669 - DNA, 4001 bp, Homo sapiens
gcactttgggaggccgatgcagggaaatcacttgaggtcaggagtttgagaccagcctggctaacatggtgaacccccatctccactaaatgcaaaaactgagccgggtgtggtggcgcatgcctgtaatcccagctactcgggctgctgaggcaggagaatcgcttgaacctgggaggtggaggttgcagtgagtcaagattgtgccattgcattccagcctgggtaagaagagcaaaactctgtcaaaaaaaaaaaaaaaaaaaaaaaaagggggaaatacaaatgcccacacctaaacagcaaatcatttcttgttcaagtacatctgaaatatactattgatctgaaatacaaatttaactgggtatccctggcctgggaagctgccttcggcaattcagataggagtctcctttggaagctaataggtaggaacatggagatgtcagcaaagggaagggactctcagggatttctatggattatgcagatgccctgccagatcccaaacttccccaaaagatcccaagtccaggcagaaaggaccactggggtccagaaaccaaatgtcttggctctgggcgggagtctttgtcatcagattccatgactgaaagacagccaggagcagagcgaaaatcccaggggttctctctaccagaagacacagactccgtccagatcaaacccaaattgtcgccagttagcgatgcctggctctccgttccccttggctcatcctgcctgcaccggtgcaatgccctggtgttcccagtccagaggccttcactccttccagtaccccaggagggtcaccttgcagttctcagggaggaagatgtggtcttccacccttgtgagcttcccaggcatcagggtctgcccgcccgactccattcccaaaggatgttccgcccagttctcccagcctcctgcttccatccagggaccacccttcagtggtaagattcacactgcagacaaccaggaccaacccattatcctcaattacagtggtcacaacaggccacctattcaaaactgatctatgtgacatgcccacaagaggcagatccagagctagagagatgcaaagtgtttgtcacggtctgggtggaagagtggggtgggaactgactgcaaatgggaataagcctctttggggtgatgaaaatctcctgaactagaatgttggtggttgaaaatatgctaaaatcattcacacttcagagtaaatttcaaaaggttacttcctcagttcgcaaaagtcagagacagggccgggtgcggtggctgatgcctgtaatcccagcactctgggaggccgaggtgcatgggtcacctgaggtcaggagttccagaccagcctggccaacatgggaaaaccccgggtctaaaaatacacacataaaaaattggccaagtgtggtggcacgcacctgaaatcccagttactccagtggcagaagttgcagtgagctgagattgtgcagctgcactccagcctgggcgacagcgagactccttctcaaaaacacataaataaatgaataataaagaaaactacaaatattagccaggtgtggaggagtgagcctgtaatcctagcgactcggaaaactgaggcaggagaatcgcttgaacccgggaggtggaggttgcagtgaggggagttcctgccattgcactccagcctgggtcagagtgagactccgccccccaaaaagaggaccatttaagaccaagagatctaggttggaagtgccaacacactccagcctgggcaacagagaccctgcctaagataaaaaataaaacaaaaacaaaacccaaccgtcatccacgtctgatgataagcatgctctccaaatgtattaccaagatcagcatcaacttcaacgttgcttttctcaaagagtaaccctctgaaaggaagcactttcttttctttcacaaaacagaaagtgcttcttacctccagatggtcacagcctgagatattcttgctcggtgcatggtggattttttgttggaatgttcttcgaccaggttaaaatggacacaaacataaagatgcatttgtgggccctgtttgcatgtttcctggaatccagaacataaacccctaaaggaaccatctccagtttcttgtttcaaagaatcagcaggttaccttgttcatcaaggggcaatcctcctgagttttgtctctagaaagaaaaagcaatgcctactacacataccttatatttaaccaagagaattgggctggatttctagagaacagcaatggattttgagccaagtgttcacttgagttccagtataggcacacagtcccagtgggagcatccaaaatggaatctacgatgttgaagaatatacattgtcatacgcacaaatattctccagaatagatcacaggcttggtcataaaaactccttaacacaattttaacataaatacacaagtacaggtggggcacggtggctcacacctctaattctagcactttaggaggccaagacgggagaatcacctgaggtcaggagttcgagaccagccccggcaacatggtgtaaccccatgtgtacaaaaaatacaaaagtgagccgggtgtggtggtgcatgcctgtagacactaatgcagcaggcttaggtggaaggcggaggttgcagtgagctgagaacgcaccactacactccagcctgggtgatagagccagaccttgtctcaaaaataaccaaccaaacaaataaaacacacacacacagaaacaaaccaaaaaatacccaaagtgatatcagagtattctctgtattcaaatcagcattttgtgtgtatatgattatgttatatatatgatatattatatatatgataaatttaactgggggctgggtacgaacaaaataacagtccttactttcttcttgtctgtgcatgggttaatattcacatgtagtcccatctacctaggactggggaggggcagaggcaggaggatctaagaccactttagccagggcggcacagtgagacccctgtctcatgcatttatttcctggtcatgcacccaagatttcagcttcatttccccaataaacactgaagccccatgcactccacctccgtgctcttgctcatcccatctgcagggacactgaggtcccctcaactccacctgaccccatgtgaggttctataccagtgccagaataatttccatgcagtaaaaggtgttgatggctgcgcagtggctcatgcttgtattctctggacaacatggtgaaaccccctctttagtgaaaaaaaaaaaaaataataataataataataatacaaaaagtagccgggcctggtggtgtgttcctgtaattccagctactccagaggctgaggcaggagaattgcttgaacctgagaggtacaggttgtagtcagccgggatcgtgccactgccctctagcctggtcgacagcgagactccatctgaaaagtaaataaatacatgaataaaaaagaaaaatacaaatgttagccaaggatgatgtcaggcgcctgtaatcccagctcctcaggaagctcaggaaggagaattgcttgagcccaggagacagaggttgcagtgagccgagatcacgccactgcactccagcctgggtcacagagcaagactctgtcccaaaaaagaggactatctgagcgcaagagacctaggttggaagtgcttatggactccagcctggaaaatacagattttgtcttaggagaaaaaaaaaaaaaaaagcacagaaccccgatatcatccaagtctgatgataagcatcctctacaaatgtattactgaagtcagcatcaacttcaacattgagtttctcaaaccgtaacgctccaaagggaagcgctttggtttctttcagacaacagaaagtgcttccctctagagggtcacagcatgggatcttctcactccagcactctgggtttcttgtt

SEQ ID NO: 1887670 - DNA, 4001 bp, Homo sapiens
agacgttgtagagagccgagatcacgccactgcactccaccgtaggcaacagcgagacttcgtctcaaaaattaaaataaaaaaaagaataataaagaaaactacaaatactagctgggtgtggtggtgtgcgcctgtaatcccacctactcagaaaaccaaggcaggaaaatcacttgaacccgggaggcggaggttgcagtgagcagagttcctgccactgcactccagcctggatcacagagcaagactctgccccaaataagaggaccatttgagccctagagatctaggttgtaagtgccaccacaccctagcctgggcaacagacatcctgttgtagaaaacaacaacaaaaaacagaacaccaccatcagccaagtctgatgataaaagcatgctctgcaaatgtactaccaagatcaacatcaaactaaacgttgctcttctcaaagagtaaccctctgaaaggatgcatgttcttttctttcaacagaaagtgcttccctctagagggtcacagcacgagatcttcttacttcagcaccatggatatgttgttggaatcttccttagcctggtgaaaatagacacaaaaataaagatgcaattatttgtcctgctggtgtgtttcctgaatccaaaaacataaacccctcacaggatcatctccaggtcccatgcctcaaaggctcagcaggctagccttgttcatcaagaggaaatcctcctaagttttttctccggaaagaaaaatcaatgcctaccagacacaccttatctttaaccaagataactgggctaaatttctagacaagagcaatggattttaagccaagtgttcacttgagttcctatataggaacacatagtaccgatgggagcatccaaaatggaatctaagatgtctaagaatatacattgtcacacacacaaacattccccaggatagaccacaggctatgttgtaaaagcgcctcaatacggtcgctcatgcctgtaatcccagcactttgggaggccgaggcgggaggatcacaaggtcaggagatctagaccatcctggctaacaaggtgaaactccatctctactaaaaatacaaaaaaattagccgggcgtggtggtgggcgcctgtagtcccagctactcaggaggctgaggcaggagaatggcatgaacctgggaggcggagcttgcagtgagccaagatcgcgccactgcgctccagcctaggtaacagaccaagactccgtctcaaaaaaaaaaaaaaaatcgcctcaataaaatgtaagcagaaacacacaagtagggcgggacatagtgactcacactttaggaggccgaggtgggaggatcacttgagctcaggggttcaagaccagcctgggcaacatggtgaaacctcatctgtacaaaaaacacaaaagttggcgaggtgtggtggtgcatgcctgtagacaggtattcagaaggctgaggtgggaggtggaggttgcagtgagccgagatcacaccactgcactacagcctgggcaacagagtgagactctgtctcaacaatcaatcaatcaatcgataataaaatgcaaaaattagccaggtgtggtggcacatgcctataaccctgctcgggaggctgaggcaggagaattgcttgaacccaggaggcagaggtggcagtgagccaagttcctgccactgcactccagctagggtcacagcgcgagactctgtccgaaaaagagggctacttgttgagcccaagagatctaggttggaagtgccaccgcactcgagcctgggctacagacaccctgtcttagaaaaaaacaaaaccccaagatcatccaagtctgatgataagcatgctcttcaaatgtattaccaagatcagcatcaacttcaatgctgcttttctcaaagagtaaccctctgaaaggaagcactttctttcacaaaacacaaagtgcttcttacctccagatggtcacatcatgagatcttcttgctccagcactgtggattttttgttgtaattttctttgactaggttaaaatggacacaaaaataaagatgcatttattggccctgtttgcacattttctggaatccagaatataaacccttaaaaggaccatctccagttccttgcttcaaagtctcagcaggttagctttgttcatcaaggggcaatcctcctgagttttgtctccagaaagaaaaagcaatgcctactacgtgcaccttatatttaaccaagagaattgggctggatttctagaaaacagcaatgaacttagagccaagtgttcactcgagttccagtacagggacacacagtcccgatgggagcatccaacatcgagtctacgatgttgaagaatatacattgtcatgcacacaaacatcctccaggatggaccacaggcttggttataaaaactcctcaataaaatttgaacaggaacacacaaataccagtggggtgtggtggctcacacctctaatcccagcactttaggaggctgagacagaggatcacctgagcttgggagggagtttgagaccagcgcctgcaacatggtgtaaacccatgtgtataaaaaatacaaaagtgagccagatgtggttgtgcatgcctgcagacactaattcagcaggattaggtgggaggtggaggttgcagtgagccgagatggcaccactacactccagcctgggcgatagagtcagaccttgtctcaaaaataaccaacccctttgtagggacatggatgaaactggaaaccatcattctcagcaaactatcgcaaggacaaaaaaccaaacaccgcatgttctcactcataggtgggaactgaacaatgagaacacatggacacaggaaggggaacatcacacaccggggactgttgttgggtgggggtagcggggagggatagcattaggagatatacctaatgctaaatgatgagttaatgggtgcagcacaccagcatggcacatgtatacatatgtaactaacctgcacgttgtgcacatgtaccctagaacttaaagtataataataaaattaaaaataaatatataagtagggatacaaaaatatgacaaaaaaaaaacaaccaaacacagacacatgcaaacaaaaaatacgcaaggtgatatcagagtattctctgtatttagaagagtattttgtgtgtacatgattatattatatatgataagaatatataaaatatacatgatatatttttgagaccctgtctcaaggaaagttccatacatcgcatactcacaggaagaataattcctacacaagttcttgctttggtagtgcacataaaaaaaattggaatgacagagattaccgtggctgctccacaaaggtgacactcaaattcacgacggtcccgtatttatctacgtatttttatttgttttatttatttttgagacggaatcttgctctgtggcccaggctggaatgccatggcttcattacagctcactgaaatcgcctcctcctgggttcaagtggttctcctgtcttggcctcccgagtagctggaatcacagatgtgcaccaccgcacccagctaatttttgtagttttagtagagacaaggctttgccacgttggccccgttggtcttgaactcctgacctcaggtgatcctcccgtcttagcctcctaaagtgctgggattacaggcgtgtgccgctgtgcctagactattatttactttgttgacactgagactcactcagttgcccaggctggaatgcagtggcgcaatctcagctcactgaaagctcagcctcctggcttcaagcgagtctcctgcctcagcctcccgagtagctgggattacaggtgtgtgcaaccaggcctggctgatttttgtatttttagtatggacggggtttcaccatgttggccaggccggtctcgaacaactgacctcaggtgatcctcctgtctcggcctcccaa

SEQ ID NO: 1887671 - DNA, 4001 bp, Homo sapiens
aggtcccctcaactccacctgaccccacgtgaggttctataccagtgccagaaaaatttccataaagtaaaaggtgctgatggctgtgcccggtggctcacgcctgtattctcagcactttgggaggccgaggccagcggctcacttgaggtcaggggtttgagactagcctggccaacatggtgaaaccccacctttactaaaaaaaaaaaaaaaaaaaaaaaatcaaaatcaaaaagtagctggttgtagtggtgggtgcctgtaattccacctactcaggagactgaggcaggagaatggcttgaacctgagaggcagaggttggagtcagccgggatcatgccactgccctccaggctgggtgacagcaacactccatctcaaaaatgaatgaatgaataaaaaagaaaaatacaaatattagccgagtgtgatgtcaggcatctgtaatcccagctacccaggaagctgaggcaggagaatcactcgaacccgggaggtggaggttgcattgagccaagatcgcgccactgcactccagtctgggtcacagagcaagactgtatcccataaaaggaccatctgagcccaacaggcctatcttaaaaagtgcttctctagtctctcctgggcaacagagaccttgtcttagaaaaaaaaaaaaacacaaaacaaaacacacacaccaaaacaaaaaacaaaaacctaacaaacaaaaaaaccaaccaaacaaacaaacaaaaaaacagactcccaacatcatccaagtctgattacaagcatggtctgcaaatgtattaccaagatcagcatcatcttcaacgtggcttttcccaaacggtaacactctaaagggaggcactttgtttaagagaaaacaaacagaaagcgcttccctttggagggtcacagcatgggatcttcttgctccagcactctgggttttttgttgaaatcttccttgaccaggttaaaatggccacaacaataaagatgcatttattggccctgtttgcctgttttctagaatccagaacataaacccctaaaaggaccatctccagttcctttcttcaaaggctctgcaggttagccttgttcatcaaggggcaaccctcctgagttttgcctctaaagagaaaaagcaatgcctactacacataccttatatttaaccaagagaactgggctggatttctagagaacagcaatggactttgagctgagtgttcacttgagttccagcacagggatacatagttccgatgggagcatccaaaatggagtctaagatgttgaagaatatacattgtcacacacacaaacatcctccaggatagaccacaggctagtggatcacctgaaagcgggagttcaagactagcctggccaacatggtgaaacccgtctctactaaaaacataaaaattagctgggtggggcagtaggtgcctgtaatcccaactacctgggaggctgaggcagaagcatcactcgaacccaggaggcggaggttgcagtgagcctagatcatgccagtgctctccaggatgggcagcaagagtgcaggacacgatggtgggtgcctgatgcctgaattcccaacaattcggcaggctgaggtgggagaatcactggaacccgagaggtggagtttccggtgagcagagatcctgctactgcactcccaacgaaacaagagtgtgtctcaaaaaatcaaaaaataaaaagaggaccacttaagcccaagaaatcttggtggaaggtgctatccacccacgcctgggcaatagaaagcctgtcttggaaaaatttcaaatcacaaacagaaccccgacatcatgcaagtctgatgataagcacgctctgcaaatgtattaccaagatcagcagcatcttcaacgttgcttgtctcaaacagtaacactctaaagggatgcacgatcttttcttttatacaacagacagtgcttccatctagagggtcactgcctgagatcttcttttttttgacacggagtctcactctgccgcccaggctggatgcggtggtgggatctcggctcatggcaacttctgcctcctgggttcaagcgattcttctgcgtcagcctcctgagtagctgggattagaggcacccaccaccatgcatattgcatatatgactgcatatatgacctggtcatgcacccaagatgttggtttcatttccccagtgaaaactcaaaccccatgcactccacctccgtgctcttgctgagcacatcccatctgcaagggacactgaggtccccctttgactctacctgaccccacatgaggctttataaatcagtgccagaataatttccatggactaaaaggtgttaatggccatgtgtggtggctcacgcctgtaatcttagcactttgggaggctgaggtgggcagatcacctgaggtcaggagttcgcaaccagcctggccaacatggtgaaaccccgcctctgctgaaaatataaaaattaggccaggcgtggtggctcatgcctgtaatcccagcactttgggaggcagaggccggtggctaacttgaggtcaggggtttgagaccagcctggcaaacatggtgaaatcccatctctactaaaaaaaaaacaaaaaacaaaaaacaaaaagtagccaggtgtggtggtgggctcccgtaattctagctactcaggaggctgaggtagaagaattgcttgaatccgggaggcagaggttgcactgagcagagatcacgcctcggccctccagcctgggtaacagtgagactccatctcaaaaacataaataaatgaattttaaaaaatgaaaatattatccaggtgtggtgatgggcacctgtaatctcacctacttgggaagctgaggcaggagactcgcttgaacctgggaggtggaggttgcagtgagccgagatcacaccactgcacttcagcctgggtgatagagagactctgtccgctaaaaaaaccatttgaatccaaaagacctaggttggatgtgccaccgcactccagcctgggcaacagagatcctgtcttagaataaaaaagcaaaaccaaaacagaaccccgccatcgtccaagcctcatgataagcatgctctacaaatgtattaccgagataagcatcaacttcaacgctgcttttctcaaaccgtaacactccaaagggaagcgccttcttttcctttggacaagagaaagtgcttccctttgtagggtcacagcatgagatcttcttgctccagaactctgggttttttgttggaattttccttgcccaggttaaaatggacacaaaaatgaggatgcatttattggccctgtttgcatgttttctggaatccagaacataaacccctaaaatgaccatctccagttccttgctacaaagaataagcaggttagccttatccctaatcccagcactttgggaggccgaggtgggcggatcaccttagttcaggagttcaaggccagcctgcccaatatggtgaaaccctgtctctactaaacgtacaaaaaaattagctggggtggtggtgtgtgcctgaaaatcccagttacccgggagttggggaaggagaatcactggaacccgggagacagaggctacagtaagccgagattgcgccactgtactgcagcctgggcgacagagcaagactgtttcaaaaaaaataaataaataaaaataaaaaaaatttagtgtcagggacaaggagattcaactaaaaagatacaaataaatagaaaaaataagaacattgtattaatattgacatccattgggattacagaatagactggatagatgtggaggcctatattttttgttttgttttgttttgagatggagcctcgctctgtcgcccaggctggagtgcacctgcgcgatcttggctcactgcaacctccgcctcctgggttgaagagattctgctgcctcagcctcctgagtagctggg

SEQ ID NO: 1887672 - DNA, 4001 bp, Homo sapiens
ctgaagccccatgcactccacctccgtgctcttgctcatcccatctgcagggacactgaggtcccctcaactccacctgaccccatgtgaggttctataccagtgccagaaaaatttccataaagtaagaggtgttgatggccacgcaccatggctcacgcctttgggaggcgcgcggtggtggctcatgcctgtattctcagcattttcggaggccaaggtgagtggctcacttgaggtcaggggtttgagaccagcctggccaacatggtaagccccatctctactgaaaaaaaaaaaaaaaaaaattcaaaacgtagccaggcgtggtggcggccacctgtagtttcagctacttcagaggctgaggcaggagaattgcttgaacctgagaggcagaggttggagtcagtcgggatcatgccaccgctctccagctggggaaacgagactccatctcaaaaataaataaatgaataaaaaagaaaaatacaaatattagccaagtgtgatgtcgggcccctgcaatcccagctattcaggaagctgaggcaggagaatagcttgaacccgcgaggtggagattgcagtgagccaagatcgtgccactgcactccagcctgggtcacagaggaagactgtcccaaaaaggaccatatgagcccaagagacctaggttggaagtgcctctgtactccagcctgggccacagagaccctgtcttagaaaacaaaaacaaaacagaaccccaacatcatccaagtctgataataagcatgcaaatatattaccaacatcagcatcaacttcaacactgcttttcccaaacggtaacactctaaagggaagcactttgttttttctcagacaacaaacagaaagtgcttcctctagagggtcacagcatgggatcttcttgctccagcactctgggtttcttgttggaattttccttgaccaggttaaaacggatacaaaaataaaaatgcatttattggccctgtttacatgttttatggaatccagaacataaacccctgaaaggaccatctccaattccttgcttcaaaggctcagcaggttagccttgttcatcaaggggcgatcgtcctgagttttgtccccaaagagaaaaaggaatacctactactcataccttacatttagctaagagaattgggctgatgttgaagaatatacattgtctcacacacaaacatcctccaggatagaccagagtctaggctgactctagaggaccacgtgagattaggggcggtggctcacgcctgtaatcccagcactttaggaggccaaggctggtggatcacctgaggtcgggagtttgagaccagcctgcccaacatggtgaaacccagtctctattcaaaacacaaaaattagctgggtggggcagtaggcacctgtaatcccagctacccaggaggctgcggcaggagaatcgcttgaacccaggaggtggaggttgcagtgagcctaaattgcaacactgcactccagcctggacatcaagagtgaaactccatctcaacaacaacaacaacaataaaaataataactagcaggacacgatggcgggcatctctattcccaactattcggcaggctgaggtgggagaatcgccggaagctgggaggcggagtttccggtcaacagggatcctgccgctgcactccagcctgggaaacggaatgagagcgcatctcaaaaaatcaaaaataaaaagatcaccacttgagcccaagagatctcggttggaggtgccacccactcccgcctgggcaacagggaacctgtcttggaaaaaaacaaaccaaagagaaccccaacatcatgcaagtctgatgataagcacgctctgcaaatgtattaccaagatcagcagcatcttcaacgttgcttttctcaaacagtaacactctaaagggatgcacgatcttttcttagacaacagacagtgcttccatctagagggtcacagcatgaggtcttcttgctccagtactgtagggttcttttttttgtttttgtttttgtttctttttgacggagtcttgctctgttgccgaggctagagtgcaatggcacgatctcggctcactgcaagctccgcctcctgggttcaagccattctcaagccttagcctcccgggtagctgggactacaggcacccaccaccacgcctcgctaattttttgtatttttaaatagagatggggtttcaccgtgttagccaggatggtctcgatctcctgacctcgtgatccacccgcctcggcctttcaaagtggtgggattacaggcgtgagccacagcgcccagcttttttttttttttttttttttcagacggaatctcactctgtcatcctggctggatgctgtggcacaatctcggctcactgcagcctctgcctcccgggttcaagcaattctcctgcctcagcctcctaagtagctgggattacaggtgcccaccaccacactgggctaatttttgttgttattgtatttttagtagagacggattttcaccacgttggtcagactggtctcaaactcctgacctgagatgatctacctgcatcggcctcccaaagtgctgggattacaggcatgagccaccatgcccggctttattttgtatttttattcatttgtttattttttgagacagaatttccctgtgttgcccaggctgaccatttgaagccaagagatatattggacatgtcactgcactccagcatgagcaacacagagccttagaataaaaaagcaaaaccaaaacagaaccccaccatcgtccaagtgtgataagcatgctctgcaaatgtattaccgaaatcagcatcaacttcaacgttgcttttctcaaaccgtaacccaccaaagagaagcactttcttttcttttagacaacagaaagggcttccctttgtagactcacagcttgagatcttcttgctccggcactctgggtttcttgttgaaattttccttgacctggtcaaaatggacacaaaaataaagatgcatttattggtcctgtttgcatattttctggaatctagaacataaaccgatacaaagaccatctccagttccttgcttcaaacgttcagcaggttagccttgttcatcgagggacaactgtcctgggttttgtcttcaaagagaaaaagcaacgcctactacatataccttatattctcaggagttagacaccagcctgggaaacatggtaaaacctcatctgtaaaaatacaaaagttagccaggtatagaggtgcatgcctgtagacactaattcaggaggctgaggtgggaggttgaggttgccgggagccgagatcacaccactgcactccagcataggtgacagggccagatcttgtctcaaaaacaaacgaacgaacaaacaaaaaatgcacacaccaacaaaaaaatgcccaaagtgatataagagtattctcagggtgtaaaagagtcttttgtgtgtacatgatattatatatataagaatatatgaaggccagccgcggtggctgtctgcaatcccagtactttggaaagccaaggtgggcagatcacctgaagtcgggagtttgagaccagcctgaccaacatggagaaatcccgtctactaaaatacaacaaattagctagccctggaagtgtatgcctgtaatcccagctactcaggaggctgaggtaggagagtcgctttaacccaagaggtggacatcgcagggagcccagatcacaccattgcacttcagcctatgcgacaagagcaaaactcagtcgcaaaaacataaaaaataataataataaaagaaacttccatatattgtatgctcacaggaagaatacttcctacacacaagtgctagctttggcagcacgcatgaaaaaattggaatgacaaagattaccatgggccctgcgcaaaggtgacactcaaattcatgatgat

SEQ ID NO: 1887673 - DNA, 4001 bp, Homo sapiens
aaaattagccaggtgtggtggcacatgcctgtaatcctagctactcaggaggctgaggcaggagaatcacttgaacccaggaggctgaggttgtatgggccgagatcatgtcattgccctccagcctgggcaacaagagtgaaactccatctctctctctctctttctctctaacacacatacacacacatacgcacacattcgaaaagcagtcaggcgtggtggtaagcgcctgtaattccagctactcaggaggctgaggcaggagaattgcttgaacctgagagacagaggttggagtcagccgggatcgtgccatggccctccagacttggcaacagcaagactccacctaaaaaataaataaatgaatgaataaaaaagaaaaatacaaatattagctgggcatgatgtcaggtgcctgtaatcccaggaagctgaggcaggagaatcacttgaacccaggaggtggagggtgcagtgagctgagattgcaccactgcactccagcctgagtcacagagcaagactctgtcccaaaaaggaccatttgagcccaagagacctaggttggaagtgcctctgtactccagcctgggccacagagaccctgtcttagaaaacaaaaaaaacccagaaccccaacatcatccaagtctgatgataagcatgcaaatatattaccaacatcagcatcaacttcaacactgcttttcccaaacagtaactctaaagggaagcactttgttttttctcagacaacaaacagaaagtgcttcctctagagggtcacagcatgggatcttcttgctccagcactctgggtttcttgttggaattttccttgaccaggttaaaatacacacaaaataaagatgcatttattggccctgtttgcatattttctggaatccagaacataaacccctaaaaggaccatctccagttccttgcttcaaaggctcagcaggttagccttgttcaccaaggggcaaccctcctgagttttgtccccaaagagaaaaagcaaagcctactacacataccttatatttaaccaagagattagggcagaatttccagagaacagcaatggattttgagccaagtgttcagctgagttccaggacaggggcacacagtcccgatggaagcatccaaaatggaatctacaatgttgaagaatatacattgtctcacacacaaacatcctccaagatagaccacagtctaggctgactctacaggaccatttgagattaggggtgatggctcacagctgtaatcccagtactttgggaggccaaggctggtggatcacctgaggtcaggagtttgagaccagcctgcccaacatggtgaaaccccatctctactgaaaacacaaaaattagctgggtggggtggtaggcacctgtaattccagctatctgggaggctgaggcaggagaatcacttgaacccgggaggccgaggttgcggtgagccgagatcgcgctattgccctccagcctgggcaacaagagcgaaactccgcctcaaaaaaaaaaaacaaaaaaacaataataattagcaagacctgatggcaggcaactgaattcccaatgattcggcaggctgaggtggtagaaacactggaacctgagaggtggagtttccggtcaacagagattctgctactgcactcccagtgaaaccagagtgggtctcaaaaaatcaaaaaataaaaagaggaccacttgagcccaagagatctcggttggaggtgccacccactctagtctgggcaacagagacactgtcttggaaaaaaaaaacaaaacaaacagaaccccaacatcatgcacgtctgatgataagcacgctctgcaaatgtgttaccaagatcagcagcatcttcaacgttgattttctcaaacagtaacactctaaaaggatgcacgatcttttcttagacaacagacagtgcttccatctagagggtcactgcctgagatcttcttgctccagtactctgggttattttttatgtatttatgtatttatttatttatgtatttattttttgagatggagtcgcccaggctgcagtgcaatggtgtgattttagctcactgcaatctccttctcacgggttcaagagattctcctgctgccgcctcccacgtagctgagactacaggtgtgtaccaccacgcctagctatattttgcatttttagtagagaggaggttttgtcttgatggcggggctgctcttgaactctgacctgaggtgatccacccgtctcgacctcccaaagtgctgggattacaagcgtgtgccaccgcacccggcctattttttatttttttgagattgagtctcactgttgcctaggctggagttcagtggtgcgatctcagctcactgagagctcagcttcccggcttcctgtgattctcctgcctcagcctcctgagtagctgggattacaggcgtgtaccaccaccacactgggctaagttttgtatttttagtagagatggggattcaccatgttggccaggctggtctcaaacaactgacctcaggtgatcctcctgtcttggcctcccaaaatgatggaatcacaggtgtgagccgtggtacccagccttgtcctatacttaaaattaggaacaaaaaaagatgcccacacctaaacagcaaatcatttgttgttcaagtacatctcaaatacattgtttatctgaaatagaaatttaagtgggggtggggcatgaatcaaagaacagtccttactttcctcttcctgtacatgagttaatattcacatgtagtcccagctactaaggactggggagggccagaggcaggaggatctaagcccactttagcttgggcggcatagtgagacgcccgtctcgttgcatatacgacctggtcatgcacccaagatttcagcttcatttccccaatgaaaactcaaaccccatgcactccacctccatgctcttgctgagcagtacacatcccatctgcaagggacattggggtccccttcacctctacctgaccccaagtgaagttccataaaccagtgccagaataatttctgtggggtaaaaggtgttgatggccaggcgcggtggctcacgcctgtattctcagcactttgggaggccgaggcaggcagatcacctaaggtcaggagctgagttcagcctggccaacatggtgaaaccccatctctgctaaacattcaaaaattaggccaggcgtgggggcgcatacctgcaatcccagaaagagtcagaggtgggcggatgacttgaggtcaggagtttgagaccagtctaaccaacatggtgaaatcccatttctactaaaaaaaaaatacaaaaagtagccaggtgcggtggtgtgctcctgtaattccagctagtcaggaggctgaggaagaattgcttgaacccaggaggcagagattgcagtgagccgagatcgtgtcactgccctccagcatgggtgacagcgagactccgtctcataaataaataaatgaatttttaaaaatacaaatattatccaggtgtggtgatgggtgcctgtaatctcagctacttgggaagctgaagcaggagaatcgcttgaacccaggaggcgggggttgcggcgagccgagatcacatcactgcactccagcctgggtgagagagagagactttgcttgcaaaaaaggaccatttgaatccaagagggctaggttggacatgccactgccaccgcactccagcctgggcaacagagatcctgtcttagaatgaaaaagcaaaaccaaaacagaaccccgccattgtccaagcctgatgataagcatgctctgcaaatgcatcaacttcaacgtcgctttctcaaaccgtaatccagcaaagggaagcgctttctcttcttttagacaacagaaagggcttccctttgcagacccacagcttgagatcttcttgctccggcactct

SEQ ID NO: 1887674 - DNA, 4001 bp, Homo sapiens
caaattcatgatggttccatatttatcttttatttatttatttattttttttttttagaccaagtcttactctgtcgacaggctgcagtgcagtggcacgatcttggctcactgcaacctctgccgcccagttggaacgattctcctgccttggtctcccgagtagctggtattacaggcacctgccactgcacctggctaatttttgtatttttcgtagagatgaggctttgccgtgatgccgcagctggtcttcaactcctgacctgaggtgatgcccccgtctcgacctccaaaagtgctagcattacaggtgtgtgccaccgtgcctggcctattttttatttttttgagattgaatcttattcttttgcccaggctgtagttcactggcgcgatctcagctcactgcaacctctgcctcccggcttcaagcgattctcctgcctcatcctcctgagtagctgggattacaggcgtgcagcacaaccacgcatggctaatttttgtatttttagtacagatggggtttcaccatgttggccaggctggtctcaagcagctgacctcaggtgatcctcctgtctctgcctaccaaaatgatggaattacaggcgtgagccaccatacctgaccttgtcctatgtttaaaatcaggagcaaaaaaagatgctcacatctaaacagcaaatcatttgttgttcaagtacatctcaaatacattgtttatctaaaatacaaatttaactgggggtgggacgtgaatcaaagaacagtccttactttcctcttcctgtacgtgagttaatattcacatgtagtcccagctactaaggactggggaggggcagaggcaggaggatctaagcccacattagcctgggcggcatagtgagacgcccgtattgttgcatatacgacctggtcatgcacccaagattttggctttatttctccaataaaaactcaaaccccatgcattccacctccgtgttcttgctaagcagtgcacatcccacctgcaaggacattggggtccccttcaactctacctgaccccaagcgaggttctataaaccagtgccagaataatttccgtggaccaaaaggtgttaatggccaggcacggtggctcacgcctgtattctcagcactttgggaggcccaggcgggcagatcacctaaggtcaggagctgagttcagcctggccaacatggtgaaaccacgtctctgctaaaaatacaaaaattaggccaggcatgggggcgcatacctgtgatcccagaaatttgggagtcagaggtgggtggatcacttgaggtcaggaatttgagaccagcctagccaacacggtgaaatccagtctctacttaaaaaaaatatacaaaaagtaactaggtgcggtggtgtgcttctgtaattccagctactcaggaggctgaggcagaagaattgcttgaaccggggaggcagaggttgcagtgagccgagattgtgccactgccctccagactgggtgacagcgagactccgtctcaaaaataaataaataaataaattttaaaaaatacaaatatcatccaggtatggtgatgaacgcctgtaatctcagctgcttgggaagccgaggcaggagaattgcttgaacctgggaggcagaggttgcagtgagccgagatcgcctcactgcatatcagcctgggtgacagagaaagactctgccccctaaaaaggaccatttgaattcaagagacctgggttggacatgtcactgcactccagcctgggcaacagagatcctgtcttagaataaaaaagcaaaaccgaaaacagaaccccggcattgtccaagcctgatgataagcatgctctgcaaatgtattaccacgatcggcatcagcttcagtgttgtttttctcaaaccgtaatccagcaaagggaagcgctttctcttctttcagacaacagaaagggcttccctttgcagtcacagcttgagatcttcttgctccggcactctgggtttcttgttgaaattttccttgaccaggtcaaaatggacacaaaaataaagatgcaatttttggccctgtttgcatgttttctggaatcctgaataaaaacccctaaaaggaccatctccagttctttgcttcaaagaatcagcaggttagccttgttcatcaaggggcaatcctcctgagttttgtccccaaagagaaaaagcaatgcctactacacctaccttatatttaaccaagagaattgggctggatttctagagaacagcaatggatggagagccaggtgttcacttgaattccaggacagagacacacagtcccgaggggagcatccaaaatggaatctaagatgttgaagaatgtacactgtcacacacacaaacatcctccgggcattatcccgtaaatgcttctcagtaacatttgaacagagatacacaagggcaggtggggcgcggtggctcacacctctaaccgcagcacttacgtaggccaaggcaggaggatcacttgagctcaggagttagacaccagcccgggaaacatggtaaaacctcatctgtaaaaatacaaaagttagccaggtatggtggtacatgcctgtagatactaattcaggagactgaggtgggaggtggaggttgcagagagccgagattgcaccactgctctccagcatggatgacacagcaagactctgtctcataaataaataaataaataagccaggtgtggtggcacatacctgtaatcccagctgctcgggaggctgaggcaggagaatcccttgaccccaggaggcagaggttgcagtgagtggagatcctgacaggacactccagccagggcagggtcacagagcaagactctgtcccaaaaaagagggccacttgaacccaagagatctaggttggaggggccgccacactccagcctgggcaacagacaccctgtcttagaaaacaaaacaaaacaaacaaacacaaaaccccaccaccttccatggttgattataagcattctctgcaagtgtattaccaagatcaacgttgcttttctcaaagcgttaacactctgaagggaagcgctttcttttcttttagccaacagaaagcgcttccctctagagggtcacagcctgagatcttgctccagcattgtgggttttttgttggaattttccttcaccgggttaaaatggacacaaaagtaaagatgcatgtattggccctgtttgcatgttttctggaatccagaacataaaccactaaaaggaccatctccagttccttgcttcaaagaatcagcaggttagccttgttcatcaaggggcaatcctgagctttgtctctaaagagaaagagcaatgcctactacacataccttatatttaaccaagagaattgggctggatttctagagaacagcaatggattttgagccaagtgttcacttgagttccagcacagggacacacagtcccaatgggagcatccaaaatggaatctacaatgttgaaaatgtacattgttatatacacaaacatcctactatatatatgataagaatatatgatgactgggcgcggtggctcacgcctgtaatcccggcactttgggaggccgaggcgggcggatcacctgaggtcaggagtctgagcccagcctgaccaacatggagaagcccgtctctactgaaaatacaaacttagctaggcatggtggcgggtgcctgtaatcccagctactcaggaggctgaggcaggagaatcacttgaacccaggaggcggaggttgcagtgaactgagatcatgtcattgcactccagcctaggtgacaggagcgaaactccctctcaaaaaatgaaaaaaaaaaaaaagatattgaagactatgtattgtacgcacaaacaacctccaggatagaccacaggttaggccataaaagctcctcaataatatttgaatagaaaaaca

SEQ ID NO: 1887675 - DNA, 4001 bp, Homo sapiens
gggtcactgcctgagatcttcttgctccagtactctgggttattttttatgtatttatgtatttatttatttatgtatttattttttgagatggagtcgcccaggctgcagtgcaatggtgtgattttagctcactgcaatctccttctcacgggttcaagagattctcctgctgccgcctcccacgtagctgagactacaggtgtgtaccaccacgcctagctatattttgcatttttagtagagaggaggttttgtcttgatggcggggctgctcttgaactctgacctgaggtgatccacccgtctcgacctcccaaagtgctgggattacaagcgtgtgccaccgcacccggcctattttttatttttttgagattgagtctcactgttgcctaggctggagttcagtggtgcgatctcagctcactgagagctcagcttcccggcttcctgtgattctcctgcctcagcctcctgagtagctgggattacaggcgtgtaccaccaccacactgggctaagttttgtatttttagtagagatggggattcaccatgttggccaggctggtctcaaacaactgacctcaggtgatcctcctgtcttggcctcccaaaatgatggaatcacaggtgtgagccgtggtacccagccttgtcctatacttaaaattaggaacaaaaaaagatgcccacacctaaacagcaaatcatttgttgttcaagtacatctcaaatacattgtttatctgaaatagaaatttaagtgggggtggggcatgaatcaaagaacagtccttactttcctcttcctgtacatgagttaatattcacatgtagtcccagctactaaggactggggagggccagaggcaggaggatctaagcccactttagcttgggcggcatagtgagacgcccgtctcgttgcatatacgacctggtcatgcacccaagatttcagcttcatttccccaatgaaaactcaaaccccatgcactccacctccatgctcttgctgagcagtacacatcccatctgcaagggacattggggtccccttcacctctacctgaccccaagtgaagttccataaaccagtgccagaataatttctgtggggtaaaaggtgttgatggccaggcgcggtggctcacgcctgtattctcagcactttgggaggccgaggcaggcagatcacctaaggtcaggagctgagttcagcctggccaacatggtgaaaccccatctctgctaaacattcaaaaattaggccaggcgtgggggcgcatacctgcaatcccagaaagagtcagaggtgggcggatgacttgaggtcaggagtttgagaccagtctaaccaacatggtgaaatcccatttctactaaaaaaaaaatacaaaaagtagccaggtgcggtggtgtgctcctgtaattccagctagtcaggaggctgaggaagaattgcttgaacccaggaggcagagattgcagtgagccgagatcgtgtcactgccctccagcatgggtgacagcgagactccgtctcataaataaataaatgaatttttaaaaatacaaatattatccaggtgtggtgatgggtgcctgtaatctcagctacttgggaagctgaagcaggagaatcgcttgaacccaggaggcgggggttgcggcgagccgagatcacatcactgcactccagcctgggtgagagagagagactttgcttgcaaaaaaggaccatttgaatccaagagggctaggttggacatgccactgccaccgcactccagcctgggcaacagagatcctgtcttagaatgaaaaagcaaaaccaaaacagaaccccgccattgtccaagcctgatgataagcatgctctgcaaatgcatcaacttcaacgtcgctttctcaaaccgtaatccagcaaagggaagcgctttctcttcttttagacaacagaaagggcttccctttgcagacccacagcttgagatcttcttgctccggcactctgggtttcttgttgaaattttccttaaccagttcaaaacggacacaaatataaagatgcatgtattggccctgtttgcaagttttctggaatccagaatataaacccctaaaagaccatctccagttccttccttcaaagaatcagcaggttagccttgttcatcaaggggcaatccttctgagttttgtccccaaaaagaaaaagcaatgcccactagacataccttatctctaaccaagagacttgggctggatttctagagaacagcaatggattttcagccaactctcacttgagttccagcacagggacacacagtcccgacaggagcatccaaagtggaatctatgatgttcaagaacatacattgtcacacacacaaacattctctagcatagactgtagtctaggttgactcaagaggaccacttgaggctaggcgtggaggctcatgcctataatcccagcactttgggaggccgatgcagggaaatcacttgaggtcaggagtttgagaccagcctggctaacatggtgaacccccatctccactaaatgcaaaaactgagccgggtgtggtggcgcatgcctgtaatcccagctactcgggctgctgaggcaggagaatcgcttgaacctgggaggtggaggttgcagtgagtcaagattgtgccattgcattccagcctgggtaagaagagcaaaactctgtcaaaaaaaaaaaaaaaaaaaaaaaaagggggaaatacaaatgcccacacctaaacagcaaatcatttcttgttcaagtacatctgaaatatactattgatctgaaatacaaatttaactgggtatccctggcctgggaagctgccttcggcaattcagataggagtctcctttggaagctaataggtaggaacatggagatgtcagcaaagggaagggactctcagggatttctatggattatgcagatgccctgccagatcccaaacttccccaaaagatcccaagtccaggcagaaaggaccactggggtccagaaaccaaatgtcttggctctgggcgggagtctttgtcatcagattccatgactgaaagacagccaggagcagagcgaaaatcccaggggttctctctaccagaagacacagactccgtccagatcaaacccaaattgtcgccagttagcgatgcctggctctccgttccccttggctcatcctgcctgcaccggtgcaatgccctggtgttcccagtccagaggccttcactccttccagtaccccaggagggtcaccttgcagttctcagggaggaagatgtggtcttccacccttgtgagcttcccaggcatcagggtctgcccgcccgactccattcccaaaggatgttccgcccagttctcccagcctcctgcttccatccagggaccacccttcagtggtaagattcacactgcagacaaccaggaccaacccattatcctcaattacagtggtcacaacaggccacctattcaaaactgatctatgtgacatgcccacaagaggcagatccagagctagagagatgcaaagtgtttgtcacggtctgggtggaagagtggggtgggaactgactgcaaatgggaataagcctctttggggtgatgaaaatctcctgaactagaatgttggtggttgaaaatatgctaaaatcattcacacttcagagtaaatttcaaaaggttacttcctcagttcgcaaaagtcagagacagggccgggtgcggtggctgatgcctgtaatcccagcactctgggaggccgaggtgcatgggtcacctgaggtcaggagttccagaccagcctggccaacatgggaaaaccccgggtctaaaaatacacacataaaaaattggccaagtgtggtggcacgcacctgaaatcccagttactccagtggcagaagttgcagtgagctgagattgtgcagctgcactccagcctggg

SEQ ID NO: 1887676 - DNA, 4001 bp, Homo sapiens
gatgacgtgctcatgtgccctacatttcagcttcatttacccaatagaaactcaaagcccacgcactccacctttgtgctcttgctacgtagtgaacatcccacctgcaagggacactgaggttcccttcagctctacctcaacccaagtcaagggaggttctgtaaaccagtgcaggcataacttccacggagtaaaaggtgttgagggctggacgaacaggcatcgctcactacggcaacaacgagagctgcggcgcatcccacctgttactagagaggcccttctagggtcctcaaggtttttgtgaaaagtatctgtggttttgtcccatgtgacaattatcactgccactgagactcatcttgtctaccatagtttgtttctcatattagccacagccaacatttcacagcttaccaagcaactagcctttaaatgcgaggtaccttgggttcattacccgaagaaaatagcataatcagggaagctgcagtcaaagaactcaccggggctggcgtgagtgggtggcggttgaatcaactacacccttcctgcagagaaagcagctctattccgagaaacgacggcaagttgttggagagaaaaaaatttcagtgtcaaggacaagaagattaaactaaaaagacacaaacaggaaaaacaagaaaattttgttaatatggacatccatttgagattacaaattaagattggatagacttgaaggcttacttaccttttttttaagtccagctcagtcgcccaggttggagtgcaatggtgcaatctcagctcactgcaacctcagcctcctaggttcacgccaccacacccggctaatttttgtatttttagtagtgatagggtttcaccatattggccaggctggtcttgaactcctgacctcaggcgatccgcctgcctttgcctcccacagtgctgggattacaggcatgaggcaccatgccccggctacttactctcttaatgaaggaaatgatttcgattgattacactaaattgatgggagacccatttcaaataaccaacccaaatggagcctctgtaaccaggtgccatgtaatctgtttttaaagagatgggatcttgctatgttggcccaggctggagcgcagtggctattcgaaggtgtgatcagtgcatggtacagtctggaaatcaaaggtccctccgaccctggcctctgcagtggctgggactgtgtgccccacaatgcctggccatgtcaactctctttgaaatgggtcatcaagacgaggtggctcacacgtgtaggaccacataagctgtggagatgagactatcctgggaaaaagagaccccaattgtaccaaaaattaaaaacttagccaagtatggtggcacgccccacgtagtcccaactacttgagaggctgactcaagaggaccacttgaggctgggcgcggtggctcacgcctgtaatctcagcactttgggaggccagggaggaggattacttaagggcaagagttgagatgagcctggccaatatggtgaaaccctttcttgtctaaaaatacaaaaagcagggcatggcggtgggtgcttataattccagctactcgggaggctgaggtgggagaatgtctggaacctgggaggctgtagttgtggagatcctgccactgtactccagcctgggtgacagagtgagactccatctcaaacaattaaaaaaatgaaataaaaagaagaccatctgagcccaagagatctaggtagaagtgccaccgcactccagtctgggcaacggagaccctgtcttagaaaaaaacaaaaccaaaacagaaccccaccatcgtccacgtctgatgataagcacgctctgcaaatgtattaccaagatcagcatcaacttcaacgctgctttactcaaaccgtaaacctctaaaggggagcgctttgttttctttcagacaacagaaagcgcttccctctggagggccacagcatgacatattcttgctccaacactggttttttgatgttgctgttggaattttccttgaccaggttaaaatggacacaaaataaagatgcatttatttgccctgtttgcatgttttctggaatccagaacataaacccctaaaaggaccatctccagttccttgcttcaaaggctcagcaggttagccttgttcatcaaggcgcaatcctcctgagttttgtccccaaagagaaaaagcaatgcctgctacatataccttatctttaaccaagagaattaggcaggatttctagagaacagcaatggatttttgagccaagcgttcacctgagttccaacatagggacacacagtcccgatgggagcatccaaaatggaatctaaattagccaggcgcccacctgtaatcctagctactcagcaggctgagacaggaggatcgctggaacccaggaggcggaggtttcagtgaaccgagatcatgccattgcactccagcctgggtgacagagtgagactccgtctccaaaaaataaaaataaaaaaaaagaatatacattgtcatacacacaaacattctccaggatagactactgtctaggccgtaaaagctcctcaataaaatttgaacagaaatacacaagtacaggtggggtgcagtggctcacacctgtaatcccagcactttaggagtcggaggcaggaggattacttgagctcaggagttcaagactagcctgggcaacatggtgaaacctcatgtgtccaaaaatacaaaggttaccaggtgttgtggttcatgcctgcagatgctaactcaggaggctcagctgggaggtagaggttgctgtgagccgaggtcacaacactgcactccaacctaggtaatagcgccagactgtgtctcaaaaaatatttaaaaaatacacaaacagaaacaaccccaaagtgatataagagtattctctgtgttggccgggcacagtggctcacgtctgtaatcccagcactttggaaggccgacgtgggtggatcatgaggtcagtagttggagaccagcctggccaacatggtgaaccccatctctattaaaaatacaaaaattagccagtgtggtggctcatgcctgtaatcccagctgctctggaagctgggtcataagaatgacttgaacctgggaggcaaagcatgcaatgagtggtgttcatgccactgtactccggactgggtcacagtgtgagattatcccaaaaaacaggaccacttgagcccaagagatctaggttaaaagtgccactgcactccagcctgggcaatagacactctgtctcagaaaaaaaaaaacaaaaaaacagaaccccaccatcatccaactctgatgataagcatgctctgcaaatgtattattgccaagatcagcatccacctaaacgttgcttttcttaaacggtaaccctctaaaaggaagcactttcttttctttcagacaacagaaagcgcttccctgtagagggacacagcctgacatcttcttgctgtggcaccgtggattttttgttggaatcttccttaaccaggttaaaatggactcgaaaagaaagatgcatttatttgccctgttttctatttgtgtgttttctggaatccagaatataaacccctaaaaggacaatctccagttccttccttcaaagaatcagcaggttagccttgtttatcaaggggcaatcctcctgagttttgtctgcaagagaaagagcaatacctgctagacataccttatctttaaccaagggaactgggctggatttctagagaacagcaatggacggagagccaagtgttcacctgagtttcagtacagggacacacagtccccatgcaagcatccaaaatggaacataacatactgaagaatatacattgtcatagacacaaacattctccagagagaccacaggctataccataaaagctccccaataaaatttgagcagaaacaca

SEQ ID NO: 1887677 - DNA, 4001 bp, Homo sapiens
cctgtctctactaaacgtacaaaaaaattagctggggtggtggtgtgtgcctgaaaatcccagttacccgggagttggggaaggagaatcactggaacccgggagacagaggctacagtaagccgagattgcgccactgtactgcagcctgggcgacagagcaagactgtttcaaaaaaaataaataaataaaaataaaaaaaatttagtgtcagggacaaggagattcaactaaaaagatacaaataaatagaaaaaataagaacattgtattaatattgacatccattgggattacagaatagactggatagatgtggaggcctatattttttgttttgttttgttttgagatggagcctcgctctgtcgcccaggctggagtgcacctgcgcgatcttggctcactgcaacctccgcctcctgggttgaagagattctgctgcctcagcctcctgagtagctgggattacaagcacgcaccaccacgcccacttaatctttgtatttttagtagagacggggtttcaccatattggtcaggctggtctcgaactcctgacctcctgatccgcctgcttcagtctcccaaagtgcttggattacacacctggcccttactctcctaatgaaggaaacatggtttggattgattaaactaaactgatgaaaggcctgtatttgaagtgaccaacccaaatggagcctcaggaaccagatggcatgtaatctgcgtttttaaagagatgggatcttgctatgtggcccaggccggagtgcagtggctattcaaaggtgtgatcagtgcatggtatagccttaaaatcaaaggaccctcccaccctagcctttgcagtaactgggaccctgtgtgtcccaggatgcctggccgtgtcacctatctttgaaatgggacaaggtggctcacacatttaggatcacttaagctcagctgagaccatcccaggcaaaagagaccccatctctaccaaaaattaaaacctgagcccaactacttgcgaggctgacaagaagaccacttgaggctggacgtggtggctcacgcctgtaatcccagcactttgggaggccagggaggtggatcacttaaggtcaggagtcgagaccagcctggccaacatggcgaaaccctttcttgtctaaaaatacaaaaattggcagggtgtgttggtgggtgcttgtaataccagctatttgcgaggctaaggtgaaagaatcactggaactccacggtgagtggagatcctgccactgcactccagcctgggcgacagaggtgggagttacagtgagtggagatcctgccactgcattccagcctgggcgacagagccagtctccatctcaaaataaaataaaataaataaaataaaacaaaataaaataacaggctgggcacggaggctcacacctgtaatcccagcactttgggaggccgaggcgggtggatcatgaggtcaggagtttgagaccatcctggccaacgtggtgaaacccggtctctactaaaaatacaaaaattagctcggcatggcggtgcgtgcctgtaatcccagctactcaggaggctgaggcaggagaatcgcttgaaccacggagtcggaggttgcagtgagctgagattccgccactggactccaacctggtgacagagcgagactccgtctcacacacacacaaaaataagaattaataataataatagagcaagacatgaccccaagagatctagtttggagtgcaacccctccctctccagcctgggcaacagagactggtcttggaaaaaaataaaaccaaaacagaaccctgccgtcatccaagcctgataagcatgctctgcgaatgtattaccaagatcagcatcaacttcaacgttgcttttctcaaaccgtaacactctaaagagaagcgctttgttttctttcagacaacagaaagtgcttccctccagagagtcacagcatgagatcttctcgctccagccatctgggatttttgttgaaattttccttgaccaggttaagatggacacaaatataaagatgcatttattcgctgtttgaccgttttctggaatccagaacataaacctctaaaaggacaatctccaggctcagcagattagccttgttcatcaaggggaatcctcctaagttttgtctccaaggagaaaaagcaatgcccactacacataccttacctttaaccaagagaattgaggtggatttctagagaacagcaatggattgagtcacatggtcacttgagttccagcacagggacacacagtcatgatgggagcatccaaaatggaatctaaatttgccaggcgtggtggtgcccacctgtaatcccagctactcaggaggctgaggcaggagaattgcttgaacccgggaggcggaggttgcagtgagacgagatcgtgccaatgcactccagcctgggtgacaggaaagaaaaaaagaatatgcattgtcttacacacaaacattctccaggatagagcactgcctaggccgtaaaagctcctcaataacatttgtacagaagtacgggtggagtgcagtggcttacacctctaatcccagcactttaggagtcgaaggcgggaaaattacatgagctcgagttcaaaactagcctgcccaacatagtaaaacctcatctgtaaaaatacaaaagatagccaggtgtagtggttcatgcctgtagacactaattcaggaggctgaggtgggaggtagaggctgcagtgagttgaggtcacaacactgcactccagcctgggcaatagagccagatggtgtctcaaaaaaaattaaaaaaaaaaaaaatacacaaacaaaaacaaccccaaagtgatataagagtattctctgtgtgcagaagactattttgtgtgaatataattatacatagaagattatatgataacatgtatatattttggagaccctgtctcaaaaaaacaaagttccatgtactatatgctcacataaagaataattcctacatactagtgcttgggcagcaagaacgaaactccatctcaaaaaaaaaaaaaagaaaaaatcaaaacaaaaacagaagcccaccatcatccatctctgatgataagcatgctctgaaaatgtattaccaagatcagcatcaacttcaatgttgcttttctcaaacggtaaccctctaaaaggaagcactttcttttctttcagacaacagaaagtgcttccctctagaggacgacagcctgagatcttcttgctctggcactgtggattttttgtgggaatcttccttgaccaggttaaaatggacgcaaaaataaagatgcatttatttgccctgtttgcatgttttctggaatccagagcataaatccctaaaaggaccatctgcagttctttgcttcaaagaatcagcaggttagccttgttcatcaacgggcaatcctcctgagttttgttcccaaagagaaaaggcaatgcctactacacataccttatctttaaccaagagaattgggctggatttctagagaatagcaatggattttgagccaagtggtcgcttgagttccagtacaggagcgcacagtcctcatgggggcatccgaaatggaatctaagatgttgaagaatatacactgttgtaggcacaaacatcctgcagggtagacaacaggctaccctgtaaacgctcctcaataaaatctgagcagaaacagacgagtataggtggggcacaacagctcacaccactaatcctagcactttaggaggccaaggtggaagatcacctgagctaaggagttcgagaccaacctgggcaacatggggaaaccacatctgtacaaaaaaaccaaaagttagccaggtgtggtggtgtatgcctgcagacagctattcaggaggctgagctgggagttggaggttgcagtgagccgagatcgcaccactgcactccagcctggg

SEQ ID NO: 1887678 - DNA, 4001 bp, Homo sapiens
tgcttcttacctccagatggtcacagcctgagatattcttgctcggtgcatggtggattttttgttggaatgttcttcgaccaggttaaaatggacacaaacataaagatgcatttgtgggccctgtttgcatgtttcctggaatccagaacataaacccctaaaggaaccatctccagtttcttgtttcaaagaatcagcaggttaccttgttcatcaaggggcaatcctcctgagttttgtctctagaaagaaaaagcaatgcctactacacataccttatatttaaccaagagaattgggctggatttctagagaacagcaatggattttgagccaagtgttcacttgagttccagtataggcacacagtcccagtgggagcatccaaaatggaatctacgatgttgaagaatatacattgtcatacgcacaaatattctccagaatagatcacaggcttggtcataaaaactccttaacacaattttaacataaatacacaagtacaggtggggcacggtggctcacacctctaattctagcactttaggaggccaagacgggagaatcacctgaggtcaggagttcgagaccagccccggcaacatggtgtaaccccatgtgtacaaaaaatacaaaagtgagccgggtgtggtggtgcatgcctgtagacactaatgcagcaggcttaggtggaaggcggaggttgcagtgagctgagaacgcaccactacactccagcctgggtgatagagccagaccttgtctcaaaaataaccaaccaaacaaataaaacacacacacacagaaacaaaccaaaaaatacccaaagtgatatcagagtattctctgtattcaaatcagcattttgtgtgtatatgattatgttatatatatgatatattatatatatgataaatttaactgggggctgggtacgaacaaaataacagtccttactttcttcttgtctgtgcatgggttaatattcacatgtagtcccatctacctaggactggggaggggcagaggcaggaggatctaagaccactttagccagggcggcacagtgagacccctgtctcatgcatttatttcctggtcatgcacccaagatttcagcttcatttccccaataaacactgaagccccatgcactccacctccgtgctcttgctcatcccatctgcagggacactgaggtcccctcaactccacctgaccccatgtgaggttctataccagtgccagaataatttccatgcagtaaaaggtgttgatggctgcgcagtggctcatgcttgtattctctggacaacatggtgaaaccccctctttagtgaaaaaaaaaaaaaataataataataataataatacaaaaagtagccgggcctggtggtgtgttcctgtaattccagctactccagaggctgaggcaggagaattgcttgaacctgagaggtacaggttgtagtcagccgggatcgtgccactgccctctagcctggtcgacagcgagactccatctgaaaagtaaataaatacatgaataaaaaagaaaaatacaaatgttagccaaggatgatgtcaggcgcctgtaatcccagctcctcaggaagctcaggaaggagaattgcttgagcccaggagacagaggttgcagtgagccgagatcacgccactgcactccagcctgggtcacagagcaagactctgtcccaaaaaagaggactatctgagcgcaagagacctaggttggaagtgcttatggactccagcctggaaaatacagattttgtcttaggagaaaaaaaaaaaaaaaagcacagaaccccgatatcatccaagtctgatgataagcatcctctacaaatgtattactgaagtcagcatcaacttcaacattgagtttctcaaaccgtaacgctccaaagggaagcgctttggtttctttcagacaacagaaagtgcttccctctagagggtcacagcatgggatcttctcactccagcactctgggtttcttgttggaattttccttgaccaggttaaagtggatagaaaaataaaaatatatttattggtcctgtttgcctgttttctggaatccagaacataaacccctaaaaggaccatctctggttctttgcttcaaagaatcagcaggttagccttgctcatcaaggggcaatcctcctgagttttgtctctggaaagaaaaagcaatgcctactacacataccttatctttaaccaagagaattgggctgaatttctagagaacagcaatggatgtacagccaagtgttcacttgagttccagcacagggacacacaatccccttgggagcctccaaaatagaatctaagacgttgaagaatataaattgtcacacacacaagcatcctccaggatagaccacagtttaggctgacttaagaggaccacttgaggctaggcgcagtggctcatgcctgtaatcccagcagtttggaaggctgaggcaggtggattacctgaggttaggagtttgagaccagtctggccaacatgctgaaaccctgtctctactaaaaacacaaaaattagctgggtgtggtggtggacgcctttaatcccagctacccgggaagctgaggcaggagaatcgcttgaacctaagagaaggaggttgcattgagccgagattgtgccattgcactccagcttgggcaacaagagtgaaactctgtctcaaaataaataaatcaataaaaataaagaaatacacaagtacgggtgaggcacggtggctcacacctctaatcccaacattttatgaggccgaggcaggaggatcactttagctcaggtgttggagaccagctcaggtaaaatggtgaaaccattttgtagtctcaggtaaaatggtgaaaccattttgtagtctcaggtaaaatggtgaaaccattttgtagtctgtagaaaaactacaaaagttagccaggtggctgggtgtggtagctcatgcctgtaatcccagcaatttgggagtccgaggcaggtggatcactagaggtcaggagttggagaccagcctgacaagcatggggaaacctgtatctactcaaaatacaaaattagccaagtgtgatggtgcatgcctgtaatcgcagctacttgggaggctgaggcaggagaatcacatgaacccggaaggcggaggttgcagtgatctgaaatcttgccattgtactccagcctgtgcaacaagagcaaaattccctctcaaaaaaaaaaggtagcccactgtggtggtgcatgcctgtagacacactaattcaggacgcataggtgggagatggaggttacagtaagccgagatcgcactactacacttttgcctgggtgacagagccagaccttgtctcaaaaacaaacaaaaaccacacacacaagaacaaaaaacaatctcatagtgatatgagtaacctctacctcccaggttcaagcgattctcctgcctcaggctcccaagtagctgggattacccgtacctgccaccatgcccggcatatatacatatatatatatatgtatttatcgtagagacggattttcaccatgttggccaggctggtcttgaactcctgacctcgggtgatccacacgcctcagcctcccaaagtgctgggattacaggcttgagccactgtgcccagccacatcatacatttttgagaccatgtctcaaagaaaataaagatctacatattgtatgctcacaggaagaataatacctaaacataagtgcttgctttgctggtgcacataaaaaaaaattggattgacagagattaccctggcccccacacagaggtgacacccaaattcatgatggttccatatttatcttttatttatttatttattttttttttttagaccaagtcttactctgtcgacaggctgcagtgcagtggcacgatcttggctcactgcaacctctgccgccca

SEQ ID NO: 1887679 - DNA, 4001 bp, Homo sapiens
gcgggcagatcacctaaggtcaggagctgagttcagcctggccaacatggtgaaaccacgtctctgctaaaaatacaaaaattaggccaggcatgggggcgcatacctgtgatcccagaaatttgggagtcagaggtgggtggatcacttgaggtcaggaatttgagaccagcctagccaacacggtgaaatccagtctctacttaaaaaaaatatacaaaaagtaactaggtgcggtggtgtgcttctgtaattccagctactcaggaggctgaggcagaagaattgcttgaaccggggaggcagaggttgcagtgagccgagattgtgccactgccctccagactgggtgacagcgagactccgtctcaaaaataaataaataaataaattttaaaaaatacaaatatcatccaggtatggtgatgaacgcctgtaatctcagctgcttgggaagccgaggcaggagaattgcttgaacctgggaggcagaggttgcagtgagccgagatcgcctcactgcatatcagcctgggtgacagagaaagactctgccccctaaaaaggaccatttgaattcaagagacctgggttggacatgtcactgcactccagcctgggcaacagagatcctgtcttagaataaaaaagcaaaaccgaaaacagaaccccggcattgtccaagcctgatgataagcatgctctgcaaatgtattaccacgatcggcatcagcttcagtgttgtttttctcaaaccgtaatccagcaaagggaagcgctttctcttctttcagacaacagaaagggcttccctttgcagtcacagcttgagatcttcttgctccggcactctgggtttcttgttgaaattttccttgaccaggtcaaaatggacacaaaaataaagatgcaatttttggccctgtttgcatgttttctggaatcctgaataaaaacccctaaaaggaccatctccagttctttgcttcaaagaatcagcaggttagccttgttcatcaaggggcaatcctcctgagttttgtccccaaagagaaaaagcaatgcctactacacctaccttatatttaaccaagagaattgggctggatttctagagaacagcaatggatggagagccaggtgttcacttgaattccaggacagagacacacagtcccgaggggagcatccaaaatggaatctaagatgttgaagaatgtacactgtcacacacacaaacatcctccgggcattatcccgtaaatgcttctcagtaacatttgaacagagatacacaagggcaggtggggcgcggtggctcacacctctaaccgcagcacttacgtaggccaaggcaggaggatcacttgagctcaggagttagacaccagcccgggaaacatggtaaaacctcatctgtaaaaatacaaaagttagccaggtatggtggtacatgcctgtagatactaattcaggagactgaggtgggaggtggaggttgcagagagccgagattgcaccactgctctccagcatggatgacacagcaagactctgtctcataaataaataaataaataagccaggtgtggtggcacatacctgtaatcccagctgctcgggaggctgaggcaggagaatcccttgaccccaggaggcagaggttgcagtgagtggagatcctgacaggacactccagccagggcagggtcacagagcaagactctgtcccaaaaaagagggccacttgaacccaagagatctaggttggaggggccgccacactccagcctgggcaacagacaccctgtcttagaaaacaaaacaaaacaaacaaacacaaaaccccaccaccttccatggttgattataagcattctctgcaagtgtattaccaagatcaacgttgcttttctcaaagcgttaacactctgaagggaagcgctttcttttcttttagccaacagaaagcgcttccctctagagggtcacagcctgagatcttgctccagcattgtgggttttttgttggaattttccttcaccgggttaaaatggacacaaaagtaaagatgcatgtattggccctgtttgcatgttttctggaatccagaacataaaccactaaaaggaccatctccagttccttgcttcaaagaatcagcaggttagccttgttcatcaaggggcaatcctgagctttgtctctaaagagaaagagcaatgcctactacacataccttatatttaaccaagagaattgggctggatttctagagaacagcaatggattttgagccaagtgttcacttgagttccagcacagggacacacagtcccaatgggagcatccaaaatggaatctacaatgttgaaaatgtacattgttatatacacaaacatcctactatatatatgataagaatatatgatgactgggcgcggtggctcacgcctgtaatcccggcactttgggaggccgaggcgggcggatcacctgaggtcaggagtctgagcccagcctgaccaacatggagaagcccgtctctactgaaaatacaaacttagctaggcatggtggcgggtgcctgtaatcccagctactcaggaggctgaggcaggagaatcacttgaacccaggaggcggaggttgcagtgaactgagatcatgtcattgcactccagcctaggtgacaggagcgaaactccctctcaaaaaatgaaaaaaaaaaaaaagatattgaagactatgtattgtacgcacaaacaacctccaggatagaccacaggttaggccataaaagctcctcaataatatttgaatagaaaaacacaagtacggtgggtctcggcggctcatacctctaactgcagtacttaaggaggccaagtcgggaggatcacttgagctctggagttccagtccagcctgggaaacatggtaaaccctgtgtgtacaaaaaatacaaaagttagtcaggtgtggtggtgcatgcctgtattcagctctttaggaggctgaagtgggaggtgggaggtggaggttgcagggagccaattgcaccactgcactccagcatgggcaacagagccagatgttgtctcaaaaaaaaaaaaaaaaacaccccaaaatcccaaaaaacgcacgcaaacaaaaaaaccccaaagtgatatcagtattctctgtgtacagaagagtattttgtgtgtgtatgattatattatcaatatcagacattataataaaatgtatatgatatatttttgagacccggtgtcaaaaaaagaaagctctctatgttgtttgctcacaggaagaataattcctacacagaacagcatgcattaaaaaaattggaatgacagagattcccatgtcccctgtacacagtgacacccaaattcaccatgggtcccatatttaaaattaggaaatacagaccgggcgcataggctaacgcctataatcccagctctttgggaggctgaggcaggtggatcacctgaaatcaggagttcgagaccagcctgaccaacatggtgaaaacctgtctctaccaaatgcaaaaactgagctgggtgtggtggtgcatgcctgtaaccgcagctactttggagggtgaggcaggagaatcacttgaaccttggaggcagaggttgcagtcacccgagatcacatcattgcactcccgccaggcaacaaactgagactctgtcaaacaaacaaacaaacaaacaaacaaacaaaaaaacaaggtgtgatcagtgcatggaatagtctggaaatcaaaggaccctcccaccccgggatctgcggtggctgggactgtgtgccccatgatgcctggccatgtcaactatctttgaaaagggtcagcaggagaatgtggctcacgcctgtggaatccttgagctcaggtgttgagaccttcctgagcaacagagatcatatctgtatgaaaaattaaaaacttagccaagtgtggtggcacgccccatgt

SEQ ID NO: 1887680 - DNA, 4001 bp, Homo sapiens
ttcaagactagcctgggcaacatggtgaaacctcatgtgtccaaaaatacaaaggttaccaggtgttgtggttcatgcctgcagatgctaactcaggaggctcagctgggaggtagaggttgctgtgagccgaggtcacaacactgcactccaacctaggtaatagcgccagactgtgtctcaaaaaatatttaaaaaatacacaaacagaaacaaccccaaagtgatataagagtattctctgtgttggccgggcacagtggctcacgtctgtaatcccagcactttggaaggccgacgtgggtggatcatgaggtcagtagttggagaccagcctggccaacatggtgaaccccatctctattaaaaatacaaaaattagccagtgtggtggctcatgcctgtaatcccagctgctctggaagctgggtcataagaatgacttgaacctgggaggcaaagcatgcaatgagtggtgttcatgccactgtactccggactgggtcacagtgtgagattatcccaaaaaacaggaccacttgagcccaagagatctaggttaaaagtgccactgcactccagcctgggcaatagacactctgtctcagaaaaaaaaaaacaaaaaaacagaaccccaccatcatccaactctgatgataagcatgctctgcaaatgtattattgccaagatcagcatccacctaaacgttgcttttcttaaacggtaaccctctaaaaggaagcactttcttttctttcagacaacagaaagcgcttccctgtagagggacacagcctgacatcttcttgctgtggcaccgtggattttttgttggaatcttccttaaccaggttaaaatggactcgaaaagaaagatgcatttatttgccctgttttctatttgtgtgttttctggaatccagaatataaacccctaaaaggacaatctccagttccttccttcaaagaatcagcaggttagccttgtttatcaaggggcaatcctcctgagttttgtctgcaagagaaagagcaatacctgctagacataccttatctttaaccaagggaactgggctggatttctagagaacagcaatggacggagagccaagtgttcacctgagtttcagtacagggacacacagtccccatgcaagcatccaaaatggaacataacatactgaagaatatacattgtcatagacacaaacattctccagagagaccacaggctataccataaaagctccccaataaaatttgagcagaaacacacaagtacaggtggggcacggtggctcatacctctaatcacagcactttaggaggccgaggtgggaggatcacttgagttcaggagttcaagaccagcccaggcaacatggagaaaccatgtctgtacaaaaaatacaaaagttagccaggtgtggtggtgcatgcctgtagacagctattcaggaggctgaggtgggagttggaggttgcagtgagccgagattgcaccactgcactccagcctgggcgaaagagtaagactctgtctcaaaaataaataaaggaaattacaaaaattagccgggcatggtagcacatgcctgtaatcccagttgcttgggaggctgaggcaggagaatcgcttttacccaggaggcagaggttgtagtgagcagagatcctgacactgcactccagccagggccacagagcaagactctgacccaaaaaagagggccacttgaacccaagagatctaggttggagagggaccaccacactccagcctgggcaacagacaccctgtattaaaaacaaaacaaaacaaacatgaaacaccaacatcatccacgtctgattataagcattctctgcaaatttattaccaagataagcatcaacttcaacgttgcttttctcaaagagtaatcctctaaagagaagcgctttcttttcttttagacaagagaaagtgcttccctctagagggtcacagcatgagatcttcttgctccaacactctgggttttttgttggaattttccttcacccggttaaaatggacacaaaaacaaagatgcatttattggccctgtttgcatgttttctggaatccagaatataaacccctaaaaggaccatctccagttccttgcttcaaaggatcagcaggttagctttgttcatcaaagagcaatcctcctgagttttgttctcaaagagcaaaagcaatgcctcatagacatatgtaccttatatttaaccaagagaactgggctggatttctagagaagagaaatggatattgagccaggtgttcaccagagttccagcacagggacacacagtcccgatgggagcatccaaaatggaatctacgatgttaaagaatatacattgttgtacacacaaacatcctccagggtagatcacaggctaggccctaaaaactcctcaataaaatttgaacagaaacacacaactacaagtggggcacggtggctcacacctctaatcccagcacattaggaggctgaaactgaagtatcacctgagctcaggtgttcgagaccagtctcggcaacatggtgtaagcccatgtgtataaaaaatacaaaacggagccaggtgtggtggtgcatgcctgtagacactaattcagcaggcttaggtgggaggtagaagtcgcagtgagctgagagagatggcacaactgcactctagactgggtgacagagccagaccttatccaaaaacaaataaaacatacactcacacacacacaaacaaacaaaaaaaaccccaaagtgatataagagtattctcttcatgtagaagagtattttgcacgtatatggtattatatatataagaatatataatggccgggcggggtggctaatgcctgcaatcccagcactttcggaggccaaggcgggaagatcaccagaggtcgggagttcgagaccagcctgaccaacatggtgaaaccctgtctctactaaaaatacaaaaaattagccaggcgtgtggtgcatgcctgaaatcctagttagtcgggtggctgaggcaggagaatcacttgaaactgggaggcggaggttgaaataagcgaagatcgcaccactgcactccagcctggtgacagagtaagactccatctcaaaaaaaaaaaaaaaaaaaagaaaagaaaaaagaaagaaaaatgcaagtattagccaggcgtggtgtcaggtacctataatcccagatactcaggaatctgaggcaggagaacggcttgaaactgggaggtggaggtggcagtaagctgagatcacgccactgcactccagcctgggtcacagagtaagactctatcccaaaagagaggaccatttgagcccaagagagctaggttggaagtgccaccacattccagcctgggcaacagagatcctgtcttagaaaaaaaaaaaaaacagaaccccaccttcatccaagtctgatgataagcatgctctgcaaatgtattagcaagatcagcatcaacttcaatgctgcttttctcaaagggtaaccctctatagggaagcgcgttcttttctttcagacaacagaaagcgcttccctctagagggtcacagcatgagatcttcttgctccagcaccctgggttttttgtagcaattttccttgaccaggttaaaatgaacacaaaaataaagatgcatttactggccctgtttgcatgttttctggaatccagaatataaacccctgaaaggaccatctccagttccttgtttcaaaggctcagcaggttagccttgttcatcaaggggcaatcctcctgagttttgtctccaaagagaaaaagcaatgactactagacataccttatatttcaccaatagaatttggctggatttctagagaacagcaatggattttgagccaagcgttcacttgagttccagcacagggacacgcagtcctcacaggaacatccaaaatgaaatct

SEQ ID NO: 1887681 - DNA, 4001 bp, Homo sapiens
gtatgcttttcctaacaagacaccagactctctaatctgctggtttgatcagtaaaccactgtgactccatttccttccccccaggccccatgaagactttcccctctcctcatccccactctgactccacagactgaaaagagttcactggttctttgaagtggcatctgagccatttttattgtgagctctgtctccctggcaggttaatccacaccagtgtgtccatctcaaacccggagtccccagagtcaaggggccgctgatacgtacgtctccccgtgcaatgcctcacttccaaaggagaagccaggccaggactgggcccctttctacttcgtttctgtccttttctgggctttccctcagaggcagaaactgggcataatattcgtgagtggggatgtcagatcaggggtagagggccagagagatggagaagggaaggaaaaatgatgacgagcagatcccaggagggacacaagcagctgggggtggagatggccagtggccgtggtgggggcagggggaggtgtgcatgtcagggcaggtatttagatggatttctgggtagcaaggagagtggaagagaacaggggcaggagttttggaggtttggggttaccctcaccaaaaagactggctctgagccaggcacaaggttctccgcagtgagtgtgtgtgtgtgtgtgtgcgtgtgtgtgtgtgtgtgcgcacatgcgcgcaggaggaagccatgtggcggtgtctggggaaactcggggacttccctggcccccgctgcccccagtgcctctgctgcagcccatccagtgtcaatgtttgaggatcacatagtccacattttcttgtgcctgaggccgctccccgaccccaaactggatcagctctgagtaatgaatcccctcatcttctggaaaatctggaatgacgttctcatagtcgccctgagaaaaccgcatggtggttagcctggccccactgtcgccagcctccaccgccgcttttctccgcattctctccttcattccacccgggggtccaaaagcccaggcgggtgtcctcgtgtcaggaaactggctgtggccggcatccaggacctggaggtacctgcctggctctggccagctctgccggagcaaccgtctccaacacccaacctctgccaccacggatgcctacccaactccttcctatgtgggacccaccactgaggccaggccctgtccccagccttccacagcccctctggggagacctggggagaccctccttaccacttggcgcttgtgcaatgctgaataagtgaccgtgtcatcgcagtccgggggaggtctctgcatctctgaggactctgcatctctgagagacagggcagatagacgaccacgcatgaagcatctcccacgaactctcctccctctcaacacccagagcccccaacagcaccccaacctcagccccttatgtaaaacctgtggcctccccagtgcccaaagctcacagtaggagctcgtgcaaatgtgcgtggagggagtaggcgtgggtgtgtatcatgaggtcttgatctttgtgataagaacggactgggcatgtgtgctgctgacttgaaggagcaggtccacttctggagactggcccttacccagaggcttgttgccgagtgggaatgaggcagagcatgtatcagggtgcctggcatgggcctggcacaaagagggcaggcgggacagagcttttcctcccgcctccctcccagggtgcagggtcaccctcctggtaccctcagtacccagttcgtggtatgttcatctcgggaaagcgcagggtggtgtagctaatgccatcttccatcattggattgtagcatcccagggagtgggggccttcagagaggggggcccttctaacctgggagggagacgaggatgaagtgctaaccacctgttccccaaccctcgtccccttccctggcctctgacagcccaggtctcctcagaggacattttatccccttccttcaccttgtttccccactcagcttcacagtctgcctcatgcctaccctttttttttttttttttttttttttgaggcagagtctcagtatgtcacccaggctggagtgcaatggcgcaatcttggctcactgcaacctctgcctcccaggttcaagcgattctcctgcctcagcctcccgagtagctggaattacaggcatggaccatcacgcccggctaatttttaaaatattttttgtagagacagggtttcaccatgttggctacgctggtctcgaactcctgacctcaggtgatccacctgcctcagcctcccaaagtgctgggattacaggcatgagccatcgtgcccagccccatcctacctttttattcctcacaaagaagctctggccgctggaattctcctgaagcccctgctggctctgtgtcctcttccaactgagaaataaaggcacatgtgtgagggtcagggactccacaggctggaggcttcgagatggagcaactggacacgggcctctgccaagggatagaggaggtggtgggggatggcaggagctcaccgtcgctggagcttgagcccacagattgccaggatgaggatggcgaggcaggacccgagtcccacagccactcgcctgccgatggtctccgggctatctgggtggagaaaggagagaccttaatcaactgaggggccagctctccctggcagcctttgcctggaaggcatcctggacttctctctgcagccagactcgtccttctcccctgcatgcgtgcaggggtgcagaggaagagggtgacaacggcccctgcttgctctgggcctccctttaggaataaggcactaattctcctgaggagctgcttttcccacagacgtggcacgcccagagcctgtgacccgcacccgcataaatgggtgcagctcttcacggcagtatagctgtgtgatcagctctgaaagtgcacctgtcttccacccagcaattccacatgggaatgcatcttgcaactgtccttgcaggcgtgcccaaaacaagaggctgcagacctaggccctgaagagggcactgggaggaggatgtatgcaaccttcatacgcgaggactccatggccccaggaaaaagaggaggctctcaggctgtctgcaaaggggatacccagggaacaatggttttatatgatgggatgtgtctgttacatttccagataacatgtttcagatgttttcctttggccttcggccgtgctggtgatggttccctagattgactgattgattgattgagacagagtctcgctctttcacccaggctggagtgcagtggtgagatcttggctcactgcaacctctgcctcccgggttcaagcgattctcctgcctcagcctcccgagtagttgggactacaggtgcgcgccaccacacccagctaatttttgtatttttagtagagatggggtttcaccattggccaggctggtctggaactcctggcctcaagtgatccacccaccttgtggcctcccaaagtgcttgtggccacccactttggcctcccaaagtgctgggattacaggcgtgagccactgtgcctggtcaggttccctcaatttaaggccatgtttccaattattaatctgaaaaagtacaataaattaattaggtatcttccatatgctttcagactcttttttgttgttgttattgttttgtttgttcgtttttaaaattttttttggtattttttgtagagatgagatcctgctatgaggtgtgggctatgttgcccaggctggtctcaaactcctgggctcaagtgatcctcccaccatggcctctcaaagtgttgggattacaggcatgaaccaccatgcccagcctccagactttagacactctgtgtatgcatagatacagaacaatgtccaaacagtattattacatggaaaaaagcaaagaaaattccc

SEQ ID NO: 1887682 - DNA, 4001 bp, Homo sapiens
tacttgggaggccgaagcaggagaattgcttgaacctgggaggcggaggttgtagtgagccaagatgggatcactgcactccagcctcggtgatagagagactctgcccccaaaaaggaccatttgaatccaagagacctaggtgggatgtgccaccgcactccagcatgggcaacacagaccctgtcttagaataaaaaagcaaaaccaaaacagaaccccaccaccgtccaagtgtgataagcatgctctgcaaatgtattaccgagatcagcatcaacttcaacgttgcttttctcaaaccgtaattcaccaaagggaagcactttcttttcttttagacaacagaaagggcttccctttgcagtcacagcttgagatcttcttgctccggcactctgggtttcttgttgaaattttccttgaccaggtcaaaacggacacaaaaataaagatgcatgtattggccctgtttgcatgttttctggaatccagaacataaacccctaaaaggaccatctccagttccttgcttcaaagaatctgcaagttagccttgttcaccaaggggcaatcctcctgagttttgtctctaaagggaaaaagcaatgcctactacacataccttatctttaccgagaactgagctggatgtctagagaaaagcgacggattttgaaccaagtgttcacctgagttccagtacagggacacagtcctgatgggagcatccaaaatggaatctaaattagccaggcatggtggtgcatgcctgtaatcctagcttctcaggaggctgaggcaggagaattggttgaaccaaggaggaggaggttgcagtaagccacgatcgcgccactgcactccagcctgggagacacagcaagactccgtctcaacaataaataaataaataaacaaataaataaaaatacaaaaattagctgggtgtggtggctcacaccggtaatcccagctgctcaggaggctgagtcaggagaatggcttgaacctaggaggcggaggttgcagtgaggagagtttctgccactgccctccagcctgggtcacaaagcaagactgaaccaaaaaaaaggaccactcgagcccaagagatctatgttaaaaatgccaccgcactccagcctgggcaacagacaccctgtggtagagaaaaacaggccgggcgcagtggctcacagttgtaatcccagcactttgggagatcgacgtgggtggattacctgaggtcaggagttcgagaccagcctggccaacatggtgcaaaccctgtctctactaaaaatacaaataattagccgggcatggtggcacaggcctgtaatcccagctactcaggaggctgaggcaggagaattgcttgagcctgggagatggaggttgcagtgagccgagatcacgccactgcgctccagcctgggccacagagcaagactcagtctcaaaaacaataacaaggctggacgcggtggctcacgcctgtaatcccagcactttgggaggctgaggcgggtggatcacgaggtcaggagatcgagaccatcctggctaacacggtgaaaccccgtctctactaaaaatacaaagaattagccgggtgtgctggcgggcacctgtagtcccagctacacaggaggctgaggcaggagaatggcgtgaacccgggaggcagaacttgcagtgagccgagatagcgccactgcactccagcctgggcgaaagagcaagactcggcctcaaaaaaaaaaaaaacaaaaaacaaaaaacagaaaaaccccaaaactaaacaaaacaaaacaaaaaaaaactcagaagcccaacatcatccaagtctgattataagcattcgctgcaaatttattaccaagatcagcatcagcttcaatgttgcttttctcaaacagtaacactctaaaaggatgcactttcctttctttcagacaacagaaagcgcttccctctagagtgtcacagcctgaggtcttcttgctccggcactgtggattttttgttggaatcttccttgacgaggttaaaatagacacaaaaataaagatgcatttatttgtccggtttgtgtgttttctagaatccagaacataaacccctaaaaggaccatctccagttccttccctcaaagaatcaacaggttagctttgttcatcaaggggcaatcctcctgagttttgttcccaaagagaaaaagcaatgcttactactcataccttacctttaaccaagagaattaggctggatttctagagaacagcaatggattttgagccaagtgttcacttgagttccagtacagggacacacagtcccaatgagggcatccaaaatggaatctacgatgttgaagaatatacattgtcgtaaacaaaaacattctcccggagagaccacaggctatgctgtaaaagctcctcaatacaatttgaacggaaacacacaagtactgttgggacacggtggctcacagcactttaggaggctgaggcgggaggatcacttgagctcaggagttcaagatgagcccgggcaacatggtgaaaccatgactgtaaaacaaatacagaagttagccaggtgtggtggtgcacgcctggagacagctgttcaggaggctgaggtgggaggtagaggttgcggtgagccaagatcgcaccactgcacttcagcctgggtgacagagcgagactctgtctcaaaaataaataaataaataaataataaaaaatacaaaaattagccaggcatggtggcacatgcccgtaatcccagctgctcaggaggctgaggcaagagaatcgcttgaacctaggaggcagaggtcgcagtgagcagagttcctgacactgcactccagccagggccacagagcaagactctatcccaaaatagagggccacttaaacccaagaggtctaggttggaagtgccaccgcactccagtttgggcagcagacaccctgtctaggaaaaaaaacaaaacaaaacaaacgcaaaacttcaacatcatccacgtctgattataagcattctctgcaaatgtgttaccaagatcagcgatgcttttctcaaagcgtaacactctaaagggaaccattttcttttctttcagacaacagaaagcgcttccctctagagggacacagcctgagatcttcttgctccagcatcgtggattttttgttggaattttccttgaccaggttaaaacagacacaaaaataagcacgcatttattggtcctgtttgcatgttttctggaatccagaatataaacccctaaaaggaccatctccagttccttgcttcaaagaatcagcaggttagctttgtttatcaaggggcaatcctcctgagctttgtctccagaaagaaaaagcaatgcctactacacatacctcatatttacccaagagaattgggctggatttctagacaacagcaatggatggagagcccagtgttcacttgagtcccagcacagggacacacagtcctgacgggagcatccaaactgcaatctaagatgttgaagaatgtacattgtctcacacacaaacattttccaggatagaccacaggttacgctgtaaaagctcctcagtaacatttgaacagagatacacaagtacaggtggggcgtggcggctcacacctctaattccagcactttaggaggccgtgatgggaggatcacctgagcacaggagtttgagaccagccccggcaacattgtgaaaccccatgtgtacaaaaaatacaaaagtgagccaggtgtggtagtgcgtgcctgtagacactaattcagtaggcttaggtcgggggtggaggttgcagtgagctgagatcacaccactacactccagcctggatgacagagccagaccttgtctcaaaaataaccaaccaaacaaaacacacacacacacacacacacacacacacacacacacacacacacaaatac

SEQ ID NO: 1887683 - DNA, 4001 bp, Homo sapiens
atagaaaataggataaaagaactcactggggttggcattagtgggtaagggttgaatcaaccacacccttcctgcagagaaagcaggtctattccgagaaatgatggcaagtttttggggaagaaaaactaaagacacaaatgaataggaaaaagaaaagaaattttattaatattgacaaccgttggggattacaaaatagactggatagacgtggaggcgttcttagtctcttaatgaaggacacatgatttggattgattacactaaattgatgggaggctagtgtttcaaatgaccaacccaaatgaagtctctgggaccaggtgccaggtgccacgtaatctgtgtttttaaagagatgggatcttggtatgtggtccaggctggccaacatatgctcacaggaagaacaattcctacacataagtgcttgcttcagcagcacacataaaaataaatgaaatgggccgggcacaatggctcatgcctgtaatcccagcactttgggaggccgaggtgggtggatcacctaaggttgggagttcaagatcagcctgaccaacatggagaaatcccatctctactaaaaatacaaagaattagccgggcgtggtgatgcatgcctgtaatcccagctgctcgggaggctgaggcaggagaatcgcttgaaccagggaggtggaggttgcagtgatccgagatcatgccattgcactccagcctgggcaacaagagggaaacaccgtctgaaaaaataagtaaataaataaaaattagccggcctggcggtggctgcctgtaatcccagctactcgggatcaaaagtgtgatcagcacatggtatagcctggaaatcaaaggaccctcccaccccggcttctgcagtagctgggactgtgtgccccatgatgcctggccatgtcagctacgtttgaaatgggtcatcaggacaaggcggctcacacctttaggatcccttgagctcaggagttgagaccatcttaggcaagagagattccctttctatcaaaaattaaaaactatcggccgggcgcggtggctcacgcctgtaatcccagcactttgggaggccgaggcgggtggatcacgaggtcaggagattgagaccatcctagctaacagggtgaaaccccgtctctactaaaaatacaaaaaactagccaggcgtggtggcgggcacctgtagtcccagctactcgggaggctgaggcaggagaatggcgtgaaccccggaggccgagcttgcagtgagccgagatcttgccactgcactccagcctgggcgacagagtgagactccgtctcaaaaaaaaaaaaaaaaaaaaaaaaaaaaattaaaaacttagccaagtgtggtggcatgccccatgtagtcccaaaacttggtaggctgacttaagaggaccacttgaggccgggcgcagttgctcacgcctgtaatctcagtacttgggaggcaagggaggtggatcgcttgaggacaggagttgagaccagcctccccaacatggtaaaaccctgtctctgctaaaaatacaaaaattagccgggtgtggtagcccacacctgtaatcccagctactcgggaggctgaggtgaaagaatcacttgaaccggggaggggaaggctgcagtgagctgataatgcaccactgcactccagcctgggtgtcaccaccagactctctcttgagaaagaaaaataaaaaaagacctcttgagcccaagagatctaggtgggaagtaccaccgcactccagcctgggcaacaaacacactgtcttggaaaaaaaaacaaagcaaaaacagaacccaacatcatccaagtctgatgataagcatgctctgcaaatgtattaccaaaatcagcatcaacttcaacgttgcttttctcaaacagtaacactctaaaaggatgcactttcctttctttcagacaacagaaagcgcttccctgtagagggacacagcctgagatcttcttgctccggcactgtggattttttgttggaatcttccttgaccaggtcaaaatggacacaaaaataaagatgcatttattggccctgtttgcgtgttttctggaatccagagcataaatccctaaaaggaccatttccagttccttgcttcaaagaatcagcaggttagtcctgttcatcaaggggcaatcctcctgtgttttgtctccagaaagaaaaagcaatgcctactagatatatattatatttgcacaagaggattaggctggatttctagagaacagcaaatggactctgagccaagtcttcacttgcgttccagtacagggacacacagtccccatggaggcacccaaaatggaatcgaagatgttgaagaatatacattgtcacacacacaaacatcctccaggacagaccacaggcgaggccataaaagctccttaataaaatttgagcagaaacacacaagtaagagtagggcacggtggctcacaccattaatcacagcagtttaggaggcccaggtttgaggagtacttgagctcaggggtccgagaccagcctgggcaacatggtgaaacctcatctgtacaaaaaatacaaaagttagcaaggtgtggttgtgcatgcctgtagacaggtattcaggaggctgaggtgggaggtggaggttgcagtgagccaagatcgcaccactgcccgacagcctgggtgacagagccagactctgtctcaaaaatcaatcaatcgatcgacaataaaaatgcaaaaattagccaggcgtggtggcacatgtctgtaaccccagctgctcgacaggctgaggcaggagaattgcttgaacccaggaggcagaggttgcggtgagccgagttcctgccactgcactccagccagggccacagagcaaagaagactctatcccgaaaagagggccacttgaacccaagagatctaggttagaagtgccaccgcactccagcctgggcaacagataccttgtcttagataaaaaaataaaacaaaaacaaaaccccaccattatccatgtctgatgatcagcacgctctgcaaatgtattaccaagatcagcgtcaacttcgacgttgcttttctcaaaccgtaaccctctgaaaggaagcactttcttttctttcagacaacagaaagtgcttctttcctcgagaaggtcacaacctgagatcttcttgctccagcaccgtgggtttttttttttggaattttcctagatcaagttaaaatggacgaaaacataaagatgcatttattggccctgtttgcatgttttctggaatccagaatataaacctctaaaaggaccatctccagttctttgcttcaaagaatcagcaggttagccttgttcatcaaggggcaatcctcctgagttttgtctctggaaggaaaaagcaatgcctgctacacataccttatatttaaccaagagaattgggctggatttctagagaagagcaatggattatgagccaagtgttcactcaagttccagtacagggacacacagtcccaatgggagcacccaaaatcaactctacgatgttgaattgtcaaacacacaaacattctctaggatagaccacaggcttggtcataaaaactcatcaaaatttgaacctaaatcacaagtaccgatggggcatggtggctcacacctctaatcccagcactttaggaggccaagacaggagaatcacctgagctcaggagttcgagaccagccccggcaacatggtgtaaccccatgtgtacaaaaaatacaaaagtgagccgggtgtggtggtgcatgcctgtagacactaatgcagcaggcttaggtgggaggcggaggttgcagtgagccgagaacgcaccactacactccagcctgtgtgatagagctagaccttgtctcaaaaataaccaaccaaacaaaatacacacacacagaaacaaaaaatacccaagttgata

SEQ ID NO: 1887684 - DNA, 4001 bp, Homo sapiens
agttccaggacagggacactacaggacagaccacaggcgaggccttaaaagctcctcagtaaaatttgaacagcgggaggatcacttgatcgcaggagttaagagtccagcctgtggaacgtgctgaaacctcatcagtaccaaaaatacagaacttacccaggggtggtggtgcctgcctgtagacactaatccaggaggctgaggtggcaggtggaggttgcagtgagccaagatctcaccactgccctccagcctcagcgacatagccaggccctgtctcataaaaattaaaacaaaatacacaaacaaaaacaactccaaagtgatataagagtgttctctgtgtatagaagactattttgtgtgtatggaattatacacagaacattgtgatgaaatatactcatttttttttgagaccctgtataaaaaaaaaccaaagttccatatactatatgctcacataaagcataattcccacatattggtgctttgacagcacacacaaatgaatggggtgacagagatttccatagcccccgcacataggtgacacccaaattcataatgggtcccatattcaaaattaggaaaaaaggctgagtgcagtggctcatacctgtaatcccagcacttcgggaggcctacgtcggcaaatcacctgaggtcaggattcaagaatggcctggctaacatggtgaaactgtgtctaaaatacatatatatatatagctggtatgggggtacatgtctgcaatcccagctacttggaaggctgaggttgcagtgagctgagatcacaccactgcagtccagcctgggagacacagagaggctctttctccaaaaaaaaaaaaaagagaattgcttgagtccaggaggcagaggttgcagtgagccaagatcacactaatgtactccatctcgggtgacagagcaagactgtctcaaatagtcaaagacagaaaaaaagaacaggtctcgctctcttcttgattgtgtatgggctcacttaaggtcaggagttggagactgggctggccaacatgttgaaaccctgtctctacaaaaaaaaaaaaaacgaacaaacaaaaaaaacacaaaaattagccgggcgtggtggtgtgcgcctgtgatcccagctactcgggaggatgaggcaggagaattgcttgaacgtgggattgtgccactgacctccagcctgatggacggagtaagactctgtttcaaaaatcgatgagtaaataaataaataataaaaatacaaaaattagctgggtatggtggctcatgtctgcgatctcagctactagggaggctgactcaggagagaatggcttgaatctgggaggtggagggtacagggagcgaagttcctgccactgcactccagcctgggtcacagagcaagactccatctcaaaaaagaggaccgctgggcacaatggcccacgcctgtaatcccagcactttgggaggctgaggtgggtggatcttgaggtcagtagtttgagaccagcctggccaacgtggtgaaaccctgtctctactaaaaatacaaaaattagctggaagtggtggcaggcacctgtagtcccagctacttgggaggctggggcagaagaattgcttgaactcaggaggtgagcttgcacacaagatcgcgccattgcactctcgtctgggtcacagagcaagactccgcctcaaaaaaaaaaaaaaaaaaaagaggaccgtttgagcctaaaagatctacgttggaagtgctaccctactccagcctgggcaagagagactctgtcttagaaaaaaaaacaaaataaaaacagaatcccaccatcatccaagtctgatgataagcatgctctgcaaatgtattaccaagatcagcatcaacttcactgttgctttcctcaaacagtaaacctctaaaaggatgcactttcttttctttcagacaacagaaagcgcttccctctagagggtcacagcatgggatcttcttgctccagcaccctgggttttttgtagaaattttccttgaccaggttaaaatagagacaaaaataaagacctatttattggctctgtttgcatgttttctggaatccagaacatagacccctaaaaagaccatctcccgttccttcctacaaaggctcagcaggttagccttgttcatcaaggggaaatcctcctgagttttgtgtccagaaagaaaaagcaatgcctactatgcataccttatatttaaccaagagaattgggctggatttctagagaacagcagtggattttcagccaagtgttcacttgatttccagcacagggacacacagtcctgattagagcagtcaaaatggaatctaccatgttgaagaatatacattgttgcacacacaaacatcctccaggatagactacaagggaggccttaaaagctcctaaagaaaccctgtctctactaaaaatacaaaattagccaggcatggtggcgcagtcctataatcccagctacttgggaggctgaggcagaagaatcacttgaacccgggaggcggaggttgtggtgagccaagattgtgccactgcacttcagcctgggcaacagagacccagtcttagataaaaaaacaaaagaaaaacaaaaccccaacatcatccaagtctgattataagcgtgctctgcaaagatattacaaagatcagcatcaactacaacgttgcttttctcagacagtaagcctctaaaaggaagcactttctcttctttcagacaacagaaagtgcttccctcaagagggtcacagcctgacatcttcttgctctgatgccgtggattttttcctggaattttctttgaccaagttaaaatagacacaaaaataaagatgcatttattgaccctgtatgcatgttttatggaatccagaatataaaactctataaggaccatctccagttccttgcttcaaagaatcagcaggttagccttgttcatcaaggggcaatcctcctgagttttgtccccaaagagaaaaagcaatgcctactacacgtacctttaaccgagaaaattgggcaggatttctggagaacagcaatggattttaagccaagtgttcactcgagttccagtacaggacccacagtcacgaagggagcatccaaaatggagtctacgatgttgaagaatatacactgtcatatgcacaaacactctccagagtagatcacaggctaggatgtaaaaactactcaataaaatttgagcagaaatacacaagtacaagtggggcccagtggctcagacctctaactcctcgaactttaggaggcccaggcaggaggatcacctgcctcaggagctcgagaccagccccggcaacatggcgagaccccatgtgtacaaaaattacagaagttagccaggtgtggtggtgcatgcctgtagagactaattcagcaggcttaggtgggaggtggaggttgcagtaagccgagattgcaccaccacactccatcttgggtgacagaggcagatattgtctcagaaaagaaccacacacacacgcacacacacgcacacgcacacacaccctaggtgatatcggagtattctctgtgtttagaagagtattttgtgtgtacataatatataagaatataaaatgaaatatacatcatgtatttttgagaccctgtctcaaagaaagttccaaatattgcatgcttataggaagaataattcctatacataactgcttgctttggaagtacacataaaaaaatttaaatgacatagaatatcctggccactgcacaaaggcgacacccaagtccatgctggtcccatattcacctaattatttttatttttatttatttatttatttagagacagagtctcacactgttgcccaggcaggagtgtaacggtgtgatctctgctcgctgtaacctccgcctcccagattcatgtgattctcctgcct

SEQ ID NO: 1887685 - DNA, 4001 bp, Homo sapiens
ccagcactctgggtttcgtgttggaattttctttgaccaggtttaaatggacagaaaaataaagatgcatttagtggccctgtttgcatgttttctggaatccagaataaaacgcctgaaaaggaccatctccagttccttgcttcaaaggctcagcaggttagccttgttcatcaagggacaatcctcccgagttttgttctcaaacagaaaaagcaatgcctactagacataccttatacttaaccaagagaattggactggatttccagagaacagcaaatggattctgagccaagtgttcatttgagttccagtgcggagacacacagtcccattggaaacatccaaaatgtgatctaagatgttgaactatatacattgtcgcacacacaaacatcctccaggatagaccacaggctaggtggtaaaagctcctcaataaaatttgaacaggaatacacaagtaccagttgggtgtggtggctcatacctctaatcccagcacatcaggaggccaaggcaggagattcacttgagctcaggagctcaagaccagcgtgtacaacacggtgaaaccctgtctgtaaaaaaatacaaatgtaggccaggtgtggtggtacatgcctgtagacactaattcaggaggctggggtgggaggcgaaggttgcagtgagccaagactgaaacactgcactccaacctgggcgactgagccagatcttgttgcaaaaaaaaatttaaaagaacacacaagcaaaaaccaccccaaagtgatatcagtcatctctgtgtgtagaagagtattttttgtgtatataattatatatatggctatatgatgaaatatacatcatatataatatatatatacacacaaacacacccatatatatatttttttttttgagacagagtctctctctctatataaatatatatgtatatatatattttttttttgagacagtcttattctctcgcccaggctggagtgtggtggcgtgatcttggctcactgcaacctccatctgtccgttcaagtgattctcctccctcaacttccccagcagatgggaatacaggcgtgcgccaccatagctggctaattttttgtatttttagtagagacagggtttcaccatgttggtcaggctggtctcaaactcctgacctcaagtgatccactcgcctcaacctgccaaagtgttgatattgcaggcatgagccaccgctcatgtcgtatacacacaaaaactgctcatatactcatgcgcctggctgtacatcatttattttccagaccctatctcaaaaaaaaagaaagttccatatactgtatgctcacataaagaattactcctacacataaatgtttgctccacacataagaaatgaatggagtgacagagatcaccatggcccctgtgcagaggtgatgcccaaattcatgatgggtctcatattgaaaattaagatcaaaggccgggtgcagtggttcatgactgtaaacccagcactttgggaggccgaggcaggtggattacgaggtcaggagatggagaccatcctggtcaacacggtgaaaccccatctctgctaaaaatacaaaaattagccgggcgtggtggcatgggcctgtactcccagcaacacaggagactgagatgggagaaccacttcaacccgggaaggggagattgtagtgagcagagatcgtgaccctgcaaagaggaccacctgagcccaagagagctaggttggaagtgccactgctctccagcctgggcaaaagagaccccgtcttagaaaacaaacaaaccaggaacaaaagcccaccctcatccaagtctgatgataagcacgctctgcaaatgtattgccgagatcagcatgaacgttaacgttgcttttctcaaactgtaatcctctaaaaagatgcactttcttttctttcagacaacagaaagcgcttccctctagagggtcacaggctgagatcttcttgctccagcaccattgattttttgttggaattttccttgaccaggttaaaatggacacaaaaataaagatgcatttattggccctgtttgcatgatttctggaatccagaacataaacccctatcagggccatctccagttccttgtttcaaaaagcaatgccgactatacataccttatatttaaccatgagaattgggctggattctagagaacagcaatagattttgagctaagtgttcactcgagttccagtacagtgacacacagtcccgacgggggcatccaaaatggaatctacgatgttgaagaatatgcattgtcacacacacaaacaccctccaggagagaccacaggccaggctgtaaaagctcctcaataaaatgagcagaaacacacaggtacaggtgaggtgtggtggctcacacctctaaacccagccctttaggaggctgaggcaggagtatcacttgagttcaagagtttgagaccagcctgggcaacatggtgatacctcatgtgtagagaaaacagaaaagttagccgggcgtggtggtgtgcgcctgtagacagctactcaagaggctgaagtggcaggtggaggttgcaataagctgagatggcaccactgcactctagcctgggtgacagacccagaccttatctaaaaaaaaaacaaaaacatacacacacaaacaaaaaattacccaaagtgatacgagagtattctctgtgtatagaagagtgttttgtgtgtatatgactatgttacatgtataataagaatatgataaaatatatatttttgagaccgtacatcaataaaaattaagttccatatactatgtgctcacatgaaaaataattcctacacatatgtgcttgcattggcagcacacattaaaaaaaattggaggctaggctgggtggcttacacctataatctcagcattttgggaggctgaggcaggcggatcacctgaggtcaggagttggagactaacctggccatcatgatgaaactgcatctctgctaaaaatgcaaatattagccaggcgtcgtggcacgtgcacctgtaatcccatctacttgggaggagaggttgcagtgagcagataacatgccactgcgctcaagcctgggccagagacagagactctgtttcaagaaaaaaaaaaaaagcaagcacgggaccacttgagcccaagagatctaggttggaagcgccaccgcactccagcctgggcaacagagaccccatgatgcaaaacaactaaacaaaaacagaaccccaacatcatgcaagtctgatgataagcacgctctgcaaatgtgttaccaagatcagcatcaacttcaacgtggtttttctcaaacagtaacgctccaaaagaaggcactctgctttcagacaacagaaagtgctttcttttggagaatgactgcatgagatcttctcgctccaaaagtctgggttttttgacggaattttcctcacctggttaaaatggacacaaaaataaagatacatttattgactctctctgcatgttttctggaatccagaatataaacccctaaaaggaccatctccagttccttgcttcaaaggctcagcaggttagccttgttcatcaagagacaatcctcctgagttctgtccccaaagagaaaaagcaatgcctaccacacataccttatatttaaccatgagaattgggctggatttctagagaacagcaatggatttgaagccaagtgttcacataagtcccagtacagggacacacagtccccatgcaagcatccaaaatggaatctaagatgatgtttaagaatatacactgttgtacacacattctccaggatagaacacaggctaggccataaaagctcctcaataaattttttttttttttttgaaacaagtctcactttgttgcccaggctgtagtgcagggccgtgatctcagctcactgcaagctctgcct

SEQ ID NO: 1887686 - DNA, 4001 bp, Homo sapiens
gaccctgtgtcaaagaaagttccatatattgtatgctcacaggaagaaaaattcctacacaagtgcttgctttggcagttcacataaaaaaaaattggaatgacagagattacgctggctgctacacaaaggtgacacccaaatttatgatgtcccatatttatctatttatttttatttattttatttattcatttatttttgagacggaatgttgctctctggcccaggctggaatgccatggcttgatttcagctcactgaaatctcctcctcctgggttcaagggattctcctgcctcagcctccggagtagctggaattacagatgtgcaccattgcacccagctaatttttgtatttttagtagagacgaggctttgccatgttggccctgttggtcttgaactcctgacctcaggtgatcctcccgtctcggcctcccaaagtgctgggattacaggcatgcgccaccgcgcccggcctattttttactttcttgagactgagtctcactctgttgcccagggtggagtgcagcagaagatttcagctcactgaaagctcagcctcctggcttcatgttggccaggctggtctcgaacaactgatctcaggtgatcctcctgtctcagcctcacaaagtgcaggaattacagacaagagccaccatatgcacactagtcccatatttaaaattaggaaaaaaaaaaacaaaacaaagatgcccacacctgaacagcaaatcgtttgttgttcaagtacatctcaaatacattgtttatctaaaatacaagtttaactggggtcaggtatgaaccaaagaacagtccttactttcttcttgtctgtgcatggggggttaatattcacatgtggtcccatctaccaaggactggggaggggcagaggcaggaggatctaagcccacttcagccagggcagcatagtgagaccgccgtctcatgcatttatctcctggtcatgcacccagatttcagcttcatttccccaataaacactgaagccccatgcactccacctccgtgctcttgctcatcccatctgcagggacactgaggtcccctcaactccacctgaccccacgtgaggttctataccagtgccagaaaaatttccataaagtaaaaggtgctgatggctgtgcccggtggctcacgcctgtattctcagcactttgggaggccgaggccagcggctcacttgaggtcaggggtttgagactagcctggccaacatggtgaaaccccacctttactaaaaaaaaaaaaaaaaaaaaaaaatcaaaatcaaaaagtagctggttgtagtggtgggtgcctgtaattccacctactcaggagactgaggcaggagaatggcttgaacctgagaggcagaggttggagtcagccgggatcatgccactgccctccaggctgggtgacagcaacactccatctcaaaaatgaatgaatgaataaaaaagaaaaatacaaatattagccgagtgtgatgtcaggcatctgtaatcccagctacccaggaagctgaggcaggagaatcactcgaacccgggaggtggaggttgcattgagccaagatcgcgccactgcactccagtctgggtcacagagcaagactgtatcccataaaaggaccatctgagcccaacaggcctatcttaaaaagtgcttctctagtctctcctgggcaacagagaccttgtcttagaaaaaaaaaaaaacacaaaacaaaacacacacaccaaaacaaaaaacaaaaacctaacaaacaaaaaaaccaaccaaacaaacaaacaaaaaaacagactcccaacatcatccaagtctgattacaagcatggtctgcaaatgtattaccaagatcagcatcatcttcaacgtggcttttcccaaacggtaacactctaaagggaggcactttgtttaagagaaaacaaacagaaagcgcttccctttggagggtcacagcatgggatcttcttgctccagcactctgggttttttgttgaaatcttccttgaccaggttaaaatggccacaacaataaagatgcatttattggccctgtttgcctgttttctagaatccagaacataaacccctaaaaggaccatctccagttcctttcttcaaaggctctgcaggttagccttgttcatcaaggggcaaccctcctgagttttgcctctaaagagaaaaagcaatgcctactacacataccttatatttaaccaagagaactgggctggatttctagagaacagcaatggactttgagctgagtgttcacttgagttccagcacagggatacatagttccgatgggagcatccaaaatggagtctaagatgttgaagaatatacattgtcacacacacaaacatcctccaggatagaccacaggctagtggatcacctgaaagcgggagttcaagactagcctggccaacatggtgaaacccgtctctactaaaaacataaaaattagctgggtggggcagtaggtgcctgtaatcccaactacctgggaggctgaggcagaagcatcactcgaacccaggaggcggaggttgcagtgagcctagatcatgccagtgctctccaggatgggcagcaagagtgcaggacacgatggtgggtgcctgatgcctgaattcccaacaattcggcaggctgaggtgggagaatcactggaacccgagaggtggagtttccggtgagcagagatcctgctactgcactcccaacgaaacaagagtgtgtctcaaaaaatcaaaaaataaaaagaggaccacttaagcccaagaaatcttggtggaaggtgctatccacccacgcctgggcaatagaaagcctgtcttggaaaaatttcaaatcacaaacagaaccccgacatcatgcaagtctgatgataagcacgctctgcaaatgtattaccaagatcagcagcatcttcaacgttgcttgtctcaaacagtaacactctaaagggatgcacgatcttttcttttatacaacagacagtgcttccatctagagggtcactgcctgagatcttcttttttttgacacggagtctcactctgccgcccaggctggatgcggtggtgggatctcggctcatggcaacttctgcctcctgggttcaagcgattcttctgcgtcagcctcctgagtagctgggattagaggcacccaccaccatgcatattgcatatatgactgcatatatgacctggtcatgcacccaagatgttggtttcatttccccagtgaaaactcaaaccccatgcactccacctccgtgctcttgctgagcacatcccatctgcaagggacactgaggtccccctttgactctacctgaccccacatgaggctttataaatcagtgccagaataatttccatggactaaaaggtgttaatggccatgtgtggtggctcacgcctgtaatcttagcactttgggaggctgaggtgggcagatcacctgaggtcaggagttcgcaaccagcctggccaacatggtgaaaccccgcctctgctgaaaatataaaaattaggccaggcgtggtggctcatgcctgtaatcccagcactttgggaggcagaggccggtggctaacttgaggtcaggggtttgagaccagcctggcaaacatggtgaaatcccatctctactaaaaaaaaaacaaaaaacaaaaaacaaaaagtagccaggtgtggtggtgggctcccgtaattctagctactcaggaggctgaggtagaagaattgcttgaatccgggaggcagaggttgcactgagcagagatcacgcctcggccctccagcctgggtaacagtgagactccatctcaaaaacataaataaatgaattttaaaaaatgaaaatattatccaggtgtggtgatgggcacctgtaatctcacctacttgggaagctgaggcaggagactcgcttgaacctggg

SEQ ID NO: 1887687 - DNA, 4001 bp, Homo sapiens
attagcctagcgtggtggtgggcacctgtagccccagctacttggaaagctgaggcaggagaatggcgtgaacccaggaggctgagcttgcagtgagccaagattgtgccactgcactccagcctgggtgacagaacgagactccatctcaaaaacaaaacaaaacaaaacaaaaagatgcatttattggccctgtttgcatgttttctggaatccagaacataaacccctaaaaggaccatctccagtcctttgcttcaaagaatcagcaggttagccttgttcatcaaggggcaatcctcctgagttctgtccccaaagagaaaaagcaatgcctaccacatataccttatatttaaccatgagaattgagctggatttctagagaacagcaatggattttgagccaagtgttcactcgagttccagcacagggacacacagtcccgatgggagcatccaaaatggaatctactatgttcaagaatatacactgtctcacacacaaacatcctgcaggatagaccacagggtatgctgtataagctcctcaataaatacagaaatacacaagtatgggtggggcgtggtggctcacaccaataaacccagcacttaaagagggcaaggcaggaggatcacttgagctcaggagttcgagctcaaccagcatgggtaatatggtgaaaccttatgcacaaaaaatagaaaagttagctgggtgtggtggtgcgcacctgtagacaagtactcaggaggctgaggtggcaggtggaggttgcagtaagtcgacatggcaccactgcactccagcctgggtgataaagctagaccttgtctcaaaacaaaacaaacaaacaaacaagaaaaacacagaaagaaacaagtaaataaatacccaaagtgatacaagagtattctccgtgtgtagaacagggtttggtgtacatatgactacattatatacatgataagactatatgattaaatatacatcatatattgttgagaccctgtctatgaaaaaaaaaaaaaagaatatactgtttgctcacattaaaaataactcctcaccgggtgcggtggctcatgcctgtaatcccagcagtttgggaggccgaggcaggtggattagttgaggtcaggagtttgagaccagccggaccaacatggcaaaaccccgattctaccaaaaggacaaaaattagccggggtggcggcatgcacctgaaatcccagctactcaggaggctgaggcaggagaatcgcttgaacccggaaggcgtaggttgcagtgagccgagatcatgccactgcactccagcctgggcgacaagaatgagactccatctcaaacaaacaaacaaacaaacaaacaaaattcctacacacaagtgcttgctttggcagcacaaaaaaatacaaataataattaaaaaaaaaaaaaaaaacaccctgcagtccgagcagggtggctcatgcctgtaatcccaccactttggaaagcagaggcgggcagatcacctgaggtcaggagttcaagactaacctggccaatgtggtgaaactccatctctgctaaaaatacaaaaattagccaggcgtggtggcacgtgcctataataccagctacttgggaggccgaggttgcagtgagcagagaatgtgtcactgcctgcccgcctggcccacatagtgagactctgtctcaagaacaaaaacaacaaaaaaagtaggggggaccaactagcctaagaggtctaggttggaagcgccaccgcactcctgcccgggcaacagaaaccctgtgttgcaaaaaaactaaacaaaaacagaaccccaacatcatgcaagtctgatgataagcacgctctgcaaatgcgttaccaagatcagcatcaacttcaacgtggtttttctcaaacagtaacactctaaaaggaggcactttgttttctttcaaacagaaagtgctcccttttggagaatgactgcatgagatcttctcgctccaaaactctgggtttttgttggaattttccttaccaggttaaaatggacacaaaaataaagatgcattcattgtccctgtttgcatgttttctggaatccagaacataaacccctaaaaggaccatctccagttccttgcttcaaaggctcagcaggttagccttgttcacgaaggggcaaccctcctgagtattgtctccaaagagaaaaagcaaagcctaccacacataccttatatttaaccaagagaattgggctggatttctagagaacagcaatggattttgagccatgtgttcacttgagttccagcacagggacacacagtcccgatgggagcaaccaaaatggaatctaagatgatatttaagaatatacgttgtgggccaggcacagtggctcatgcctgtaatcccagcactttgcgaggccgaggcaggtggatcacctaaggtcaggagttcaagactaatctggccatcatgatgaaactccgtctctgctaaaaatacaaaaattagccaggcgtggtggcatgtgcctgtaataccagctactcgggaggcagaggttgcagtgagcagagaacataccactgcactccagcctgggccacagagagagactgtctcaagagaaaaaaaagggggagggggtgggggcagggaccaactgagcccaagaggtctaggttggaagtgtcaccgcactccagcctgggcaagagaccctgtgttgcaaaaaaactaaacaaaaacagaaccccaacatcatgcaagtctgatgataagcacgctctgcaaatgtgttaccaagatcagcatcaacttcaacgtggtttttctcaaacagtaacgctccaaaagaaggcactctgctttcagacaacagaaagtgctttcttttggagaatgactgcatgagatcttctcactccaaaactctgggttttttgttggaatttaccttaccagattaaaatgaacacaaaaataaagatgcattcattggccaggcgcggtggctcacgcctggaatcccaacactttgggaggctggtcaagagaccacgaccatcctggccaacatggtgaaactccgtctctactaaaaatacaaccatttgccgcctgtggtggcatgtacctgtagtcccagctactcgggaggctgaggcaggggaattacttgaaccaggaggcagaagttgcagtgagccgagatcgtgccactgcactccagactggcaagagtaagactccatctcaaaaaaaaataaaaataaaaataaaaaaggtgcattcattgcccctgtttgcatgttttatggaatccagaacataaacccctgaaaggaccatctccagttccttgcttcaaaggcttagcaggttagccttgttcatcaaggggcaatcctcctgagttttgtccccaaagagaaaaagcaatgcctaccacacataccttatctttaaccaagagaattgggctggatttctaaggatgttgagccagtgttcacttgagttccagcacagaaacacacagtcctgatgggaacatccaaaatggaatctaagataatgtttaagaatatacattgttgtacacacaaataccctccaggacagaccacaggctaggccgtaaaagctcctcagtaagatttgacagagctggggggaaaaaaagaatgtacattgtcacacacacgaacattcttcaggatagaccacaggctaggctgtaaaacctcaataattttttttcttggagactaagttaggaaaaacaaatgcccacacctaaacaaccaatcatttctagttcaagtacatctcaagtatactgttgacctgaaatagaaagttaaccgggtttccctgctctgggaagccccctttggtaattcagttaagggtctcctttggaaggtaatgggtaggaacatggagatgtcagccaagggaagtgactctcaggga

SEQ ID NO: 1887688 - DNA, 4001 bp, Homo sapiens
aaaccagtgcccgaataatttctacgtaggaaaagttgttgatagccgggcgtgttggctcacacctgtattcacagcactttgtgaggctgaggcaggtggaccaactgaggtcaggagttccagaccaacctggccaacatggcaaaaccctgtctctattaaaaatacaaaaattagccgggcgtggtggtgcacggttgtagtcctagcgacacgtgaggctgaggcaagagaatcgcttgaacccgggaggcagtggttgcagtgagctgagatcacaccattgcactccagcctgggtgacagagcgagactctgtctcaaaaaaaaataataataataaaataaataaataaataaataaataaataaaaggtgttgaggactggaagaacatgcatcgctcactatggcaacaagaagagctgctgtgcattccacctgttacgagggagccccttctagggtcctcaagatttttgtgaaaacaactggttttgttgcatgctacatttatcactgtgactgagattcatcttgtctacaacagtttcttatattagccacagctaatataagacacatttgacatcttagcaagtaactggcatttagatgcaaggtttaagcccattggaatggtaccttggaatcgttacccaaagaaaataggataaacatggcagctacagtcaaagaactcactggggttggcattagtgggtgagggttgaatcaactacacccttcctgcagagaaagcaggtctattccgagaaatgatggcaagatgttggggaaaaacaaatttcagtgttacggacaagcagattacactaaaaagacacgagtgaacaggaacaaaaagaaattgtatcaatacggacacccactggggattacagaatagactggatggacttggaggattacccactctcttaatgaaggaaccatggtttggattgattatactaaattgatgggaggccattgtatgacatgaccaacccaaatgaaatctgtgggaccaggtgctatgtaatctgtttttaaagaaatgggatcttgctatgttggcccaggctggagtgcagtggctattcaaaggtgggatctgtgcacggtatagccttaaaatcaaagcaccctcccgccccggcccctgcagtaactgggactgtgtgccccatgatgcctggccaagtcaactatctttgaaatgggtcatcaggacaaggtggctcacacctgtaggatcgcttgagctcaggagttgagaccgtcctgagcaacagagaccccatctctaccaaaaattaaaagctgaaccaagtgttgtgtcacgccccatgtaatcccaactacttgggaggctgactcaggaagaccacttgaggccggacacagtggctcacgcctgtaataccagcactttgggaagccagggaggcaaatcacttgaagtcaggagttgagaacagcccagcaaacatggtgtaaccccatctctgctaaaaatacaaaaattagcatgacatggtggtgggcgcctgtaatcccagctacatgggaggctgaggtggcagaactgctggaacctgggagatggaggttgcagtgagtggagattgtcctactgcactccagcctgggtcacagagccagattccatctctaaatgaatgaatgaataaataaataaataaataaataaataaataaataaataaatagagggtctcttgggcccaggagagctaggttggaactgccactgcactccagcctgggcaacagagaccctgtcttggagaaaaacaaaatcagaaccccaacatcatccgagtctgatgatgagcgtgctctgcaaatgtattaccaagatcagcatcaacttcaacgctgctttactcaaaccgaaacagtccaaagggaagcactttcttttctctcagacaacagaaagtacttccctctggagggtcacagcctgagatcttcttgctccagcactctgggtttattgttggaattttccttgaccaggtttaaatggacacaaaaataaagatgcatttttcctggccctgtttgcatgttttctggaatccagaatataaaccccctaaaaggaccatctccagttccttctttcaaaggctcagcaggttagccttgttcatcaaggggcaatcctcctgagttttgcccccaaagagaaaaagcaatgcctactactcataccttatctttaaccaagagaatcgaactgaatttctagagaacagcaatggattttgagccaagtgttcacttgagttccagtataggcacatgtagtacccatgggggcatccaaaatggaatctaagatgttgaagaatgtacattgtcgcacacacaaacatcctccaggagagaccacaggctacgctgtaaaagctcctcaataaaaaaatacacaagtacctgttgggtgcggtggctcacatctctaaccccagcacttcaggacgccgaagtgagaggatcacttgagctcaagagttccagacaagcctgggcaacatggtgaagcttcatctgtacaaaaaatacaaaagtgagccaggtgtggtggtgcatacctgtagacactaattcaggaggctgcggtggcaggtggaggttgcagtgagccaacattgcaccactgcactccagcctcggtgatatagtcaggctgtgtcttgtaaaaactagaaacacatacacacacacacacacacacacacacacacacaaagacacacactcaaagtgatagtctcctgcctcaccctccggagtagctgagactacaggcgtgcgccaccagccctggctaattttttgtatttttagcagagacatggtttcaccatgttggccagtctggtctcgccctcctgatctcaggttatccacccgcctcggcctcccaaactgctgggattacaggcgtgatccaccgcacctggccatacatcatatatttttgagaccctgtctcaaaagaaagaaagttccatatactgtatgctcacagaaagaataattcctacacataagtccttgctttggcagctcacacccccgtctctaaaatacaaaacctaaatcaagtgtgcgttgataacgtggtcatacaccctgtatttcagcttcatttacccaataaaaactcaaagcccatgcactccacctctgtgctcttgcgaagcaatgcacatcccatctgcaagggacactgaggttcccttcaactctacctcaagtcaagtcaagggaggttctgtaaaccagtgcaggcataacttccacggagtgaaaggtgttgagggctggacgaacaggcatcactcactatggcaacaagagcggatgcgcatcccacctgttactagggaggcccttctagggtcctcaaggtttttgtgaaagtatctgtggttttgtcccatgtgacatttatcactgcaactgagattcatcttgtctataatagcttgtttctcatattagccacagccaacatttcacagcttaccaagaaatttgcatttaaatgtgaggttttgcaggttggaatggtacactggaaaaattacctgcagaaaacaggataaacagtgcagctgcagtcacagcactcactacggttggcatgagtgggtgagggttgaatcaactacacccttcctgcagaaaaaggtctattccgagaaataagtggaagctgttaagcaagaaaaattttcgatgtcagggacgagcagattaaattaaaaagacaggaatgggccgggcacggtggcttatatctataatccccagcactgtgggaggccaaggaggcagatcacttgaggtcaggagttgagaccagccccgcaaacatggtgaaaccccgtctgtgccaaaagtacaaaaactggcaggtcatagtggtgagcatttgtaatcccagctactag

SEQ ID NO: 1887689 - DNA, 4001 bp, Homo sapiens
caagagttgagatgagcctggccaatatggtgaaaccctttcttgtctaaaaatacaaaaagcagggcatggcggtgggtgcttataattccagctactcgggaggctgaggtgggagaatgtctggaacctgggaggctgtagttgtggagatcctgccactgtactccagcctgggtgacagagtgagactccatctcaaacaattaaaaaaatgaaataaaaagaagaccatctgagcccaagagatctaggtagaagtgccaccgcactccagtctgggcaacggagaccctgtcttagaaaaaaacaaaaccaaaacagaaccccaccatcgtccacgtctgatgataagcacgctctgcaaatgtattaccaagatcagcatcaacttcaacgctgctttactcaaaccgtaaacctctaaaggggagcgctttgttttctttcagacaacagaaagcgcttccctctggagggccacagcatgacatattcttgctccaacactggttttttgatgttgctgttggaattttccttgaccaggttaaaatggacacaaaataaagatgcatttatttgccctgtttgcatgttttctggaatccagaacataaacccctaaaaggaccatctccagttccttgcttcaaaggctcagcaggttagccttgttcatcaaggcgcaatcctcctgagttttgtccccaaagagaaaaagcaatgcctgctacatataccttatctttaaccaagagaattaggcaggatttctagagaacagcaatggatttttgagccaagcgttcacctgagttccaacatagggacacacagtcccgatgggagcatccaaaatggaatctaaattagccaggcgcccacctgtaatcctagctactcagcaggctgagacaggaggatcgctggaacccaggaggcggaggtttcagtgaaccgagatcatgccattgcactccagcctgggtgacagagtgagactccgtctccaaaaaataaaaataaaaaaaaagaatatacattgtcatacacacaaacattctccaggatagactactgtctaggccgtaaaagctcctcaataaaatttgaacagaaatacacaagtacaggtggggtgcagtggctcacacctgtaatcccagcactttaggagtcggaggcaggaggattacttgagctcaggagttcaagactagcctgggcaacatggtgaaacctcatgtgtccaaaaatacaaaggttaccaggtgttgtggttcatgcctgcagatgctaactcaggaggctcagctgggaggtagaggttgctgtgagccgaggtcacaacactgcactccaacctaggtaatagcgccagactgtgtctcaaaaaatatttaaaaaatacacaaacagaaacaaccccaaagtgatataagagtattctctgtgttggccgggcacagtggctcacgtctgtaatcccagcactttggaaggccgacgtgggtggatcatgaggtcagtagttggagaccagcctggccaacatggtgaaccccatctctattaaaaatacaaaaattagccagtgtggtggctcatgcctgtaatcccagctgctctggaagctgggtcataagaatgacttgaacctgggaggcaaagcatgcaatgagtggtgttcatgccactgtactccggactgggtcacagtgtgagattatcccaaaaaacaggaccacttgagcccaagagatctaggttaaaagtgccactgcactccagcctgggcaatagacactctgtctcagaaaaaaaaaaacaaaaaaacagaaccccaccatcatccaactctgatgataagcatgctctgcaaatgtattattgccaagatcagcatccacctaaacgttgcttttcttaaacggtaaccctctaaaaggaagcactttcttttctttcagacaacagaaagcgcttccctgtagagggacacagcctgacatcttcttgctgtggcaccgtggattttttgttggaatcttccttaaccaggttaaaatggactcgaaaagaaagatgcatttatttgccctgttttctatttgtgtgttttctggaatccagaatataaacccctaaaaggacaatctccagttccttccttcaaagaatcagcaggttagccttgtttatcaaggggcaatcctcctgagttttgtctgcaagagaaagagcaatacctgctagacataccttatctttaaccaagggaactgggctggatttctagagaacagcaatggacggagagccaagtgttcacctgagtttcagtacagggacacacagtccccatgcaagcatccaaaatggaacataacatactgaagaatatacattgtcatagacacaaacattctccagagagaccacaggctataccataaaagctccccaataaaatttgagcagaaacacacaagtacaggtggggcacggtggctcatacctctaatcacagcactttaggaggccgaggtgggaggatcacttgagttcaggagttcaagaccagcccaggcaacatggagaaaccatgtctgtacaaaaaatacaaaagttagccaggtgtggtggtgcatgcctgtagacagctattcaggaggctgaggtgggagttggaggttgcagtgagccgagattgcaccactgcactccagcctgggcgaaagagtaagactctgtctcaaaaataaataaaggaaattacaaaaattagccgggcatggtagcacatgcctgtaatcccagttgcttgggaggctgaggcaggagaatcgcttttacccaggaggcagaggttgtagtgagcagagatcctgacactgcactccagccagggccacagagcaagactctgacccaaaaaagagggccacttgaacccaagagatctaggttggagagggaccaccacactccagcctgggcaacagacaccctgtattaaaaacaaaacaaaacaaacatgaaacaccaacatcatccacgtctgattataagcattctctgcaaatttattaccaagataagcatcaacttcaacgttgcttttctcaaagagtaatcctctaaagagaagcgctttcttttcttttagacaagagaaagtgcttccctctagagggtcacagcatgagatcttcttgctccaacactctgggttttttgttggaattttccttcacccggttaaaatggacacaaaaacaaagatgcatttattggccctgtttgcatgttttctggaatccagaatataaacccctaaaaggaccatctccagttccttgcttcaaaggatcagcaggttagctttgttcatcaaagagcaatcctcctgagttttgttctcaaagagcaaaagcaatgcctcatagacatatgtaccttatatttaaccaagagaactgggctggatttctagagaagagaaatggatattgagccaggtgttcaccagagttccagcacagggacacacagtcccgatgggagcatccaaaatggaatctacgatgttaaagaatatacattgttgtacacacaaacatcctccagggtagatcacaggctaggccctaaaaactcctcaataaaatttgaacagaaacacacaactacaagtggggcacggtggctcacacctctaatcccagcacattaggaggctgaaactgaagtatcacctgagctcaggtgttcgagaccagtctcggcaacatggtgtaagcccatgtgtataaaaaatacaaaacggagccaggtgtggtggtgcatgcctgtagacactaattcagcaggcttaggtgggaggtagaagtcgcagtgagctgagagagatggcacaactgcactctagactgggtgacagagccagaccttatccaaaaacaaataaaacatacactcacacacacacaaacaaa

SEQ ID NO: 1887690 - DNA, 4001 bp, Homo sapiens
gcctgggcgacagaggtgggagttacagtgagtggagatcctgccactgcattccagcctgggcgacagagccagtctccatctcaaaataaaataaaataaataaaataaaacaaaataaaataacaggctgggcacggaggctcacacctgtaatcccagcactttgggaggccgaggcgggtggatcatgaggtcaggagtttgagaccatcctggccaacgtggtgaaacccggtctctactaaaaatacaaaaattagctcggcatggcggtgcgtgcctgtaatcccagctactcaggaggctgaggcaggagaatcgcttgaaccacggagtcggaggttgcagtgagctgagattccgccactggactccaacctggtgacagagcgagactccgtctcacacacacacaaaaataagaattaataataataatagagcaagacatgaccccaagagatctagtttggagtgcaacccctccctctccagcctgggcaacagagactggtcttggaaaaaaataaaaccaaaacagaaccctgccgtcatccaagcctgataagcatgctctgcgaatgtattaccaagatcagcatcaacttcaacgttgcttttctcaaaccgtaacactctaaagagaagcgctttgttttctttcagacaacagaaagtgcttccctccagagagtcacagcatgagatcttctcgctccagccatctgggatttttgttgaaattttccttgaccaggttaagatggacacaaatataaagatgcatttattcgctgtttgaccgttttctggaatccagaacataaacctctaaaaggacaatctccaggctcagcagattagccttgttcatcaaggggaatcctcctaagttttgtctccaaggagaaaaagcaatgcccactacacataccttacctttaaccaagagaattgaggtggatttctagagaacagcaatggattgagtcacatggtcacttgagttccagcacagggacacacagtcatgatgggagcatccaaaatggaatctaaatttgccaggcgtggtggtgcccacctgtaatcccagctactcaggaggctgaggcaggagaattgcttgaacccgggaggcggaggttgcagtgagacgagatcgtgccaatgcactccagcctgggtgacaggaaagaaaaaaagaatatgcattgtcttacacacaaacattctccaggatagagcactgcctaggccgtaaaagctcctcaataacatttgtacagaagtacgggtggagtgcagtggcttacacctctaatcccagcactttaggagtcgaaggcgggaaaattacatgagctcgagttcaaaactagcctgcccaacatagtaaaacctcatctgtaaaaatacaaaagatagccaggtgtagtggttcatgcctgtagacactaattcaggaggctgaggtgggaggtagaggctgcagtgagttgaggtcacaacactgcactccagcctgggcaatagagccagatggtgtctcaaaaaaaattaaaaaaaaaaaaaatacacaaacaaaaacaaccccaaagtgatataagagtattctctgtgtgcagaagactattttgtgtgaatataattatacatagaagattatatgataacatgtatatattttggagaccctgtctcaaaaaaacaaagttccatgtactatatgctcacataaagaataattcctacatactagtgcttgggcagcaagaacgaaactccatctcaaaaaaaaaaaaaagaaaaaatcaaaacaaaaacagaagcccaccatcatccatctctgatgataagcatgctctgaaaatgtattaccaagatcagcatcaacttcaatgttgcttttctcaaacggtaaccctctaaaaggaagcactttcttttctttcagacaacagaaagtgcttccctctagaggacgacagcctgagatcttcttgctctggcactgtggattttttgtgggaatcttccttgaccaggttaaaatggacgcaaaaataaagatgcatttatttgccctgtttgcatgttttctggaatccagagcataaatccctaaaaggaccatctgcagttctttgcttcaaagaatcagcaggttagccttgttcatcaacgggcaatcctcctgagttttgttcccaaagagaaaaggcaatgcctactacacataccttatctttaaccaagagaattgggctggatttctagagaatagcaatggattttgagccaagtggtcgcttgagttccagtacaggagcgcacagtcctcatgggggcatccgaaatggaatctaagatgttgaagaatatacactgttgtaggcacaaacatcctgcagggtagacaacaggctaccctgtaaacgctcctcaataaaatctgagcagaaacagacgagtataggtggggcacaacagctcacaccactaatcctagcactttaggaggccaaggtggaagatcacctgagctaaggagttcgagaccaacctgggcaacatggggaaaccacatctgtacaaaaaaaccaaaagttagccaggtgtggtggtgtatgcctgcagacagctattcaggaggctgagctgggagttggaggttgcagtgagccgagatcgcaccactgcactccagcctgggcgacagagtgagactctgtctctaaaatgaataagttaaaaaataaatacataacaataatacaaaaattagctgggcgtggtggcatatgcctgtaatcccagctgctcgggaggctgaggcaggagaatcatttgaacctgggaggcagaggttgcagtgagcaaagttcctgatactgagctccagccagggtcacagagcaagactctgtcccaaaaaagagggccacttgaacccaagagatctaggttggaggggccaccatactccagcctgggcaacagacaccctgtcttaggaaaaaaaaccaaaaaaaccccacaaaaccccaacatcatccaagtctgattataagcatgatctccaagatcagcattaacttcaatgttgtttttctcaaagagtaatcctctaaaaggaagcgctttctcttctttcaagcaacagaaagtgcttccctctagagggtcacagcctgagctcttcttgctccagcactgtgggttttttgttggaattttccttcaccaggttaaaatggacacaaaaatgaggatgcatttattggccctgtttgcatgttttctggaatccagaacataaaaccctaaaaggaccatctccagttccttgcttcaaagtctcagcaggttagcctagatcatcgagggacaatcctcctgagttctgtctccagaaaaagcattgcctactacacataccttacatttaaccaagagaattgggctggatttctagagaacagcaatggattttgagccaagcgttcacttgagttccagcacagggacacacagtcccgatgggagcattcaaaactgaatctcccatgttgaaaaatatacattgttggccgggcgcagtggcttatgcctgtaatcccaccactttgggtggctgaggcgggcggctcacatgaagtcaggggtttcagaccagcctggccaacatggtgaaaaaaaaaatacaaaagtaaccgggcgtggtgacgggtgcctgtgattccagctactcaggaggttgaggcagaagacttgcttgaacctgagaggcaaaggtttgagtgagccgaggtcctgccactgccctctggcctgagtgacagtgagactccatctcaaaacaaataaatacatgaataaataacatgcaaatattagccaggcatggtgtcaggcacctataatcccagctactcaggaatgtgaggcaggagaactgcctaaaactgggaggtggaggttgcagtgagctgaga

SEQ ID NO: 1887691 - DNA, 4001 bp, Homo sapiens
taaaaatgcatttattggccctgtttacatgttttatggaatccagaacataaacccctgaaaggaccatctccaattccttgcttcaaaggctcagcaggttagccttgttcatcaaggggcgatcgtcctgagttttgtccccaaagagaaaaaggaatacctactactcataccttacatttagctaagagaattgggctgatgttgaagaatatacattgtctcacacacaaacatcctccaggatagaccagagtctaggctgactctagaggaccacgtgagattaggggcggtggctcacgcctgtaatcccagcactttaggaggccaaggctggtggatcacctgaggtcgggagtttgagaccagcctgcccaacatggtgaaacccagtctctattcaaaacacaaaaattagctgggtggggcagtaggcacctgtaatcccagctacccaggaggctgcggcaggagaatcgcttgaacccaggaggtggaggttgcagtgagcctaaattgcaacactgcactccagcctggacatcaagagtgaaactccatctcaacaacaacaacaacaataaaaataataactagcaggacacgatggcgggcatctctattcccaactattcggcaggctgaggtgggagaatcgccggaagctgggaggcggagtttccggtcaacagggatcctgccgctgcactccagcctgggaaacggaatgagagcgcatctcaaaaaatcaaaaataaaaagatcaccacttgagcccaagagatctcggttggaggtgccacccactcccgcctgggcaacagggaacctgtcttggaaaaaaacaaaccaaagagaaccccaacatcatgcaagtctgatgataagcacgctctgcaaatgtattaccaagatcagcagcatcttcaacgttgcttttctcaaacagtaacactctaaagggatgcacgatcttttcttagacaacagacagtgcttccatctagagggtcacagcatgaggtcttcttgctccagtactgtagggttcttttttttgtttttgtttttgtttctttttgacggagtcttgctctgttgccgaggctagagtgcaatggcacgatctcggctcactgcaagctccgcctcctgggttcaagccattctcaagccttagcctcccgggtagctgggactacaggcacccaccaccacgcctcgctaattttttgtatttttaaatagagatggggtttcaccgtgttagccaggatggtctcgatctcctgacctcgtgatccacccgcctcggcctttcaaagtggtgggattacaggcgtgagccacagcgcccagcttttttttttttttttttttttcagacggaatctcactctgtcatcctggctggatgctgtggcacaatctcggctcactgcagcctctgcctcccgggttcaagcaattctcctgcctcagcctcctaagtagctgggattacaggtgcccaccaccacactgggctaatttttgttgttattgtatttttagtagagacggattttcaccacgttggtcagactggtctcaaactcctgacctgagatgatctacctgcatcggcctcccaaagtgctgggattacaggcatgagccaccatgcccggctttattttgtatttttattcatttgtttattttttgagacagaatttccctgtgttgcccaggctgaccatttgaagccaagagatatattggacatgtcactgcactccagcatgagcaacacagagccttagaataaaaaagcaaaaccaaaacagaaccccaccatcgtccaagtgtgataagcatgctctgcaaatgtattaccgaaatcagcatcaacttcaacgttgcttttctcaaaccgtaacccaccaaagagaagcactttcttttcttttagacaacagaaagggcttccctttgtagactcacagcttgagatcttcttgctccggcactctgggtttcttgttgaaattttccttgacctggtcaaaatggacacaaaaataaagatgcatttattggtcctgtttgcatattttctggaatctagaacataaaccgatacaaagaccatctccagttccttgcttcaaacgttcagcaggttagccttgttcatcgagggacaactgtcctgggttttgtcttcaaagagaaaaagcaacgcctactacatataccttatattctcaggagttagacaccagcctgggaaacatggtaaaacctcatctgtaaaaatacaaaagttagccaggtatagaggtgcatgcctgtagacactaattcaggaggctgaggtgggaggttgaggttgccgggagccgagatcacaccactgcactccagcataggtgacagggccagatcttgtctcaaaaacaaacgaacgaacaaacaaaaaatgcacacaccaacaaaaaaatgcccaaagtgatataagagtattctcagggtgtaaaagagtcttttgtgtgtacatgatattatatatataagaatatatgaaggccagccgcggtggctgtctgcaatcccagtactttggaaagccaaggtgggcagatcacctgaagtcgggagtttgagaccagcctgaccaacatggagaaatcccgtctactaaaatacaacaaattagctagccctggaagtgtatgcctgtaatcccagctactcaggaggctgaggtaggagagtcgctttaacccaagaggtggacatcgcagggagcccagatcacaccattgcacttcagcctatgcgacaagagcaaaactcagtcgcaaaaacataaaaaataataataataaaagaaacttccatatattgtatgctcacaggaagaatacttcctacacacaagtgctagctttggcagcacgcatgaaaaaattggaatgacaaagattaccatgggccctgcgcaaaggtgacactcaaattcatgatgatctcatatttatctatttttattttttaacgtttaatgtttatttaatagttttatttatttatttagagacagagtttcactcgttgcccaggctggaatacaatggcacaatctcggctcaccacaacctccgccccctggggttcaagtgattctcttgcctcaacctcccgagcagctgggattacaggcatgcgccaccatgcccggctaattttgtatttttagtagagatggggtttctacgtgttggttaggctggtcttgaactcccgacctcaggtgatccgccacctcggcctcccaaagttctgggattacaggcatgagtcactgtgctcggcctatttatttaatttttgaaacagaatctcactctgtcacccaggatggagtacaatggtgtgatttcgtctcactgcaatctccttttcccaggttcaagagattctcttgccgtggcctcccaagtagctgagattacaggtgtccaccactgttcccagccatttttcctaattttagtatagacgaggttttgccttgtttgcccagctagtcttggactcctgacctgaggagatccgcctgtcctggcctctcaaagtgctgggattacaggagtggaccaccgtgtctggcctattttttatgtttttgagatggagtctcactctttttgccgaggcttgagtgcagtggcgtgatctcagctcattgaaagatcagccttccagcttcaagcgactctcctgcctcagcctccagagtagctgggattacaagcatataccaccaccatgctgggctaattttgtatttttagtagagatggggctgcaccatgttggccaggctggaatcaaattcccgacctcaggtgatcctcctgtctcagcctcccaaagtgctggaattacaggcgtgggccactgtactctgcctggtgccattattaaaactaggaaaaaagaaagat

SEQ ID NO: 1887692 - DNA, 4001 bp, Homo sapiens
gccagtgatgcctggctctcctttcccctcggctcatcctgcctgcatcggtgcagtgccctgacgttcccagtccagagggtggaggttgcagtgaggggagatcacagactgtcagagccttcctctctccttgcctatgcatgggttaatattcacctgaagtcccagctactagggtacgcataggagcacagcccagtttagtctgggtgacacagtgagacccccatctctaaaatttaaaaattaaatcaaatgtgcaattttttgacctgttcatgcacactacatttcggctgcatttacccaataaaaactcagagcccatgcactccacctccgtgcgcttgctaagcagtgcacatcccatcagcaagggacactgaggtcccctccaactctacctcaacccaagaggtgttctataaagcagtgcaggcagaacttccatggagtaagaggtgttaagggctggacgaacaggcatcgctcactgtggcaacaacaagagctgctgaacatcccacctgttactagagagacccttctagggttctaaaggaccctatttttgcgaaaatatctgtggttttgtctcatgtgacatttgtcactgtgattgagatggattttctttacaatagtttatattaggcacagcaaacattttagatcttgccaagcaacctgtattcagaggcgaggttttgcctgttggaatggtacattggaaccgctacccacaggaaacaggataaatggtccagctgtagtcaaaagaactcactagggttgttggcattagtggttgagggttgaatcaactataagcttctcacagaggaagcaggtctattctgagaaatgatggtaagctgttaggaaggaaaaattttcagtgtcagggacaagtagattaaaataaaaagacaaatgaacaggaaaaaaaaaatccccattggggactgcagaacaagactggacaggccgggcgtggtggctctcgtctgtaatcccggcactttgggaggctgaggtgggtggatcacggaggtcaggagttcgagaccagcctgaccgacatggtgaaaccccatctctagtaaaaacacaaaaattagctggtcatggtggcaggcgcctgtcattctagctacttgggaggctgaggtgagagaactccttgaactcaggaggcagaggttgcagtgagctgagattgcaccattgcactctagcctgagtgacaagagccaagctctgtctcaaaaagactggatagacttggaggcttatttactctcttaatgaaggaaacatggtttggattcattaaactaaatttataggaggccattgtttgaccaacacaaatggtgtctctggaaccaggtgccatgtaatgtatttttttttaagagatgggatcttgctatgttggcccaggctggagtgcagtggctattcaaaggtgtcattagtgcacggtatagcattgaaatcaagagactctcccaccccagcctctgcagtagctggggctgtgtgtcccactatgcttgatcatgtcaactatctttaaaatgggcacggtggctcacacctgtaggattgcttgagctcaggagttgagaccatcctggccagggtgaggccccatctctacaaaaaattgaaaaatctaccaaatatggcggcacacccctatattatagtcccagctactcggcaggctgaggcatagaggaccagttcatcccaggagttctaggttggaagggcaactgcattccagcctgggtggagaccctcatcttggagtaaaaacaaaacctcacatcacccaagtctgattataagtatactctgcaggtgtgttacaaacatcagcatcaacctcaaggttgcttttctcaaacagtaaccctcaaaaaggaagcactttctttcctttcagacaacagaaactgcttccatcttgagggtcacagcaggagacagtcttgctccagcactctgggtgtttattggtttccttggattctaaaaccttgaccaggctgaaatgaacacaaaaataaagatacagccaaacattcatttgccctgtttgcatgtgttctggaatcccaaattataagcccattaaatgaacatctcgggttccttgcgtgaaaatctcaacaggttgcccttatgaatcaagaagcaatcctcctgagttttgtcccccgaaagaaaaagcagcgactactatacataccttaaatttaaccaagagaactggctagatttatagagaacagcaatgaattttgagccaagtgttcacctaagttccagtacacctaagttccagtcctgatgggaggatccaaaatggaatctgagctgtttaagaatatatattgtcagtcaggcgtggtggtgcacacctgtaatcccagctactcgggaggccgaggcaggagaattgcttgaacccaggaggcagaggttgcagtgagccgagatcatgccattgcactccagcttgggccacaagagtgaatctccgtctcaaaaaaaaaaaagtacaaaaattaggaatatacatggtcagcctgggcagggtagctcacgcctgtaatctcagcactttgagaggccgaggcgggactcctgaggtcaggagttcaagaccaccttggtcaatatggcgaaaccccacctctactaaaaatacaaaaattagccgggtgtggtggagggtaatcccggctactcgggaggctgaggcaggaaaatcgcttgaacccgggaggcggaggttgcagtgagctgagattcatgccactgtactccagctagggcaacaagagtgaaactccatctcaaaaaaaagaaaaaaaaaaaaaaatatatatatatatatatatatacacattgtcatgcacacaaatattctccaggatagaccacaggctaggccataaaacctcaacagaatttaaagagaaatatacaagtatgagtagggagtggtggctgacacctgtaattccagcactttgggaggctgaggcaggaggatgcttgagccccggaggttgagaggctgcagtgagctgtgaacatgacactgcacaccagtctaggcaagagtgagaccgcatctctatttgtattaaataagctatattaaaaaaaaattacactcctgaagacctttcaggcagggaaattctcaggcaatttactcactgtagcttcatgaaattaccaagacgcttatgactatttccgttaaaatgaattttctaagtacatttcctggatcaacagcatccagaagtaaacacaggaatctgatttcatgcttgtttaaaaaactattaacattgccatcaacttccttagacgattgctctcaaactgtgagcttcaagctctggaggtgcttttcatccagttatagaaaaacgccccctggcttgaaatcacagcctgagcttcacttcccaaggagggtttggggcttgagcattctcagggtccatctgaaatcagagtgcaaacaaaaggcatcccagagcagtccactctcaataataagcagaattaggcagaagtaagtagaagtttcaaataagtttgcaaaccaactcaatggacatctactgaaccctccccaacattcaaatgcacacatagcataggacgggacagacgttatgagacacataatacacgaggcatacaatggagaaggaccaaagtacattatgttcaatcaccaccataaaatgcaattagaaatcattgttgaagacaggcacggtggctcacgcctcttatcccagcactttgcgaggcggaggtgggcagaccacctgaggtcaggagttcgagaccagcctggccaacatggtgaaaccctgtctctactaaaaatacaaaaattagctgggtgtagtggcgggcgcctgtaatcccagctactggggatgctgaggcag

SEQ ID NO: 1887693 - DNA, 4001 bp, Homo sapiens
ccaggtgattagcctgctttggtctccaagagtgctgagacgacatgcctgagctaccgtgcctggcctgcagacagctattccagaggctgcggtggggcatgggccaagactgcaacactgcactgcagcctgggtgacagagccagaccttgtctcataacacacacacacacacacacacacacacacacacacacacacgaaggaaaaaaaacccaaagtgatacaagagtattctgtgtgtgtagaagagtgttttgtgttaatcattatattatctatagaagatgatatgataaaatgtgtatcatatataagacactgcccccagaaaaggaagttctatatactgaatgctcacacgaagagtaatttctccacctaagtgccttctctggcagcatatgttaaaaaaaaaaaaaaatgacagcgattcccacgtcccctgcacaaagtgacacccaaattcatgatggtcccatatttaaaattagaaaaaacaaatgccgacacccacagccaatcatttctacttcaagtacatctcaagtatactgttaatctgaaatacaaatttaaccaggtttccctgctctgggaagccccctttggtaattcagataagggtctcctttggaaggtaatgggtaaggaacatggagatgtcagccaagggaagtgactctcagggatttctatggattatgcagacgcccagccagatcccaaacttccccaaaagatcccaagtccaggcaggaaggaccactgggctccagaaaccaaatgaagtggccctgggcaggagtctctgttgtcagattccatgactaagacagccagggagcagagtgaaaatcccaggggctctctctcccagaagacacctgctccatccagatcaaacccaaaatgtccccagagaatgatgcctgcttctcctttcccctcggctcatcctgcctgcatcggtgcagtgccctgacgttcccagcccagaggccttcactccttccagtgccccaggagggtcaccttgcagttctcagggaggaagatggggtcttccacccttgtgagcttcccagacatcagggtctgcccgccccactccattcccaaaggatgttccgcccagttctcccagcctcctgcttccctccagggaccacccttcagtggtaagattcacattgcagacaaccaggaccaacccattatcctcaactggacacccatacaagattggtctacgtgaccggcctacaagaggcagatccagagctagagagatggggagtcgttgccacggtctgggtggaagaggtgggtgggtactgactgcaaatgagtataagcctcttcggggtgatgaaaatcttccaaaactagagtggtggtggctgcaaacaagctaaaatccacatctcagagttcatctcaaaagattagtttctcggccgggcgcggtggctcacgcctataatcccagcactttgggaggccgaggcgggcggatcacgaggttagaagatcgagaccatcctggctaacacggtgaaaccccgtctctactgaaaatgcaaaaaatacaaaaattagatgggcgtggttgcacgcacctgtgatcccagctactcaggaggctgaggtttcagtgagccaagatagtgccactgcattgctgagacacacagtgagactccctgtcaaacaaacaaacaaacaaacaaaaacgaccggagcccaagaaatgtaggttgaagtgtcaccgcactccagcctgggcaacagggaccttgtcttggaatacaacaaaacaaaagcaaaaccccaccatcatccaagtctgatgataagcacgctctgcaaatattttaccaagatcagcatcaacttcaacattgcttttcccaaacggtaaccctctaaaaggaagcacttgcttttctttctgaccacagaaagcgcttccctttagagggtcacagcctgagatcctcttgctccagcaccgtggattttttgtgggaatcttccttgaccaggtttaaatggacacaaaaataaagatgcatttattggggccgggcgcagtggctcatgcctgtaatcccagcactttgggaggccgaggcgggcagatcacgaggtcaggagatcaagaccatcctggctaacagggtgaaaccccgcctctactaaaaatacaaaaaattagcctagcgtggtggtgggcacctgtagccccagctacttggaaagctgaggcaggagaatggcgtgaacccaggaggctgagcttgcagtgagccaagattgtgccactgcactccagcctgggtgacagaacgagactccatctcaaaaacaaaacaaaacaaaacaaaaagatgcatttattggccctgtttgcatgttttctggaatccagaacataaacccctaaaaggaccatctccagtcctttgcttcaaagaatcagcaggttagccttgttcatcaaggggcaatcctcctgagttctgtccccaaagagaaaaagcaatgcctaccacatataccttatatttaaccatgagaattgagctggatttctagagaacagcaatggattttgagccaagtgttcactcgagttccagcacagggacacacagtcccgatgggagcatccaaaatggaatctactatgttcaagaatatacactgtctcacacacaaacatcctgcaggatagaccacagggtatgctgtataagctcctcaataaatacagaaatacacaagtatgggtggggcgtggtggctcacaccaataaacccagcacttaaagagggcaaggcaggaggatcacttgagctcaggagttcgagctcaaccagcatgggtaatatggtgaaaccttatgcacaaaaaatagaaaagttagctgggtgtggtggtgcgcacctgtagacaagtactcaggaggctgaggtggcaggtggaggttgcagtaagtcgacatggcaccactgcactccagcctgggtgataaagctagaccttgtctcaaaacaaaacaaacaaacaaacaagaaaaacacagaaagaaacaagtaaataaatacccaaagtgatacaagagtattctccgtgtgtagaacagggtttggtgtacatatgactacattatatacatgataagactatatgattaaatatacatcatatattgttgagaccctgtctatgaaaaaaaaaaaaaagaatatactgtttgctcacattaaaaataactcctcaccgggtgcggtggctcatgcctgtaatcccagcagtttgggaggccgaggcaggtggattagttgaggtcaggagtttgagaccagccggaccaacatggcaaaaccccgattctaccaaaaggacaaaaattagccggggtggcggcatgcacctgaaatcccagctactcaggaggctgaggcaggagaatcgcttgaacccggaaggcgtaggttgcagtgagccgagatcatgccactgcactccagcctgggcgacaagaatgagactccatctcaaacaaacaaacaaacaaacaaacaaaattcctacacacaagtgcttgctttggcagcacaaaaaaatacaaataataattaaaaaaaaaaaaaaaaacaccctgcagtccgagcagggtggctcatgcctgtaatcccaccactttggaaagcagaggcgggcagatcacctgaggtcaggagttcaagactaacctggccaatgtggtgaaactccatctctgctaaaaatacaaaaattagccaggcgtggtggcacgtgcctataataccagctacttgggaggccgaggttgcagtgagcagagaatgtgtcactgcctgcccgcctggcccacatagtgagactctgtctcaagaacaaaaacaacaaaaaaagtaggggggaccaactagcctaagaggtctaggttggaagcgccaccgca

SEQ ID NO: 1887694 - DNA, 4001 bp, Homo sapiens
aggaaagttccatacatcgcatactcacaggaagaataattcctacacaagttcttgctttggtagtgcacataaaaaaaattggaatgacagagattaccgtggctgctccacaaaggtgacactcaaattcacgacggtcccgtatttatctacgtatttttatttgttttatttatttttgagacggaatcttgctctgtggcccaggctggaatgccatggcttcattacagctcactgaaatcgcctcctcctgggttcaagtggttctcctgtcttggcctcccgagtagctggaatcacagatgtgcaccaccgcacccagctaatttttgtagttttagtagagacaaggctttgccacgttggccccgttggtcttgaactcctgacctcaggtgatcctcccgtcttagcctcctaaagtgctgggattacaggcgtgtgccgctgtgcctagactattatttactttgttgacactgagactcactcagttgcccaggctggaatgcagtggcgcaatctcagctcactgaaagctcagcctcctggcttcaagcgagtctcctgcctcagcctcccgagtagctgggattacaggtgtgtgcaaccaggcctggctgatttttgtatttttagtatggacggggtttcaccatgttggccaggccggtctcgaacaactgacctcaggtgatcctcctgtctcggcctcccaaagtgctggaattataggcaggagccaccatacctggactagtcccatcattaaaattagggggaaacaaagatgcccacacctaaatagcgtatcatttattgtttaagcacatctcaaatacattgtttatctaaaacacaagtttaactgagggccgggacgaaccaaaaaatggtccttactttcttcctgcctgtgcatgggttaatatttacatgtagtcccatctaacaaggcctgggaggggcagaggcaggaggatctaagaccactttagccagggcagcatagtgagacccccgtctcatgcatttatctcctggtcatgcacccaagatttcagcttcatttccccaatacacactgaagccccatgcactccacctccgtgctcttgctcatcccatctgcagggacactgaggtcccctcaactccacctgaccccatgtgaggttctataccagtgccagaaaaatttccataaagtaagaggtgttgatggccacgcaccatggctcacgcctttgggaggcgcgcggtggtggctcatgcctgtattctcagcattttcggaggccaaggtgagtggctcacttgaggtcaggggtttgagaccagcctggccaacatggtaagccccatctctactgaaaaaaaaaaaaaaaaaaattcaaaacgtagccaggcgtggtggcggccacctgtagtttcagctacttcagaggctgaggcaggagaattgcttgaacctgagaggcagaggttggagtcagtcgggatcatgccaccgctctccagctggggaaacgagactccatctcaaaaataaataaatgaataaaaaagaaaaatacaaatattagccaagtgtgatgtcgggcccctgcaatcccagctattcaggaagctgaggcaggagaatagcttgaacccgcgaggtggagattgcagtgagccaagatcgtgccactgcactccagcctgggtcacagaggaagactgtcccaaaaaggaccatatgagcccaagagacctaggttggaagtgcctctgtactccagcctgggccacagagaccctgtcttagaaaacaaaaacaaaacagaaccccaacatcatccaagtctgataataagcatgcaaatatattaccaacatcagcatcaacttcaacactgcttttcccaaacggtaacactctaaagggaagcactttgttttttctcagacaacaaacagaaagtgcttcctctagagggtcacagcatgggatcttcttgctccagcactctgggtttcttgttggaattttccttgaccaggttaaaacggatacaaaaataaaaatgcatttattggccctgtttacatgttttatggaatccagaacataaacccctgaaaggaccatctccaattccttgcttcaaaggctcagcaggttagccttgttcatcaaggggcgatcgtcctgagttttgtccccaaagagaaaaaggaatacctactactcataccttacatttagctaagagaattgggctgatgttgaagaatatacattgtctcacacacaaacatcctccaggatagaccagagtctaggctgactctagaggaccacgtgagattaggggcggtggctcacgcctgtaatcccagcactttaggaggccaaggctggtggatcacctgaggtcgggagtttgagaccagcctgcccaacatggtgaaacccagtctctattcaaaacacaaaaattagctgggtggggcagtaggcacctgtaatcccagctacccaggaggctgcggcaggagaatcgcttgaacccaggaggtggaggttgcagtgagcctaaattgcaacactgcactccagcctggacatcaagagtgaaactccatctcaacaacaacaacaacaataaaaataataactagcaggacacgatggcgggcatctctattcccaactattcggcaggctgaggtgggagaatcgccggaagctgggaggcggagtttccggtcaacagggatcctgccgctgcactccagcctgggaaacggaatgagagcgcatctcaaaaaatcaaaaataaaaagatcaccacttgagcccaagagatctcggttggaggtgccacccactcccgcctgggcaacagggaacctgtcttggaaaaaaacaaaccaaagagaaccccaacatcatgcaagtctgatgataagcacgctctgcaaatgtattaccaagatcagcagcatcttcaacgttgcttttctcaaacagtaacactctaaagggatgcacgatcttttcttagacaacagacagtgcttccatctagagggtcacagcatgaggtcttcttgctccagtactgtagggttcttttttttgtttttgtttttgtttctttttgacggagtcttgctctgttgccgaggctagagtgcaatggcacgatctcggctcactgcaagctccgcctcctgggttcaagccattctcaagccttagcctcccgggtagctgggactacaggcacccaccaccacgcctcgctaattttttgtatttttaaatagagatggggtttcaccgtgttagccaggatggtctcgatctcctgacctcgtgatccacccgcctcggcctttcaaagtggtgggattacaggcgtgagccacagcgcccagcttttttttttttttttttttttcagacggaatctcactctgtcatcctggctggatgctgtggcacaatctcggctcactgcagcctctgcctcccgggttcaagcaattctcctgcctcagcctcctaagtagctgggattacaggtgcccaccaccacactgggctaatttttgttgttattgtatttttagtagagacggattttcaccacgttggtcagactggtctcaaactcctgacctgagatgatctacctgcatcggcctcccaaagtgctgggattacaggcatgagccaccatgcccggctttattttgtatttttattcatttgtttattttttgagacagaatttccctgtgttgcccaggctgaccatttgaagccaagagatatattggacatgtcactgcactccagcatgagcaacacagagccttagaataaaaaagcaaaaccaaaacagaaccccaccatcgtccaagtgtgataagcatgctctgcaaatgtattaccgaaatcagcatcaacttcaacgttgcttttctcaaaccgtaaccca

SEQ ID NO: 1887695 - DNA, 4001 bp, Homo sapiens
cacgtctggctaattttttttttttttttgtatttttactagagacagggtttcaccgtgttagccaggatggtctcagtctcctgaccttgtgatccacccacctcggcctcccaaagtgctgggattacaggcgtgagccaccgcgcccggcccacacccagcctattttttacttttttgagactgagtctcactctgttgcccaggctggagtgcagtggctcaatctcagctcactgaaagctcagcctcctggcttcaagtgattctcctgcctcagcctcctgagtagctgggattgcaggggtgcaccaccaccccgtctggctaatatctatatttttagttcagacgaggtttcatcatgttggcgaggctggtctcaaacaactgacctcaggtgatcctcctatctcagcctcccaaagtgctggaattacaggcgggagccaccgtacccagactagtcccatcattaaaattagggaaaaaacaaagatgcccacacctgaacagcaaatcatttgttgttcaaggacatctcagatacattgtttgtctaaaatacaagtttaactgagggcccggtgtgaaccaaataatggttcttacattcttcttgtctgtgcatgggttaatattcacatgtagtcccatctagcaaggactgcggggggcagaggcaggaggatctaagcccactttagccagggtggcatagtgagacccccgtctcatgcatttatttcctggtcacgcacccaagatttcagcttcatttccccaataaacactgaagccccatgcactccacctccgtgctcttgctcatcccatctgcagggacactgaggtcccttcaactccacctgaccccacgtgaggttctataccagtgccagaaaaatttcgataaagtaagaggtgttgatggccacgcaccatggctcatgcctttgggaggccgaggcgagcagctcacgtgagttcagaggtttgagaccagcctggtcaacatggtgaaaccccgtctttacttgaaaaaaaaaaaaaaaaaaaaaaaattcaggccgggcatgttggctcacacctgtaatcccagcactttgggagactgaggcaggtgaatcatttgaggtcaggagttcgagaccagcctgaccaacatggggaagccccatatctactaaaaatacaaaattagccaggtgtggtggcacatgcctgtaatcctagctactcaggaggctgaggcaggagaatcacttgaacccaggaggctgaggttgtatgggccgagatcatgtcattgccctccagcctgggcaacaagagtgaaactccatctctctctctctctttctctctaacacacatacacacacatacgcacacattcgaaaagcagtcaggcgtggtggtaagcgcctgtaattccagctactcaggaggctgaggcaggagaattgcttgaacctgagagacagaggttggagtcagccgggatcgtgccatggccctccagacttggcaacagcaagactccacctaaaaaataaataaatgaatgaataaaaaagaaaaatacaaatattagctgggcatgatgtcaggtgcctgtaatcccaggaagctgaggcaggagaatcacttgaacccaggaggtggagggtgcagtgagctgagattgcaccactgcactccagcctgagtcacagagcaagactctgtcccaaaaaggaccatttgagcccaagagacctaggttggaagtgcctctgtactccagcctgggccacagagaccctgtcttagaaaacaaaaaaaacccagaaccccaacatcatccaagtctgatgataagcatgcaaatatattaccaacatcagcatcaacttcaacactgcttttcccaaacagtaactctaaagggaagcactttgttttttctcagacaacaaacagaaagtgcttcctctagagggtcacagcatgggatcttcttgctccagcactctgggtttcttgttggaattttccttgaccaggttaaaatacacacaaaataaagatgcatttattggccctgtttgcatattttctggaatccagaacataaacccctaaaaggaccatctccagttccttgcttcaaaggctcagcaggttagccttgttcaccaaggggcaaccctcctgagttttgtccccaaagagaaaaagcaaagcctactacacataccttatatttaaccaagagattagggcagaatttccagagaacagcaatggattttgagccaagtgttcagctgagttccaggacaggggcacacagtcccgatggaagcatccaaaatggaatctacaatgttgaagaatatacattgtctcacacacaaacatcctccaagatagaccacagtctaggctgactctacaggaccatttgagattaggggtgatggctcacagctgtaatcccagtactttgggaggccaaggctggtggatcacctgaggtcaggagtttgagaccagcctgcccaacatggtgaaaccccatctctactgaaaacacaaaaattagctgggtggggtggtaggcacctgtaattccagctatctgggaggctgaggcaggagaatcacttgaacccgggaggccgaggttgcggtgagccgagatcgcgctattgccctccagcctgggcaacaagagcgaaactccgcctcaaaaaaaaaaaacaaaaaaacaataataattagcaagacctgatggcaggcaactgaattcccaatgattcggcaggctgaggtggtagaaacactggaacctgagaggtggagtttccggtcaacagagattctgctactgcactcccagtgaaaccagagtgggtctcaaaaaatcaaaaaataaaaagaggaccacttgagcccaagagatctcggttggaggtgccacccactctagtctgggcaacagagacactgtcttggaaaaaaaaaacaaaacaaacagaaccccaacatcatgcacgtctgatgataagcacgctctgcaaatgtgttaccaagatcagcagcatcttcaacgttgattttctcaaacagtaacactctaaaaggatgcacgatcttttcttagacaacagacagtgcttccatctagagggtcactgcctgagatcttcttgctccagtactctgggttattttttatgtatttatgtatttatttatttatgtatttattttttgagatggagtcgcccaggctgcagtgcaatggtgtgattttagctcactgcaatctccttctcacgggttcaagagattctcctgctgccgcctcccacgtagctgagactacaggtgtgtaccaccacgcctagctatattttgcatttttagtagagaggaggttttgtcttgatggcggggctgctcttgaactctgacctgaggtgatccacccgtctcgacctcccaaagtgctgggattacaagcgtgtgccaccgcacccggcctattttttatttttttgagattgagtctcactgttgcctaggctggagttcagtggtgcgatctcagctcactgagagctcagcttcccggcttcctgtgattctcctgcctcagcctcctgagtagctgggattacaggcgtgtaccaccaccacactgggctaagttttgtatttttagtagagatggggattcaccatgttggccaggctggtctcaaacaactgacctcaggtgatcctcctgtcttggcctcccaaaatgatggaatcacaggtgtgagccgtggtacccagccttgtcctatacttaaaattaggaacaaaaaaagatgcccacacctaaacagcaaatcatttgttgttcaagtacatctcaaatacattgtttatctgaaatagaaatttaagtgggggtggggcatgaatcaaagaacagtccttactttcctcttcctgtacat

SEQ ID NO: 1887696 - DNA, 4001 bp, Homo sapiens
caacattgtgaaaccccatgtgtacaaaaaatacaaaagtgagccaggtgtggtagtgcgtgcctgtagacactaattcagtaggcttaggtcgggggtggaggttgcagtgagctgagatcacaccactacactccagcctggatgacagagccagaccttgtctcaaaaataaccaaccaaacaaaacacacacacacacacacacacacacacacacacacacacacacacaaatacccaaagtgatataagactattctctgtgcatagaagagtattttgtgtgtatgtgatattacatatataaaaatatatcatggccgggcatggtggctcacatctgtaatcccagcactttgggaggctgaggtggatggatcatctgaggtcaggagttcgagaccagcctgaccaacatggagaaaccccatctctactctaaatacaaaaaattagctaggcttggtggcacatgcaagcaatcccagctacttgggaggctgaggcaggagaatcgcttgaacccaggaggcagaggttgccgtgagctgagatcgtgacattgcactccagcctgggcaacaagagtgaaactgtgtctcaaaaaacaaacaaacagaaaaaacaaaaaagaaagctccatatattgtattctcacaggaagtataattcctacgcatatgtgcttgctttggcaatacgcataaaaaaattgaaataacaaagattaccatgacccctgcacaaaggtgacactcaaattcataatggtaccatatttatctatttaattctttttacttttattttgtttatttatttacttatttttgatacagagtctcgcactgtcgcccaggctggagtgcaatggcccgatctcggctcactgcaacctccgcttcctgggttcacacgattctcctgcctcagcctcccaagtagctgggactacaggtgccagccaccatgcccagctacttttttgtatttttagtagagatggggtttcgccatgttggccaggctggtctcgaactcctgaccttgtgatttacccgccttgcctcccaaagtgctgggattacagacgtgagccaccctgtctgccctacttatttattttttgagacagaatctcgctctgtcgcccaggctagagtgcaatggtatgatttcgtctcactgcaatctcctcttcctgggttcaagaggttcttctgccacagccccccaagcagctaagattacaggtgtaattttgtatttttagtagagtcgaggttttgccttgttggcccagccagcctttaactcctgacctcaggtgatccacctgtctcggcctcccaaagggctgggattacaggcatgtgccaccacgctcggcctattttttatttttttgagatggagtctcactctgttgcccaggctggagtgcagtggaacgaactcagctcactgaaagctcagcctcctgtctctactaaaaatacaaaaattaaggccgggcgcagtggttcacgcctgtaatcccagcacttttggaggccaaggcgggtggatcacaaggtcaggagatcaagaccatcctggctaacacagtgaaactctgtgtctactaaaaatacaaaaaattagccaggcgtggtggcgggcgcctgtagtcccagctactcaagaggcagaagaatggcgtgaacctgggaggcggaggttgcagtgagctgagaacacgccactgcactccagcctgggcgacagagcaagcctccatctcaaaagcaaaacaaaacaaacaaacaaaaaactcaaaaccaaaacagaactacaccgtcgtccaagtctgatgataagcaggctctgcaaacttattaccaagatcagcatcagcttcaacgttgcttttctcacacggtaacactctaaagggaagtgcgttcttttcttttagacaacagaaagttcttccctttggagggtcacagcctgagatcttcttgctccaggactctgggttttttggtgaaattttcgtttaccaggttaaaatggacagaaaaataaagatgcattcattgtccctgtttgcatgttttctggaatccagaatataaacccctaaaaaaaccatctccagttccttgcttcaaaggctcagcaggttagccttgttcatgcaggggcaaccctcctgagttttgtctccagaaagaaaaatcaatgccgactagacataccttatatttcaccaagagaatagggcaggatttctagagaacagcaatggattttgagccaagtgttcactcgagttccagcacagggacacacagtcccgatgggagcatccaaaatggaatctaaaatgttgaaaatgtacattgttatatacacaaacatcctccaggatagaccacagactaggatgtaaaagctcctcaatacaatttgagcagaaacaaacaagtacgggtgtggcacggtggctcacaccattaatcacagcagtttaggaggccgaggtgggaggaccacttgagctcaggggttcaagaccagcctgggcaacatggtgaaacctcatctgtacaaaaaatgcaaaagttagccaggtgtgggggtgcatgcctggagacaggtattcaggaggctgacatgggaggtggaggttgcggtgagctgagatcacaccactgcactacagcctgggcaacagagtgagactgtctcaacaacaaacaaataaatcaattaaaaaaatgcaaaaattagccgggcgtggtggcacatgcctgtaaccctgctcgggaggctgaggccagagaattgcttgaacccaggagacagagattgcagtgagccaagttcctgccactgaactccagccagggtaacagagtgagactctgtttcaaaaagaggaccacttgagcccaagagatctaggttggatgtgccactgcactccagcctgggcaacagagacaccctgtctcagataaaaaacaaaacaaaaacaaaaccccaccatcatccacgtctgaccataagcatgctctgcaaatgtattaccaagatcagcgtcaacttcaatgctgcttttctcaaaccgtaaccctctgaaagaaagcactttctgggcgggcgtggtggctcacgcctgtaatcccagcactttgggaggccgaggcgggtggatcatgaggtcaggagatcgagaccatcctgcctaacaagatgaaaccccgtctctactaaaaatacaaaaaattagccgggcttggtggcgggcgcctgtagtcccagctacacaggaggctgaggcaggagaatggcatgaacccgggaggcggagcttgcagtgagccaagatcacgccactgcattccagcctgggcgacagagcgagacattgtctcaaaaaaaaaaaaaaaaaaaaaaaaggactttcttttctttaagacaacagaaagtgcttcttacctctagatggccacagcctgagagcctgagatcttgctccaacaccgtggattttttgttggaattctcctgaccaggtcaaaatgggcaccaaaataaagatgcatttatgggtcctgtttgcatgtttcctggaatccagaatataaacccttagaaggaccatctccagttccttgcttcagagaatcagcaggttagccttgtttatcatagcacaatcctcctgagttttgtctctggaaagaagaagcaatgcctactagaaatacattatatttaaccaagagaaacgggcaggatttctgtgggtggcaagccacccaggtgccgaggcaagagaccgaaggcacaagctgttccggtataataaagaaactcaccacaagccgttccagtataacaaagaaaatatatagaataagactagttatactagaaatagattatagatatgattatatatgaatattattaatcattagtttgtagcattactctttattcca

SEQ ID NO: 1887697 - DNA, 4001 bp, Homo sapiens
ttacaggtgtccaccactgttcccagccatttttcctaattttagtatagacgaggttttgccttgtttgcccagctagtcttggactcctgacctgaggagatccgcctgtcctggcctctcaaagtgctgggattacaggagtggaccaccgtgtctggcctattttttatgtttttgagatggagtctcactctttttgccgaggcttgagtgcagtggcgtgatctcagctcattgaaagatcagccttccagcttcaagcgactctcctgcctcagcctccagagtagctgggattacaagcatataccaccaccatgctgggctaattttgtatttttagtagagatggggctgcaccatgttggccaggctggaatcaaattcccgacctcaggtgatcctcctgtctcagcctcccaaagtgctggaattacaggcgtgggccactgtactctgcctggtgccattattaaaactaggaaaaaagaaagatgcccacacctaaacagcaaatcatttgttgttcaagtatgtctcaaatgcagtcttcatctaaaatactaatttgactggcggctaggtgtgaaccaaagaacggtcctttctttcctcttgcctgtgcatggttaatattcacatgtagtcccagctactaaggactggggagaggtggaggcaaaaggacctaagcccattttagcctgggcagcatagtgagacccctgtctcgttgcacatatgacctggtcgtgcagccaagagttcagctgcatttacccagtgaaaactcaaagccatgcactccacctccgtgccccagtgaaaactcaaagccatgcactccacctccgtgctcttgctaagcagggcacatcccatctgcaagggacaatgaggtcccccacccccttatttatttatttatttttttgagacagagtcttgctctgtcgcccaggctggagtgcagtggtgccatctcggctcactgcaagctccgcctcccgggttcacaccattctcctgcctcagcctcccgagtagctgggactacaggcacccgccaccacgcctggctaattttttgtatttttagtagagacagggtttcaccatgttagccaggatggtctcgatctcctgacctcgtgatccacccgcctcggcctcccaaagtgctgggattacaggcgtcagccaccacacccagcctgaggtcccttttaaatctgcccgaccccaagtgaggttctataaaccagcgccagtatcatttccatggagtagaaggtgttgatggctcggtgcagtggctcacgcctgcattttcagcactttgggagtctgaggcgggaggatcacttgaggtcaggggcttgagactagcctggccaacgtggtgaaacccattttctactaaaaaaaaacaaaaagggcatgatggtgacacatataattccaactacttgggaggctgaggcaggaaaattgcttgaacccaagaggcaaaggctgccactgcactccagcctgagagacagcgagactcaaaaataaataaataagaaaaatgaaaattatagccagtcatggtgtcagacacctataatcccagctactcaggaagttgaggcaggggaatcacttgaaactgggaggcagagattgccgtgagccaagatcgtgccactgtggtctagcttgggtcacagagcaagactctgtcccaaaaaagaggaccatttgagcccaagagacctaggttggaagtgccaccatactccagcctgggcaacagagatcctgtcttagaaaaaaaaaaacagacgcccaccattgtcaaagtctgattataagcaggctctgcaaagttatttgcaagatcagcatcaacttcagcattgcttttctcacacggtaacactctaaagggaagtgcgttcttttcttttagacaagagaaaattcttccctttggagagtcacagcccgagaccttcttactccagcactctgggttttttgttgacatttttgttgaccaggctaaactggacacaaaataaagatgcacgtattggccctgtttacacgttttctggaatccaaaacataaacccctaaaaggaccatctccagttccttgcttcaaacaatcagcaggttagccttgtttatcataggacaatcttcctgagtttcgtatctgctaagaaaaaacaatgcctactacacgtagcttatatttaagcaggagaattggtaagatttctggagaagagcaatggattatgagccaagggtgcacttgagttccaggacaggtacacacagtcccgatgggagcacccaaaatcgagtctacgatgttgaagaatatacattgtcacatacacaaatattctccaggatagaccataggcttggtcataaaaactcaataaaatctgaacagaaatacgtaagtatgggtggggtgggttggctcacacctctaatcctagcacattagggggccaagacgggaggatcacctgagctcaggagttcctgagaccagccccagcaacatggtgtaaacccatgtgtatgaaaaacacaaaagtgagccaggtgtggtggtgcatgcctgtagacactaattcagcaggtttaggtgggaggtggaggttgcagtgagccaagatcgcaccactacactccagcctgggtgatagagccagaccttgtctcaaaaataaccaactggccgggcgcggtggctgacgcctgtaatcccagcactttgggaggccgaggcgggtggatcacgaggtcaggagatcgagatcatcctggctaacatggcgaaaccctgtctctactaaaaatacaaaaaaaaattagccaggtgtggtggtgggtgcctgtggtcccagctactcaggaggctgaggcaggagaatggcgtgaacccggtaggcggagcttgcagtgacccgagatcctgtcactgcactccagcctcggcgacagagtgagactctgtctcaaaacaaaaacaaaaacaaaaaacaaaaaacaaaaaacaaaaacaaaaaaaaaccagccaaacaaataaaaaacatacacacacaaagaaagaaaaaaatacccaaggttatatcagagtattctctgtatttagaacagtattttgtgtgtatatgattatattatatataagtatatatataacgaaatatataccatatatttctgagaccctgtgtcaaagaaagttccatatattgtatgctcacaggaagaaaaattcctacacaagtgcttgctttggcagttcacataaaaaaaaattggaatgacagagattacgctggctgctacacaaaggtgacacccaaatttatgatgtcccatatttatctatttatttttatttattttatttattcatttatttttgagacggaatgttgctctctggcccaggctggaatgccatggcttgatttcagctcactgaaatctcctcctcctgggttcaagggattctcctgcctcagcctccggagtagctggaattacagatgtgcaccattgcacccagctaatttttgtatttttagtagagacgaggctttgccatgttggccctgttggtcttgaactcctgacctcaggtgatcctcccgtctcggcctcccaaagtgctgggattacaggcatgcgccaccgcgcccggcctattttttactttcttgagactgagtctcactctgttgcccagggtggagtgcagcagaagatttcagctcactgaaagctcagcctcctggcttcatgttggccaggctggtctcgaacaactgatctcaggtgatcctcctgtctcagcctcacaaagtgcaggaattacagacaagagccaccatatgcacactagtcccatatttaaaattaggaaaaaaaaaaacaaaacaaagatgcccacacctgaacagcaaatcgtttgt

SEQ ID NO: 1887698 - DNA, 4001 bp, Homo sapiens
gcgcagtggctcacagttgtaatcccagcactttgggagatcgacgtgggtggattacctgaggtcaggagttcgagaccagcctggccaacatggtgcaaaccctgtctctactaaaaatacaaataattagccgggcatggtggcacaggcctgtaatcccagctactcaggaggctgaggcaggagaattgcttgagcctgggagatggaggttgcagtgagccgagatcacgccactgcgctccagcctgggccacagagcaagactcagtctcaaaaacaataacaaggctggacgcggtggctcacgcctgtaatcccagcactttgggaggctgaggcgggtggatcacgaggtcaggagatcgagaccatcctggctaacacggtgaaaccccgtctctactaaaaatacaaagaattagccgggtgtgctggcgggcacctgtagtcccagctacacaggaggctgaggcaggagaatggcgtgaacccgggaggcagaacttgcagtgagccgagatagcgccactgcactccagcctgggcgaaagagcaagactcggcctcaaaaaaaaaaaaaacaaaaaacaaaaaacagaaaaaccccaaaactaaacaaaacaaaacaaaaaaaaactcagaagcccaacatcatccaagtctgattataagcattcgctgcaaatttattaccaagatcagcatcagcttcaatgttgcttttctcaaacagtaacactctaaaaggatgcactttcctttctttcagacaacagaaagcgcttccctctagagtgtcacagcctgaggtcttcttgctccggcactgtggattttttgttggaatcttccttgacgaggttaaaatagacacaaaaataaagatgcatttatttgtccggtttgtgtgttttctagaatccagaacataaacccctaaaaggaccatctccagttccttccctcaaagaatcaacaggttagctttgttcatcaaggggcaatcctcctgagttttgttcccaaagagaaaaagcaatgcttactactcataccttacctttaaccaagagaattaggctggatttctagagaacagcaatggattttgagccaagtgttcacttgagttccagtacagggacacacagtcccaatgagggcatccaaaatggaatctacgatgttgaagaatatacattgtcgtaaacaaaaacattctcccggagagaccacaggctatgctgtaaaagctcctcaatacaatttgaacggaaacacacaagtactgttgggacacggtggctcacagcactttaggaggctgaggcgggaggatcacttgagctcaggagttcaagatgagcccgggcaacatggtgaaaccatgactgtaaaacaaatacagaagttagccaggtgtggtggtgcacgcctggagacagctgttcaggaggctgaggtgggaggtagaggttgcggtgagccaagatcgcaccactgcacttcagcctgggtgacagagcgagactctgtctcaaaaataaataaataaataaataataaaaaatacaaaaattagccaggcatggtggcacatgcccgtaatcccagctgctcaggaggctgaggcaagagaatcgcttgaacctaggaggcagaggtcgcagtgagcagagttcctgacactgcactccagccagggccacagagcaagactctatcccaaaatagagggccacttaaacccaagaggtctaggttggaagtgccaccgcactccagtttgggcagcagacaccctgtctaggaaaaaaaacaaaacaaaacaaacgcaaaacttcaacatcatccacgtctgattataagcattctctgcaaatgtgttaccaagatcagcgatgcttttctcaaagcgtaacactctaaagggaaccattttcttttctttcagacaacagaaagcgcttccctctagagggacacagcctgagatcttcttgctccagcatcgtggattttttgttggaattttccttgaccaggttaaaacagacacaaaaataagcacgcatttattggtcctgtttgcatgttttctggaatccagaatataaacccctaaaaggaccatctccagttccttgcttcaaagaatcagcaggttagctttgtttatcaaggggcaatcctcctgagctttgtctccagaaagaaaaagcaatgcctactacacatacctcatatttacccaagagaattgggctggatttctagacaacagcaatggatggagagcccagtgttcacttgagtcccagcacagggacacacagtcctgacgggagcatccaaactgcaatctaagatgttgaagaatgtacattgtctcacacacaaacattttccaggatagaccacaggttacgctgtaaaagctcctcagtaacatttgaacagagatacacaagtacaggtggggcgtggcggctcacacctctaattccagcactttaggaggccgtgatgggaggatcacctgagcacaggagtttgagaccagccccggcaacattgtgaaaccccatgtgtacaaaaaatacaaaagtgagccaggtgtggtagtgcgtgcctgtagacactaattcagtaggcttaggtcgggggtggaggttgcagtgagctgagatcacaccactacactccagcctggatgacagagccagaccttgtctcaaaaataaccaaccaaacaaaacacacacacacacacacacacacacacacacacacacacacacacaaatacccaaagtgatataagactattctctgtgcatagaagagtattttgtgtgtatgtgatattacatatataaaaatatatcatggccgggcatggtggctcacatctgtaatcccagcactttgggaggctgaggtggatggatcatctgaggtcaggagttcgagaccagcctgaccaacatggagaaaccccatctctactctaaatacaaaaaattagctaggcttggtggcacatgcaagcaatcccagctacttgggaggctgaggcaggagaatcgcttgaacccaggaggcagaggttgccgtgagctgagatcgtgacattgcactccagcctgggcaacaagagtgaaactgtgtctcaaaaaacaaacaaacagaaaaaacaaaaaagaaagctccatatattgtattctcacaggaagtataattcctacgcatatgtgcttgctttggcaatacgcataaaaaaattgaaataacaaagattaccatgacccctgcacaaaggtgacactcaaattcataatggtaccatatttatctatttaattctttttacttttattttgtttatttatttacttatttttgatacagagtctcgcactgtcgcccaggctggagtgcaatggcccgatctcggctcactgcaacctccgcttcctgggttcacacgattctcctgcctcagcctcccaagtagctgggactacaggtgccagccaccatgcccagctacttttttgtatttttagtagagatggggtttcgccatgttggccaggctggtctcgaactcctgaccttgtgatttacccgccttgcctcccaaagtgctgggattacagacgtgagccaccctgtctgccctacttatttattttttgagacagaatctcgctctgtcgcccaggctagagtgcaatggtatgatttcgtctcactgcaatctcctcttcctgggttcaagaggttcttctgccacagccccccaagcagctaagattacaggtgtaattttgtatttttagtagagtcgaggttttgccttgttggcccagccagcctttaactcctgacctcaggtgatccacctgtctcggcctcccaaagggctgggattacaggcatgtgccaccacgctcggcctattttttatttttttgagatggagtctcact

SEQ ID NO: 1887699 - DNA, 4001 bp, Homo sapiens
aggagaatcgcttttacccaggaggcagaggttgtagtgagcagagatcctgacactgcactccagccagggccacagagcaagactctgacccaaaaaagagggccacttgaacccaagagatctaggttggagagggaccaccacactccagcctgggcaacagacaccctgtattaaaaacaaaacaaaacaaacatgaaacaccaacatcatccacgtctgattataagcattctctgcaaatttattaccaagataagcatcaacttcaacgttgcttttctcaaagagtaatcctctaaagagaagcgctttcttttcttttagacaagagaaagtgcttccctctagagggtcacagcatgagatcttcttgctccaacactctgggttttttgttggaattttccttcacccggttaaaatggacacaaaaacaaagatgcatttattggccctgtttgcatgttttctggaatccagaatataaacccctaaaaggaccatctccagttccttgcttcaaaggatcagcaggttagctttgttcatcaaagagcaatcctcctgagttttgttctcaaagagcaaaagcaatgcctcatagacatatgtaccttatatttaaccaagagaactgggctggatttctagagaagagaaatggatattgagccaggtgttcaccagagttccagcacagggacacacagtcccgatgggagcatccaaaatggaatctacgatgttaaagaatatacattgttgtacacacaaacatcctccagggtagatcacaggctaggccctaaaaactcctcaataaaatttgaacagaaacacacaactacaagtggggcacggtggctcacacctctaatcccagcacattaggaggctgaaactgaagtatcacctgagctcaggtgttcgagaccagtctcggcaacatggtgtaagcccatgtgtataaaaaatacaaaacggagccaggtgtggtggtgcatgcctgtagacactaattcagcaggcttaggtgggaggtagaagtcgcagtgagctgagagagatggcacaactgcactctagactgggtgacagagccagaccttatccaaaaacaaataaaacatacactcacacacacacaaacaaacaaaaaaaaccccaaagtgatataagagtattctcttcatgtagaagagtattttgcacgtatatggtattatatatataagaatatataatggccgggcggggtggctaatgcctgcaatcccagcactttcggaggccaaggcgggaagatcaccagaggtcgggagttcgagaccagcctgaccaacatggtgaaaccctgtctctactaaaaatacaaaaaattagccaggcgtgtggtgcatgcctgaaatcctagttagtcgggtggctgaggcaggagaatcacttgaaactgggaggcggaggttgaaataagcgaagatcgcaccactgcactccagcctggtgacagagtaagactccatctcaaaaaaaaaaaaaaaaaaaagaaaagaaaaaagaaagaaaaatgcaagtattagccaggcgtggtgtcaggtacctataatcccagatactcaggaatctgaggcaggagaacggcttgaaactgggaggtggaggtggcagtaagctgagatcacgccactgcactccagcctgggtcacagagtaagactctatcccaaaagagaggaccatttgagcccaagagagctaggttggaagtgccaccacattccagcctgggcaacagagatcctgtcttagaaaaaaaaaaaaaacagaaccccaccttcatccaagtctgatgataagcatgctctgcaaatgtattagcaagatcagcatcaacttcaatgctgcttttctcaaagggtaaccctctatagggaagcgcgttcttttctttcagacaacagaaagcgcttccctctagagggtcacagcatgagatcttcttgctccagcaccctgggttttttgtagcaattttccttgaccaggttaaaatgaacacaaaaataaagatgcatttactggccctgtttgcatgttttctggaatccagaatataaacccctgaaaggaccatctccagttccttgtttcaaaggctcagcaggttagccttgttcatcaaggggcaatcctcctgagttttgtctccaaagagaaaaagcaatgactactagacataccttatatttcaccaatagaatttggctggatttctagagaacagcaatggattttgagccaagcgttcacttgagttccagcacagggacacgcagtcctcacaggaacatccaaaatgaaatctaagatgttgaacaggcctggcgtggtggctcacgcctgtaatcccaatgctttgggaggctgaggcaggtggatcacctgagatcaggagttcaagaccagcctgactaacatggtgaaaccccatctccaccaaatacaaaaactgagccgggtgaggtggcgcatgtctgtaatcctaactactcaggaggctgaggcaggagaatcacttgaacccaggagggggaagttgcagtgagccgagattgcgccattgcactccagcctgggtgacagagtgagactctgatttaaaacaaaaaacaaaacagaaacccaccatcatccaagtcttaattataagcatgctctgcaaatatattaccaagatcagcatcaacttcaacgttgctttacccaaaccgtaacgctctaaagggaagcgccttcttttttttcacataagagaaagtgcatccctctggagagtcacagcttgagatcttcttgctccagcaccgtgggtttttggttgaaatcttccttcactgggttaaaatggacacaaaaataaagatgcatttattggccctgtttccatgttttctggaatccagaacataaacccctaaaacgaccatctccagttccttgcttcaaaggctcagcaggttagccttgttcatcaaggggcaatcctcctgagtttcgcctccagaaagaaaaagcagtgcctactacacataccttatatttaaccaagagaattgggctggatttctagagaacagcaatcaattttaaaccaagtattcacttgagttccaggacagggacactacaggacagaccacaggcgaggccttaaaagctcctcagtaaaatttgaacagcgggaggatcacttgatcgcaggagttaagagtccagcctgtggaacgtgctgaaacctcatcagtaccaaaaatacagaacttacccaggggtggtggtgcctgcctgtagacactaatccaggaggctgaggtggcaggtggaggttgcagtgagccaagatctcaccactgccctccagcctcagcgacatagccaggccctgtctcataaaaattaaaacaaaatacacaaacaaaaacaactccaaagtgatataagagtgttctctgtgtatagaagactattttgtgtgtatggaattatacacagaacattgtgatgaaatatactcatttttttttgagaccctgtataaaaaaaaaccaaagttccatatactatatgctcacataaagcataattcccacatattggtgctttgacagcacacacaaatgaatggggtgacagagatttccatagcccccgcacataggtgacacccaaattcataatgggtcccatattcaaaattaggaaaaaaggctgagtgcagtggctcatacctgtaatcccagcacttcgggaggcctacgtcggcaaatcacctgaggtcaggattcaagaatggcctggctaacatggtgaaactgtgtctaaaatacatatatatatatagctggtatgggggtacatgtctgcaatcccagctacttggaaggctgaggttgcagtgagctgagatcacaccactgcagtccagcctgggagac

SEQ ID NO: 1887700 - DNA, 4001 bp, Homo sapiens
cgatgggagcatccaaaatggagtctaagatgttgaagaatatacattgtcacacacacaaacatcctccaggatagaccacaggctagtggatcacctgaaagcgggagttcaagactagcctggccaacatggtgaaacccgtctctactaaaaacataaaaattagctgggtggggcagtaggtgcctgtaatcccaactacctgggaggctgaggcagaagcatcactcgaacccaggaggcggaggttgcagtgagcctagatcatgccagtgctctccaggatgggcagcaagagtgcaggacacgatggtgggtgcctgatgcctgaattcccaacaattcggcaggctgaggtgggagaatcactggaacccgagaggtggagtttccggtgagcagagatcctgctactgcactcccaacgaaacaagagtgtgtctcaaaaaatcaaaaaataaaaagaggaccacttaagcccaagaaatcttggtggaaggtgctatccacccacgcctgggcaatagaaagcctgtcttggaaaaatttcaaatcacaaacagaaccccgacatcatgcaagtctgatgataagcacgctctgcaaatgtattaccaagatcagcagcatcttcaacgttgcttgtctcaaacagtaacactctaaagggatgcacgatcttttcttttatacaacagacagtgcttccatctagagggtcactgcctgagatcttcttttttttgacacggagtctcactctgccgcccaggctggatgcggtggtgggatctcggctcatggcaacttctgcctcctgggttcaagcgattcttctgcgtcagcctcctgagtagctgggattagaggcacccaccaccatgcatattgcatatatgactgcatatatgacctggtcatgcacccaagatgttggtttcatttccccagtgaaaactcaaaccccatgcactccacctccgtgctcttgctgagcacatcccatctgcaagggacactgaggtccccctttgactctacctgaccccacatgaggctttataaatcagtgccagaataatttccatggactaaaaggtgttaatggccatgtgtggtggctcacgcctgtaatcttagcactttgggaggctgaggtgggcagatcacctgaggtcaggagttcgcaaccagcctggccaacatggtgaaaccccgcctctgctgaaaatataaaaattaggccaggcgtggtggctcatgcctgtaatcccagcactttgggaggcagaggccggtggctaacttgaggtcaggggtttgagaccagcctggcaaacatggtgaaatcccatctctactaaaaaaaaaacaaaaaacaaaaaacaaaaagtagccaggtgtggtggtgggctcccgtaattctagctactcaggaggctgaggtagaagaattgcttgaatccgggaggcagaggttgcactgagcagagatcacgcctcggccctccagcctgggtaacagtgagactccatctcaaaaacataaataaatgaattttaaaaaatgaaaatattatccaggtgtggtgatgggcacctgtaatctcacctacttgggaagctgaggcaggagactcgcttgaacctgggaggtggaggttgcagtgagccgagatcacaccactgcacttcagcctgggtgatagagagactctgtccgctaaaaaaaccatttgaatccaaaagacctaggttggatgtgccaccgcactccagcctgggcaacagagatcctgtcttagaataaaaaagcaaaaccaaaacagaaccccgccatcgtccaagcctcatgataagcatgctctacaaatgtattaccgagataagcatcaacttcaacgctgcttttctcaaaccgtaacactccaaagggaagcgccttcttttcctttggacaagagaaagtgcttccctttgtagggtcacagcatgagatcttcttgctccagaactctgggttttttgttggaattttccttgcccaggttaaaatggacacaaaaatgaggatgcatttattggccctgtttgcatgttttctggaatccagaacataaacccctaaaatgaccatctccagttccttgctacaaagaataagcaggttagccttatccctaatcccagcactttgggaggccgaggtgggcggatcaccttagttcaggagttcaaggccagcctgcccaatatggtgaaaccctgtctctactaaacgtacaaaaaaattagctggggtggtggtgtgtgcctgaaaatcccagttacccgggagttggggaaggagaatcactggaacccgggagacagaggctacagtaagccgagattgcgccactgtactgcagcctgggcgacagagcaagactgtttcaaaaaaaataaataaataaaaataaaaaaaatttagtgtcagggacaaggagattcaactaaaaagatacaaataaatagaaaaaataagaacattgtattaatattgacatccattgggattacagaatagactggatagatgtggaggcctatattttttgttttgttttgttttgagatggagcctcgctctgtcgcccaggctggagtgcacctgcgcgatcttggctcactgcaacctccgcctcctgggttgaagagattctgctgcctcagcctcctgagtagctgggattacaagcacgcaccaccacgcccacttaatctttgtatttttagtagagacggggtttcaccatattggtcaggctggtctcgaactcctgacctcctgatccgcctgcttcagtctcccaaagtgcttggattacacacctggcccttactctcctaatgaaggaaacatggtttggattgattaaactaaactgatgaaaggcctgtatttgaagtgaccaacccaaatggagcctcaggaaccagatggcatgtaatctgcgtttttaaagagatgggatcttgctatgtggcccaggccggagtgcagtggctattcaaaggtgtgatcagtgcatggtatagccttaaaatcaaaggaccctcccaccctagcctttgcagtaactgggaccctgtgtgtcccaggatgcctggccgtgtcacctatctttgaaatgggacaaggtggctcacacatttaggatcacttaagctcagctgagaccatcccaggcaaaagagaccccatctctaccaaaaattaaaacctgagcccaactacttgcgaggctgacaagaagaccacttgaggctggacgtggtggctcacgcctgtaatcccagcactttgggaggccagggaggtggatcacttaaggtcaggagtcgagaccagcctggccaacatggcgaaaccctttcttgtctaaaaatacaaaaattggcagggtgtgttggtgggtgcttgtaataccagctatttgcgaggctaaggtgaaagaatcactggaactccacggtgagtggagatcctgccactgcactccagcctgggcgacagaggtgggagttacagtgagtggagatcctgccactgcattccagcctgggcgacagagccagtctccatctcaaaataaaataaaataaataaaataaaacaaaataaaataacaggctgggcacggaggctcacacctgtaatcccagcactttgggaggccgaggcgggtggatcatgaggtcaggagtttgagaccatcctggccaacgtggtgaaacccggtctctactaaaaatacaaaaattagctcggcatggcggtgcgtgcctgtaatcccagctactcaggaggctgaggcaggagaatcgcttgaaccacggagtcggaggttgcagtgagctgagattccgccactggactccaacctggtgacagagcgagactccgtctcacacacacacaaaaataagaattaataataataatagagcaagac

SEQ ID NO: 1887701 - DNA, 4001 bp, Homo sapiens
acaagtggggcacggtggctcacacctctaatcccagcacattaggaggctgaaactgaagtatcacctgagctcaggtgttcgagaccagtctcggcaacatggtgtaagcccatgtgtataaaaaatacaaaacggagccaggtgtggtggtgcatgcctgtagacactaattcagcaggcttaggtgggaggtagaagtcgcagtgagctgagagagatggcacaactgcactctagactgggtgacagagccagaccttatccaaaaacaaataaaacatacactcacacacacacaaacaaacaaaaaaaaccccaaagtgatataagagtattctcttcatgtagaagagtattttgcacgtatatggtattatatatataagaatatataatggccgggcggggtggctaatgcctgcaatcccagcactttcggaggccaaggcgggaagatcaccagaggtcgggagttcgagaccagcctgaccaacatggtgaaaccctgtctctactaaaaatacaaaaaattagccaggcgtgtggtgcatgcctgaaatcctagttagtcgggtggctgaggcaggagaatcacttgaaactgggaggcggaggttgaaataagcgaagatcgcaccactgcactccagcctggtgacagagtaagactccatctcaaaaaaaaaaaaaaaaaaaagaaaagaaaaaagaaagaaaaatgcaagtattagccaggcgtggtgtcaggtacctataatcccagatactcaggaatctgaggcaggagaacggcttgaaactgggaggtggaggtggcagtaagctgagatcacgccactgcactccagcctgggtcacagagtaagactctatcccaaaagagaggaccatttgagcccaagagagctaggttggaagtgccaccacattccagcctgggcaacagagatcctgtcttagaaaaaaaaaaaaaacagaaccccaccttcatccaagtctgatgataagcatgctctgcaaatgtattagcaagatcagcatcaacttcaatgctgcttttctcaaagggtaaccctctatagggaagcgcgttcttttctttcagacaacagaaagcgcttccctctagagggtcacagcatgagatcttcttgctccagcaccctgggttttttgtagcaattttccttgaccaggttaaaatgaacacaaaaataaagatgcatttactggccctgtttgcatgttttctggaatccagaatataaacccctgaaaggaccatctccagttccttgtttcaaaggctcagcaggttagccttgttcatcaaggggcaatcctcctgagttttgtctccaaagagaaaaagcaatgactactagacataccttatatttcaccaatagaatttggctggatttctagagaacagcaatggattttgagccaagcgttcacttgagttccagcacagggacacgcagtcctcacaggaacatccaaaatgaaatctaagatgttgaacaggcctggcgtggtggctcacgcctgtaatcccaatgctttgggaggctgaggcaggtggatcacctgagatcaggagttcaagaccagcctgactaacatggtgaaaccccatctccaccaaatacaaaaactgagccgggtgaggtggcgcatgtctgtaatcctaactactcaggaggctgaggcaggagaatcacttgaacccaggagggggaagttgcagtgagccgagattgcgccattgcactccagcctgggtgacagagtgagactctgatttaaaacaaaaaacaaaacagaaacccaccatcatccaagtcttaattataagcatgctctgcaaatatattaccaagatcagcatcaacttcaacgttgctttacccaaaccgtaacgctctaaagggaagcgccttcttttttttcacataagagaaagtgcatccctctggagagtcacagcttgagatcttcttgctccagcaccgtgggtttttggttgaaatcttccttcactgggttaaaatggacacaaaaataaagatgcatttattggccctgtttccatgttttctggaatccagaacataaacccctaaaacgaccatctccagttccttgcttcaaaggctcagcaggttagccttgttcatcaaggggcaatcctcctgagtttcgcctccagaaagaaaaagcagtgcctactacacataccttatatttaaccaagagaattgggctggatttctagagaacagcaatcaattttaaaccaagtattcacttgagttccaggacagggacactacaggacagaccacaggcgaggccttaaaagctcctcagtaaaatttgaacagcgggaggatcacttgatcgcaggagttaagagtccagcctgtggaacgtgctgaaacctcatcagtaccaaaaatacagaacttacccaggggtggtggtgcctgcctgtagacactaatccaggaggctgaggtggcaggtggaggttgcagtgagccaagatctcaccactgccctccagcctcagcgacatagccaggccctgtctcataaaaattaaaacaaaatacacaaacaaaaacaactccaaagtgatataagagtgttctctgtgtatagaagactattttgtgtgtatggaattatacacagaacattgtgatgaaatatactcatttttttttgagaccctgtataaaaaaaaaccaaagttccatatactatatgctcacataaagcataattcccacatattggtgctttgacagcacacacaaatgaatggggtgacagagatttccatagcccccgcacataggtgacacccaaattcataatgggtcccatattcaaaattaggaaaaaaggctgagtgcagtggctcatacctgtaatcccagcacttcgggaggcctacgtcggcaaatcacctgaggtcaggattcaagaatggcctggctaacatggtgaaactgtgtctaaaatacatatatatatatagctggtatgggggtacatgtctgcaatcccagctacttggaaggctgaggttgcagtgagctgagatcacaccactgcagtccagcctgggagacacagagaggctctttctccaaaaaaaaaaaaaagagaattgcttgagtccaggaggcagaggttgcagtgagccaagatcacactaatgtactccatctcgggtgacagagcaagactgtctcaaatagtcaaagacagaaaaaaagaacaggtctcgctctcttcttgattgtgtatgggctcacttaaggtcaggagttggagactgggctggccaacatgttgaaaccctgtctctacaaaaaaaaaaaaaacgaacaaacaaaaaaaacacaaaaattagccgggcgtggtggtgtgcgcctgtgatcccagctactcgggaggatgaggcaggagaattgcttgaacgtgggattgtgccactgacctccagcctgatggacggagtaagactctgtttcaaaaatcgatgagtaaataaataaataataaaaatacaaaaattagctgggtatggtggctcatgtctgcgatctcagctactagggaggctgactcaggagagaatggcttgaatctgggaggtggagggtacagggagcgaagttcctgccactgcactccagcctgggtcacagagcaagactccatctcaaaaaagaggaccgctgggcacaatggcccacgcctgtaatcccagcactttgggaggctgaggtgggtggatcttgaggtcagtagtttgagaccagcctggccaacgtggtgaaaccctgtctctactaaaaatacaaaaattagctggaagtggtggcaggcacctgtagtcccagctacttgggaggctggggcagaagaattgcttgaactcaggaggtgagcttgcacacaagatcgcgccattgcac

SEQ ID NO: 1887702 - DNA, 4001 bp, Homo sapiens
aaaaaaagaatatgcattgtcttacacacaaacattctccaggatagagcactgcctaggccgtaaaagctcctcaataacatttgtacagaagtacgggtggagtgcagtggcttacacctctaatcccagcactttaggagtcgaaggcgggaaaattacatgagctcgagttcaaaactagcctgcccaacatagtaaaacctcatctgtaaaaatacaaaagatagccaggtgtagtggttcatgcctgtagacactaattcaggaggctgaggtgggaggtagaggctgcagtgagttgaggtcacaacactgcactccagcctgggcaatagagccagatggtgtctcaaaaaaaattaaaaaaaaaaaaaatacacaaacaaaaacaaccccaaagtgatataagagtattctctgtgtgcagaagactattttgtgtgaatataattatacatagaagattatatgataacatgtatatattttggagaccctgtctcaaaaaaacaaagttccatgtactatatgctcacataaagaataattcctacatactagtgcttgggcagcaagaacgaaactccatctcaaaaaaaaaaaaaagaaaaaatcaaaacaaaaacagaagcccaccatcatccatctctgatgataagcatgctctgaaaatgtattaccaagatcagcatcaacttcaatgttgcttttctcaaacggtaaccctctaaaaggaagcactttcttttctttcagacaacagaaagtgcttccctctagaggacgacagcctgagatcttcttgctctggcactgtggattttttgtgggaatcttccttgaccaggttaaaatggacgcaaaaataaagatgcatttatttgccctgtttgcatgttttctggaatccagagcataaatccctaaaaggaccatctgcagttctttgcttcaaagaatcagcaggttagccttgttcatcaacgggcaatcctcctgagttttgttcccaaagagaaaaggcaatgcctactacacataccttatctttaaccaagagaattgggctggatttctagagaatagcaatggattttgagccaagtggtcgcttgagttccagtacaggagcgcacagtcctcatgggggcatccgaaatggaatctaagatgttgaagaatatacactgttgtaggcacaaacatcctgcagggtagacaacaggctaccctgtaaacgctcctcaataaaatctgagcagaaacagacgagtataggtggggcacaacagctcacaccactaatcctagcactttaggaggccaaggtggaagatcacctgagctaaggagttcgagaccaacctgggcaacatggggaaaccacatctgtacaaaaaaaccaaaagttagccaggtgtggtggtgtatgcctgcagacagctattcaggaggctgagctgggagttggaggttgcagtgagccgagatcgcaccactgcactccagcctgggcgacagagtgagactctgtctctaaaatgaataagttaaaaaataaatacataacaataatacaaaaattagctgggcgtggtggcatatgcctgtaatcccagctgctcgggaggctgaggcaggagaatcatttgaacctgggaggcagaggttgcagtgagcaaagttcctgatactgagctccagccagggtcacagagcaagactctgtcccaaaaaagagggccacttgaacccaagagatctaggttggaggggccaccatactccagcctgggcaacagacaccctgtcttaggaaaaaaaaccaaaaaaaccccacaaaaccccaacatcatccaagtctgattataagcatgatctccaagatcagcattaacttcaatgttgtttttctcaaagagtaatcctctaaaaggaagcgctttctcttctttcaagcaacagaaagtgcttccctctagagggtcacagcctgagctcttcttgctccagcactgtgggttttttgttggaattttccttcaccaggttaaaatggacacaaaaatgaggatgcatttattggccctgtttgcatgttttctggaatccagaacataaaaccctaaaaggaccatctccagttccttgcttcaaagtctcagcaggttagcctagatcatcgagggacaatcctcctgagttctgtctccagaaaaagcattgcctactacacataccttacatttaaccaagagaattgggctggatttctagagaacagcaatggattttgagccaagcgttcacttgagttccagcacagggacacacagtcccgatgggagcattcaaaactgaatctcccatgttgaaaaatatacattgttggccgggcgcagtggcttatgcctgtaatcccaccactttgggtggctgaggcgggcggctcacatgaagtcaggggtttcagaccagcctggccaacatggtgaaaaaaaaaatacaaaagtaaccgggcgtggtgacgggtgcctgtgattccagctactcaggaggttgaggcagaagacttgcttgaacctgagaggcaaaggtttgagtgagccgaggtcctgccactgccctctggcctgagtgacagtgagactccatctcaaaacaaataaatacatgaataaataacatgcaaatattagccaggcatggtgtcaggcacctataatcccagctactcaggaatgtgaggcaggagaactgcctaaaactgggaggtggaggttgcagtgagctgagatcacgtcactacactccagcatgggtcacagagcaagactgtccgaaaaaagaggaccatttgagcccaagacacctaggttggaagtgccaacacactccagcctgggcaagagaccctatcttagaaaaacaacaacaacaaaacaggaccccaccatcctccatgtctgatggaagcacgctctgcgaagttattaccaagatcagcataacttgttgggaggccaaggtgggcgagtcacctgaggtcaggagttccagaccagcctcgccaacaaggtaaaatcccagctctaaaaatacaaaaaaaattttgccaagcgtggtgacacgtgtctgcaattgtacctacttgggagtcagaagttgcaggagcagagactgggccgctgcactccaccctgagggacagagtgagatactgactcaaaaaaaaaaaaaaaaaaaaattgcttgaacccaggaggcagaggttgcagtgagccgagatcacattattgcactccagcttgagtgacagagtgacactgcctcacaaagtcaaagacagaacaaaagaaccctccttgccctcttcttgcctgtgcatagattaaaatattcacctgtagtcccagatactaggaagaggagagggagagagcacattctaccctgggcggcatagcgagacctccgtttctaaaatacaaaaattaaatcaattgtacattgatgacgtgctcatgtgccctacatttcagcttcatttacccaatagaaactcaaagcccacgcactccacctttgtgctcttgctacgtagtgaacatcccacctgcaagggacactgaggttcccttcagctctacctcaacccaagtcaagggaggttctgtaaaccagtgcaggcataacttccacggagtaaaaggtgttgagggctggacgaacaggcatcgctcactacggcaacaacgagagctgcggcgcatcccacctgttactagagaggcccttctagggtcctcaaggtttttgtgaaaagtatctgtggttttgtcccatgtgacaattatcactgccactgagactcatcttgtctaccatagtttgtttctcatattagccacagccaacatttcacagcttaccaagcaactagcctttaaatgcgaggtaccttgggttcattacccgaagaaaatagcataatcagg

SEQ ID NO: 1887703 - DNA, 4001 bp, Homo sapiens
gttccagtccagcctgggaaacatggtaaaccctgtgtgtacaaaaaatacaaaagttagtcaggtgtggtggtgcatgcctgtattcagctctttaggaggctgaagtgggaggtgggaggtggaggttgcagggagccaattgcaccactgcactccagcatgggcaacagagccagatgttgtctcaaaaaaaaaaaaaaaaacaccccaaaatcccaaaaaacgcacgcaaacaaaaaaaccccaaagtgatatcagtattctctgtgtacagaagagtattttgtgtgtgtatgattatattatcaatatcagacattataataaaatgtatatgatatatttttgagacccggtgtcaaaaaaagaaagctctctatgttgtttgctcacaggaagaataattcctacacagaacagcatgcattaaaaaaattggaatgacagagattcccatgtcccctgtacacagtgacacccaaattcaccatgggtcccatatttaaaattaggaaatacagaccgggcgcataggctaacgcctataatcccagctctttgggaggctgaggcaggtggatcacctgaaatcaggagttcgagaccagcctgaccaacatggtgaaaacctgtctctaccaaatgcaaaaactgagctgggtgtggtggtgcatgcctgtaaccgcagctactttggagggtgaggcaggagaatcacttgaaccttggaggcagaggttgcagtcacccgagatcacatcattgcactcccgccaggcaacaaactgagactctgtcaaacaaacaaacaaacaaacaaacaaacaaaaaaacaaggtgtgatcagtgcatggaatagtctggaaatcaaaggaccctcccaccccgggatctgcggtggctgggactgtgtgccccatgatgcctggccatgtcaactatctttgaaaagggtcagcaggagaatgtggctcacgcctgtggaatccttgagctcaggtgttgagaccttcctgagcaacagagatcatatctgtatgaaaaattaaaaacttagccaagtgtggtggcacgccccatgtagtcccaactacatgggaggctgagtcaagaggaccacttgaggctgggcgaggtggctcacgcctgtaatcccagcactttgggaggccgagggggaggatcacttgaggtcaggagctgagaccagcctggccaacatggtgaaaccctgtctcttctaaaaatacaaaaattaggccagacgtcgtggttcatgcctgtaattccagcactttggaaggccgaggtgggtggctcacatgaggtcaggagtttgagaccagcctggccaacatggtgaaactccgtctctactaaaaaaaaatccaaaaagtagccaggcatggtggtgtgttcctgttgattccagctactcgggaggctgaggcagcagaattgcttgaacctgggaggcagacgttgtagagagccgagatcacgccactgcactccaccgtaggcaacagcgagacttcgtctcaaaaattaaaataaaaaaaagaataataaagaaaactacaaatactagctgggtgtggtggtgtgcgcctgtaatcccacctactcagaaaaccaaggcaggaaaatcacttgaacccgggaggcggaggttgcagtgagcagagttcctgccactgcactccagcctggatcacagagcaagactctgccccaaataagaggaccatttgagccctagagatctaggttgtaagtgccaccacaccctagcctgggcaacagacatcctgttgtagaaaacaacaacaaaaaacagaacaccaccatcagccaagtctgatgataaaagcatgctctgcaaatgtactaccaagatcaacatcaaactaaacgttgctcttctcaaagagtaaccctctgaaaggatgcatgttcttttctttcaacagaaagtgcttccctctagagggtcacagcacgagatcttcttacttcagcaccatggatatgttgttggaatcttccttagcctggtgaaaatagacacaaaaataaagatgcaattatttgtcctgctggtgtgtttcctgaatccaaaaacataaacccctcacaggatcatctccaggtcccatgcctcaaaggctcagcaggctagccttgttcatcaagaggaaatcctcctaagttttttctccggaaagaaaaatcaatgcctaccagacacaccttatctttaaccaagataactgggctaaatttctagacaagagcaatggattttaagccaagtgttcacttgagttcctatataggaacacatagtaccgatgggagcatccaaaatggaatctaagatgtctaagaatatacattgtcacacacacaaacattccccaggatagaccacaggctatgttgtaaaagcgcctcaatacggtcgctcatgcctgtaatcccagcactttgggaggccgaggcgggaggatcacaaggtcaggagatctagaccatcctggctaacaaggtgaaactccatctctactaaaaatacaaaaaaattagccgggcgtggtggtgggcgcctgtagtcccagctactcaggaggctgaggcaggagaatggcatgaacctgggaggcggagcttgcagtgagccaagatcgcgccactgcgctccagcctaggtaacagaccaagactccgtctcaaaaaaaaaaaaaaaatcgcctcaataaaatgtaagcagaaacacacaagtagggcgggacatagtgactcacactttaggaggccgaggtgggaggatcacttgagctcaggggttcaagaccagcctgggcaacatggtgaaacctcatctgtacaaaaaacacaaaagttggcgaggtgtggtggtgcatgcctgtagacaggtattcagaaggctgaggtgggaggtggaggttgcagtgagccgagatcacaccactgcactacagcctgggcaacagagtgagactctgtctcaacaatcaatcaatcaatcgataataaaatgcaaaaattagccaggtgtggtggcacatgcctataaccctgctcgggaggctgaggcaggagaattgcttgaacccaggaggcagaggtggcagtgagccaagttcctgccactgcactccagctagggtcacagcgcgagactctgtccgaaaaagagggctacttgttgagcccaagagatctaggttggaagtgccaccgcactcgagcctgggctacagacaccctgtcttagaaaaaaacaaaaccccaagatcatccaagtctgatgataagcatgctcttcaaatgtattaccaagatcagcatcaacttcaatgctgcttttctcaaagagtaaccctctgaaaggaagcactttctttcacaaaacacaaagtgcttcttacctccagatggtcacatcatgagatcttcttgctccagcactgtggattttttgttgtaattttctttgactaggttaaaatggacacaaaaataaagatgcatttattggccctgtttgcacattttctggaatccagaatataaacccttaaaaggaccatctccagttccttgcttcaaagtctcagcaggttagctttgttcatcaaggggcaatcctcctgagttttgtctccagaaagaaaaagcaatgcctactacgtgcaccttatatttaaccaagagaattgggctggatttctagaaaacagcaatgaacttagagccaagtgttcactcgagttccagtacagggacacacagtcccgatgggagcatccaacatcgagtctacgatgttgaagaatatacattgtcatgcacacaaacatcctccaggatggaccacaggcttggttataaaaactcctcaataaaatttgaacaggaacacacaaataccagtggggtgtggtggctcacacctctaatcccagcacttt

SEQ ID NO: 1887704 - DNA, 4001 bp, Homo sapiens
ctgggagacacagagaggctctttctccaaaaaaaaaaaaaagagaattgcttgagtccaggaggcagaggttgcagtgagccaagatcacactaatgtactccatctcgggtgacagagcaagactgtctcaaatagtcaaagacagaaaaaaagaacaggtctcgctctcttcttgattgtgtatgggctcacttaaggtcaggagttggagactgggctggccaacatgttgaaaccctgtctctacaaaaaaaaaaaaaacgaacaaacaaaaaaaacacaaaaattagccgggcgtggtggtgtgcgcctgtgatcccagctactcgggaggatgaggcaggagaattgcttgaacgtgggattgtgccactgacctccagcctgatggacggagtaagactctgtttcaaaaatcgatgagtaaataaataaataataaaaatacaaaaattagctgggtatggtggctcatgtctgcgatctcagctactagggaggctgactcaggagagaatggcttgaatctgggaggtggagggtacagggagcgaagttcctgccactgcactccagcctgggtcacagagcaagactccatctcaaaaaagaggaccgctgggcacaatggcccacgcctgtaatcccagcactttgggaggctgaggtgggtggatcttgaggtcagtagtttgagaccagcctggccaacgtggtgaaaccctgtctctactaaaaatacaaaaattagctggaagtggtggcaggcacctgtagtcccagctacttgggaggctggggcagaagaattgcttgaactcaggaggtgagcttgcacacaagatcgcgccattgcactctcgtctgggtcacagagcaagactccgcctcaaaaaaaaaaaaaaaaaaaagaggaccgtttgagcctaaaagatctacgttggaagtgctaccctactccagcctgggcaagagagactctgtcttagaaaaaaaaacaaaataaaaacagaatcccaccatcatccaagtctgatgataagcatgctctgcaaatgtattaccaagatcagcatcaacttcactgttgctttcctcaaacagtaaacctctaaaaggatgcactttcttttctttcagacaacagaaagcgcttccctctagagggtcacagcatgggatcttcttgctccagcaccctgggttttttgtagaaattttccttgaccaggttaaaatagagacaaaaataaagacctatttattggctctgtttgcatgttttctggaatccagaacatagacccctaaaaagaccatctcccgttccttcctacaaaggctcagcaggttagccttgttcatcaaggggaaatcctcctgagttttgtgtccagaaagaaaaagcaatgcctactatgcataccttatatttaaccaagagaattgggctggatttctagagaacagcagtggattttcagccaagtgttcacttgatttccagcacagggacacacagtcctgattagagcagtcaaaatggaatctaccatgttgaagaatatacattgttgcacacacaaacatcctccaggatagactacaagggaggccttaaaagctcctaaagaaaccctgtctctactaaaaatacaaaattagccaggcatggtggcgcagtcctataatcccagctacttgggaggctgaggcagaagaatcacttgaacccgggaggcggaggttgtggtgagccaagattgtgccactgcacttcagcctgggcaacagagacccagtcttagataaaaaaacaaaagaaaaacaaaaccccaacatcatccaagtctgattataagcgtgctctgcaaagatattacaaagatcagcatcaactacaacgttgcttttctcagacagtaagcctctaaaaggaagcactttctcttctttcagacaacagaaagtgcttccctcaagagggtcacagcctgacatcttcttgctctgatgccgtggattttttcctggaattttctttgaccaagttaaaatagacacaaaaataaagatgcatttattgaccctgtatgcatgttttatggaatccagaatataaaactctataaggaccatctccagttccttgcttcaaagaatcagcaggttagccttgttcatcaaggggcaatcctcctgagttttgtccccaaagagaaaaagcaatgcctactacacgtacctttaaccgagaaaattgggcaggatttctggagaacagcaatggattttaagccaagtgttcactcgagttccagtacaggacccacagtcacgaagggagcatccaaaatggagtctacgatgttgaagaatatacactgtcatatgcacaaacactctccagagtagatcacaggctaggatgtaaaaactactcaataaaatttgagcagaaatacacaagtacaagtggggcccagtggctcagacctctaactcctcgaactttaggaggcccaggcaggaggatcacctgcctcaggagctcgagaccagccccggcaacatggcgagaccccatgtgtacaaaaattacagaagttagccaggtgtggtggtgcatgcctgtagagactaattcagcaggcttaggtgggaggtggaggttgcagtaagccgagattgcaccaccacactccatcttgggtgacagaggcagatattgtctcagaaaagaaccacacacacacgcacacacacgcacacgcacacacaccctaggtgatatcggagtattctctgtgtttagaagagtattttgtgtgtacataatatataagaatataaaatgaaatatacatcatgtatttttgagaccctgtctcaaagaaagttccaaatattgcatgcttataggaagaataattcctatacataactgcttgctttggaagtacacataaaaaaatttaaatgacatagaatatcctggccactgcacaaaggcgacacccaagtccatgctggtcccatattcacctaattatttttatttttatttatttatttatttagagacagagtctcacactgttgcccaggcaggagtgtaacggtgtgatctctgctcgctgtaacctccgcctcccagattcatgtgattctcctgcctcagcctcccgagtagctgggattacaggtgagtgccaccacacccggctaatttttgtatttttagtagagacggggtttcaccatgctggccagactggtctcgaacaactgacctcaggtgatcctcctgtctcagcctcccaaagtgctagaattactggtggaagtcaccatacccagactagtcccatatttaaaattaggaaaaagcaaaagatgcccacacctcaacagcaatgttcgagtacatctcaaatacattgcacatcccatctgcaagggacgctgaggtccccttcaattctacgtgaacccacgtgaggttctataaaccagtgcccgaataatttctacgtaggaaaagttgttgatagccgggcgtgttggctcacacctgtattcacagcactttgtgaggctgaggcaggtggaccaactgaggtcaggagttccagaccaacctggccaacatggcaaaaccctgtctctattaaaaatacaaaaattagccgggcgtggtggtgcacggttgtagtcctagcgacacgtgaggctgaggcaagagaatcgcttgaacccgggaggcagtggttgcagtgagctgagatcacaccattgcactccagcctgggtgacagagcgagactctgtctcaaaaaaaaataataataataaaataaataaataaataaataaataaataaaaggtgttgaggactggaagaacatgcatcgctcactatggcaacaagaagagctgctgtgcattccacctgttacgagggagccccttctagggtcctcaagatttttgtgaa

SEQ ID NO: 1887705 - DNA, 4001 bp, Homo sapiens
agcctgggtgacagagcgagatcccatctcaaaaaaaaaaaaaaaaaaaaaaaggccgggtgcagtggctcacacctgtaatcccagcactttgggaggctgaggcagggagatcacgaggtcaggagatcaagaccatcctggctaatacggtgaaaccccgtctctactaaaaatacaaaaaattagccaggcgcggtggtgggcacctgtaatcccagttacttgggaggatgaggcaggagaatcgcttgaacccgggaggggtaggatgcagtgaaccgagatcgtgccattgcactccaggctgggtgacagagcgagaccccatctcaaaaaaacaaaacaaaaaaacaaaaaagctgggtgcggtggctcaagcctgtaatcccagcactttgggaggccaaggcaggcagatcacgagctcaggagatcaagaccatcctggctaatccagtgaaaccccgtcttcactaaaaatacaaaaaattagccaggcgtggtggcgggtgcctgtagtgccagctacttgggaggctgaggcagaaaaatatcatgaactggggaggcggagcttgcagtgagccaagatcgtgccactgcactccagcctgggtgacagagccagactccatctcaaaaaaaaaaaaaaaaaaagaaaagaaaagaaatacacaagtttgggtgagggacagtggccgagacaggagcatcacttgagctcagtagctggagaccagcttgggcaatatggtgaagccctgtctgtaaaaaaactacaaaagttaggtggccaggtgcaatgtctctcacctgtaatcctagcactttgggaggtcgaggcaggtggatcacttgaggtcaggagttcaagaccagcctgagaaagaaggtgaaacccatctctactaaaaatacaaaattagccaggtgtggtggtgcatgcctgtaatcccagctacttgggaggctgaggcaggagaattgcttgaagccgggagtcagaggttgcagtgagctgaaatcaccccattgcactccagcctgagcgacaaaagcaaaattccttctcagaaaaaaaagtgagccaggtgtggtggtgcatgcctgtagacactaattcaggggactttaggtgggaggtggaggttgcagtgagctgagcttgcaatactacactttagcctgagcaacagagccagacgttgtctcaaaaacaaagaaacaaacacaaaacaaacacacaaacaaaaaaacccaaagcgatataagaatactcttcgtgtgcagaagagtattttgtgtgtatatgattatatatataagaatatatgacaaaatatatatcatactagccaacatggtgaaatccagtctgtattaaaaatgaaatataaaaagtagccaggtgtggtggtgtacttctgtaattccagctactcaggaggctaaggcagaagcattacttgaaccagggaagcgcaggtggcagcgagccgagatcgtgccactgccctccagtctgggtgacagtgagactccatcttaaaaataaataaatacatgaataaaaccaaatattatccaggtgtggggatgggcacctgtaaatctcagctacttgggaggccgaagcaggagaattgcttgaacctgggaggcggaggttgtagtgagccaagatgggatcactgcactccagcctcggtgatagagagactctgcccccaaaaaggaccatttgaatccaagagacctaggtgggatgtgccaccgcactccagcatgggcaacacagaccctgtcttagaataaaaaagcaaaaccaaaacagaaccccaccaccgtccaagtgtgataagcatgctctgcaaatgtattaccgagatcagcatcaacttcaacgttgcttttctcaaaccgtaattcaccaaagggaagcactttcttttcttttagacaacagaaagggcttccctttgcagtcacagcttgagatcttcttgctccggcactctgggtttcttgttgaaattttccttgaccaggtcaaaacggacacaaaaataaagatgcatgtattggccctgtttgcatgttttctggaatccagaacataaacccctaaaaggaccatctccagttccttgcttcaaagaatctgcaagttagccttgttcaccaaggggcaatcctcctgagttttgtctctaaagggaaaaagcaatgcctactacacataccttatctttaccgagaactgagctggatgtctagagaaaagcgacggattttgaaccaagtgttcacctgagttccagtacagggacacagtcctgatgggagcatccaaaatggaatctaaattagccaggcatggtggtgcatgcctgtaatcctagcttctcaggaggctgaggcaggagaattggttgaaccaaggaggaggaggttgcagtaagccacgatcgcgccactgcactccagcctgggagacacagcaagactccgtctcaacaataaataaataaataaacaaataaataaaaatacaaaaattagctgggtgtggtggctcacaccggtaatcccagctgctcaggaggctgagtcaggagaatggcttgaacctaggaggcggaggttgcagtgaggagagtttctgccactgccctccagcctgggtcacaaagcaagactgaaccaaaaaaaaggaccactcgagcccaagagatctatgttaaaaatgccaccgcactccagcctgggcaacagacaccctgtggtagagaaaaacaggccgggcgcagtggctcacagttgtaatcccagcactttgggagatcgacgtgggtggattacctgaggtcaggagttcgagaccagcctggccaacatggtgcaaaccctgtctctactaaaaatacaaataattagccgggcatggtggcacaggcctgtaatcccagctactcaggaggctgaggcaggagaattgcttgagcctgggagatggaggttgcagtgagccgagatcacgccactgcgctccagcctgggccacagagcaagactcagtctcaaaaacaataacaaggctggacgcggtggctcacgcctgtaatcccagcactttgggaggctgaggcgggtggatcacgaggtcaggagatcgagaccatcctggctaacacggtgaaaccccgtctctactaaaaatacaaagaattagccgggtgtgctggcgggcacctgtagtcccagctacacaggaggctgaggcaggagaatggcgtgaacccgggaggcagaacttgcagtgagccgagatagcgccactgcactccagcctgggcgaaagagcaagactcggcctcaaaaaaaaaaaaaacaaaaaacaaaaaacagaaaaaccccaaaactaaacaaaacaaaacaaaaaaaaactcagaagcccaacatcatccaagtctgattataagcattcgctgcaaatttattaccaagatcagcatcagcttcaatgttgcttttctcaaacagtaacactctaaaaggatgcactttcctttctttcagacaacagaaagcgcttccctctagagtgtcacagcctgaggtcttcttgctccggcactgtggattttttgttggaatcttccttgacgaggttaaaatagacacaaaaataaagatgcatttatttgtccggtttgtgtgttttctagaatccagaacataaacccctaaaaggaccatctccagttccttccctcaaagaatcaacaggttagctttgttcatcaaggggcaatcctcctgagttttgttcccaaagagaaaaagcaatgcttactactcataccttacctttaaccaagagaattaggctggatttctagagaacagcaatggattttgagccaagtgttcacttgagttccagtacagggacacacagtcccaatgagggcatccaaaatggaatctacgatgtt

SEQ ID NO: 1887706 - DNA, 4001 bp, Homo sapiens
caggctgcagtgcagtggcacaatcttggctcactgcaacctctacctcctgggttcaagcgatcctcccacctcagccttcctagtaactgggacaacaggcatgtgccaccactcctggctatttttttttttttttgagacagagtctcactctgtcacccaggctagagtgcagtgacacaatctcggctcactgcaacctccgcctcctgggttcaagcgattctcccacctcagtagtccctgagtacctgggactacaggcatgcaccaacatgcctggctatttttgtctttttagtagagacagggttttgccatgttggccaggctggtcttgaactcctgacctcaggcgatccacccacctcaacctcccaaagtgctgggattacaggtgtgagccaccatgcccagccagcttggctaattttttttttttttttggtagagaaggggttttgccatgttgtccaggctggtctagaactcctggcctcaagtgatcctcctgccttggtctcccaaagcactgggattacagatgtgagccatagcacctggtgcttgtttctctgtactcaatctttgtgtccctggtcttctggcagagctgggaggaagggggctcaccgagcctggatgtcaacgcccagagcctcatccttgaggtaaaagaaagtcttatttgggaccagctggacctcaaaagatgggaggactgggagaaaaaaaaaagccatggtcaccctcagtattctacctgctccctcgtcccctcccagtcctgctccttccttggtggctctgtcaagcccgaagggctgcaacaccagcacccaacacttagcatccagctcaggccctgggttacagcagaggttccccttgagacctcctttctattccaagtcctgtccctggcgtattcatcttgctcaccccacccacacctttctcaccatattccttcacatcaaaggcagcctcgaacttctgcttgggtgtactttggtagctggcttcgatggtccaggtccccaaactgaggcacagaaagttaagagagatggagacagagaatgacagcctcctttgccacccctcgggctcccagacctgacaagggcacctgacaagctctgggaggtgaaaggagctgaaaaagaagccatccttggccatcagactctggctaatcacggtgattccctttgggttctgtggggatagggggtggggctggtgactgccctctgggagggccctggtggctcatgcccccaggacttcagcacaccatgtaaccccagtgtccaggatccaccaccaccccccacccctcatcgggaaagaccaccttgatgtccagagtgaatgtcctggtcacagggtccatcttgtggttcacagtgaacacccggtagtgaactaggggagaaggaggactctgagtattgggtagaggaagggaaagagagagagagagtttgcatcttgggcagtggcggggtggggggcacttatgcatagagagagatcttgggaggtggagaagattttaggggatgggagtatctcagacattgggagagacgggatgagagccagtgattgccccgagccaagtgcctcggggctgtacccaagtactcaggggtgtagatggtcttctccgtctggataaagatgtagccagcatgaagagccaccagcaccatcttctccatgaatgaggagcccgaggtgggtgcccaagttgcccggatgatgacatattgctgccctggttttgggaggtacatcaggctctcgggaacctgagagagatatatatccatactcctcaggctctgctggggtctccctggctgggggtaaagccctgggacagatcctgggaggagcaattgactgagggtcttctgactctgcctttgggagctaggttgccatgtgcagttgtgtaggttgctcactgcacaagagcacccagccaaaggaaggacgaaatcaagtccatgctcatcttcccaagctaccaacagaaggcaccttttatagttctcagagaggcatcaaatgggctagtggaggcttcctggagcccaggcttagggacttttggcttctaaatgcacaggatattagaggagtggtaagtactttgggccctttatctactctctggacagaaagtctgcccctttctacctttattgctgacctgtagcctccctttggggtcacacattccagcctgtcacccaccgtcacaggtgcctggtccataaagttgtttcctggtgagagaatgagctggctccttgccaacactgtcttcctcatggggaagtcccacactgtgaggttcaccttgagggtccttgtgaggggctgtctggagtctgagtgggcctgaatgtgaatgctctccggactgccaaccctcagaactcggggggtcaccaggatgtacctgccagtagactaacacaagggcattaagggacttgagtagggaaaatgacaccgaacacgagtcataagctggaatcacgcagacatcagatgtgcaggaagccggctgagccccctccattccccagactcacagaggctcagcgtggatgagggggcttcccaaaagaagcagaatccaccctaggggccagggcatttccatggtgggtgggagggtgacaggaggccacaggctgcagatgtctgtcctcttgtctgtcctcttgtctgccctggccctggcctgtttgccttgacttgtagtggctgagttaatatctaaacaggtgtggggcaagaatccctataaatccaatggggcggagttgggggtgtttcttacttcccagccaagcctccaagatatgcttgagaagtgccccatccgcttccttgggggccagagtggtaggagaactgcctgtcccatgagccatgagggtcttatccacgcccctctcccctttttttctgagacagagtctggctctgtcacccaggctggagtgcaatggcacaatgtcagctcactgtaacctctgtctcccacgttcaagtaattctcatgcctcagtctcccaagtagcggggattacacgcatgggccagcaagctcattttgtacttagtacaaaaatactaatttttgtatttttaatagagacagggtttcaccacgttggccaggctggtctcgaactcctgacctcaagtgatccacccgcctcaacctcccaaagtgctgggattacgggcatgagccactgtgcctggccatgaaggtcatatcctaaagccttcccctccgccagcaaggagctttgcacacccaggacactgaactcagggcttgcttgggattggctggcaggaggagagcaaacatctttctaccctagcctggatggattttccctacttttgcctttgtgaaattggcaaaacagggcagctgcacaaacaggggaggtgctggcattttttccctatttcccaattccgggagtgagcagcatgtggcatttgaccatctgactccaggatccaccataacgaaacctcctgagaaatccataggtcaaagtcctcttcttgggcttcaaatccttgcgctatatggatttcgtcatccttgcaggagacagttatgcttagtaaattgtgaccattgtctattgtttcctaagtcatgccagagtctctgggttccttttccagaaggcaaattatacatattaaaccagggaaggaaacacatcatgcttgaagcattcctggaaaaaggctttctctgtcctcaaataattctcaatgtttagcaggcttattaaagagaatgttgagacggctttgtggtgtctgcctctaagaagcagttgggcttgatgatgagtctgtttgaatctgcaccctacagtgatgtcaattcagccagcttgggaaattttgcctattgaagggtccctgatcccccc

SEQ ID NO: 1887707 - DNA, 4001 bp, Homo sapiens
ttctttagggtagaaagaggctaagggataggggttaaacagccattccggggcagcctagatctcaccaagtgtgggaaagagaaggaaaacgaaagaggcgaaaaagaaactgagctatgtgggggcagggggaagtccagcagtgcagtggccttgctggaggaaggtcccagcagaagctgggggcgtcccgtccttggagggtccctgtgacccctaaatgccccctcccttcttccccttgcttgaatggctcccctccccctccccaggctcaagggagattccggaggcctgtgagtctggcaggcacactgccaggcctgtgtctcccgcccaggctaataactgcagctgacatctggctgggccccgcgggggcgcagcgggcagcgttggggggttgggcagggcagggcaggccagagggcagcaccttgggaagctaacttgcaggtcccaaaagccaggaggccacagtaattcagccctggccagggctgaggctggccatgccagagggagtcctagagagaggtgaggccatcccagacagagtccatcccaggaggagggcaaggaacagtgggtgtatgggggcaggggcgcagggcagggagagatgcccagagagacaaatgggttcaaggttagtgtcacgcagacagtgagactcagaaacacttaagatagataggctgagaaataataattattattttaatagccaacacttacatggctcttactgtgggctaggcactcttctaagtggttaacataaaataagtcatcgactgcttccaacaatccagcaaaatgcatgttatttgtatccccatgtaacagatgagaaactgagccacaggagattaaggaacttgtctggtgtccaacagctagaagcactagagttgagatataatccaagctgtctggcttcagagcattagccactgtgttgtgaataatgacaaccagagaagcatgtatgcagtaccagctgcaggccgtctcatgaagggcctctttttttggtgttttgtttgtttgtttgtttgtttgttttttgagatggagtcttgctctgtcgcccaggctggagtgcaatggcatgatgttggctcactgcaacctccgcctcctgggttcaagcgattctcctgcctcagcctcctgagtagctgggattacaggcgcatgccaccatgcccagctaatttttgtatttttagtacagacggggtttcaccatattggtcaggctggtctcgaactcctgaccttgtgatcagcccgcctgagtctcccaaagtactgagattacaggcgtgggccaccatgcccggccctttttttgtttttttaaagagaacctcactttggccaaacacagtggctcacgtctataatctcagcactttgggaggccgagggggaggatcacttgagcccaggagtttttttttattgtttgttttgttttgtttttttgagacaaaatatcactctgtcgcccagggtggagtgcagtggcacaatatcagctcactacaacctccacctcccaggttcaagctattcttctgcctcagcctcccgaatagttgggattacaggcgcatgccaccacgccaggctaattttttgtatttttagtagagatggggtttcaccatgttggccaagccggtctcgaactcctgacctgaagttatctgcccgcctcagcctcccaaagtgctgggattacaggcatgatctacctcgcccagccctagcccagaaatttttgagaccagcctggggaacacagcaagacccccatctctacaaaaaaatttaaaaattagctgaggtcaggagggtgtgcctgtagttccagctactccgaaggctgaggcaggaggatcacatgagccatgatcttgacactggactccagcctgggcaacaaaacaagaccatctcactctgttgctcaggctagagttcagctacacaatcatagctcgctgcagccctgaactcctgggtaaaagcgatcctcctgcctcagcctccagagtaactgggactacaagcacaccacaactgctaagttttatttttttatattttattgagacagggtctcattctgttgcctaggctggtctggaagtcctggccctaagggatcctcccacctgggcctcccaaagtgctgggattacaggtgtgagccaccgcaccccactgagggtctcctttaattgggggagaaatgtggtggggcacagacagaggggcacgggtctctgtggacaggccagcatgtgggagtagggttcctccaaacactctgcatgggtgtttgagcacggggtggagattgggccagacagggagggcgggggcccagccaagctggtacagccggttccaggcctctgccagtgtcacccttgtggcctgggcaccaccccctcaagccgccccactggcgccaggccggccccacgaggagggtgggagaacagccccctcccccaactggcctgagcgtccagactggcagctgggtactgcccaggccctgggctccagaccagcacctggctaagaagtccctgcgcaggcttccccagtgccccagggcctggggcctagggcacaggataaggaggaagttcacccacccccacccacaagtgtcttcggggcttttggtcttggcacgagggacttctccttcttataaatagcccggtgacccccctccctgctggccccactgaccagtggggccctcactaggaaactgggctgggggctgcctgtgagtcagccagtgggcaggccagggcgagaacccacaaatcgcagcacacagcacccagcctccctcccgtgtccctgcccctgggtgtggatctgaggcccggcaggagccctcccccaggaactcctggcctaccagccgcctccctctcccacctctgtggtttgggggtcctttgccccctctcctggagaggaagctgctaggttttcttggaagcaggaaggagagtctctctctttctctctctccaggctgacatggttgggcatgaggggagtttctcaggaagctgcttccatccctgccactgctggtgaagccttgggggacctgggcatcaccaagaccctgggtgacctctttatagcaggcccccaccccagcaggagcagaggctgctgagctaggcctcctaggggaagtggcaaaagcaaagagggagggaagtgggggtgatgtttggagagaggaagtgccaggatctctgtggggcagagacagactggggtgtccagtgcccccacagaaccttggcaaggtccagggggcaagcgtgtgactggcctatagggtgcatgtgagagtgtgtgctggtccaaccctgacacccaggcctgagagacaggagtagccctctgcccgcttctgtgcccagccctggatgcaaaggtctatgtagggcttatctgtgtagagttctgttccactctgtgtgtgtgtgagctctataggatgggttgcacatggtctagatgtatgtacgtgtaggttgtttcaaagttcctatggctaacttgtgtcggtgtgtatgtgtgtttgtgtgtgtggtctgtggctggtctgtatgtgtgtatatgatctgtttgtgtgtgtgtaaaagaggtctgtggctggtctgtgtgtatacgatctgtaatgtgcatttgtgtgtgtgtgaaaaagaggtctgtggctggtctgtatgtatgtgtgtatacgatctggtgtgtgtgtgtgtgtgtgaaaaagaggtctgtggctggtttgtgtttggtgtgtgtgtgtggtctctgtgtgtgaggtctgtggcttgtttccatgtgtgtgttctgtggctgatctgtatgttgcctgttactgatctccgtttgtatgtgtgcatgtgtgtgtgtgcaaacaggttttgtcatgg

SEQ ID NO: 1887708 - DNA, 4001 bp, Homo sapiens
cgatcgagaccatcctggctaacagggtgaaaccccgtctctactaaaaatacaaaaaaaaaaaaaaaaagtatgggtactgagccaggcacagtggctcacttctgtaatcccagaacttttgggaggccaaggtgggtgggtcacttgaggtcaggaattcaggagcagcctggccaacgtggtgaaaccccatctctactaaaaataaaaaaattagggctgggtgcggtggctcatgcctgtaatcccagcactttgggaggctgaggcgtgtggatcatgaggtcaagagattgagaccatcctggccaacatggtgaaaccctgtctactaaaaatacaaaaaattagccgggcgtggtggcgggtgcctgtagtcccagctactcaggaggctgaggcaggagaatggtgtgaacctgggaggcggagcttgcagtgagcggagatcgcaccactgcactccagcctgggcaatagagcaagactccgtctcaaaaaaaaaaaaaaaaaaattaggctgggcgtggtggctcacgcctgtaattccaacactttgggaagctgaggcaggcagatcacttgaggtcaggagttcgagagcagcctggccaacgtggtgaaaacccgtctctactaaaaatacaaaaaaaaagctgggcgtggtggtgagcacctgtagtcccagctacccgggaggctgaggcacgagaatcgtttgaaccaggaggtggaggttgcagtgagccaagattgtgccactgcactacagcctgggtgacagaagaagactctgttccaaaaaaaaaaacaaaaaacaaaaattagcaggcatgatggcaggcacctgtagtcccagctatctgggaggctgaggtgggagaatcacttgaacccaggaggtggaggttgtagggagctgagatcacaccactgcactccagtctgggccacagagtgagacctgtcccccaaaaacagaaaacaaaaattagctcagcatagtggctcatgcctgtaatcccaggtactccagagactgaggttgatcacttgagcctgggaggtcgaggctgcaatgagccgtgattacaccactgcactccagcctgggcaacagagtgagaccctgtcgttaaatacatatttatgtgtctaaataaacacaagtaccctggaatcttgccatttccatcaaatctgaactttggctgtgtaggggtgaagagaaagcttccttattgccctctgaagtttcactaaaaattactgagaaaaggcagattaataagagaaaaggaatacgaatgtatttgatcatagtgttacctgacaagccttcagaatgaagatccagagatacaggggaaactgtgtttttgttttgttttgttttgagacggagtctggctctgttccctgggctggagtgtaggggcgatcttggctcacagcagcctcagcttcccaagcagctgggattacaggtgcccgccaccatgcctgattaatgaaaagtgtcttatgcttaggttcagcaaagtttgaacacccaggtagaaatttgattggacaaaaagggtttgtcgtggttcatacttgtaatcctgacactttgggaggctgaggcgggtggatcacttgaggccaggagtttgagaccagcctgagcaacatggaaaaaccccatctctactaaaaatacaaaaattagctgggcatggtgcatctgtaatcccagctacttggttggctgagaatcgcttgaacctgggaggccaaggttgcagcgagttgagatcttgccactgcactccagtgttgcctggacaacagagcaagacaaaaaaaaaaaaaaaaaaaaaaagccgggggggtcgtctaatactaataggctgagtggggaaacccagcaaggcctatctgtctagattcttcttggagtctcaggaatgcatgctcagagaggccaagaagaatctagatagataggccttgtgtggggcagaaacttctttgaaacgggggtcttatgacctacagtcaatagggtagatcagataatttcttctttttttgagacagcactttgggagaccaagacgggaggacggcttgagcccaggagttggggatcagcctgggctcagcacagtgagatctcatttctacaggaaaaaaaaatataattatgtgtgtgtgtgtgtgtgtgtgtgtgtgtatatatacatacaatcttttttttttttttgagacggagctttactctgtcaccccggctggagtgcagtggcatgatctcagctcactgcaacctctgcgtcctgggtttaagcaattctcctgccccagcctcccgagtagctgggactataggcgcccgccaccacgcccggctattttttgtatttttagtagagacagtttcaccatgttggctaggctggtctcgaactcatgacctcaggtgatccacccgcctcggcctcccaaagtgctgggattacaggcgtgagccaccgcgcccggccagaaaaatatttttaaattagaagggcctggtgaatgacactgctactcaggaggccgaggcaggaggatcgcttgaacctgggaggtcgaggctacagtgagctgtgatcgcaccactgcactccagcctgggcgacagaccaagatcttgtctcaaaaaaaaaaaaaaattgttatggagtatattttccaaggcagagtggatgaagttagaagcaccgaataaatacaggactctgagatccgtataacctgggcgccccgtggaacccaggagcctcacaggggcacacaagcgcacccagagcgcgccgtcctgctcccaaggggcgccgactgcgcgcgcagcccgcggaccgcgaaactgctgcttaacggtcggccccgcccagttggccgcgcaagttctcaaagagggcggggccgggagcacgcgtcacaacacactcgtccgcgggagcgcagctggccaggggcggggtcggcgcatgcgcagagggtgcgagcttgaaggcgggaaaatacggaatggagcgacagggagtacgcggcgcttgtttccttctcgcgcgtggggcgggcggacagataggcagggaacggctgcgatcccagccatctccagcggacccgagcccggccgcttgtcctttgccattggggctccctctcatcaggcctggcctcaaatttcctgactgactgaacccggccctgactgacgcactgacgggtctgatttccacacatggcgcgtggccggaacggagtagagaaaggcacaaacacccacgcaccgcacccgtttctttcatttctttttttttttttttttgagacgaagtatcactctgtcgcccagtctggagtgcagtggcgtgatctcggctcactgcaacctctgcctcccgggttcaagtgattctccttcctcagcctcccgagtagctgggattacaggcacgcaccaccacgtcagctaatttttgtatttttagtagagacggggtttcaccatattgctcaggctgttctcgcactcctgacctcgtgatccgcccgcctccgcctcccaaagtgctgggattacaggcgtgagccaccgcgcccggcctcatctcttttctcctacctcttctcctttctcgaaggactccagccaacacacataccagttaggagcccaggtcctccagttacattcccacagccctgccctcacccggcccctctaggtctggtgtcctggtgtcccctagggacagagtgtcctttcaccccatgcccctgccctcatggcacctgccccagccctgcccgtctttcctgcgggtccccaccgtcccgcagcagcacatcgaggtgaccagggttgaagggtcggcaggagggcgatctgttcactcctcatcctccctccttggcctccgtcctgactgtgcttgcaggtggacgtgccccatgtg

SEQ ID NO: 1887709 - DNA, 4001 bp, Homo sapiens
aataataataataataaataaaaataattagccgggcgtgatagtgcacacctgtagtcccagctactcagaaggctgaggtaggaggatcacaggagcatgggaggcaaaggttgcagtgagccgagattgtgccactgcactccagcctgggcgacagagtgagactgtcttaaaataaataaataaacaaacaaacaaacacataaaaaataaaattacacatatggatccagcaatcccacttctgggtgtatattgcaaataaattgacatcaagatgtcagggccaggtgcggtgactcacgcctataaatccagcagtttgggaggccgaagcaggaggatggcttgagcccaggagttggagactaatctgggcaatgtagtgagatgccatctctacaaaaagcacaataataaaaataaaaaaaatcagatgagaggccgggcacagtggctcacgcctgtaatcccagcactttgggagacggaggcgggtggatcacgaggtcaggagatcgacaccatcctggctgacacggtgaaatcccatctctactaaaaatacaaaaaaaatttagctgggcgtggtctcacacgcctgtagtcccagctactcgggaggcggaggcaggagaatcacttgaacccaggaggcagaggttgcagtgagccgagattgtgccactgcactccagcctgggcagcagagcgagactccgtctcaaaaaaaaaaaaaatcagatgagaacacgtagtgacaaaaaataaaaaataatatttacaaatttaaaaaatttaaactctattttagcaactttgaaatacacaatacattagtattaactgtggttaccatgctgtgcaatagatcactgaaatatatttctccagtctcgctgaaactttgcaccctttgatcaacatcttctcttttcccaaccctctcccacttccctggactctagtagccacctttatactgtttctatgagctcgactttttaagattccatataaaagtgggatcatgtggtgtttgtctttctgtgtctggtttatttcacttagaataatgtcctccagttccatccatgttgtcttgaatggcagaatttcctcccttttcaaggctgtatagtattccatcgtgtgtatatgcaacatttgctttatccattatgtcccttgatggacacttaggttgactccatatcttggctattgtgaccagtgctgcaatgaacttgagagtgtagataacccttcgacatcctgatttcaattcctttggaaatataaccagaggtatatgagtctgctagatccatatgtacgattttatttttacttattatatatatatatacacacacacatatatattttctttttcttttttgagatgaagtcttgctcctgtcgcccaggccgaagtgcagtggcgtgatcaaggctcactgcaacctctgcctcctgggttcaagcgattctcctccctcagcctcctgagtagctgggattacgggcgtgtgtcacaacgcctggctaattttgtatttttagtggagatggggtttcaccatgttggtcaggctggtctcgaactcctgacctcaggtgattcacccaccttggcctcccaaagtgctgggattacacgcgtgagccactatgcccggcccttattttatattttaaagtctcactatattggaatccactatatatggagtctcactgtatggcccaggttgatctccaactcttggtctcacggggtcctcccacctcagctttccaaggagctgggattacaagtgcaggctaccatgcctggctgtcacacatgtcgttttaaatgtttaggccagggtggctcacactcgtaatctcagccctttgggaggccaaggcgggcagattgcaatgtcaaggccaggagtttgagatcagcgtaggcaatagagcaagaccccgcccccccgcttcatctctacaaaactatttttgtttgtttgtttgtctgagacggagtctcactgtcacccaggctggagtgcagtggcgtgatctcggctcactgcaagctccgcctcctgggttcacgccattctcctgcctcagcctcacgagtagctgggtctacaggcgcccgccaccatgcccggctaattttttgtatttttagtagagacagggtttcaccatgttgaccaggatagtctcgatctcttgacctcgtgatccgcccgcctcggcctcccaaagtgctgggattacaggcgtgagccacggcgcccggccgaatttctcttgttttaagtcactgaattggggataatttgttatagtagccgttaagaaactaatgcaatctgtttgagcttctgtcccctccacgctaacggcagagtttctgaggcttttagagaacatcttttccaacccttccacatagggaaggaaactgaggctcagagagaggatggagactgaaggagacctcaggcttcccgctcttcatccaggctccgtgggtcactgtggcaatttacagatatttttcccgttttaaaaaaaataggctgggcacggtggctcatgtctgtaatctcagcactttgggaggatgaggtgggcagatcaactgaggtcaggagttcaagaccaacctggccaccatggtgaaaccccgtctctactaaaaatacaaaaaatattagccgggcatggtggtacatgtctgtactcccggctacttgggaggctgagacttgagagaatcgcttgaatccgggaggcagaggttgcagtgagccaagattgcgccactgctctccaccctgggtgacagagtgagactccatctaaaaaaaaaagtacagaatgtggactgaacatggaggctcacacctgtaatcccaacactttgggagtccaaggcaggaggatcccttgaggccagcagtttgagatcagcagcctgggcaacatagcgagaccccatctctacacaaaaatagccagctctggcggtgcacacctatagtcccagctacttgtgaggctgaggtaggaggtttgcttgagcctaggagtttgaggctgcagtgagctgtgatcaccacactgcactccaacctgcgtaacagaataaaggtctcaaaacaaaaacaaaaaggccagaatgtttattgagttttcttttaaggctgagacagagcacaaggtttggttggagtcctagtttgtttgtttacctgctatgtggccttggataagagtctaccttccctgtgcctcagtttctccctctgtaaaatgggcatggtgagataagtcatctcagagggttgtagtgtggagggctgctgtgagaatcaatgttactgtgcggcatagtcctggaagtgtttgaaatgctgtaaaatgggcctggcacagtggctcatgcctgtaatcccagcactttgggaggccaaggtggatggatcatgaagtcaggagtctgagaccagcctggccaacatggggaaaccccgtctctactaaaaatacaaaaatttggccaggcaccatggctcatgcctgtaattgcagcactttgggaggctgaagcaggtggatcacctgaggtcaggagtttgagaccagcccgaccaacgtggaaaaaccccatctctactaaaaaaaaaaatacaaaaaattagccgggcgtggtggtgcatgcctgtaatcccagctactcaggaggctgagacagcagaatcgcttgaacccaggaggcagaggttgcagtgagccaagatcgcactattgcactccagcctgggcaacaagagcgaaactctgtctcaaaaaaaacaataaaaataaaaataaaaaaatttttaaaaaaggccgggtgtggcaatgttcgcctgtagtcccagctgctcgggaggctgaggcaggagaattgcttgaacccgggaggcgaaggttgcagtgagctg

SEQ ID NO: 1887710 - DNA, 4001 bp, Homo sapiens
ctgttgttgggcggcaagctggagtgcgacttgatggtgtactccttcagacgcgtggtcttcaggcgccgccgctcgggcttgcggccgctgtcctcaccacgcacgttccgccgccggatcgcctaggaaggagggaagcctgagcggggtccccgcgatgccacccagccccgccagcccccacctgccagtgtgaactgaggttcaggggctcatccggcagcagagtcaacgcctcgtgacggagactgcccagcccgacgcaaagccgagagtgctctctcgagaaaaacgctgcggccctggccccaggagtcagccccgttggacacacaccagccaaggatgccaccaggtctgtcgggtgctggacatcccacgcccaggacccaacccccgccacacaggctcactcctctggggaccctccccagccactgggggttgtcacatccacaagccttaaatgctgaaggccccccgggaccccagcgagaaggccaaggcgggaagcccagggagctcccccacctccccacttaccttaatccaggaatgttccaggctctgggcaatggtcattctccgcctggaagacccccgctctggttaggtacacctgcaccatctgtcccgtcctcccgtgaacaactgactcccgggacccccaaaagccctaaagtcgccccccagcctctgctcagccaaccacagaagctgaacaagggtactgcagggagcgtggggttttctggggggtggtggagagagctgagacctcaggctggagtcgcaaacccaggcgcccgagagagggactgggcggccatggaggcccggggaggcctacgagtgagggctcagcactgccagaattctaagtgtttacaggaaaacaagtgacctggaattttacatggatccttactttacacaccggcaactaattaaaagtttgctaaaaacacagcaagcagccagacacggtgtctcacgcccgcaatcccagcactttgggagaccaaggcaggcaaatcacaaaccaaggaggtcaggagttcaagacaagcctgggcaacatggtgaagccctgtctctactaaaaatacaaaaattagccaggcgtggtggcgggcgtctataatcccagctacttgggaggctaacgcaggagaatagcctgaacccgggaggcagaggctgcagtgagccgagatcacgccactgcactgcactccagcctgggagacagagcaagactccgtctcaaaaaaaaagactccgtctcaaaaaaaaaaaaaaaaaaaaaccatggcaatggccagcttgggccaccagtttatcagtttactctctccagcccaaggggtaagcaatgtctgatccccagccgcagggaggtggcgctgggaggagagtcctctggagcctccgtgggtggagtgggcctgtgtcccatgtcccaccccgtgccccctgccggcccctcgtacttgggatctttgacgagcagccggcgaatgaagtccttggccagctcgctggtgttgctgaagtactcctcgtcgaagtcgtagttcacggctgagatgttggtgagcgtctcctgcttggtctcgcccaggaacggggatgcaccgctcaggctgcgagacaggcgtgggggctcagtggggtcctgggctcccaccacggccgcgccgcctctccggctgcccacgacaggcggagcacagaagacaggctgacggcaggtgcctgggccactcacactcctgagcccttagaaccttcctgcaacgatcccagacaccacccaagaggcattcaaaatccacccccccaccccgccactgacagcagcagaaatgaacaggcagaagtctccttggagactcgaagtatctgtgcagacgcagagcccgaaagcccccagtgctcagtaacgccgaggggagggtaactgcagtggggagcccgagccaacaccttagccaaaggatcaaggtcaacagcccggcagtgagaggccccaacagcgtctgcctcccagcctgacgctgggagggtgacacagcatcatccctggggttttgagcagagacactgaagccccgtctgatcgtctgatcgtgacagcgcacgagactaaacgtggactcagacgccttctgcaaaacacctgacccgtgagcacaagtcagggtcaaggtcatgaaagccagacagaggaacagcctcagactggaggcggcgaaggagctgaatggctaaatgccgtgtggggacctcagagaggacaggagtggaaaacgggggtgtctaaccacctctggcactttaaattttttaaattttttagagacggagtctcgctctgtcacccaggctggagtgcagtagcgcgatctcggctcactgcaaactccatctcctgggttcatgccattctcctgcctcagcctcctgagtagctgggactacaggcacccgctgccacacccagctaatttttgtatttttagtagagacatggtttcatcgtgttagccaggatggtctcaatgccctgacctcgtgatctgccctcctcagcctcccaaagtgctgagattacaggcgtgagccatcgcacccggcccatctagcacttttgtgattagcgtagcaccaaggctaacgtcttggtgttcataacgttcgtgttcatgaaaaatgtaaactgaaggaggaggaagctgcagggggcgtctgtgctgtttctgttgctcctttgtaagtctgaattatctgaacatttaaaaagaatacaaacggtctagcccatctcctgaagcctttgggtccgctcacgcactacagcgggctgggcccacgccattgtttatttccttgcttactgaatgagctatgcccattcaatatggctgggcaacacagtgaaactccacctctacaaaaacttttaaaaattagccagctgggcacggtggctcacacctgtcatcccagcattctgggaggccaaggcggccggatcacttgaggtctggagttcaagaccagcctgaccgaaatggtgaaacatcgtctctactaaaaatacaaataattagccaggcatggtggcaggcacctgtaatcccagctacttgggaggctgaggcatgggaatcacttgaacccgggaggcagaggttgcagtaagcctgagctgagacggggccttggcacttcatccagcctgggcaacaagagcgaaactctgtctcaaaaaaaaaaaaaaaaaaaaaaaaattagccagctgggtgcagcggcccacgcctgtaatcccagcactttgggaagccgaggcaggcagatcacctgaggtcaggagttcaaaaccagccttgatcaacatggtgaaaccccgtctcttctaaaaatacaaaaattagctgggcatggtggtgggcgcctgtaatcccagctactcaggagactgaggcaggagaatcgcttgaacctgggaggtgggggttgcagtgagcagctgagatcgcaccactgcactccaacctggacaacaagagcaaaactccatcaaaaaaaaaaaaaagtccgagcatgggagcatggttgtgtgcacatgtagtcccaggtactcaggaggctgaggtgggaggattgcttaagtctgggaggtggaggctgcagtgagctaggacagcactccagcctgggcaagagagtaagaccccgtctcaacaaataaaaataataaacaacagcaggcccacgtgtggcccagggacaggagccaaaacccagcgtggggtcggaccccttccttgcacttcgagaggaggctgggctccctagcagccagagggacaggagcacacacgacccccaacccggagcctgctcagccgctctgtgagtgtcctgccttcagaactctccagaagcctctgtgacagcagccacagagaatcactcatccgttcacccg

SEQ ID NO: 1887711 - DNA, 4001 bp, Homo sapiens
cccgtctctactaaaaatacaaaaattagttgggcttggtggtagacgcctgtaatcccagctactcgggaggctgaggcagaagaatggcctgaacctgggaggcagaggttgcagtgagccaagattgctccactgcactccagactggatgacagagggagactctgtctcaaaaaaaaaaaaaataaataaataaataaaataaaataaacttgtttaggagagtcaaccaagacttagagaggccaagacaacctgtgcaaggtcacaaggcaagtgaaagagacagagctttgcaaacaccccccacccccgtcccagaagcctgggcaggcaggaagatggtcactcaaaggggcccacaccacagtccagcctgagatcaggccaggcccagctggctgcaagtccacacctttccaccacggtagacagaaggcaatgagctagagacaaggtagcaaaagaggagatttgtgctgcttggagcaaagccccaaggctctgggatggcagacacaaggccttacgccagcctagtggccttgggtgatcacagtcccttctgagcctcccagctcagctaaggtggggatgataacacagcctccaccccactccttacttgggattcaagatgttgaatcaagaagggacattatcccttgacaatgataacaacaataacaatgacaataatgacaggaggaggatgttatcatttggcagccacaccaccacaaatgagtagttcctggaatggagaagtggccgcccatctgggagacaagaaaggcaagaggggttggtgggagggagaggtggctgcacgggctgttctcattcatttgcttcctgaatcctggaaacagccccagagagtggagtttgcccactggacagatgggcacaccgcggcttctcaaggctgtccagagaaggctacatcccagcgctagccactgaggcctgatcacgcaagaagccccttcccaggctccaaaggagggcccccaatttgtaggctgtagctgggaggcgggcccctgtgttctagcactcggaaaggaatcctgaagtaaggtacccccagagtcctccttccagctgagaggggaagtagggtccaaacctcctccttcagctctgttctcccctctaccctcctaccacccctttccagagccgttgtgccagacactcaggggtagtcatgggcagactaggagatggccagacagacagaagaattcacacggaagagaggagccagcgctagccaggaatcaagctgtaagagtcagccagagagaatcaaacagggtcccctaggagtcagctagccagtcagacagtagaggccagctggtgtcacccaacagagggactgctcagtgttaaagtctgtgaggggcacggatgggcggccagacagcagaggtcaccctggacagctagccagacagcagggggctgccaggtgggactggacagatggacaaccaaatggtggtggcagggaggcttgcccaggacagagagacagccaaccagacggcgggggcagctccagatacaagaacaagccagccagaccgcagcggtcgccccaatagatatctagatggccggtttcacctctgatggacagcccgaaagagcagaagagggatctaccccagacccacggccaaccagatggcagacttcacccacgaaagctgggaccagatggaccgcagggttccagcgcacctcctgtcctacggcgccctggcccgtgacaccgcccctggggcccgggcctgctccggagcccctgcagggagtcctctgcccagggcgtcccacagggcccgcctccccgaccccgtccggttccccgccgcgggcacgcaagcgccgcagttacgccggcggcgcacggcgcgccattcccggtccgccctccgcgccctaggccgccacccgcccgcgatccctgccgcgcccgctcaccggcccacgaagttctccagcaccgagctcttgccggcgctctggccgcccactacagcgatctgcggcaggtccaggtggcagctctggccgatggagctgaaggcgtcctgcagtttgttgaccagcgggatcagctcttccatcccgcggttgcccatggcgccggcggcccccggcccgagcgccctgcgctcctcgcccgccgccgaccctcaacgacctggccccgcggcgtctgtagccgttgctccccgcccgcccgggcctcggcaagacgcccgctcccggctcggcctcacggtcgccgcctcatccggttctcaggcgacacccgacccgagcgacctcccgccccggccccgggggctgcgcccaaagcactcgcgccgcacgcgactggcctgctgcaccgccactcggatacactagccaataaaaactaggcacgggcctatggttgagtaaaccttccccctggggaccgtcttgctgacttattggacaaaagaaccgtcactgttgtgcaacagccaatagcggcagaaagcaagttgtcaagagaggaagggggtgtttccgaaaaaggcacgttggctctgcccattggcgaagttccaccatcttattggcaggcagacgtgccagtagacaatgtggaccaatggtgttggggattgagctactacctcgttccctaagaatttcccattggttcatataaatatcacttcgttgctccagccaaccaggcaaaagagggcgggctttaacatccgaatcttgactatcattgagaaccatatctgtcaatcagaaaaactcccgttcttccttgtgattgttggatgtctgcaacagccttctgaagtataggatagatcccaccgtactcgctcaagggcgacacctcgtggtgggatccgatgtctcgatttttgagtttcctggcactggggaaaactacaagtcccagagcgcatctcagttcccagactgcaaaccagctctgggagcagggtcccaatgcgctctgcaaatggtagaggccaagtcattgcttcctagggatagaacgcaataaaatcactcctccacgcctttgcaaatgctgtgccctttctgctcacgcccgatcttgacgccgctaacactccaatgttttcccccacttcttcaactttagcagatcatgaatcttttttcttttcttttttttgaggcggggtactcactctgtcacccaggctggagtgcagtagcgcgatcttggctcactgcaacctccgcctccccggttcaaccaattctcctgcctcagcctcccgaatagctgggattacaagtgtgagccaccacgcccagctaattttgtatttttagtagacggggtttcaccatattggccaggctggtctcgaacgcctggcctcaagtgatccgcccgtcttggcctcccaaagtgttggaattacaggtgtgagccaccgcgtctagctaatgaatcttcttttcttagaaactgggtccttactctgttgcccaggctggggtgcagtagtgcactcatagctcaattcaacaagcacctgggctcaaacgatcctcccgcctcagcgtcccgagtagctggaaccacagacgtgcgcaactatgcccagctaattatttttattttattttttatagagacagggtcttgctgtgttgtccaggctggtctcaaactcctgcgcccaaacgaccctcacaggccggcctcccaaaagtgctgggattacatgtgtgaacccccccaactggctttagatctttttgagtacccactaaaactcaacaaatcctctccccgtgaaaagacacgctattttgtaggcaaaattggggttctgggaactggaactcctgacagtggacagagacaaataggaggatttgaagtgttttgacccctctggagacaaataggccagagacaaggaaacccagtgagaaggcag

SEQ ID NO: 1887712 - DNA, 4001 bp, Homo sapiens
ggctggggcaggagaatcacttgaacccgggaggtggaggttgcggtgagccaagatcacgccattgcactccagcgtactcaacaagagcgaaactccgtctcaaaaaaaggcttcaaaggattgtgggtaaatttccaaaaatagtagcaataaagggggcaggaggcagaggtagtaatattcaacttgtcaataaaaacaaacagccgggcgcactagctcacacctgtaatcccagtactttgggaggccgaggagggcaaatcacttgaggtcaagagtttgaggccagcctggtcaacatggtgaaacccccatctctactaaaaatacaaaaaattagccgggcatggtggcggtcacctgtaatcccagctattcaggaggctgaggcaggagaatcgcttaaacccaggaggcggagtttgcagtaggccgagatcgcgccattgcactccagcccgggcaataagaccgaaactctgtctccaaaagaaaaaaaaaatccttctacgtatccaaggtacctagagtagtcaattcattaagacggaatggtggctgagtagaatggtggctgccagaggtggaggtggagaggaatggggagttagtatttaacgtctacagcttctgttttccaagatgcaaagagttctggagatgggtggtggtgatggttgcacaacaatgtgaatgttcttaatgccactgaactgcacacttaaaaatagtcaagatggtaaattttatgtgtattttgccagaattttttaaattggaggggaagtgagaaacaagaaatcgctcgacctgctatttttcatttgaggaccagcatggcatagtggctaggaactaagaccttggcgtcctgagttcccctatctgttttgcatttactaactaggggcctttgaacaagtcactttatatctctgagactttattcatccttacaaacaggaataataatagttcttatacaaggtaacagaatctcaccagcacaagagtaagcacttgctaaattgttattttgaattttaataacaaattttattatttgatgatagttacttaaaagtcagcaataattcagggataattggttgaattattaatattatattatcacctagggcgataagcacatcagaagacttcgttttaagggaaaaagagacccaagttaggagtcagaagacttgggcttcaagagtggctgtgggtgggtataagatttctccttggtgacacccaagggttgacgtagatgacctctttgataaccagaaagcaagatcagcttcgctgctctgcgaaagccagccgtggagctgcacctccctcaccgcctaagtctcccgggaacgtcccgggcgagggaaggggtccaaaggtcgtacacaagaatactgatagcaaagccccttcctacgctggtgacggcggcgtggcgcaagatttgtgcaagactccctcggattgggagcaagggtcccgcaccttcgtggctcccatgacaaagtctgcaactcagcccgctgggggagctgcaaggaacctgcaagcgtcccagcccctgcagagacccccaagaaaaagtacccccaaaacagcctgggttgcagatttataaatacttcctgcgcacatgcgcattggaatttacgagtggcccggggcgcaacgcttgcccactgcgcctgcgccgtctggctcttccttcggggcacaggaccagaaagtggggtcccgtggtcccgcaaagaaggaaaaagaatgggtcagcagtggccacacggcccctgtttctcgcttcttacctcgtaatgcttcatggctccctcccacggcggctactgctccgcggctgctgctgcctaactgcgcggcacagcacaggctccctacagcgctcgcaaccgcagcgatagactaaacgcggctctgcgtccgccccgcccctccaggccgcgcgcgccccgtcggccaatcagggcacgaggcgcccacgttcgcccctgctccttggggccggtccgaaccaagactaggactagcaccaggggattgaccaatcaacttgcgagaccaatcgaagggggcggaacgcctgtaggaggggctaaagagaaggggcttgaccatccaccaatccaaaggaggtctctgccccgcgcgtccctttgccacgccccctgatggcgtcgctgtggaaaccaaggtaagcgacggttaggccagacgcgggggcggggtaagaagttgagtgacaggcaaggcagcatccacatgacaggcggcgccgaaggggtaaattctgaggtgggcggcccccggggtacaccgggaacagcaggagagggctaggggctggggtcgcgggctgcggagtctggttggcgaggaggtcactatgggaggagactcttgagtgggagggaaggaaaggcgaaacggagtcgcgaaaagctccccatttgggaacccccaacctgcaagaaccttgagccccagccccattctggggtggcttcactgccgtttttaatgaaagccccgccccactttgtttttctgttttgttttgtttttgaaacaatctcgttctgtcccccagctggagtgcagtggcgcaatgacggctcacgcaacctccgcctcccgggttcaagcgattctcatgcctcagcctcccaagtagatgagattacaggcacccgccaccacgcccgactaatttttgtattttttttagtagagacggggtttccccatggttggccaggctggtcttgaactcctgacctcaggtgatcctcccgcctcagcctcccaaagtgctaggattacaggcctgagccaccccgcccggcccccctccacactttgctccgccctatggacaggggaactacattggtctctgcctgacgtccagaatcgtgtctagtggctccaatggggccactgagcccttgaaatggggctggtccaggccgggaacgatggctcacacctgtaatcctagcaccttgggaggccgaggggggcagatcacgaggtgaggagttcgagaccagcctggcagatatggtgaaacctcatcgctactaaaaatacaaaaattagccgggcgtggtggtacacacctgtagtcccagctaatcaggaggctgaggcagaagaattgcttgaacccgggaggcggaggttgcagtgagccaagatctcgccactacactccagcctgagcaacagaccgtctcaaaaaaaaaaaaagaaaaaagaaaaagaaatgggactggtccaaattgagatgtgctgtaaatgaaaaacacataaatttctggccaggcacggtggctcacacctgtaatcccagcacttcgggaggccaagacaggcagatcacatgaggtcaggaattcaagaccagcctggacaacgtggtgaaaccctgtctctactaaaaatacaaaaattagccaggtgtaatggtgggcacctgtaatcccagctactagggaggctgagaatcgcttgaacccgggaggtggaggttgcagtgagccaagatcgcaccactgcactccagcctgggcgacagagtgagattctgtctcaaaaaaaaaagaaaaaaaaagaaaagacttttgacagacaaaggaacaggcagtacctggcacacttcttcacctcctctccttactcttgtttccagatcctgcccctgagctttcatgagctgttgaaccatctggaattcacaggcctgtcatgagagacacgatgagaagtccttaaaggtagatcactgattcacaggggagcaggcggaggcaagggtgagtcagtgcttggaactcagtcatccagatttggctctggaaacttctgaagctgtagcctttggggatccctgactgcgagtacaggaagccaacgctatgtggtcttctggaaactcattatctttttcactggtgcta

SEQ ID NO: 1887713 - DNA, 4001 bp, Homo sapiens
attacctgactatgcccatattttcttgccatatgaagagctgaaacctcacaaaactgaccgcaacacttgttctgtgccatggtcagcagagcagccacatctcacactgcgtgaccggcaagatcctgttcgatggggcatgaatccctaggcaagtcacctgccaactctggcccatgtgtgtccccatctataaaacggagcagctgacccaggggctgcctccaagttctaagacatctttcagttctgcgttcttctccaggtaggtagccttgggccaaaacgtcgctgaccaggcttgatggtaacagagaaaatccaaggtacccagcaatgccctggtacagctcttgacagtctctgcctaagagctccacgcagcgggggcagcttagctttgccatgaggcacgaggcaaggtaagggcaaccagctccaagaaccagtgtggggccctgggctttgcggtgaataaggaaaaagtctaacggcatctatcactgctgggaaatcatgggaatggccagagggcaaaggccactggccaggattatcctctgcccctgcccctcagagaggacaggctcatcttatttagacctagggttttcaaatgaatgaccaatcagaatggtttctttttccctgaggcctgaagggacgggccaggcagccccatacagactgcacagtgtgcgatcccagggggcctgcctccctccatcttctctaggaggtggctgaagcagcactcactttaaagtgtccaagaagctgaccgaagcctgctggatgcgtggaaccttccttccacagacactacaccccaagcactcacctggcttcggggtatggggtgctggtcctaccagttggccatggccacagtgacatcaaaaggctacttgagacaatgtgctgaccaacctaaagcaaaggacagagaaagaaacactgtgtttccaagcaaggtttctggaacatactggcatttctaaaatgtctctaacccctggaattacatagcaaaatttcagatttcctgagttttgcctcagctaccttccacaatggggacagtcggaggaaacaaatttctactgatctctgaggtatgaaacaatacagtgctaaccaatgaacgccaacgtcccagacactgtcttcaccaatacagatggtgacataaaaagcagtcacacgatgaaatacaattatttttatcttatgcccagactggagtgaagtggcacgatctcggctcactgcaacctctgacccctgggttcacacgattctcctgcctcagcctctcgagtagctgggactacaggcacccaccactatgcccggctgatttttgtatttttagtagagacggggttttgccatgttggccaggctggtctcaaactcctgacctcaggcgatacacccacctcgacctcccaaagtgctaggattacaggcatgagccaccgtgcccagcccagggtttttattataatagtaatgacattaaaaacagaaacaggccaggcacagtggctcacgcctgtagtcccaacactttgggaggccaaggcaggaggactgcttgagcctagcagtttgagacaagcccgggcaacatggtgaaactctgtctctacaaaaaaatacaaaaattagccaggtgtggtggcgtgtgcctgtggtcccatctacttgggaggctgaggtgggagtatcacctaagccagggaggttaaggctgcagtgagccaagatcccacaccactgcactccaacctgggcgacagagtgagaccctgtctcaaaaaacaacccagaaacctagcatttaataggtacttaggagtatgttccaggtactatgctcacacagcatctctgaatccccaaggcaaccgtagaggcaggttcctggatcatgcccattttacagataagggatctgatgtgtctgatcttcaggaacttgcccagggtcacagagcacacaggcagcacgcagggctcattctcccaatgtaacctcctcaccatcatgttgtctgtcatggaccccagggaaaccagccaccattcctggtgaaggcagtgctaggtttaccctcaagatgagggcatgatgtgcctgggaatgagcggacttcaccctccagaccgagagggcttcacctccaaaaccaaaggtcatggtcatccccatgggatgctgtccagagagaaagaggctgcctgtcttacagacaggaaaactaatgctctacaatattcaggaacttctcttccaaggtcatagagaaaatgcctcggacttccacttccggtttgtatcatcagacgtccagggctatgggccagaggctgaaccttaggaaccagccaaatcccagattcccaagcagttctgtcagttgtagcttgccaaatagtgtcaacatcacctctgttgtcattctttgcacccacaggactaccaggagcttgctctgatatgaaacctttatttttaaactaggttcacggcaattcacagctgatggatggcgagaaacactcccacaggagaacttgcaaaaataaggataggggacaacaccagtgaactctatggaaagacctttaggcacctcctaaatgaggcacagggctagctcctcaggaagaaccctttctgccgctctttttagccccattcaagctgagaaacccaatgggcagcattagtcctaactattttgtatctgccaatccaagacctctctgccccgagggtgggaagcctcagaagcaggtgtcctgtgctgttctgctgcaggatcaaggtctatatataaaaaatcagctgtgtttctacacacaggcacaaaccaatcagaactcaaaacctgaaaaaagtcatctacattagcacaaaaaaggtgaaatacttaaggataaagaaactacaatgaaacaacaagaaaaatgaaagaaggccgggcacagtggctcatgcctctaattacagcactttgggaggccatggcaggcagatcaattgagctcaggagttcaaggccagcctggccaatatggcaaaaccccatctctacaaaaaaaatttttgaaaattagctgggtgtggtggcgtgcacctgaggtcccagctacttctcaggttgaggtgggaggatcacctgagcccaggaggctgcagtgagccgtgactgtgccactgcattcctgcctgggcaacagagcaagaccttgtctcaaaaaaagggggggtatggggaggtactccttgcagtaataaatgagaataattttattttagtgttacacttttcatcaatttctgttgtatgttatacactctctgaacatgtttaaaagatgtttctaaagttgttgtttgcatgaatcaatcacaatagcctcacttgtgtaaaatactgttttatctcaaaacaaaaaaaaagaaaactgaagtatatgaagacatgtgtcttgttcatgggtcagaaggtatcaattctctcccaaactgatctacagattcaatgcaatctcaatcaaaaattcccagcagatggtttgaagaaatgacaaactgattccaaaatctacacggaagtgcaacggacctagaataacgaaaacaacatggaaaaacaggcacaaatttggaggacttaccacaactgattttgagacttaacataaagctacatcaagacagtatgacatggatacaaagacaagcagactgacaaaatagatgcacgcatgtggatcactgagacttgacaaagatccaactaccctactctgcgtgaacacaagatgcacaagatcacatcttcctggggcaggggggtggtggaggaaagtcaaatcacaacaaacagtacatcgtacctacagtgcaactggcaagaagtcttaaggtaacttctttcacactctaccactgctttcaaagccagcttgtggcaaatcca

SEQ ID NO: 1887714 - DNA, 4001 bp, Homo sapiens
gctctgccaagccacacaggcctccgtgaggcttgtccctgcacctcaccaagctctgtcctcccttcagacctttgcactgtggttccctccacctggagggctgttccttctcctcccatcccacatgactgcctcaccttgccaaactgggatcagctcagaggccctccccacagccgcatgcatctaaagaagtgcccagtctgtcacctgatttgaattcgctgcctagctcctccccctctaaccggctccttgcttattaacctgtttcgggttggtcttgcttagccccacaaggatagggactttggcaagtacactgctgtattcccagtactgatgcaacgctggcacatacgaggtgttcagtaaatggtggcggatgagtgaaaccttttcctcggctccacaatacccttaggatccatcctcacctctcacccaggcccacaggccagtgcagcacagcccctgccaacccctgcaggcacttctgctgctccccctgcccaggcccagccttcctgccactcccagagctgtgagctgtggtgggctgggaaccaggggcagtggcatgcacctacggtcccagctactcaggagactgaggcaggaggatcacttgagcccaggagttcaagactagcctgagcaacatagcgagactcccgtttccacaaaaaatttaaaaattagctaggcatggtggcatgcacctgtagtcccagctactcaagaggatgaggtggaaggatcactaaagcctaggaggtcaagcctgcagtgagctgtgatcacaccactgcactccagcctgggtgacagagggaggccctgtctcaaaagaaaaaaaaaaacaagcacagagcctgacctctgaaaagactccagtgtgtctaccttggaggcgctcagggctgcaaagccactgcgtggaagaggagtgggcccgggagctgcccttgtcagttctgacttgattgcatgtctcccccgacctctgtttctgcatctgtaaaactgagatgctaatttcagccctgatctcctcctagtgctctctgacacggttctgtgaactggcaaaggccttcaaagtcccggcagaaatactaagaattacaattgctaagacagaccaacagctcaccatgtgtcgggcactgttcttagtgaggagacatttccggtaggcttattgtatgccagaacagttatgaatgcttcccacaaattaatccactcagccttcacaataatcctatcaggtgggaattatcatcatccccatggcaccgatgatgaaatgagctcacaagggttggggagcctgctcaaggtcacacagccatggagtggcacggctggatttgaaccctgtgctctcactcgcttccatacacctctttacagaggctggaaaccagaacattgaagttctggatcctagctgggccaggctggggagctggatcccggaatgctcgaggggaccaaaagtagggggtgggggaggctggatgcctccgttccataacataatcatgactgccaaccaagacttacacagtaccaggcaccattctaggagcttctcgtggattaattcatttaatcctcacaacagcccaaggtggacgtccttctgagaccactgtatgggagtgaacagtgtggtccaaggtcgcagagctagaaccgacttcaccgtcctgctgctagctaacgcaggtccctggtagctgtgtcaccccctgcatggctctcttgctgtcttcttctcccagcacacacctgcccagggttaaaggatgccttgcctccactctgaggagggaccaagaaatgctggactggctgtaggcagagatgctcagggcagcctgaggctcaggggtaagaggaaggaaagacataggacagtcacctctataggtagaggacagaggacagaggtgactctatcctatgtctttccttcctttcacccagcctggaacctggtgagcaaggaatgcatggcactaggggctcagtgacctgggttcaaatcctaccctggcacccatagggtctgataagatgcggtggaaggcaattcttcctctgaacttcaatttcggactctgcaaaaaaggacacaaataccatataaagcccaaagcacagggctgggcagagtatatgctcacagacaaaagccactcctccagtttctccttgacaagacgatctgaggccaaggttggccaagggctcacatcacacctctcccacttcagctatgagacctctgggaaatctttgcacttcacagtgagtgaaatgattcctcatctgtaaaatggtatcacacttctaactagctcgtagctctccataaaataggcctaaccacaggtatgttttgagacttaagtgagatcacatgtacaaaagccctgtcacacgcctggcatggggtgaatgctataaacactgggcatccactagctctggaaatgatctgcctctctgagatgctgttttctcatctaaaagggagagcataacaacagcgcctaccgctctagaattcaagtattcagcaagtttatctatatgaagcattccaaacagtgtgtggcccacagaatgcactcagttactgtcagccatcaatttcatgattactgttttcactgccactgttagccccatcaggcaaaccctctaaaagctggcaggagaggaccagaggaacaaacccctagtggagaaagattctacagagtcgccgctgcctcacagactgtgggacctttctctccaggaaccacgagccacggaagccagtcagcttggaagtcactgctgcggactaggggcaaccatctgccccctctgaccacatcaccagcccaggtctgctgggtcaatcagggactgcagccagtcctctgggaactccagacccagagcaaaggctacagggcaagccaaggtcatgatctggcctagggagcagggacactggccacagacctctggggctggctgctcccagcaccagcccacagaccacaataagacaccagatccatgggggatctgactgtcccaagcccttcagagcagccttcctccctgggccaggctgggccaggggcacccccactccaagtccccttggcctatgcaaagaggaacagctgggaaaacagctcccggcctcactgcaaggccaactgttactgccttggtggggagtgtaaacatgatgtgtgaccgagctggtaactgggagacacaaacagcttcgtggccagcgacagaggagcatgtagtggtctgcgttggttcctggacccttcacatccactgccaaccaagttcagcccacgagtgaactcctgctgcttctctgggaaggtaggagtggatgaagttgaaaagcagcccattggaggctctagttactccagcccaggcgtcttgctgagccccaagaggtctccaaatgagaggaagaggtcctcacaatcccaagatcaagatgcccccagagagcttccctggggggaagaggtgttcccccaaacactccttcctcccaagttttaacaagcgggtgcaggggcacggctcctcaaatccaagcccaatccctcttcctcttcagaatgttaaggctcagacaacttcagtgacttctaacacagctttcctccctcccctatggaaggaaagaactgttactgcctggtaaataatctgagagggtaatggaatccagagcagcacctccatggtccaaagcaccccagtaaccatgacgttccctccagagtcgttaagaagttcaataaaggctgagatcagtgtaaacccccaacgccacacacgtcaaatacaggaaacagaaacccctcctcaccaatcggcatcacagtcctcccaaaatacgcccctaaaacccactagggcctgtcccgccccgtcccagtccctta

SEQ ID NO: 1887715 - DNA, 4001 bp, Homo sapiens
tagaggggtagtcagcgctgcccgggtgtctcccagtctcccccagctttgatcgcccttccaccccgtctcttgccatcaaaggttcttccactctgtgtccccagtgaatggtatctgtgattggtttctctcaccctattccctttccctgtatggactctcccactctgaaccccttaacaattggtatctggtagggcgcggtggctcacgcctgtaatcccagcactttaggaggccgaggtgggcggatcacctgaagtcaggagttggtgaccagcctggccaacatggtgaaaccctgtctctgctaaaaatacaaaaattagccaggtgtggtggcaggcgcctgtaatcccagctactcgggaagctgatgcaggagaatcgcttgaacccgggaggtggaggttgcggtgagccgagattgcaccactgcactccagcctgagcgacagagggagactccgtctcaaaaaaaaaaaaaaaaaaaaaaaaatcagcttcttttttgagactccatctcaaagaaacaaaacaaacaaaaacaaaacaaaaaataattggtatcttccatcattgccgtcagttcccccctagatccccaaaatgtgacctctgtcactggtcaccccagctccttctaagaactgaactccctgccagtacccacattatggactctcctgccctatggcttcctcttttttttttttttttttttagacggagccttgctctgtcgcccaggctggagcgcaatggcacgatctcggctcactgcaatctctgcctcccaggttcaagtgattctcctacctcagcctcctgagtagctgggactacaggcatgtgccccatgcccagctaatttttgtatttttagtagagacggggtttcactatgttggtcaggctggtcttgaactcctgaccttgtgtcctgccttcctcgtcctcccaaagtgcttggattacaggcatgagccactgtgcctggcccctcttattttattttatttcattttatttttttgaaacagggtctcaatctttcgccagattgcactggcactatcacagcatcacagctcactgcagcctcgacctgatggactcaagtgatcctaccatctcagcctcccaagtagctgggagtacaggcgagggccgccatgcctggctaatttttgtatgtttttgtagaggtggggttttgctatgttacccaggctggtcttgaactcctgggcaaaaagcgatctgcccacctcagcctcccaaagtgctgggattacaggcatgagccactgccgggccacgctatggctttttttttttttttttttttgcgatggagtcttgctctgtcacccaggctggagtgcagtggcgcaatctcagctcactgcaacctctgtctcctgggttcaagcaattcttctgcctcagcctcctgagtagctgggattacaggtgtccgccaccacacccagctaatttttgtatttttagtagagacagggtttcaccatattggccaggctgatcttgaactcctggcctcgtgatctgcccgtcttggcctcccaaagtgctgggattacagatgtgagccactgtgcctgggtgcgtgcggcttcttaacaattggtatggtccaactttcaacaagttagttcttaccacgtctgctcccagactctagtctctcccaccctgtctcctagtaacaaactggcacctgccacatccccacccccacttactttctcgtatcctgccatgcctcaccgccagcaggtggattctctcattggtgaaaaagttcaatgatgggtgaaataatgagggagaggaacggaaaattccagtatgggagtgataggctgggagagttaaatgatggcagaggccgagttgggaggttccctctccaaatgtgtcttgatcccccaccccaagacacatttggagagggaccctcccaactcagataaactgtggagagtgtaggagataggaaatggactgagaacttcctggtcccaccagagaagcaagattcccatttggaggaacggaaggaggatgcccacctggttccacagcgcaagggcctggtccccaaggtaggggccaggtcgaggtagcagacggtctcggctgagaatggccgcagctcgcagcatgaaagacgtgaacaggttgatgtggatatagtttctagtgcaatgtagccgcctaggggaatttggaaggcagtgtgggggcccctggagagctgtcctcagccacacagagttctatttttttttttaaacagggtctcactctgtcacccaggctagaatgcagtgacacaatcagggctcactgcagcctcaacctcctgagctcaagcaatcctcctgtctcagcgcccccctatagctggtaccacaggtgcaccaccagtatgcctagctaattttatttgtcgtagagacaaggtttcactatattgcccagcctgatctcaaactcctgggctcaagcgatcctcctgccttggcatcccaaagagctgggattacaggcatcagccaccgctcccggccacacagagctcctttaaccacccccactgctccccatagaaccaccagtggatagctggacctggtggaaacagaccaccccatcttactggacaaactgaggccgagctcacatctctgccgccaccactcagggttaaggtcccacctgaacaaactcaagatgagcagggctagcagcagtgtggcgagagacagggagtagccgacagtgtacatgacctgcaaccgctccaagatgagcctttggtcctggtcggggcaagaaggggaagggaacaaggcttggctcgaagccccaggcccagagagagactggaaggacctctgctctttgtttctgcccaaataccctattttatcttggggaactgcttacccttatttgagaagggctgactccacccttcagctccagggcacgaggcatgtgaccagccaaccagagatttttttttttttgagacatggtcttgctttgttgcccaggctggagtgctctggcaggatcatggttccctgcagcctcgccccccagggcccaagcgatcctcccaccccagcctccagagtagctggaactacaggtgcgtgccaccatgcccagctaatttttgtatttttagtagagacggggtttcaccatgttggccagaatggtctcaatctcttgacctcgtgatccgcccgccttggcctcccaaagtgctgggattacaggcatgagccaccactcctggccaaatttttatattttttgtagagatggagtttcactatgttacccaggctggtctcaaaatcctgcgttcaagcaatcatcttctcaaagtgttggaattataggcatgagccattgaccttggcccaactacagcattcttttttttttttttttttttttttgagatggagtctcgctctgttactcaggctggagtgcagtggcacgatcttggctcactgcaacctctgcctcctgggttcaagcaattctcatgtctcagccctctgagtagctgggactacaggtgcataccaccatgcccagctaatttttgtatttttagtaaagacggggttttgacatgttggccaggctggtctcaaactcctgacctcaagtgatccaccctccttggcctcccaaagtgctgggattacaggcgtgagccacaccacccggccatcttattcttttccatcacagaaggcagtacatctttctctctttgaagcaagtctgagttgagtttctctcacttacaacccagaggtctgaacagtccaaggggtttcaggccctgcctgaatctactgcctttccatctctccctggactcctaacctgaagccctcacctcttcttaccagaaaggcctcattcttctctgggtt

SEQ ID NO: 1887716 - DNA, 4001 bp, Homo sapiens
tagattcaggcagggcctgaaaccccttggactgttcagacctctgggttgtaagtgagagaaactcaactcagacttgcttcaaagagagaaagatgtactgccttctgtgatggaaaagaataagatggccgggtggtgtggctcacgcctgtaatcccagcactttgggaggccaaggagggtggatcacttgaggtcaggagtttgagaccagcctggccaacatgtcaaaaccccgtctttactaaaaatacaaaaattagctgggcatggtggtatgcacctgtagtcccagctactcagagggctgagacatgagaattgcttgaacccaggaggcagaggttgcagtgagccaagatcgtgccactgcactccagcctgagtaacagagcgagactccatctcaaaaaaaaaaaaaaaaaaaaaaaagaatgctgtagttgggccaaggtcaatggctcatgcctataattccaacactttgagaagatgattgcttgaacgcaggattttgagaccagcctgggtaacatagtgaaactccatctctacaaaaaatataaaaatttggccaggagtggtggctcatgcctgtaatcccagcactttgggaggccaaggcgggcggatcacgaggtcaagagattgagaccattctggccaacatggtgaaaccccgtctctactaaaaatacaaaaattagctgggcatggtggcacgcacctgtagttccagctactctggaggctggggtgggaggatcgcttgggccctggggggcgaggctgcagggaaccatgatcctgccagagcactccagcctgggcaacaaagcaagaccatgtctcaaaaaaaaaaaaatctctggttggctggtcacatgcctcgtgccctggagctgaagggtggagtcagcccttctcaaataagggtaagcagttccccaagataaaatagggtatttgggcagaaacaaagagcagaggtccttccagtctctctctgggcctggggcttcgagccaagccttgttcccttccccttcttgccccgaccaggaccaaaggctcatcttggagcggttgcaggtcatgtacactgtcggctactccctgtctctcgccacactgctgctagccctgctcatcttgagtttgttcaggtgggaccttaaccctgagtggtggcggcagagatgtgagctcggcctcagtttgtccagtaagatggggtggtctgtttccaccaggtccagctatccactggtggttctatggggagcagtgggggtggttaaaggagctctgtgtggccgggagcggtggctgatgcctgtaatcccagctctttgggatgccaaggcaggaggatcgcttgagcccaggagtttgagatcaggctgggcaatatagtgaaaccttgtctctacgacaaataaaattagctaggcatactggtggtgcacctgtggtaccagctataggggggcgctgagacaggaggattgcttgagctcaggaggttgaggctgcagtgagccctgattgtgtcactgcattctagcctgggtgacagagtgagaccctgtttaaaaaaaaaaatagaactctgtgtggctgaggacagctctccaggggcccccacactgccttccaaattcccctaggcggctacattgcactagaaactatatccacatcaacctgttcacgtctttcatgctgcgagctgcggccattctcagccgagaccgtctgctacctcgacctggcccctaccttggggaccaggcccttgcgctgtggaaccaggtgggcatcctccttccgttcctccaaatgggaatcttgcttctctggtgggaccaggaagttctcagtccatttcctatctcctacactctccacagtttatctgagttgggagggtccctctccaaatgtgtcttggggtgggggatcaagacacatttggagagggaacctcccaactcggcctctgccatcatttaactctcccagcctatcactcccatactggaattttccgttcctctccctcattatttcacccatcattgaactttttcaccaatgagagaatccacctgctggcggtgaggcatggcaggatacgagaaagtaagtgggggtggggatgtggcaggtgccagtttgttactaggagacagggtgggagagactagagtctgggagcagacgtggtaagaactaacttgttgaaagttggaccataccaattgttaagaagccgcacgcacccaggcacagtggctcacatctgtaatcccagcactttgggaggccaagacgggcagatcacgaggccaggagttcaagatcagcctggccaatatggtgaaaccctgtctctactaaaaatacaaaaattagctgggtgtggtggcggacacctgtaatcccagctactcaggaggctgaggcagaagaattgcttgaacccaggagacagaggttgcagtgagctgagattgcgccactgcactccagcctgggtgacagagcaagactccatcgcaaaaaaaaaaaaaaaaaaaaagccatagcgtggcccggcagtggctcatgcctgtaatcccagcactttgggaggctgaggtgggcagatcgctttttgcccaggagttcaagaccagcctgggtaacatagcaaaaccccacctctacaaaaacatacaaaaattagccaggcatggcggccctcgcctgtactcccagctacttgggaggctgagatggtaggatcacttgagtccatcaggtcgaggctgcagtgagctgtgatgctgtgatagtgccagtgcaatctggcgaaagattgagaccctgtttcaaaaaaataaaatgaaataaaataaaataagaggggccaggcacagtggctcatgcctgtaatccaagcactttgggaggacgaggaaggcaggacacaaggtcaggagttcaagaccagcctgaccaacatagtgaaaccccgtctctactaaaaatacaaaaattagctgggcatggggcacatgcctgtagtcccagctactcaggaggctgaggtaggagaatcacttgaacctgggaggcagagattgcagtgagccgagatcgtgccattgcgctccagcctgggcgacagagcaaggctccgtctaaaaaaaaaaaaaaaaaaaagaggaagccatagggcaggagagtccataatgtgggtactggcagggagttcagttcttagaaggagctggggtgaccagtgacagaggtcacattttggggatctaggggggaactgacggcaatgatggaagataccaattattttttgttttgtttttgtttgttttgtttctttgagatggagtctcaaaaaagaagctgatttttttttttttttttttttttttgagacggagtctccctctgtcgctcaggctggagtgcagtggtgcaatctcggctcaccgcaacctccacctcccgggttcaagcgattctcctgcatcagcttcccgagtagctgggattacaggcgcctgccaccacacctggctaatttttgtatttttagcagagacagggtttcaccatgttggccaggctggtcaccaactcctgacttcaggtgatccgcccacctcggcctcctaaagtgctgggattacaggcgtgagccaccgcgccctaccagataccaattgttaaggggttcagagtgggagagtccatacagggaaagggaatagggtgagagaaaccaatcacagataccattcactggggacacagagtggaagaacctttgatggcaagagacggggtggaagggcgatcaaagctgggggagactgggagacacccgggcagcgctgactacccctctaccggtctggcccctccctaggccctcgctgcctgccgcacggcccagatcgtgacccagtactgcgtgggtgccaactaca

SEQ ID NO: 1887717 - DNA, 4001 bp, Homo sapiens
ccattgcactccagcctggagacagagcaagactccatctcaaaataaataaatgaataaatacatacatacatacataaaggacatggtgacaggtgggggtaaagaaagatttctcttaagaactcacaggttttaaactcttatttctccacacaattctcccacttataaacacgatttaatagtgtggctctggtaggcaaggggcacatgcctataatcacatcactttgggaggccaaagcaggaggactgttgaagcccaggagttcaaagctgcagtgagctatgatggccaatgcactccagtgtggggaacagagactgtctcaaaaaaaaaaaaaaaagtgtggctttcactctgtccatctgagctcttacctgtgttgatatctttgataccttcccacctatctggattttttgctactttcatttcattctccacagtccagggctctgtcctttgcttcatcatggagataatactcaggtcaggaagacagattcctgtttataaaagaaagaatcaagatgtgctgtgatgtctccaaaatccaagccctctgtttaggcagcagagatgatattaaaaattaatcctttaaagccagttagaatggcgatcatgaaaaagtcagcaagcaacagatgctggagacactgtggagaaacaggaacacttttacactgttggtgggagtgtaaattagttcaaccatgtggaagacagtgcggcgattcctcaaggatctagaaccagaaataccatttgacccagcaatcgcattactgggtatatactcaaaggattataagtcattctactataaataaataaaaaaactaatcaagaattcaagaaaaacatttcacaaattcacccacagactgtctgcttctgaatgcgtagggaactgtgtaataattggacatcgaactctcttccaagaactatagaatcaaaagcacaggggtagaaaacagggaactggatattttaaaagtttgtcataaggttttatgcacacttaagcccaggtaccacccaaaggtgtatcatgaaggatacagaatgtctgaagaaagggggaatttcaagaccagaaagcatacgggagcttttcatttctgagtcaacagggtttctttttttttgaaacagagtcttgctctgttacccaggttggagtgcagtggcatgatctcagctcactgcaacctctgcctcctgggtgcaagcaattcttcttgcctcagcctcccgtgtagctgagattacaggcatgcaccgtgacacctggctaatttttgtatttttagtacagatggggttttatcattttggtcaggttggtctcgaactcctgacctcaagcaatccacccacctcagcctcccaaagtgctgggattacaggcatgagccaccgtgcccagccaagtcaacagggtttcaatctcagtcaagcaatgcaggggctcccaagaggcacacaagggaaaatgcagagatactaagggcagaccccaacttctggaggggcattatccttacccagggagaccaggttcctgtagttctccaacatcacatccctgtataaagccttctgcacagggtccaggcatttccactcctcctgagagaattctatggccacgtccctgaatgtcaagtgtccctaaaataaaagatgtatttgaccaacagggtaaggagagagtaattatgttcacacgaaatgagaagagggttgtaaggactgactcaactgaagtgctgacgtgaacattctgacatatccacattaaggtatttttgagctagttatgtgtctgtgattgagttttattatacttttccataaaaagttatgatattctttaaactagtgtagatttttcattcaatatctacctgagctagcatacaagtgtctctgaagacgccaactacttgtattctagctcaggtagacaatgaatatcacttggtgtgtcgaacataatacctaacacttctatagaattgtgggttaattttgtgtctgggcattagaatcaaacctaaagaatcaagcagttaagtaacagatcagcattaaaagtaaactgacaattacctaactgagtaaagttaagttcatggacaaaaatctgaatctgcgtaaaaggtcattctatatgcatacacatgtatcctcctcataatacattactattcttactgccattaactcattaacgtgatagtgtagaacacatttttttttattgacagagtctcagtctgtcacccaggctggagtgcagtggcgcaatctcggctcactgcaacctccgcctcctaggttcaagtaattctcctgcctcagcctcccgagcagctagcattacaggcacgcaccaccatacctggctaatttttgtattttcagtagagacaaggtttcaccatgttgctcaggctggtcttgaactcctgacctcatgcgagccacctacctcggcctcccaaaatgctgggattacaggcatgagccaccgcacccggcccaatagtgtagaacacttataaggtcatggcaagtatttcagatgtaatttcaactgttcaaaatataatttttttttttttagatggagttttgctcttgttgcccaggctcaagtgcaatggtgcgatctcggttcaccacaacctctgcctcccaggttcaagggattctcctgcctcagcctcccgagtagctgagattacaggtatgtgccaccacacccagctaattttgtatttttagtacaaatggcctttctccattggtcaggctggtctcgaactcctgacctcaggtgatccacccgcctaggcctcccaaagtgttgggattacaggcgtgagccatcacgcacggccaaaagtgttggctcacacctgtaatcccagcactttgggaggccgaggcaggtggatcatggggtcaggagaccaagaccatcctggccaacatggtgaaacctgtctctactaaaaatataataattagctgggtgtggcggtgcatgcctgtagtcccagctactcgggaggctgaggcagaagaaccgcttgaacccaggaggcggaggctgcagtgagctgagatcacgccactgcactccagcctgggcgacagagcaagactcagtttcaaaaaaatgaaaaataaaattaaaattaaaattaaaaaattcttataaaatgatgttgtagcttaactataggcttgcttatccatgcactcatgcaaacacatcacatgtatacacttacacacacttagtttataaagtaatacacatatacaatttacacatcagatgaaataaggagttgtctctcaatgacctattttttagatgatatttgtcatcttttttaaaaaaaattcttagagactgggtcttgctatgttgtccaggttggggtacagtgagtaatcatagcacagtacagccttgaactcctgatctcaaatgatcctccctcctcagcctcccaagaaactggggctaacggtgcacatactgcctggcagtcattattatttttgctaatgtgtatttcagcatctttgcaacaataaaaatgtataaatagtactcagtttagtttataaacattattgtatattaagctatttaaaaaaagtagaccagctgggagcggtggctcacgcctgtaatcccaacactttgggaggctgaggcgggcggatcacctgaggtgaggagttcgagaccagcctggccaacatggtgaaaccccgtctctgctaaaaatgcaaaaattagctaggcgtggtggcgggcacctgtaatccaagctactcgggaggctgaggtaggagaactgtttgaacccaggagatgcaggttgcactgagccgagatcacaccactgcactccagcctaggcaaaagagtgagactccgtctcaaaaaaaaaaaaaaaaa

SEQ ID NO: 1887718 - DNA, 4001 bp, Homo sapiens
ttctcactctcttattcaggtatttttcaggtacctactacatgccagaactgtcttgggcacagaaggtatttcagtgaccaaaacagacaaaaattcagtcccagcatttttttttttttttgggacagagtctcgctatcacccaggctggagtgcaatggcatgatctcagctcactgcaagctccgcctcccgggttcacgtcatccttttgcctcagcctcccgagtagctgggactacaggcgcccaccaccacacctggcaaattttttgtatttttactagagatggggtttcattcaccatgttagccaggatggtctccatctcctgaccttgtgatccacccgccttggcctcccaaagtgctgggattacaggtgtgagccactgtgtccggccaagtcccaactttttttgagagggtctcactctgtcaccgaggctggagtgcagtgacataatcatggctcactgcagcctcgatgccccaggctcaagtgatcatccttcttccttggtagttgggactacaggtatgcatgacatctcgccaatttttaaagtttttgtagaggctaggcatggtggctaacccttgtaatcccagcactttgggaggccgaggcgggcagatgacctgaggccaggagttcgagaccaacctgggcaacatgaagccctgtctctacaaaaaggctgggtgaggtggctcacgcctgtaatcccagcactttgggaggccaaggtgggtggttcatgaggtcaggagatggagaccatcctggctaacacggtgaaaccatgtctgtactaaaaaaaaaaatacaaaaaaattagccaggcatggtggggggtgcctgtagtcccagttactcgggaccctgaggcagaagaatggagtgaacctggggggtcgtgcggagcttgcagtgagcagagatcacaccactgcactccagcctgggcgacagagcaaggcacggtctcaaaaaaaaaaaaaaaaaaaaaaattagcctggcatccatagtagcacatgcctgtaatcccagctactccggaggctgaggcaggagaatcgcttgaaaccaggagacggagggcgcagtgagctgagatcgtgccattgcactccagcctcagcaacaagagtgaaactctgtctcaaaaaaaaaaattttttttgtagagatagggtctcctcgctgtgttgccaagctaggttgagttgtgtaactcctggcctcaagcaatcctctgtctcagcctcccaaagtaccgtgattgtaagggtgagccactgtgcccagccccagctaactaactgggttacctgaccaccttctaggtctttgggggtaaagaagttgatttgcataaaagtacttggggaagtacttggtgcacagcaagtataaccttaaaggggttgctgtgaggacttcacagggacagaccaggaagtactgtttacaagaagtaccatttttgagtcagactcacctggggtgcctaccctgtccctttcctcttgggtgatcttatgcacttgaggtaccccagggatcctcctttttcctccaagtctcacctgccagaggtccaggcccagcacgccaaagttatcataggcatagatactgggatcgggagaatactcggggttgtcaatttctgggtggatccaagtgcccttgtaatctgggttgtcgatctgccggggcttccactcaccctgcagaagggagaaggaaaccgaagggtgagtaaggttggtgcactccccactgtgagccccagccctgctcagagccccaaactcaccttgtactcagggttctgaatcactgggggttcccactctccgtccatctcttcatcccagtcctcgggcttcttagcatcagggtcagggatatgctcgggcttgtcccagtcctggggggtagatgaagagatcagagttggcccagatgtcttccacaccctccaatgtggagagcagagcccctgcccaaacaccaacctcaggcttggagtctgtgggatcatcgatcttggcccgctcatcccagtcttccggttttgaagcatcaggatcctttatcttcttgggtggcaggaagtcccaatcgtcttccaaggagccggactccacctggctgttgtcaatcttcacctcataggtgttgtctggccgcacaatcagtgtgtacaggtgtgtaaactcatcatcctgaagaaggaagaaggtgagcgggggccaccccccaatgaggctgacctctgaatctccccatgacagccatttgccaccacccccaggcacaccttgcaacggatgtccttgttgatcagcacgttcttgcccttgtagttgaagatgacatgaaccttcttggtgccagggccacagatgtcgggacctaggtgtgaagcagatccagttaagagtcagagactacccatcatctcgaggctctcacccctctttataaaaggaagacctggttcttcaactcgggtctgtcaaggctgagaagagaaactcagaccctgattctgtcctgaatgggctgtgggtggagccttaagtttaaaggagaaaaaaaaaaaatcagtgctctagaactcaaaatcctcattagtaagattgggaaataactatatacaaacacgcaaattaaattaacagcctagatctgcgatcataatgcaataaattgttgctgggacttattcttttagctccccttccaaaaaaaatcattattaagaaagtcaatggggtctgggtctccctctaactaatgggacagagatcagcaccaggaagcaggccctcaccaaacatgatgttgtattctgagtctccgtgcatgtctgtctggtccaaactattaggaaacagcttcacatagccgcccccacagtcgatgttctgctcatgtttcaccgtgaactgcaccaccagcgtctggcctttgttgctgaaaggctcgaaactggccgacagagcataaaagcgtgcatcctggcttgtctgcaaacctgagacgggacggtagtgaggtcaccgttgggccttgactcgcgaggaccctcgacttagagaatagagaagactcccccacttcctccacctgtcctcctccaaggggactgtcccggctgtgtgtgtacagacaaggacttctgccaggaagtcctcccggatctgagcacccactcctaggctcttacctttatctttctcctcgtcaccgtagaacttgccggaactgagaacgaatttgccaaaatctgacttgtgtttggattcgatccagcgggaagtccacccgtctaagtgggggattagaggggtaggtcagagcggctgtgctaatccccccccacaccaaacatctgccgagagccacaagctgctggggacaggaaaggagatccccgacactccccattccaacctctagtttgacacgtcgggtgccttcagagatcctcgggctaaccctaactcccgccgcgggaggccgctacgccctccgcgctccccagggacgcagaagagaaatcgcccgcggctctagtcccgggaggccaccgtgttggacctctaaacggtaattacgggcgacaacgcagatccaggatcgggggccggccgcgtcgtcggggcggcctcgaggcgggaccaggcgttacctccgtccagaaactgctccttgaagtagacggcaggctcggcgacggccaggccgaggaggccgagcagcagcggcacggatagcagcatggcgggccgagggggcggcaacgcgcgggccctttaaaacgaccctccggcagcggctctgcagtacggacggacgccgccgcccgccttgcacttttatacccacccgcctctcaaaccaacctgacccagcccttgggcccgcccctgccactttgtcattggtctatgcccatggccgtctttttccattgga

SEQ ID NO: 1887719 - DNA, 4001 bp, Homo sapiens
tttctgggagccactggtgccatcttgtttatcaatctggggagtctgctggcctagacagaccctgatctccacccccaacccggatcctgggcccttctgggtcaccaggcagaggctgacattccataagccctataccatcgtcacttttagtggcagctcatacagagctgcaaagttgaagccttccacctccatcctcagctttaagaacagagaagacaaaaacttagcgaggcagcacccctggctcaaacccaacccaacttcaccctgttcacatctggcagcttcaaaatgggccctgcccctcaggcttcacccttcccatcctagtgggcagtatattcacacccccaccccaagcattatccctcagttcccacggctcctaataatcccatcccagccaagccccgcccctaagcctcccgttggctctgccccacccaaactactagccgtgctcccaggaccgggccgccccctaccctctggccaagctggcaggagctgccgaagtccacaatcttgatggcgctgcgcttggggttgcacagcaagatgttttcgggcttgaggtcgcagtgaatgatgctgagctcaggcgtggccagaaagagcagtgccgtgcagagctgctgcgccagcttccgggtcaggttcagcgagacgccgcggaagtgggtgttgcgcaggaggtcgtacaggttgtaggacagcagctcaaataccaggcacaggtggttccggaacatgaagtgccgcttcaggtgtactgcgggggaggggaggaaatgggccagagaagaaacggctcagagagggcaggtggtggcctggggtcatacaacgctctttgattactagccacattgtgctgtccccacgggtaccatctgctagtcaaaatctttttatctaacaactagattcacacaggaagttaatgctctttccaagtctctgtcaaaccctccaattaaaccaaagagaaagtttcattagttactactagctctaacacattctacacttcctcatttaatttcataacactgctttcatctcccttgtattcatttttgtggcaaaggacactggttttccgtttactttaaggatatacgttttcctttcaaacgaaaccattttaaaatccacttgctgtttatgattatgttgtgatgtttatgtccatgagcaggaatcagtttaagggaggagaaagactggcacagatgttaagagtaacagctctggagtccacgacctcatcaaattatagctcaattagtacaaactgccacctcatgcaagtgacagcacttgaatgcctgagtttcttttttcctttcttcgtttttttttgttgttgttgtaactgttgttgttgttattaggtttggttttttgtttgttttgggtttttttttttttgagatggagtctcgctctgtcatcaggctggagtgcagtggcgtggtcccagctcactgtaacctccgcctcccaggttcaagcgattctcctgcctcagcctcctgagtagctgggactacaggcgcgcaccaccacatcaagctaattttttcacatttttagtagagacggggtttcaccatgttggccaggatggtctcgatctcttgatatcatgatccgcccacctcggcctccaaaagtgctgggattacaggcgtgagccactgtgcccagcccgttttgtttgttttattgaagaagaaactaggatggaagcccaggtttcttatcttcaagatgttgttaataatgcccttccccttatgggctgtggtgagttaacttccaagtgcttccaagagagcctggcccttggtgagcactcagtaacctctgaccattaccaagaaaataggacaaaaatcataaaagcagcaggagaatcactgatgtcagagaagcacagaccaaaccctgctctgaagacatcagcctcctcctgagagtagggcgggggtgtgacccatccctactggctccagctcccgctatcccaggtgcccacagccctgccagtcccaggcctcacctatatagtacttcatctccgtgtcatgctggttcatcagctccagcagccgcagctcaatctgggcctggttcaggaaagcctttttgttcttgatgatcttgatggccacaagctcctgggtctgatgatcataggctttcaccacctgttggggcagggcatgtcacgaagaaaggggtgggagcagggcagagccaggcaccattcttctccctccaggcaaggagacccaccaagaacactatgcatacttcgcagctgagtgcgcaccattagtcaggcgctggtgtaaacactggatgtgaaataacataacgaccttatgttgagtcttgttatttaaactgttttacagaaaaggcgactgaggcacagggaaactaagtgggctagggtgagtggcccagcatgggacttgaagccactgaaccactgggtgtgtgatcaatgttagtggggccttggatcagggtggtggggggtgtcccacacctggccaaaggagcctttgccaatgagcgagtcaatttcgtagcgctccagccagcgctcgccactgcgcacgatgtagtcatggttgtcgtcatcataaccatggttcaggaccttcttctccttcttgttgctcgaatcctggggtggcgcctgctgggcccgccgcttcttcttcgcatagtatacctgcccagccagccagccaggagatggggactggtgagtgactcatgccagcagacaagaccctcggcacccagcccaggatcccccagcccctgcccacctcattgatgtgcttgtaggtcttgatgaggtccacagagagcttacgcagcggggctgaggttgcatcccggaaggccaggggcagcctccgaggcagtagccgcacatcaggcaatacctgcagggcagggtgaggggtgggcactgaggacgtgccttcacctccgacctcaagaggaagaactgtaagggctgctggcacatcatgtatttggttgctgtctgtatttgttccacctgtctaggaaagaaactcccccagggctgagactttctcttgttcttactatacctccagtgcctacagcagggcctggcacacaatggatgctcttagagatctgtggtgtgaatgagtgaactctgacctttcacccctcacctttactcctttctgaacctcagagggagagatcatatggaaaacctgggctctgttcctccccattcttcactttgaagccagccattttgggtaccctctgaagtacctctatctcaatttaccctcatcccttgggcctcaacccatactcccaccaactctttgcacagttctttcaccccaaggctcttggatctggatctggcccctggacctcccacttcatcctgcttcaagctctgcatgtcactgccttcactgcctctagccttgggagagctttgccctcaccacccatgcctgttggcctcaagaccctttagactcaacccccctccaaattcacccaatccagatctttcactctgaacttttcttagtagcatttattgggtatttactatgtgccaggcaccattctaagtgttttacatgcataccattaactcatttaatcctcacaacaaccctgtgaagtaggtatcattattggccccatttcacagaatgagttgagttctccaactcaagtatggagaacctaaggaatttaaccactgggtcaggatttgaacccagcctctccaaaccctgactctgcctgaaaactcctctgttattttccaatcccatgggacccattatgtgcccagaagaatgtcttgggcaaccacactaccttttggtctggagacctttctatccccagcctccccctaccaccacgcaggtgaggagccagctgaacgcgta

SEQ ID NO: 1887720 - DNA, 4001 bp, Homo sapiens
atgagccagggctggaggactgcctctgccacctgcagccccaccccggccctctgcagccctgcacacaccttgcccgtcaccttccggatttcgttcctgtagaagatgaggcttctccgcatgaactcgtagctggggaaaagggtggcacggggtcaaatgcccgctctgcatggctgctgtgcccaccccagcagtgcccaccaccgcctggccccacctggcccgacgcagagcctccatccactcctgacactgctcctcgctgctgcactcaaagtgatacttcctctcagggtcctcaatgaagcctggggatggaacacctgtggtcggtcctacccacagccacaagcagcttcctcttgccattgcccataaactgtcccttctctggcccccacaaagatgtgttcatgtcctgaccccccagaacccatgagtatggccctgtatataaacagggtctttgcatataaactagtcaaaatgaggttgtcgccaggtgcggtggctcatgcctataatcccagcgctttgagaggccaaggtgggaggattgcttgagctcaggagttcgagaccagcctgggtgacatggcaaaatccccatctctacaaaaacaaaaattagccaggtgtggtggtggggccttgtaggcccagccactccggagtcagaagtgggaggactgcttgagccaagggggttgaggctgcagtgagctgtgatcacgccactgcactccagcctcggaaacaaaagatcctgtctcaaaaataaagagggccgggtacggtggctcaagaccgtaatcccagcactttgggaggccgaggtgggaggatcacctgaggtcaggagttcgagagcagcctggccaatatggcgaaaccccgtctctactaaaaatacaaaaattagctgggcatggtggcgcgtgcctgtagtaccagctactcgggaggctgaggcaggagaatcacttgaacccgagagggggaagttacagggagccgagattgcaccactgcactccagcctgggcgacataccaagaccctgtctcaaaaaataagcaaataaaataataaagtgaagtaaaaaggggttgtcagggtgggccctaaattctgcttggcgtctgtgtagaaggggaaatgtgggcacagacgtgatgcaaggaggacaaggtgacgcttccacaagccaaggaacctggaggatactggccaccactaggaactgggagattcccctcggcctcagaaggattcggccccacccacaccttcatctaggatttctggcctccagaactgtagagaatgtttctgatatttaagccacctggcctgtggaattttgacagccactctgggcaaactagcagggactccatctttccccgcagaagggaatctcttaagacccaggagaacacccccctctcactcctcctacccccacctgggatttccagcccggggccatataacaatgctagacccatgctactcttggcagctggggaaacgctttgggtggggctggcccacctgccctgtaagtacagcctgggcccacagggaacaaagagcagagtctgggagggacccaagcttaagtggactcggcaggtgggaagggtggtgcccgccaggagaacttgaccttgagctgcccgtggacaatgcactcttgtgtttgaggagggtggcgccaggctggggacacagaggagaccttgggcgcccggggaggggaaagtgcggcgctgcgggtgccccgggctgcgggaagcgccgctggcttccctagccccactcactgatggagaaggtgccgggctcttcccggacgactctgcagcgctccagcagcagggctccgacgggctggaggagacacgggcgccgggacggggcagtgagcacccggcctccgaggggcccagcctgggacccgcccgcgcgcccgggacgcccctacctcggcctcgtctgtccgaaagtagaagaggaaattcaccaccagcttcaccagccgccgcttcagcactgcgggcacagcgcgcactcaggggcgcaggcagcccccgcccggaccccggcctcccgtccccggcgccccgacccggactccggcctccggcacccccgcccagaccccggccccggcctcccgcccctggcactgtctcggtctcccgggtcccgctcaccgctgcccttcttggggcccctcatgcccagctcggccgccatctcggccggctgccgggacagagcctgcagctccttctcgttgtaccgcatggctccgcggggaacgggaacccgggccgcgccctcccggccgccgtccccgctcaggctggggccggcgccaaaaatgtctcagggcgcagacacggaagcacccccagggctagtgcgcctgcgcaccttgggccagccatgccgcccgcctccgctgcgtggcgctggcgacccgtggctgctggcgtgggcggggtaccggttggtaggagagacggaccgttgttacataaccattaaactgaaataaaccggaccaaggtggaacagaatcaaggcaccccagcgatggctggcacccctttctagagcggccaggcgcaggcggagggagcgataacgtcgcccggagagtgtcagccgctccctcgcgaaagttggccccgtgcggccgcagcggaccgagggttcgttgagagcgttgtgcgcacgcgcagtttgccttccaggccgcgctttcagcctctccccctccagccttttccttcgcgcctcgggaccctctgactcacgccgctgggcgggccaggcatgcgcacaccagagggcccgtctcatttgccccggaagtgctttctttgcccgccgttcgccaaacgaagtcgtggaggtggcgaaacgaggaggagataacgcggccttgggctctggtgaggagtagaggcggttgagggcggcggccgacgcggaccgggggttccctgggggacagcggacgtaggagagaggcgcttgcgacaggccgcgggccgagggtggggcggcggcgtcgctcccctccctcctcccgtgagcgtccggccttgtgcatcctgaggccccgcgctgggcgggcctggagggtcgggcccgccaggaactctatttccaaactcctgttgggaggccgcgcgcggggcctcacgcctgtaatctcactgctcagggaggccttggcgggaggatcgcttgaggccaggagttcgagaccagcctggacaacacaccgagacccccatctctacaaaaaattttaaaaaattagccaggagtggtggttgtacctgtaggcccagctactcgagaggatcgcttgagctcggaatgtcgaggctgcagtgagccatgatcccaccactgcactccagcctgggcaacatagcgagaccccatcactgcaaaaaaaaaaaaaaaaaaaattagccgggcgtggttggtgacgcgcgcctgtagtcccagctactctggaggctgaagcgggaagatcgcttgagtccaggaggtcgaggctgcagtgagttgtgattgtgccgttgcactccagcctggacaacagagcaagaccctgtttgacaaaataaaaaagaaacaaccaagattcgttggggtcgaatcgggatcgcggctgaaatggtttcggccgccttccttgtagccgagaacgcttctgtatgctcatctatacctgttagttgactggggctctgtgatgtaattcctgtgagcctcagttcccttaaaatgggagtgacggcttcaacatcatgccaaaggcgaccagaacacgttagctggccccattttgcaggtgcaccccgctgtgaccgttgttcttgtgtatccttggacgacaccaaacagccaggcggagctctggaaaataggttgttggctaggttaaggagagaacggtgttg

SEQ ID NO: 1887721 - DNA, 4001 bp, Homo sapiens
aatgtgatccgaattacccttaagctcttgatttaaggtccatatataccatttccaaaacactctagaatcagccacatctcataacctccactgcctccagtgccctgccaggactcacctagaccagtccagttgcttctaccttggtctccgtttatttgccctcaaacccacagtttgtctccccatagcagccagatcacacacactacaacttcccaattgaagatgctttaatggctcccaaagtcctttctagagcctctgatggcaggggctctgggaaagcccccagcccagtcccctcccttgcccagataaaccatggccaaaaatgtccaacagtgggcacagcttctaaatgttctcctttaaggagaggcctctggtgggcctaccaaacctaacttacagggacacccaggagctaggcctgggcctttgccatttccgtttttttttttttttttttttttttttttttgaggcagggtcttgctctgttatccaggctggagtgcagtcgtacaatcatagctcactgcagccttgaacccctgggctcaagcgatcctcctacctcagcctcctatgtaggactacagacccacgctatcagccccaactaactttttaatttttttgtagagttggggtcttgctattgtattgcccaggctggtctcaaactcctggccttaagcaagcttcctgcctcagcctcccaaagtgctgggattacaggtgtgaactactgcacccaaccctttgtcatctatcttttcttcacttggagaaaagtgagaaaattaagacttagtgactatgacagttaagcaactatcacaaccaccaaggtcagggtcaagttctctcaccaccccagcccctgacccccaggactcagagacttacctgattccacgtagcaaagttgactttgtcggctgcattaaaagccatgatgttatattttttggttgtattcctggagtggatgagaagaggtagtgtcaatccaatacagcaattcaatcattaatttaatcagtcaatgctattgaaccattaattcaatcaaccacccaactggatcgttaattcaatcaaatcattactttaattcaatcactcaattcaattgaaccattaattcaattcaatcattccattcaattgaatcattaattcaattcaattcactcaacaaacccacccagcttcattcagcctgttttgcctggcaacactggatacggaagactccaaggattcccagtctgccagagaagctagacccatcctctcctgaccccaggcagaagaagagcagatggagggacgaagatttgggggaacccaagatgtggagattattgtgaactcagccttggggaggagggaggacaggcagggagtatttcctggaggaggaagatactggagttgagttttgcagaatcatcaagaattcacccagcagagtcacagtttaggggttgaggggaggcactcatggcagaggaacaggatgtacaaaggcctggaaaggaaagacagcctgaccactttgaaacaggacgaggaatatgtccttacagctggcctgggcatcatgggaccatatactcctcgaaggttaggccagggggctggatcaccgtgtattaatgcactcattcattcattcgttcaaaaaagcagtgttgtccccagagaagcctcagcttaatcccagccctgccctccaagtctctcccggtctggagggagaaccacagacagggccagaaatggctggctaagaagatcgtgaaggttttcatttttggggggtggagaggagtgggagatggggctggggacttacttaggaactcgaacgacgtattcagtgacattctggctgctagggccctgcggaaagaggaagcggtgagtgaggggtcgccgaggtcgccgtcggaacccccgaaccccgccaaatccacactcactagggccgccatgggcaatggtcagtggttccgatctggtccgacccgggttcctttcgtctcctctggcgtgcgcgtccctcgatcccggggaagccgccgctcggtgtcgggtctctgtgcctgagcgaggaccccaaccctaggcgcctctggcgctgggaaaaggtaaccggaagaggcgctcaagctactcggtctacgcttctgcggccgcctaacccggaagcgaaaccctcgagcagccgcgtcgcgatggcaaccttcttagcgactgtggccacctcagtgcgcagtcacttatgctcctcggcggctatggtcacctcaaaaggtccaccgcggtccctttttagactcagcaaacctaggccgagtctgagataaactaacgggcctctgtcgctggcgctcttgtatataacgcggttaacttcatcaaatgggggaccgccctctctcgtgacgtcagcacccaaggaccgtggggcatcctgggtgggaagagggagacgaatcccccttgcgggctcccaggcactttgcgcatgcgccttgccgctctggacctggggggcccagaaggccgcgtcaccatagcaaccgaggcctactcgggtcgggtcgaaccgccgcttggctccccatgggtctgtttggggttcatttcctccccctaccccgaaggggtggaccccgtcattcccgcaaaatgaccggggcggggacccttgtgacgttgagccgagccaggaggggtcagagcctgggcggggtcggggcgcgaccaccccaagagctgctggccggatgggtctttgcaagtccaagctgcccgagatgggcagggctctgaggccccaggagaagggtaacgtcgcgggggcggctggctggcttcctggggggaagggaaggaagctgccgagaacaggagggagatgcaggatcccctaccccgttccaggcatgcacacatcccccgaatcatggcagtaacacaactgcgcatgctcacggcgcaaccattcattgctccacttcgcaaatactccagcacctcctgggttcggggccccgcaaggtgaatctgtcaaaccagctccccacggaggattacagtgtcctctcgagggttacagtgtcgtggaagagacagagtcacagcatgggaatctacaacccaggaaggagcaggagaagcacagcggggctctgagggctcagagaagaggggaggtttcagttgggcactgagggatgcataggagttggctaagcaaagggaaggcgggcaagacacaaaagttgggccatgaactacagacaccgtcgatgtgtctgttttcatttatttctcatccaccactaaatgtcaggaaccgccaacccctaggaatataggaatgagggaggcagaaatagtccttgccctcatggagtgtctggcttgggggagacaagaacgagtaaacggctgggcacggtggctcatgcctgtaatcccagcactttgggaggccgaggcgggcggatcacctgaggttgagagttcgagaccagcctgaccaacgtggagaaaccccgtctctactaaaaatacaagattagccgggcgtggtagcacatgcctgtaatcccagctactcgggaggctgagacaggagaatcgcttgaacctgggaggcagaggttgtggtgagccgagatcgcgccattgccctccagtctgggcaacaagagcgaaactccgtctcaaaaaaaaaaaaaaaaaaaaaagaaggaaaagaaggaaaaaaaaagaacgagtaaacagagaagatcatgacagactgtggccattgctgtggaggaaataggtgtctcagacaaggagtgatggggggaagctctagatggaggctagagaaggccagatggaagttgtggccagaaggaactggggcaggcagggattttccaagcagaggaaacagcaagggagaagtgagtttcaaattc

SEQ ID NO: 1887722 - DNA, 4001 bp, Homo sapiens
gatcctcctggctcagccagtctcccaaagcactggaattaatggcatgagccaccatggccagccctacattattattattattattattattattattattattattattattattttgagacaggctcttgatctgtcgtccaggctggagtgcagcagtgcaaacttggttcactgcaacctccacctccccagctcaggagatcctctcacctcagcttccagagtagctgggactacaggcgtgcaccaccatgcctggctaattcctgtacattttttggttttttagtaaagacaaggttttgccatgttgcccaggctggtctacaattcctgggcccaagcaatccttttgcctcggcctcccaaatactgggattacaggcgtaagccactgcctggccctaagtatattatttaaaaagaaaacattttatctacagaaaagcaacatggttttgtcagaccctggccccagaatcccagttcctgggactcagttttcttgtctgaagagcggagatgatcacaggataaggaatgggtgagttagtgtattaaagctccgggacaccggaagcactcaacatgtgcgaacaattgttattcattctcacaacaaccctctgtatccgggtcttctgccctgagacaccaacacccgcggagtccctctctccttccttccaacaatcagaagacttgaaggcaaaactaaaaagtaagtggctttctctctctgcttctcatcccacctgatcagcccaggtgcgtgtgggcatcacaccagggaaacgcagacgaaggatctgagcgagcccccggtccccaactcactgcagatccttggtgttgatgaggaacaggaccaggaaactgctactgtttttctggagagggcagtcctggaaatcccgggtctggggggtgggcaggagggagtgagtcttggttactcctctcctggtccagctccaccctgtctccctccctgtccacccacgggatcttcctgctcctgcctctgacaaagaacaggggcccttgggttacagatgcagaggacagaccctaccccctccctccagccccttctcccgtcttccccatgccctccactcactgaataggagcgaactctgccagaccgaacccggctgagactgaaccccacctggtgggtggaaaaaaaaaggggagggtgtgagggacagtagagacctcccagctatccctttcagtagcaatagaaacctaacctcacatttactgaacacctaacatgtgctagatcccacacgctctttttcttttttagagttggggtggtgggtggacctcattctgtttctcaagctggaatacagtggcaggatcatagctcactacagcctcgaactcccaggttcaaacgatcctctcacctcggcctcccgactggctgggactacaggcacacctcaccacgcccggctaattttaaaaactttttgtagagacggggttctcactatgttgcccaggctggtcttgaactcctggcctcaggcaatcctcccaccttggcctcccaaagtgctaggactacaaagcctgagccaccgcgccccgcctgtcccccaagtcttaagaaaagtgcctagcacatcctgtgtaagacatcattactcccaggtacagatgacgaaacaggctcagagagatgacgggacttgtacaagatcacatgggtagcggcagagctgggaacccagaaccgggggattgcaccgtgctctcctccagcaaactcctcaaggtccctcaccagcagggacttctcttctgcctcccggaggcccagccgcaggacgctcaactccacctccagagagccattggtgtagaaaccgaagctgttcagctggatgtccgctcgcttctccccctgccggagaccaaggaggcagaggcagttcagacctctttccgcctgcccagccccaggggtctggcacgaggacctccagaagggcctcctggtacccctctatttaggacaggcccagaggatgacaagagaaagttgagagggacttcctccctgcaggggaagggtggtcctgcattctccgacctctgttctgagaacccaggaacagagatcctgcggcacctggaagtctccccactggggtgagcaccgcccggagaacagttattcacctcggcgtgcctgaccttcaccttcccgaagaacttttacattccagttgagctcccagcaatatttcaacagaaccccccaaatcccattaagtgcccagaggaccccactctatagccccccaggaccccgctgtgcggctccagggtctctagcgccccaaaagtgattccaagaatttaaaggactaagacccagttggggggaaggggggtgtagtccccaagagatggagcctcgcccccgaagggagggggccgaccccagcgaggcggacccggcaactccatccggaggaccgaaggggatcccgggacgagaccactccgggcccggaaacggggggcgccggaccactccaccgcctcggggacgggggagggcggacgagaccactccaagccagggggcttctccgagacaaagttgcgccaccgaccccagaccctcgcgcggcgggcctcaccgtcagcgccagctggtggatgcgcccggagcagccacccagcagcagcaccagaagtagccgctgcccccactccgcggggctcccgcggccgagccccctcctctcgctcactgccatctctggagccacctcctccccgactccgcctctggcgcccaagcccgcccaccgatgagccaatcgccgcacggcggggcccggcctttcggagtttccagtccgccaaccaatcagcaattgcctctccgcaagcccgcctgcttgcgtcaccgacggacagcaccggttccgaatgggagagccgataacgcttaacccccagctcactctcaccaatcgctataaagattgtccggatgtgatttaatgagcagtttatctaaccaattgtcatggatctgatatccggcccttaaagcggaatttctccacccactcttaactgtccgggactacattacccagaatgcagcgggagcagacaagggccacaaagcattaaataaactacctttcccagtatccccaaggacggacttcctcttcttgagccagggatgtggctcccagccagagctgaggcttttggtaaacacacgcatctgttcaggcctgacctgttttcctaatcttcctggtccacagagaggcctaaagctggcctcaggttaaagtttgaccctaggatgacctatgaccccaggctgagaccccagccttaggctaagccttttattccagagtgaggcaattggagccccacccccagattccaggctagaccggactccgggctgaactctgaccccaggtgaactccctctctgcaagttgagtcctaacttcagcctgaaactctgacaccccctcgtcccccacaccacacactgaggcttaatctctggtttaggccaccgatctggactagccctgactccagattggacctgaccccttaccgggttgctaatccttctggttaagcctctggcctctatcccctatccccacggtggtgctgacctggactgaaccccaattccagtttgagtctctgagcagaggtgaactcagaactttgctaggctgagcccccatttgagactagccacagaactcactgggttcaattgcccaactgcaatcagacattttctagctcagaagccaccagcaggtggggccaggtctcagcagagacatcagtcccagtgtgggctcccaaggctctcctcctgggctcagctgtatctctctgttctgggagcctgggtgctctgtgtaaggggaacgtatacccaagggcccccctgcaagacg

SEQ ID NO: 1887723 - DNA, 4001 bp, Homo sapiens
gggaggtggggcggctgggccccaggccagatactgcccggcctcaccccgcagagccagttctggactcgagaggccagtccctccgctgcctggggccttggagtgggtcctgcccggaaacttccttgagcctctgtagcctgggaagggcaatccagcccctggctgcccaggtctcgccagcccctgcctctcagagcccttctgtggccccaggcagctgccgcctccctggggtggcacccactgtctgttccccactagggactggcccttgccctcaagtcttggagtcaggcaggctctggcccagctctgggaactgattagtaacgcgtttctgtgcctggacgggggccaggcgccagaccttgtgcacggcccaggaccagggcgtggtccttagtcctaagcctgggaagccattagcgggctgtaggctattaaggggttttaagtatcaagggatataatcagatttgtgcttcgaacgggtcacacaggctgctgtgtgggcaggaggcagctggggacatggggaggcccaggccattggcttggactttgcagggaggtgacagggctggagagaagcgagtgagacaggaggggagggctgagctgtgtagaactgggcggcagctgggaagccagtgccagcctgggttgcagggcaggccttgcatctgagagagacacccaggcaatggcagggggcaactggattgtcaaacacagatctcagagaaacctggaatcactggcccagaggtagatgccaggcctggaaacaccaggctggccaggggagacaagatcaagttagaagttggccccatgccaaacgctggttagggccagtaacaacagccacacagaccaggagaatccagcaagcgggggtggccaaggccacaggaagggccagtgggacacctcgagcctgagagatcagttcagaggcagcttcgaaacagccctggctgggggctgggagtgccctggctgaagctgcattaggggattatgggggttgaagacaggagttggtttgagaaagaacaggagactaaaaacacagccagggagtgtgggaccccggccagcctcggagggggggacaaggttcaacttctctttaaattattttattcaagaagtgggggaggacagacaaggggactgagctgagccctgagtccctgaacctcccagctcagcccccacagcaggactggactcaaagtcagagggtggagactccagccccacccagacacggttggggacagacaggacccaggaataccgactgactgtcctccaggggatggcggccgcagcacacagggcccggcccgtggaccgcccgggtggggctatttgggggtgccgccgcccttcttgggagtggtgggtttcttgccctgccagaggtgtccctggatggtgaaggcatcgacgctcatggacatggtcttggcggggatctgggtgaagcgcttgcggtccgagttgtacttgtagatgccttccaccatggcgggcgtgacggtccggggcccataccctgccagccgcgacagctcctctgtctcccccgacagcgtgtagagcgcccggaactggcagctcgagtcgcgaaagaggatcaggaagtggttggccttgcttttctcaatttcctgggcaggagtgctggaaatggtcagctggccaagtcaggccacccacccacccaccagcccccaactcccacgtgtgggcgggctcacctccagaatgcgattcttctgcggttcgttcaccttgcccgccaggcagcagtgtgatagggcattgtggatgatgaacttgttggacttggcgctgggttctttgtacagccgtggacctagagggtgaggcagtgggagggggtggggggcagcaggaatgagcaggggctgtggaggagggtgcctgttgctcctcacatcacccagagcccctgcttacctgtgtactcgggcactgacgctggggaggaggcattgctgccattttcccagtcccgttcgcggcttccaggcaggcggcttggggacatgagacctgacggggagggagccctgcagtgggagaaggatgggatggaggtggggtcaggatgggatggaggtggggtcagagatgggaagcttccctatgtgcagaggggccaaggaaaataagggccacggctgggcatcgtggctcatgcctgtaatcccagcacttcgggaggccaaagcgggcagatcacttgaggtcgggagttcgaggccagcctggccaacatggtgaaacaccgtctctacaggcacgggtaaccccagctactcaggaggctgaggcacgagaatcacttgcacccagggggcggaggttgccgtgagccaagattgcgccactgcactccagcctgggcgacacagcaagactccctctcaaaaaaacaaaaaaaaaaaaaaaaaaaaaaaaggcgggccacacacactgcagaggaggcggtatacactgcacaccctcccaagtccatgcagtgccccgtgctgtcctcctcccacaggaacacctggcactcaagtgcactgaggcacatgcttgagtcctgtctgccaggtacagactatgccccatgcacacgtgcccacacgcgtccctccatctcttcatggcgtatccataaactcgagccataccgccctctaggttcacccagatgcccacacacctcccaggctctgggaagccacccggcatacgaaccccgcctgtgcgggctaaactcaccgagacgtgggcctcttcaccccgaggttattgtgggcctcgttggccacagtggacagtgacagggtggactgggaatagattttgctcagccgagagcctggggacagagattgcaggtcagtgcccaccagaagcccctgccctccacaacacccggtccagcaggctgtggggggaacacaggaggagtcagtcctgcccaagacccctcggccctctgcagcacccctatggggggacccctctatgagggaggatgctttgcccagcaggcaagtggggagcagcactgggtcagcccctactggcaacgcctcaccccaaacatactcccaaaggttcctatccatgaagccacagaagaaagacccctcatcccactgcaccccacatccctatggaagtcttttttttttttttttgtcttatttctgagacggagtctcgctctgttgcccaggctggagtacagtggtgcaatcttggctcaccgcaacctccacctcccaggctcaagcgattctcctgcctcagtctcccaagtagctgggactacaggcatgccatatgcccggctaatttttgtatttttaatagagatgggctttcaccatgttggccaggctggtctcaaactcctgacctcaggtgatccgcccgcctcagcctcccaaagtgctgggattacaggcgtgagccaccgcgcccggccccctatggaagtctttacccaagagacagtgtccaaccccacctgaggccccctgtcaccccacatacccgccccctcccggcacccctgcttacatctccctccccctccccccttacccatgggggcctcacccagtgagccccggaaagggcactgggcaggccccgtcccccaagggtcctcacccagcaggccgcgggctgggcttcgtgccagggctgagtcgtcacagcaacccgagcgaggccgggtggccctccgcccgccccgacctggacccccggaccccgcagcccggggccgcagcaccttatcgaggtcgtccatcagcttcagctgggcccggcgctcgtactcctgccgcgtgaagtcccccttccgggggcccacctcctcctcggctggagcccgggcagcaggggctggagtcgccatcgggactgcggacacaagcggggctgggccc

SEQ ID NO: 1887724 - DNA, 4001 bp, Homo sapiens
aaagagaataaagacaggtggggagggggagacggcagtgaggccgggagcaagaggcaggcctgggttgaggacccagcccccacccacacaccaccccagggtgttcccaggctgacctccgcaagccaccagggtgtcgggcaggagtgccaaacctaggcatcaactcgcctgctgtttgaccctcagtgagccccctgccctccctgggcctcagcttccccaccggagaagtggggagaataaagcctggcccacggtaggttgaggcaggcaggagcaggaaggagaagaaggtaaacagtgggaggaggtgcccagtgtgagggttccccagctgcctggtggcacaccccagtaggcagagggcaagctgggagccccggagtcaccagggctccgctactctgtgacactgaacaagcctcttggcctctctgggcctgtttcctcgcaagccaaatagggatgaggacgattcctccactccagcagctgggcacgtagtgagagctcactgggaggaagtgagacaggaggagagaccccagggtgcaggcagttggggtggagggcagggggttggccttacctgggcactcctgggggaatccctggggggatccgaactggccgagatgggatctgaggcggggctgggaagaggtcactgttggcaaacacgctctggggtccaggccgggatgggattgggggcgccgagaaggaggctgctgcccccacgggaacaggaatcagggggggccctggagtggggcccctcactgctgggggccggccaggggggtgtatgctggacaccggtcggcgctgtggagtggggctgtgaggaaggagagggtgtgagctacagatacagatggagtaggagcccccgccatgccactgtggctgccagaacctgaggtgggggctggctatggggacagcgcaggcgcagtgggatcctcccaccccaacctgagcgccagtcccaccttcccttgccctcggccccctcaggcacttcccactcacagggccccctcaggccttgggcctgggatccaccctcacagccaaagacacttccagagtcctccagatcaagccctaatatctctaggggccgtggaacctgcaagccctgtccagacatccagattccctcctgggcctcagtccctgccacctgcaggcctgggtgcgatatcctccccttaaggaactccatggctcccccagggctctgcaaggcagccccctctgaggttccctgcccgacggcctcaatggacaactcaggggcggcagcagctctggccacgccttgcgtttgcccctccagagcctcccatctgcccttctctgtgctccaggaggctcatctctctcctgtggctgctgcccctccagcctcttaccccagcttccatttgggctgtgccaatggaaggcaccagcagagggcaggcggggtatttattcacagggtcctgccctagagctgtagggctggctcgcccccataccccttctctccctcctccggcctcagcagggcagcagctcccacagtgcccagccctgggtgccacccttgggctgtgtcctgtttcctgccaggaccctgcaggacacacagggagggcaggaacctgcaggccgaatgcttgagggtaggggaaccaggcttccggacctgtggctgctggcgctctggagccaggtgtcatcgacaggcgggggtacaggcgtggacacagtgctggtgctgatgtcaccgatgatgttgagcgcctccttgagggcatggtacatgcgcagcatgtcgtcccgccgctgtgcctggtcagccgactcctccatgaggctgctctggtctgccgaggagtataggtaggccagcagctcgtggtggatgaaggccttcgtctgcgggcaggggttggggagggtcaggcttgtgtatcaccccaacccagaacccacagtgactgctggaaaaacatctctcacagggcggggccacccccagacttttttgaaaaagagtcttgctctgtcacccaggctggagtacagtggctcaatttcagctcactgcaacctccgcctcccgggttcaagtaattatcctgcctcagcctcccaagtagctaggacgacaggcacgttgacaccatgcttggctaagttttgtaatttttttagagatagggttccaccatgtggcccaggctggttatgagattcttattcaacttatttctagtatcttgcctcttccattgatgtcttttctcctgttttagcttatttatttatttccttaaccttggcagaataatcctgttatatcttttttgtttttgcttttttttttttgagacagtctcactgtcgcccaggttggagtgcagtggtgcaatctcagctcactgcaacctccgcctcccgggtttatgccattctcctgcctcagtctcccaagtagctgggactacaggcgcctgccaccacgcccagcttattttttgtatttttagtagagacagggtttcaccctgttagccaggatggtctcgatctcctgaccttatgatccgcctgcctcagcctcccaaagtgctgggattacaggcgtgagccaccgcgcccagccaatcctgttatatctttatttttttgtgacagagtctcactctgtcacccaggctgcagtgcaatcttggctcactgcaacctgcgtctcctgggtccaagcaattcttgtgcctcaacctcccaagtagctgggactacaggcgtgccccccaacccccggctaatttttgtatttttagcagagatggggtttcaccatattggccaggctggtctttaactcctgacctcaggtgatccacccgccttggcctcccaaagtgctgggattacaggcgtgagtgagccactgcgcccggctaatcctgttacatcttccacctggcttctgttcaaacactactagtttctgttcatgaattttatacattgtcctttctggaacctcctactggatacagaagtttttcagttacttttttttttctttttttttgagacagagtctccctctgtcaccaggctggagtacagtggcatgatctccgctcattgcaaactccacctcctaggttcaagtgattctcctgcctcagcctccagagtagctgggactacagacgcgtgccaccacgcccagctaatttttgtatttttagtagaggggggtttcagcatgttggccaggatggtctcagtctcttgacctcgtgatgtgcccgcctcagcctcccaaagtgctgggattacaggcatgagccaccacacctggccgtcacaactttttttttttttagatagggtctcactcctatcactcaggctggaatgcagtggagcgatctttgctcaccgcagcctcgatctcctgggctcaagtgatcttcctgcctcagcttcccgagtagctgggccgacagatttattattttcttaaataataaaatatttttattttataagagtctattaaaaatggataattatgtcccatctttggctgctataaaacatcatggaaaacaataagcatgtataagctcactttgcacgtgggcaattgtctctcttagagaagttcctaaaagtaaacttgcagggtcaaaggatatatgcattttaaatttcatagcagaagaaccgtatatgtctccgatcctatcggtatatgaggaaacataccaggacaccatgaaactgtgaacactgatcactactgagaatgggagcaacagggtgggagggcatggcacgtgggaggtgtgtgtgtgttttaaatagggatggggtctcactatgttgtccaggctggtcttgaactcctgggatcgagtgatcctcctgccaagcctcccaaagtgctgggagtacagatgtgagccaccatgccc

SEQ ID NO: 1887725 - DNA, 4001 bp, Homo sapiens
tcccagctactcaggaggctgagggaggagaattgcttgaacctgggaggcggaggttgcagtgagccgagatcacgccattgcactccagcctgggcaacaagagtgaaattctgtctcaaaaaaaaaaaaaaaaagaaatatccagaaaaagcaattccacagagagagaaaatagattagtggttgccagggactgcagggagggaggaatgaggagggagtgtgtaatgggtgtgaggtttccctttgggggtgataaaaaagttctgcaactacatagatctaatggctgtacagcatggtgaattactaaatgctgcagaattgtttatttattactattaatcattattattattattattattattattattattattattttgagacagagtctcgctctgttgcccaggctggagtgcagtggtgggatcttggctcacaccaacctccacctcccgggttcaagcaattctcctgcctcagccttccaagtagctgggattacaggcatgtgccaccacgcccaactaatttttttgtatttttagtggaaatggggtttcaccatgttggccaggctggtttcgaattcctgacctcaagtgatccacccatcttggcctcccaaagtactaggattacatgcataagccattgcacctggcctattctttattatttttaatttcatttttcaagacagggtctcaccctgttgcccaggctggagtgcagtggtgtgatcatggcttactgaagccttgacttcctgggctcataggatcctcccacctcagcctcccgagtagctgggactacaggggtgcaccaccacgcccagctgattttttatgctgcccaggctggtctcaaatgccttagcacaaacaatcctcctgccttggcctcccaaagtgctgggattacaggcctaagccactgcacccggccccgaattgttcattttaaaatggttaaaaaggccgggcgcggtggctcatgcctgtaatcccagcactttgggaggccgagatgggcagatcaactgagattgggagtttgcaaccagcctgaccaacatggagaaattttagtctctactaaaaatacaaaattagccgggtgtggtgttacatgcctgtaatcccagctactcgggaggctgaggcaggagaattgcttgaacccaggagatggaggttgtggtgagctgagatagtgccattgcactccagcctgggcaacaagagcaaaactccatctcaaaaaataaataaataaataaataaaaataaaataaaatggttaaaaaagtaaattaaattttatgtttcatggattttaacatgacaaagaggtcacaggggaagagcaattattttattttattttattttattttttgagacagtttcgctcttgttgcccaggctggagtgcagtggtgtaatctcagttcacagcaatctctgcctcctggattcaagtgattcttctgcctcagcctcacaagtagctgggattagaggcatgtgccaccaggcttggctaatttttgcattttttttttttttaagtagaaacggggtttctccatgttggttaggctggtctcgaactcccgacctcaggtgatctgcccaccttggcctcccaaagtgctgggattacaggcatgagccagcatgccaggctctggaagagctattattaatcccattttatggatgggaaaactgaggctcagagtgtaggaccaagagatccacaaagcctgagggcaaagaagccggagatgagccccaccctgccctcccaggaaccagggtactgaccgcttagccacccagccttacctcagagagatcgtcttgctcaggggtgttggaaccaccactgtcctgttcctccagatgcaccacatctagggagggactgagagtgagcacgagctgggttctgggcctgctcacccccagtccccctgcgcccaccagccggcacctggaaaggggtcacgggtgaggcccagctggcggatgatgtagcgggggatgtccgtcttcacaaggtggccctccttggcgtgtccttcggccgcctccagcaggtggtagaactcctcggggttgaattcctgaggcagggcaggagtgggctcaccacaggctcccagggtctaccaacccacccctacccatgcccagccccctcaccaggcactccagcagcctcgcagggcgtgagatgataataagcaacttcttcaccagctgagtaacgaaggccacctccaagctctcagagcgttcataggcctgtggcaggggacacagagggacagggctcataggcactctgcctcagcccggcccctctctcagcccctcagagtacatactgctgctactgtcccatcttacaggtgaggagactgaagcccaagccacacagtaaaaataatgaggctgggcacggtggctcatgcctgtaatcccagcactttgggaggctgaggtgggtggatcacttgaggtcaaaagtttgaaaccagcctggccaacatggtgaaaccccatctccactaaaaacgcaaaatgagccaggcgtggtggcaggtgcctgtaatcccagctacttgggaggctgaagcaggagaatcccttgaacctgggaggcagaagttgcagtgagccaagatcacaccactgcactccagcctgggtgacacagcgagactctgtctcaaaacaaaagcaatgacaaacaaacaaacaaacaacaaaaccatagcgagaccctgtctctacaaataataaaattagccaggtgtggtagtgtgtgcctgtagtcctagctacctgggaggctgaagtgggagaattacttgagcccagggggctaaggctgcagtgagctgattataccactgcactcctgcctgggtgacagagagagagaccctgtctcaaaaaaaaaaaaagaaaaaaagaaaagaaaaagaggccgggcacagtggctcacgcctgtaatcccagcattttgggaggcagaggagggtgaattacttgaggtcaggggtttgagaccagcctgcccaacatggcaaaaccccatctctactggaagtacaaaaattagctgggtatagtgccacacacttgtaatgccagctacttgggaggctgaggcaagagaatcgcttgaaccagggaggtggaggttgcagtgagccgagatcacatcactacactccagcctgggtagcagagtgagactgtctcaaaaaaaaaaaaaaagaaaagaaaaaactaatatcttattgcaatacttgaaaagcctaaaattaatgccaaaaatctatcataagccaaaatatcaaaatttaagccagatgtggtggtacatgcctataatcccagctactcaggaggctgaggcaggaggattgcttgagcccaggagttcaagaccaccctgggcaacatagagagtcctccatctcaaatgaaaaagaaaaagaaaaagaaaattaaataaagacagaatccaacaggctgtgcctagccatattgtaacttgagccaaaaaaaagtatgcaccaacctatatgtgttttaatgtgtctttgaaaatgtctaatggtttcaatgaaaatagtattattgatgagtttgctttcattaaaaccaggacagtaaaattataacacattctggcttggttataaataaaatatgtaaacttaaaataatgttgggttttcatttatctacttttcaagtttttcaaaaattaatttaatgttctgggggaagaaataattacttgctttaccctggtcctggtctcagccctaatacctattgggtctttgtttgtttgacttgttttactgtagagacagggtctcgctatgttacccaggctggtctgcaactcctgggctccagaaagcctcctgtctcagctccccaaagtgctgggattac

SEQ ID NO: 1887726 - DNA, 4001 bp, Homo sapiens
catggatgaacagacacacggacagacacgtgggacacaccgatgggcagatagagtgcacagagaaacagacggggcaagtggatgggcaggtggaaagagaggcagggcccacggacaaacagactgggatggatgcatagacagacggatcgatcgggtggatgggctcacttgcaagtgcgctcgcggccaccggcgtggcagtcgaagttgtcgtagaggcaggcgggcgagctgcaggcggggtcgcagcggctgttgttgaagaggcgccagcactgcagcgcctcgcattgccgccaggggtcgcccacgctcagcgagcagtcgccgccgtcccagccgcagcctgggctgttgcactcgcggtcgcagcgctggtccccgcgcttggcctggcaggcggcgcgcgggcaccgcggctcctccgagacctcgggtgccgcggcgggcgcctcgcagcgcggcccggtccagccctgcgcgcaagcgcagcggaagaagggcgcgagcggcgcggggcggcaggagcccccgtggagacagggggcggccgcgcagctggcgttgctggcccccggcggcgaccccgggaagctgcggcaggagggtcccgacaaccctggggggcaggcgcagcgcggcccgcggggcgtctgctggcatgggacgcccaccgggcactgcagctcccggcaggagcgcgccacccgctcgcaacgcggaccccagaacggctgggggtcgggtttggggagggagggataaaaatgagggtggggagtggagggaaggaggagaagaaatggaggagtggggaaaagaagagtcaaggggagagagggggaagagaagaggtcaagactaaggaaggttgagaccccctcaacctccccatgtcccacccaaccgctcccctttccacactggagaccccacctggcagataagccctgccatcccaggaggccacgccccccaatcaccatcctcacccttttcccttcaaacctccaggaaatgtcggggcagggggttgtttctttgttttttgagacggagtgtcactcagtcgccaggctggagtgcaatggcgtgatggctcactgcaacctccgcctcccgggttcaagtgattctcctgcctcagcctcccgagtagctgggattacaggcagctgccactacgcccggctaatttttatatttttagtagagacggggtttcaccatgttgcccaggctggtctctaactcctggcctcaagtgatcctcccgcctcggcctcccaatgtgctgggattacaggtgtgagctaccacacccggcggaaatgtcagcattttccagaaactcccttcccttcgatgtctcccctaaagccacatcctcctcctagacgccacgcccctactactccagaggccacgcccctactcctcctccaaaggccgccacccacacctacctgggcacagtgacaggtgaaggtcagcccacccccaggacccgggctaggacggcactggcctccatgctggcatggctgggactcgcagggagacaggacagtctgacagcgaggacctgagcgagcgggagcatgtagatcagccacaatgggggaatgacaggcggggtcccaggccagccccttcgccaacgcttacctgagaagccagcatgacaaaggcaacggaaacctccgcctgggtcctgcaggcagtcccgggtgtgtgccgcgtggcaggcacctgagcgacactcattgatgtctgcctcgcagcgcaaaccagtgtatcctgggggacaggtgcagcggaaaccacccaccaggtccacgcaggtgccattgtgtaggcaccggggccctgagtccagcggtgggcctgggccgcagtcatcctcattaatctcgcagagcacccctgggggaagaaacgaggggtggtcaagagggaatgaagacagcctctcatcctgtccccccaaccctggccctggcatacccagcgttcctgggggacaggagcagagatagcgggccacgaggtcaatgcatgaacccccgtgctggcagggctgggaggcacactcgtccacgtcgtcctcacagttatcaccattgtagccaggaagacacttcagtggggtaagagagggacccactcagcttagtgggacacagacccacctggacatacccatgaagacgcaaagaaccccagcacaaaaggacacacacagatgttcagcgcactaccagtaggtaatcccagcactttgggaggccgaggtgggcagatcacctgagatcaggagttcgagaccagcctggccaacatggtgaaaccctgtcactatgaaaaatacaaaaattagctgggcgtggtggtgggtgcctgtactcccagctataatgagaggctgaagcagaagaatcacctgaacccaggaggcaaaggttgcagtgagctgagatcgcgccactgcactcgtctgggtgacagagtgagaacctgtctcaaaaaaacaaacaaataaaaaaacaccccagatctacccagagtgacacccacagatacaccaagagtcacaaaagcaaaaactcagacatatctagagacatacccataccaagccacacagaaatgtgtgcccagacgcacccaagcatgcccacctcctcttccctctcctggggagcgcccccttacctcacacatgtagccccccatatagccacggcaggtccccccatgctggcagggctgggccaagcaggggtccacctcctgctcacagtggctaccagtacggccctctgggcacacgcagtagtgggagctgtcttcatccacacactgcccacccgcctgacacagctgctccagccgcacccctgcaaagaggagagtggcacaggaacagaggtaaccccatacatcccccttctgcctccatcacacagatcattcaacatccttggtggaatgagtccccaggatcgcacccacactccatcaggttgtcacacatccccccagcaggcaaggtctcatcactgacatacacacacatgccttcaacgctcacagcagctcggtcacaccctgtagcacacacaccatccctgctgtctcacagtgacagacacacaccatcccggccagttgtcacatgctcacacacccacaccactcagccacacaccccatcatgccccataggctctgtggcacccccattcggctcacactagcaggaggtacgtgcatgagccccttcccaaggccccacacgcccgcccacatgctcccactcaccgatctgggctgcggcctccctgcagggcaagcttcggatgtcacagaggcgtccgctccatccagggggacaaaggcaataggccccagtctggacgcagcgacccccgttttgacaaggctggcggctgcaccaatccaccagcgtctggaggggaagcactcagagtcagtactgtggggtggggggtagtctgggagaaactgtgccccgacttggcttctccctcctaggatcccaggcaggctcctcccccaggtccccagtaactccacccacctggcactgcgggcccgtgaagctctcgaggcaggtgcagcggaagccagggtgggcggcgctgcagacgcccccgtgtaggcagggccgcgagaggcaggggtctgcctcatgttggcagtgggctcctgtgtagccgggacggcacaggcagctgaacgagttcacgccgtccacacaggtcccgccattgaagcaggagctggagcggaaggagtgggagggaggatcaggctccgccccctcacaggccctgccctccttcctgagtcccgctgttagcgctggggacgtcccactccctgacccttatctcggcaagaagctgcagccccagcagaagccaatcaggtcccttagctccaattcaccagggacttcagccctaagg

SEQ ID NO: 1887727 - DNA, 4001 bp, Homo sapiens
attgaggcagatctccattggtgtctcttggttgtagcgggtgtcatagaaccggggccaagttgatgggatggagctgcctgcctggcccaggaaccagtaggcctcaaagatcttggtcaggtctcgagccaggcagctgcagttgtacatgaccacgcccagctccttgacctgtaggagggcagtgctgagctcagcgatagcggcctagtgctcacagatgacagggacactccccagtctggtctctgtctttccccctgtcccacagtaccccctccaccccagctccaatagctaaagtcctagaatgattatcaacttaagttttgatgaaaatcagttattccaaagctccaggtttcctgaacgtttgcaatctgctgttgcttctaccctccactgagctagcttctactcattcttaggtctaggctgacatgttgcctccttcaggaagcctcccatgactacccagcctgcaccaggcattcctctgggctctcacagtcccttgggattccctcctcattctttctggtgacaaactggtcttcccattgggctgggaggacaggcactagggatgtctcagtcacagctatatctacagcatctccctgcataattgctgagattaaaggttaggggaactatctgttgaggaaatgaattcatgagttattgtcctgtcttatcttcacctcattgcccaagctgtttcctgttccatcttgcgctaattcctccctatccttcagggatcagattagttatacctcctttgggaaaccctccaatgccccaggttggggtctctgagcttccacagccctctgttccctccatcctggccctgaccctctgcctgtgtctccccaaccccggccctgacccctctgggctgtcactgtcaggtgacaggccagtctgcattgggctgggagttccatgaggtccatctgttaccaccatgttcccaacattacccaggatagggctggacttagagcaggcacacagagatgtacaatgaagatcaaatgggtgcgcaggttcttgaatgccatgtagaggggctggtagctgcaattggggatcagagggagccccaggcttccaggagcagggggagggcagtagagggctccatttagggattctttgttttgtaacagggtctcactctgtcactcaggctggagtgcagtggcatgaatacaacccactgtagcctcaaactcctgggctcaagtgatcctcccacctcagtctcccaaggagctgggaccagaggtgtgtgccaccacaccgggcttatttttttttttttggtagagatggggtctcactatgttgcccaggctggtctccaactcctgggctcaagcaatcctcccaccttggcctcccaaagtgttgagattataggtgtgagccaccgtgcatggcttggattagggaggcctggtaggaggcaagaaggaagccattacagagaatgggtggagaggactctggattgagtgagggatgcagtcggaggctgggtgccctgtggggcagggagtggcctggaaggaaggtagacagggtgcagacagacctgggtcagtgaacgccagtccatgttggcactgcccaggtagaagtgggtctggtccaccacccagaacttggtatgcaggacgccatgggtcagcttctgcatgtccaccatgcggacctgggcacctgtgaccagcaggggcagagatcaggggccaggctgggtacccccaggcccagaccagccccagttgggccccagctcaccgctctgcagcagagcctgcaggtccgcctgtggctggggcccgctgggcttgctcacagcgatgcggacgttcacgccctttggtgccagggtctgcagctgccggaggacctcctcaccctgcggggaggggagagcttctgaggggctggaccagccagctctccaaccccacaaggtaatgcccggtggagttattttgagacatgattaggagtaaacagactttacattagcctgcatagattaaagactttacagattaaaatattaaaagacttccttatctgttttaaacatctttatctgctttaataattagttgccctgtgatccccctccaagtcctcctgacccctcctgcccctccagggactttctcaaaattcagcatcaaggcagggcctccaggcatctcccagtatggtgggggcgaggctcaggcagggggtcctggaaggtatcgggtgaggcacgatgatgccaacaacagcaacagtcaaggatgccctggaacctactgtgtgccaggccctgttctaggcctcttctcagcgaactcactgaattctcacaacccagtgaggctggtttaattataatccccacagagaactcagtagtggagtgggattttgtttttgtttttttgtttgtttgtttgttgagacagggacttgctatgttgcccaggctgatcttcaatccctgggctcaagcattccgcctgcctcagtctcccaagtagctagtacctcaggagtgcaccaccacatccagctatggagcaggatttgaacccagaccatctgcctcctacatctgtgttttaaaccactttagagggagccagcagggagtgggagctcatacggttttttaacataaaaaaatttttttttagagacagggtttcactatgttgcccaggctagagtgcagtggcatgatcacagctcactgcagcctccaattcctaggctcaagtcattctcctgcttcagcctcccaagtagctgggaccacaggtgtgtaccactatgcctggctttggtttttaacttttgtaattattattattactttttctttttcttttttttgagacagggtcttgctatgttgcctgggctggagtgtagtggcatgatcacggctcgctgcagcctccaactcctgggctcaagccatcctcctccttccatctcctgagtatctgagactgcaggcatgcaccacaacaccctcctaatttttttttatttttagtagagatggttgaggggaggtggggggcgggtctcactatgttgctcaggctagtctcgaactcttgggctccagtgatcctcctgtctaggcctcccaaagtgctgggattacaggtgtgaatcaccacacttggccataattatttttttcaggcagttcttaaggagccttgtaattttagttaagttttaagacaacttctcacaaaaagagccagtagggagaagaaaacagaaggaacaaattcatggtttttcaatggaagaggttatccatgtaggctgttccttttcaaattgtgaagcttttatgttctttaagtttgtctgcagaccataccaggatatatagtaacagcagactcacaaaggctgactctgtgccaggcactgtgctaaaatttgcatggattagtccatttcatcctcacaagagccctaagaagcaggtgctataaattggccccattttacagataaagaaactgaagctggagagaagaggtggcctgcctggggtcacacagctgggaggtggcccctgtcttgaggctgggctgttaattactccactcttccctttctttgtgtgactgggtcaggacagcttgtgggtgagtgacatctgccagcctaataatcccttgtaaccaaacccgcaccctgacattcagaggcctacagatgaccgtgacaaacgcccccagtccagagagccacgtgacgacagctgcttgcaaacacctgtgtccaatctgctgtgtgagacacacccctctgtctcctgggctgcaggagaaaccccttcattccccacagcccccgctgcctcccaccccctgcccctgctgccggccagggccaaggttgcaggtacctgctgggcagagggctcctgcgtgtgggtgtca

SEQ ID NO: 1887728 - DNA, 4001 bp, Homo sapiens
cgcctcttcctcatgcccctgaagaacaatcaagagacccaaaccagaccaggcacagtggctcacacttgtaatcccagcactttgggaggctgaggcaggagaatcatttgaacccagaaggcggagattgcagtgagctgagatggcgccactgcactccagcctgggcgacagagcaagagactcaaaaaagagacccagaccaggattacgaatgaggcaatttattaacccagcatggtttgttctaatgcttcttgttggcagctgccacctgtgggaaaagatggaagaataaaagttagtcaagggggtctctgctggggcactttgtaacagctacctaactacccaccacaggtgggcaccccgatttgtggtttcaaatgcatctatctcatctaattctcactgtgggtattcccccatttcacagacgtggaaactgagtctcaagggagtggccaggcacagtggctcacacctttaatcccagcactctggaaggccgaggcaggtggatcacctgaggtcaagagttcgagaccagcctgaccaatatggtgaaaccctgtctctactaaaaatataaaaactagccaggtgtggtggtgtgtgcctgtagtcccagctactcgggaagctgagataggagaattgcttgaacccaggtggcagaggttgcagtgagctgacattgcaccactgcactccagcctgggcgacagagcaagactctgtctcaaaaaaaaaaaaaaaaaaaaaaaaaaaaaaaggaagggagtggcggagtggagtccaaattccgcccactgccatgtgagaaggccaacatccaaccaccagcaatgatgtgtgcgccaagccccactctgcctggaagagctttctccttccagaccacccccaactcctagagggctgacactttccattcttttgtgacacttgactgactaaatgctccaaggctcctaggaggcctgagtcagtgatacagaattgagctcatgccaggccctgggtgctcctgctgtactatagctcactgactcctcactaccatgcttgaggtggccaagggtagattttggccacagggaggccaagacaggagactgtggcaccaggggtgtggccactctgccccagggtgttggccagccaggatctgaatggagacctgggttctgaaccagcccccctcccttatctccacctctcccaagcagcccatgtgatgctcagtacgcatgaggactaaggggaaacatcgcaggctgacctggggagggggagtcatctacgggtacagctatgtgctctgtggatagatgcccagtggcacctgggctggagttccctccaatttttttttttttgagatggagtttcactcttgttgcccaggctggggtgcaatggcatgatcttggctcaccgcagcctccacctcccgggttcaagtgatttttgtgcctcagcctccccagtagctgagattacaggaatgtgccaccacacccggctaattttgtatttttagtagagacagggtttctccatgttggtcagaatggtcttgaactcctgacctcagataattcgcctgcctcggcatcccaaagtgctgggattacaggggtgagacaccacagccagcctgcctccaaatttctaagcagcaccaacaggaaaagtcagacaggactgtcctttctcctgtctctgggcagccctcctctgaccccaccagcaccctgggctgtgccctccagagaaggaaataagtctacctgacaaagtatgggctttggaaatgcttgggcagcgactaagggacccagccccaccccaaacgcaggccttacctgtccggcgattctgtccagatctctttgtccctgaggtgtcagtttgcggccgctgtggggagggaagggtcatgcaggccccagtgagcacaggtcctgttctcagccccttccctcctggctgtgagccaggcttctcaaaaagccacctgccgccagccaagtcccactgagggccctagtcaggtgcattctaacgagctgggggcagtagtgggagcccccctgggagctgacggggtgttgtttgtgcaagcatttagatcaaaagccccgaaaaatcaattgggaaaagttaacgagcaggctaatgaaagcagatagtcgctaaattaccctcctggagcctgggctagtcagccagagaggtcggggtgaggccccgtgctgtttgcttttctgcagaatcccctcctgcctgcctctgataggaggggcctgaggggctgggcagactatgcaggaccattcgttggggaattgatgaccgggcctcaaggctactccatcaatgcagccccctctaccctgcttacccatcttggtccttttccaccattttcagcccctccagggcttggaggacccggcgggccacactcttggagcctcggctgaagtggctgggcatgacgccgtttctctgacgtcccccatagatcttggtcatggagccaaccccagcgccaccccggaggtacaggtgccgcgctgtggaagctgggggtagtgtgagagggagatttaagggtcttgatcaaggtctcaggtaaacaattccttgtgtgtaaacagctaattctcactgttttataagaagggaaactgaaaacacacactaacacccagaaactgacagccccctctcctcacccacccccccggctagctcttccttgacaaacagccctgcaccctgggtgggcactcccaccatctccagggccaacttctttagtggttactatcccagcagcactgctgttgaattgaacctgaggttatgtaggggtggagcctagctgtgaccatctccatgggccccagagaagcaggagtgaagggacctattgccactctccgggccacctcagtctggagagctcaggataacaagggcagggcagacactctgtgcagtgggtgccccctgcttggaatgtgtaccagcccctctgcagacacagggaaggctggcttgggcaagtccctggtccaccccagccagcctccttgcctgcaaaaaaagctccgtaaaatccagtcgacacaccagcctccccagaaacgcttgcacgcttctattaactggagcacacatctgccaggccctgtgccaaatgcttttcgatctctccacccttcttcacctgagggccgggttactctgaggactcaacaggtgtgtcaagtgctactctcctttaaagagtgaaactgaggtgccagagggtactcactggctccgtgtcacacagctctggaggaactgccctgtcctgccactgtgatggcaccggggcccacatgcaggaagcacccagatttcagccatcacatggtcctgcctagctctggagctcagagcagagtctggtttgttcctgggacccagagatcagcaagttggtctgagtctgctctagtgatttctttcctctagttctaaagatcaagtgggggaattgggggttcttccataactgccaagtgccaggcagtagtctgtgtggggtgggctgcttctgcccagaaacagttcttacacaccgcttgttcccagcccactcctgccctgagatcaggtccagatacagccagcccttcatatccacagactcaaccaagggtggatcaaaaatatttaggggaaaaaaactacaattcaaaacagtgtaacaattatttacaccgtattagtgctttttcttttttcttaaaacacaaaaaaagggcctcattctgtcacccaggctggggtgctgtggtgtgatcatagctcactgcagcctcgaactcctgggcttaagcaatcctcttgcctcagcctcctaagtagctgggactataagtatgtgccatgtctggcctgtattaatctataagtaatctacagatgattta

SEQ ID NO: 1887729 - DNA, 4001 bp, Homo sapiens
gcttcagcacagcacagtaccctctgtgtcacaggaatctgtccccggcatcctcaggccaaacacaacattaagagttccccgtgcacagggtgctggcaacacctgggagatgaggttcccaggcttcagcagagcacggtaccctctgtgtcatgggaatctgtccctggcatccttaggccaaacacaacgctaagagttctgttaatggagttgctgggtcgaagtgactgaacaatcgtagtttatgttatgtctaacagatgtcactgtgcttccctcaagactagaaaacatcccacagcactcctgtgagtttcctgcagcaccctggggtgcctcggcacgcagtttgaagactgcagccttgggggctaaaggagcagcaagacagaaaggcagcaagaacacagtctctgggcttcctcgggaagcagagctgcctcccacccgccttttgtaagcaaagagcgcacactgcagtcacgcgtccctccctgacccggtgtcaacacaggctcccattgaccctctgaccacacccactgcccagagcatcctgttttccccagaggcccctgtagccggctcaccgcgtgatgccacggttggtggccatgatcaggacaggcgccatgtcactctccagggcccggttgaggaaggagaagctctcgatgtccagcatgtggacctcgtcgatgaacagcaccttggattggggtgtgtgtgagagtcaccacccgcgtccccacttccccggcccacctccaccccaccacccgccccggccatgtcctgggtcctcactccagggatgatctccgccttgccctcctcgcgccactcagccaccttggcattgatctgctcacggacttctgacttgatctcccctgtgtcacctatgggaggcacaggttgcatcagggaagccagagaggaggcgggttccagggccagagtgtggctaagacagagaaggatgatgccagggatggaggaaggggagcaaagcaaggagggatgaggagcctgaaacatccccaaagaggaggaacagaggcagagaacacaggaggggagagggcagggccacacccatcacagcaccagcaggggtggggacggagcggacttgcaggtggagaacagaggcagccacgggccggagttacaggaaacagcgtggagcaggtgggccacactcggagctcaggaacagagggagcccgagggaggctgctaggcctggggcagggcagggcagggcagggcaggaggggcctcacctgagaagagcgccaggaagccctgggtgcgagagttgatgacgtcgatctcgtgcagggacacggtgtgcaccacctccttgcgtttctggagctccccatctgggcactgcacgaacttggtctatggggcgggggtgggggaagaacggcggagacagggcagggaagggcatgaagggggcccctaaagccctctgtctgggggagactggagctccaggaaatggagctgggaggctaaatggggtcatctggaaaccccaggcccaggaggtagtcaggactagggacattccagagcgctgagggtcacgggggctcccggaggaccttagaagccacaggccacatgtggccatgcgaagctatagtgccaggctgaggggccctgctgtcctagggttacagggaagacccaggagtaccaggacaaacagtcagggtaacaggaagatccagaccccatgggtcaagggggtgatggaggagatgaaaacaccccagtgctgggggcgaggggatcccgggagtcccggccgcacctgggagcccatagcgtcgtagtcgcgggcgcgtgtgaaggagcggcccagcttggagatcttgcccgtcgccttgtcgatggtgatcacgtccctacagggggatggggggtagggtaaggaaaggaatgggcccaagctcgcccatccccctggctgcctggcatggcccctgactgctcacccggcctggaccttgtccttggtcagggactcaatcatcttggtgcccaggtcgtagatggtctccatctctgtggtcttgagggtcagtttgcccaccttggagccctgagagtggggacaagccagggatggggctcagagagggccctgatgttgccccagtgcccccagtgttgataagcttctggctctgctctggcctctgcttccacagcttcaaaatgggcacaacacaaggaagctctccagggaagacatacggtgcgctcaccagcctgacgcggtgatggctccgcggctgaacatgtatgtcccaacggaccatactggacacttgcaatgtgtacagctttctgtatgtcaattaaaactcaataaagttctttttttttttgagacggagtcttgctctgtcgcccacgctggagtgtagtagcatgatctcggctcactgcaagctctgcctcccgggttcacgccattctcctgcctcagcctcccgagtagctgggactacaggcgcccgccaccacgcatggctaatttttgtatttttagtagagatggggtttcactgtgatagccaggatggtctcgatctcctgaccttgtgatctgcccacctcggcctcccaaagtgctgggattacaggagtgagctactgcgcctggtgaataaagctcttttttttttttttttttttttttttttttttttttgagatagagtcttgctctgtcgcccaggctggagtgcagtggtgtgatctcagctcactccaacctccatctcccgggttcaagtagttctcctgcctcagcctcccaagtagctgggattacagatgtgtgccaccatacccagctaattgttttgtgtttttattatttatttatttttgagatggagtttcgctcttgttgcccaggctggagtgcaatggtgtgatctcggcttactgcaacttctgcctcccagattcaagcgattctcctgccttagcctcccaagtagctgggattacaagcacccaccaccacgcccagctaattttttgtatttttagtagagacagggtttcaccatgttggtcaggctggtcttgaactcctgacttcaggtgatccacccgcctcggcctcccaaagtgctgggattataggcatgaaccaccgcgcccagccattttgtatttttagtatagacagggtttcaccatgttagtcaggctcgtttcgaactcctgatctcaagtgatcgcccacctcagcctcccaaagtgctgggattacaggtgtgagccactgcgcctggccaaaactcaataaagctcttaataaaaatagtaaacaggcagggtgcagtggctcacacctgtaatcccagcactttgggaggccgaggcgggcagatcacaaggtcaggagatcgagaccacagtgaaaccccgtctctactaaaaatacaaaaaattagccgggcgtggtggcaggtgcctgtagtcccagctactcgggaggctgaggcaggagaatggcatgaacccgggaggcagagcttgccgtgagctgagattgtgccactgcactccagcctgggcaacagagcaagactccatctcaaaaaaaaaattataataaaataaaataaaaataaaaaataaaaatagtaaacaaacaacatgcctaaaaaataaagtctatcaaaaacaacataggcccgaggtctcgcaaaattgccaaatgtcacactttgacattcctattttatacccaaataaaaagtgtttttgttgatcacaaaatcagaaaacacagctatgcaaaaaggagaaaacagaaattgtaaaaaaaaaaaaaaaaaaaaaaaaagaggccaggtatggtggctcacggctgtaatcccagcactttgggaggccaaggtgggcagatcacgaggtcaggagttcaagaccagcctggccaacatggt

SEQ ID NO: 1887730 - DNA, 4001 bp, Homo sapiens
tcttctctttgcctgcgaatccaggcctcttcctgactgcccaggagatgcgcatgtgtattctaagtctcaattctgggatcgccgcccccaggaagccttcgtggactcacaggctgtgttaagtgcctcctatgggtgacctatcctacctccattatagcacgagtcaccccttttctgacaatctgtgactgagtcacctccctgccagaaggacagggagctccttaagagcagagcttggttctgactcatctgtgtccctggtgtcacccgacatggagcctggcatgcacaaggcctcaggggatgttcctgggcaggacaggagcaaaggtgggagagggacgccaggcaggagtgagaggctgcacaggaaagagagaggcgggaggcaaagccagaagagggaaagtgggagacagagagagaagtgggagagggaggaggtcatgagggcggctggctcccggggtgctcggcccgcgaggccctgttctgagcactctatccacagcgctctgtgcctccaggtgggcaccggtattatccccactgaacacagggggcagctgaggccagggaggtgaagccacttgtccagggccacccagccaggaagaggccgagccaggatgaatccagctcagagcctgagtttgtaaaccttgggctgggctgcctctcagggagagtgggggcctgaggggtgtcagagggcatagggatgccagggccacctccagcagccaatatctaggccacacccacccggctcaggcgcgacacagccagagagacgcacgtcttgaagtcatctgggttcttcttgcagagacaggtgatgaggctgacggcggccgtgaccacaccctgcaggggcagaggagagacaagtcaggcccctgggggaggtggtacctgagagcagaggctcaggagcgggacagggtcgggatgtgtgtgcagtcgggaagatggggtttaggggtgtgcacatgtgtcactgtgcgtgctttaggggtggggtgaggaggccacggggcctcgggcgccatggccagcactgacctgggtgtgtggggtgtccctggcaggaccccaggcagctgggtaaggagcagtgaaggggcgagactctagagggttgggactgtgggggtgggacagtcaaggtttctgcgctggtgcgcaggtgatgggcgctgttgggggaatctccaggtattagaaacagagtgggattttctaagggactgggtggttggtgaggggtgtgggggtcactggacaggatccctggccagccaggggagtgtcagagatggggatgggagggtttctggacacttgggcaggtaatgagtaccggggacactggatcatggtttctggtgtctggtgaacgtcagcgccgagggggaagctccaggaatccagggggatcagggctgaggtgggagccccaggcatccagggggcgtgagggctgaggtgggagccctgggtatccgggggcgtgagggctgaggtgggagccctgggtatccgggggcgtgagggctgaggtgggagccctgggcatccagggggcgtgagggctgaggtgggagccctgggtatccgggggcgtgagggctgaggtgggagccccgggcatccagggggtgcgtgggctgaggtgggagccctgggtatccgggggtgtgagggctgaggtgggagccccgggcatccaggggggtcagggctgaggtgggagccctgggtatccgggggtgtgagggctgggggctcaccatgtgctggtcattgagcaggtgtaccacacgcgccgtccactcgcccatgggcaccaggtcaggcgaggccttgtacagtcgaaggaggcacagggccgcactctgcttgacactgtccatgctgtccctgtggggacaccatgcagggcaggggaagcagagtcagtgaccccagccctgcacacctcccctcctctcctgttcctcccaggaagggtgtgcgaggccagcgagagggacagacagccaggcggccgcaggatccagtctggcgctgacctcacggcccaccaggactcagtgtcttcatctgcaaaatgattgcatctcagtaacctcacagggctcaggaacatgtcaagcctggctctgcaccttcattcattcaccaagcacctactgggtgcccatggggtaccaggcactgctgttcactccatggatagagtggtgaataaagtggtccaaacacttgtcctcacagggcttacatttcagacagcaccacgaaaacacatacatcaaatactgtcagggctgggcatggtggctcacgcctataatcccagcactttgggaggtcgaggtgggaggatcacttgaggccatgaattcaagaccagcctgggcgacagtgagacccagtctcttcaaaaatacaaaaattagctgggtgtggtggcgcaggcttgtaatcccagctactcgggagggtgaggtgggaggattgctcgagactgggaggtcgaggcggcagtgcaccatgactgtgccactgcactccctctagcttgggcaacagagttagagctgtctctaaataaataaaaaaatttaaaaataaacaaaacagagtaacttaaggaggaaagactgaaaatcctctgcaacagaacatcccaggcagagggaacagcctgtgccaaggccatcaggaaggcggagcccgtgtgtaggaggagcagcaaggaggcctgcaggctgcggcctgagccatggggcaggagggctgcagataggacagggagggaacagagagccagaccctgcagggccttgttggctgaagtgaggacttggctttttaccgattgggagatgaaagccgctgtgggtggtgagcagagaatcagcgtgatgttaacacgacagcaggaacagctgcccccggaccccttcggcctgtccagcactcccacaggtctctgggtggattcacacgtttatcttctctccacaacaaactgagaaaatgggtgtatttttgatctggcttaggtttttaaagggtccctctgcctgttgtgagggaacagactttgcaaggctcttttgaatccaagggaatatattcacaggttctgggggttagggtggctcacgcctgtaatcccagcactttaggaggctgaggtgggagaatcacttgagcccaagagttggagaccagcctgggcaacatggtgagacccccatctctactagaaatatgagaattagccaagcgtggtggcgcatgcctgtagacccacctacttggcaggctgaggtgggaggatcgctttagcctgggaggtgaaggctgcagcctgggtggcagagcaagaccctgtctccaaacaaaaaaaagggtgggggtactttgcagatatgataaagttaaggatcatgagatggagagaggatcctgggtgatccaggtggacccaatgtcatcacagggtccttataagggaaagatacagttcagagtcagagatgatgtgaggatggaacagaggtcaggcaggagagaagatgccacactgctgcctttggggatgggggaaggggccacgagccaaggaaagcaggtggcctctaggagctggagaaggcaaggacgcggcctctcctctagggcccccggaagggacgagccctgcccacgccttgattttagccccgtgagatggatgttggacttccgacatccagaaccggtgtttgacaccgctgtgctggtggtaattcatcacagcagtcacaggaaaccagggtcagcacttgcctggcacagaacctggcagccagcgggcagcccatctcagagggctgactccaggccccaaccataacccagctcctagcacagcaaagagcatggagcatgatgttgttctagaagaggatcccaggggagcaccttctggggtc

SEQ ID NO: 1887731 - DNA, 4001 bp, Homo sapiens
tgactataaaggagaggccaagagaaccacagggccctgtccctgatgtcacagacctatgaaaccaatcccaatagctggccccctctagatgtcctgtcctgtgcaaaatataaatgcctgctcctacaacgcctgccctctcagaacccagctgccacagtgtggccacgtggacaggccatgtgcagacactgggatggccggtcctagccaagccccagccaacagccagggctgtgtgaggagctgttttgaacatccagcccagtaaaggtttcagatgaccagagtctcagctgccatctgatggcaaccccgtgagagtcgccaagcgagatggcccactgagcccaggtgacccacagaatcataagagaacattttttccgagtgcccccaattatctatgtgtttgggaaactacgtgatttgcagccggaagtactaactctcaggaatgccttcttcacaaggttctgtgagggtctcgtgaggtgatccccctaaggttctctttcctgcaggagtgcctggtgcacggaagtaactgatctgctccttccccgagttacaaagtgtgaactgtgactcccagaaagctatgctgaggctgggcgcggtggctcacaccggtaatcctagcactttgggaggccgaggcaggcagatcacttgaggtcagaagttcgagaccaacctggccaacatggtgaaaccctgtctctactaaaaaatacagaaattagctgggcatagtggcacatgcctgtaatcccagctacttgggaggctgaggcaggagaatcgcttgaacccaggagacggaagttgctgtgagccaagattgcaccactgcactccagcctggctgacaacagtgaaactctgtctcaaaaaacaaaaccagaaagctaagctgaggttccagtccccagcacctgtgaaggtgactctatctggaaagagggtctttgcaattgtagtaagatgaggtcaggaaaatggggcctaatccaaaattactgatgtccttataagcacagacacaaagatacagagagaatgccatgtggagacacacacagagggaagacagctgcgggatggaggaagaccctggagcgatgccacctgaagcctggggttaccggccggaagaggcaacgaagaggccttccctccagcctctagagagagcgtggccctgctgacaccctgaccttgggcttctggcctccagaactgggatagaacacgtttctgttgttttaagcccctctgcttgtggtaatgtgttaccacagccacaggaaatgaacacatcccataaagccatgccagaatcaacagcttcctcctaactgatcctgtcacatccagctcacatttttaatgtggaatatccctcaaatctggtgcatacgatgattataataaaagtcacggctctagaagaaaggcgaggaacctaagggcatgaagtgcacccaaccatcaaaaacggcttccgtgggcccaggcactctgggattcccgtcaaaggtcagcagaaagcaggacaagagtcaacacccctcggccccccatgccctggactcacgaagccgttgcccatgatgcggtagaggcctttgagagactccaggtccttgttggtgaaatggaactggaccatccttgagttccggaacaaagggcccagggtggtctgcgggagacacagaagtcggctggcatgctggtgtgggcaagtgaggcggggacatgaggcagggagtgggggtggggcagggaacaggaaagagacagcagggtgaggactgcccggcagcagggctggccctccaccgccactcaccagcagctgctgggggatgagctgcatgatcagcttctggggccactgctccgtcttcctgggggcgatgccaggagaggtgtgaggagggggccagccccagccccaccacaccccgcccctgactgtcacctacaggttctcgccatgattcacgtagacctggcagggcagtgaccgcgtcagcttggtgttggcatccactgaggcaggtttgggtttctgagggggaaaaaagagcatgtcagtaaaaagggccataagcctcagtccccttgagccctcatgtcctaccctggtagccccaaagctcaggatgttccccagtttaagtcccatgagccccaggcccctcctccagaccagcaagccttcagttcctcaaatgttacagctacgtgcccggcccctaaatcccaccatccactgtgccccagatgatacatcgcctgggctcttctctgggccccaaatcctgggcttttctgggttctttgcatggggactctcctctgtaccgcaagtcccaccactccatggggctcctggcctcgccccgcatcccacaggtccagcgcaacgaatgcctccaaacccagcactgcagaccccacgcatctggccccatgagtcctacatgcccagccccacggccccaggagtcccaagtgcccaatggaccctcaggcccctcacctcttgccactccaggaccccgctccaggccagaagcttattggagactgactgctgcccaccgagggctggggctcccagctgggctggggaagggccgctcacccctcctggggccacagtgcctgcctgccagaggggaggaaggagggccatgagaatggggaaggccgggagcctccgggggccatcctgtgagggcaaaccaggaaggaggaaagatcccttcttctgcccctccatccccagaacagcacttggccagccgcaggaccccaaatgcttggaccttgcaggattcgaggactcgtaagctgtgcgatgccctggactcccagacccagggattccttgggtttctcggaacagccctgaccctcctggagccatgagcctccccactctgtccccagaccctcatctcaggcatctgcagcacacacaccacgagcccccaaagccccagaaccacgagagccacatccccctggaaggcaaatgactcatcctctaactgtcctagctgtggacagcaggaggaaggagcaggggcaggaggcgtgcaggcacctaccatggacggtgccccgggctgtgccgtgggagccaggccggagccaggggccacagtggagaccagactgggctgggaagcaggtggtggcttgggggcgccagggggtcctgggggtagttggggagctggggcctggctgaaggggggacccactccgggagcagcttgttggagaggggtgatgggcgagactgtgggagagaccaagggaagaagtggggaacaagtgtgtggagagaggcctgcctggcccctgcccgcccttcatcctcactccaggactcacagcgagggcccagcccagccttctggttcttggcagcctccactgcattctgcgcggccacctgagctgcactcaggttcccgggaacctgtgggtagaagggaagaagggaagggactggtgaggaccatggccccccagtcctggtatcccacgaggtcacaccacccatggccccatgaggcaccagctgggatagcttagctcacaacacccatcacacagcacatgagcttccatggccccaagagtcccaccttcccaatgtcccatgggactcccatcatcccacaagctccaacatgcaactagatttctccccaggggccagggctccagcaagtccccagaagcatgtcccttcccggaaatatccatacctggtactgcggggggacggggggcagaggctgctggggggctgctgagagagtggcacctgagggtgcggcgggaggcagggggactggctgctttgactggagggggcctggggctgagccacccccaactgagagcaggagggatggccaaccccagagagaagggattcaagatgcagagaaaggagagaaatccaa

SEQ ID NO: 1887732 - DNA, 4001 bp, Homo sapiens
gaatagttttccactgtttgaatgaactaaaatttatctactctactgtggacagacatggaggttgtttccatttttacggctactatgaataaagctaccatgaacattcttctgacagaaacagcactcatttctcctggatagagacccaggagtggaagggctgtttcacaggctgtttgtataacaagcttcaccaaattccactccagatccactcccgttttcagagtgatcaaaccctaaatgtacagccccacgtgcaatggatgagagttccagctcttctatgtcttcaccatttgcaccactgagtcttttttaatgttggctgttctgggaggcgtgtagtcatatgtcactgagatttaatttgcattttcctgaaggctaatgatgctgaacacccttgtcatatgcttactggctatttggagatcctttttcaagtgcctattcaagtctttttccccatctctttcttgtcttgcctgatttgtagacaggtattgtggatgagtcctttctcagaaacatatattaaaacatcttcctccagtcagtggcttgcattttactctcaaaatgctgtcttttgagaaacagcgttacattttacagaaggtcaacttacccatcacttcctctggtttgctgtttaacaaatctgtgcctacgctaactcaagaagatattttcctacattttcttctaggtcctttatttttaaaatctttctggttctggtctgtcatctcaaattaatttgtttatgcattgaggcgagccttcttttattcctaaatggatatcaaattgactcagctatgttttttaaaaaacatacatttctccactgaactgcagagatgcctactgttaaacacatgtgggactgtttctgtacccttgattccattctattgggcgatttaaatatgcttgtgttcacatctattttaattattgtggtgtcataagtcttcgtctctggtagtgtaaatcagacaactttgttcattagaagtgtcaattttccactaaagaacctgttaagattattgggcttatactgaatctaaagatgagttcagggaactgtcccatccgtgaatattatgtaggtctgctttaattttttttgagacagtctcgctctatcgcccaggctggagtgcagtggcatgatctcagctcactgcaacctccacctcctggattcaagcaattctcttgccttcagcctcccaaatagctaggattacaggtgagtgctaccgcaccggctaattttttgtatttttactagagacggggtttcgccatgttggccaggctggtcgtgaactcctgacctcaactgatccgcccaccttggtcaggtctgctttaatttctcacattagtgttttacagtttacattagaggtgttacatacacatctttcattgaatttattcctggctatttgatatttttggtgcaattataaattatacacatacttacatataaaacataaggtgatttcattttctaatgacttgttgctagtatacaggactgccaacccatcaccccctctttctatttcatgctgtgatgttcattttacagttgagaaaacacaccttgagaagggaagggagccaaggtcacacagcaagcaaggagcgctgccaggcctctgaccctgggctctaccttcaaaggtcaaagattaaggtgcccacaagaagcccctgccagtgtgtgggggagtatccagacctcacctgttgtccaggatgggccctatcttctgcagagacttggccacattgaagcggacattggcaaccgggtccccagccatgcgcagaaccgtgggtagcatgtgcttggtggtgatgtcctgcccacagacctcagacagcacctgggggccagtgagtggcaggggtgagtatgcaaagctcctggctaactctcatttcctgctgcctctgaccaggccactctggtgatcatcaggccccacagaggctgagcaatacgggtgactcagttagtggagtgaatctcccaactccactaacaccatcctaacaccatgtcccagtttctctgtcctcaggcttcccttaattattctggagatcgaccttaattaccaagccctaggatccctccttaaagcaatgctctccagagagtggcgtgggaagaaatgatcagaacacttagttatatttatttttaaatcccttcctttctagccctgtgtatggtttacacataaataagtagtacatgagataattataatcgtaggaaaagcaaatagacaggagcacttcctacctgtagcataactgttctaagccctgtgcgtgtataacctgattaatcttcacgctcaccaggctgtgattaccagtatgaattctttacagtatgaattatttacaaatgagaagaccaaagcatcggttaggtaactatccaaggtccatagctaatatatggcagtaccagaatttaaaactaggtctgacctagagcccatacactcacccaacgcaccacagatagagacacacatttctcagggaaggagaggggtgctcataaagcttgagatcgctgctccaacaggtcaagtctcccaggccctgggtccctcaccatccaagtccccagtcccagaggccctatgaccctgaccctgggagccccacccccttgcctgcagttccccaaggactcatctctggatagaagatgcactccatgtctccattcccaagccaggtgtctcccttggggaaccctctagcatccctcctctcccacgcgctccagttccctagggatgggccagcaggcaggtggaaggctcacattgatgcagaagagcgtagtcatgcggtgcaggtagttggggtctccggacatggccaagaccttggggatgattgtggcatgggcccactccttcccaaacttttccactagcttcttcaggttgctggtggctgcctcgcggatggcatatactgcagaagggtgagggtgagagagacagggatttggaggtgaagaactgatgtgggcaaaatgtaggtcacactcaccatggcttacaaagcagcccctaggtgccaggctgcatgtgagccaaagagagaaaaaaggacttactatgtgctatatctagtaactgtttttttttatacagtatcttttcaaccactccaagaggtaggttccactactggcttcattttacagatgggcaaactaaggctctaagaagtgatttgcctaaattatgtggcacttattacttcaaacagggcttcacagagataaatattaccttttattttttacctctcttagtgtaaacaatgagccattctcataatggccccaaggcaccagaataagaagtttcaaagaatgagtgtggggctcattcaaagacagcaggtgacttgttttagatctgacagccccaagggcaggattcaaaaccctggtctggctgctcagtggccctctggctctccactataccaggcaacccctgggtgatctgtttcgtcctcctcccactcaacacttctctaggactctaacaagcatgcgagctggtccatacgagcatccagcggcgtggggagtgactctagcctcctccactgcccgccacagccccagccaatccatcctgcctttctggagctcccatctcctcttgctgctcctgtgaaggtactcaccatgatccacaagccaggccatgcacaaggagttaagtttctcatcaaagaactccactccctacaggagaaaccaagggttccaaggtaagcgttccaggagagcaaacagggggagctgctagccacatcccatggaacctacacccaccctagaaagaccggacacttctcaactttgtctgaggtgctcctttccctcctctctcttattgaatccaatgcatctt

SEQ ID NO: 1887733 - DNA, 4001 bp, Homo sapiens
gtttcatcccgaaaggggcagctggtgaccccaatgccatctaccagtcagtcccttcattctcctgccagggtggggttttcttctttttttttttaattaaaaaagcagagatggtctcacaatgttgcccaggctgggctgaaattcctgaactcaagcgatcctcctgcctcggcctccctaagtgctgggattaagatgtgagccactgtgtccagcccagttttcacttgagcatcttctccaggggtctcggcacaggccactgacccacaaagaccaacgctctgcaagtctccatgctgggcacagaagcagccaacacaggatatcacgtctgcatctgagaggacctctgtccagctgtggactaagccaggaacagctgactatccctcatcgtggtgtcccttacgctgtgctgtacagggaccccggggcagccatgggcagccatccagctcccacacactaaccagctatgtcctggggcctcagtctccctggccgtaaatgagctcatcgtggggagcaagacagagtctcgctctgttgcccaggctggagtgcagtgggacaatctcggctcactgcaacctccgcctcccaggttcaagcgattgtcctaactcagcctcccaagtagctgggactacacgcacctgccaccacgcctggctaatttttgtattttttagtagagatggggtttcgccatgttggccaggctagtctcgaactcctgacctcaggtgatctgcctgcctcggcctcccaaagtactgggatcacaggtgtgatccactccgcccagccacttttttctgactccagaagcaacagatgcttgtggcaagaaactcagaaaagttcatgatcataacacccagaggtgactgatattaagatgtggttgacccacaaatcaaaacaagcagaattggtaattggaaaaaaaaagttttgttaccccgaggcctgtggaggggaaaactggacccccatgtctggcagactcctgagccagagggcatccatggaggtgcagctctgccccacagtccctgcgccaggactgctggtccccactaccctgagcccctcccgcctggaacccctaaggctagctccaggagtgggagggacccgctctgtgtccccagcacagaagatgtttgtgccccaccctcatggcctgcctctcggagagaagagactgcagagctggaactcatgtaacaggaggcagacacacgaggctgcagacacacacacaaggccacggccaacgcgtgcccaggaggggccacagctgcaggctgagcccacagggcatgtaggtgcgtgcaggggacagatacaagtaggcgcgcctgctgctgcagaggcaggacagggctgtgaccctgcgcaggagacactcacttcacactctcctcctgctccccaaactcctcatcattgaagccgaagtggtcaatgaaggcagaggtcatgcgctgcatctggaagtccatgaaggcctgtgggggtgcggaggttagggctggagggagttgggcaggaccccactccagcatagcccagcacagccccacatagccccacgcccacctgctgcagcacagcctcctcagggaagttgaactccttgagccggtcgtcctcatcgtcactggaggagtgtaggtggtgggtgttcacctggggagaggagggggcgtcagggcctgctggagcccccagaccagggtgggcaggcagctatcggtggcggtgggaggctaagactggcccaagagagagaagcagcaggaggagtgcaggaagagaagctgggcctcaccaggtccaccatgttcttcttgttggtctccgccaggggccccgatacgaaggcttcccactgctcctgctgctcgctgggcagctctgcttaggtgagaggggtgaagacgtgaggcatctcggggcttcaagccccccacctagccctcaggccggcctggggaccctcacccttcagcagctgccgcagctgctctgcattgggccccttctccgtgttctgcaccagggcaccggccactcttgtcaggtgacccatgtagcctttccgagggcctcccgcacacctggcaagagtgaaggccgcggctgcaagccaggactggacccagggatgcccagccccagcccggccccccatccaggcagccccagcccctggagacatgaagggcagcaggtgctcactgtacacggtcgttctcctcccaggacgtcaggatccgctccaccaggcggcactgctgcagcagctgcgggagagcgggacaggatggcctggaggggtggtctgcacacatgtggggagctctgcactgcagcaggggtcccttcctcagcagatgcttcaccaggcccccgctcatccagagacggggatgggaaggagggatgcaagctggggcttgggaccctggcatccacccaagtctctctggtctttctacaaaagaatatgtggtgcatacacacacacacacacacacacacacacacacacacacacacatgcatgcactaacggacacacacatgctcacacatacatgttcacatactcgtgtgcactcacacacatacatgctctcacacacgcttgcactgacacatgctcacacacgcacgtgtgcgcactcatgcacactcagctgctcgcaggtctgctcccgcccacccctagctcttcagctcaagtcaggagcccactgctccctgcacctgcatgtttcatccgcgtttctccctggccatgcctcccacaccccatctgggcgctggcacctaacactacccaacaaacacttgtgggaggaaggagtgaggggtaggcctctggagagggtgcgcccacaggggatgggcccagaaggagggggaccagggagtcccagctcacatgtttcacaacagggttttggatgggcgtctcagggctgctgtcaggaggtggccccaagctcagcatggtgctcacgcatccctctacttgggcatgcaagaagttgttgaagacataatggaagaagaggtcctatgggaggacacaggattggtaccagagaggccccgccccagccgagcccccaacccctgagcccccagccgagcccccaccccagcccccgaaccctcagcccagtccagtccccgccccagcccctgaacccccagcccggtccagtccccgcaccagcatggtgttgggcacgtccagtgccaggagctcgtgcgtcagggctgcatcattggcgctcagggcactggccaggagcttgaccacgtgcagccgcgtgttgcccagaggcggagccagcatgccccatgtcatctgtagcggctccagctgcagacacagggaggcctgattcccaagggctgcccttcctgcttcccccgcctccccgaggaccagaacccacacccctgaccttgggaggctccagcaggagctggtggaagcagctgagccgcgggcgtagggcgtgcaaggcgcccacactggacacagtgctttccagggccccctgggccaggagctccagctgcccatccacactgctgaagaagctgttcacggtcacggactcggacctgcagcagggcagggtcgaaggcggagtgagcctagatggcctgtgcgcccacacaggagtaggcacaaggaccacgtctgcagggtctggaggaaaacgaggagccacatgcccccagcgccgctctcttctgaggcccttcagacaacacctggctggggtggggagcccgccaggcggcagcattggcagtccactgtgagagcacgggtgaggggtggaggcgggaaggcaaacccaacaggctagcggcctgtgtggtaaggcaggggcacgggggcctggggtccctcccaacacaagctgcagcagtggcctcagcctcagtgccctcac

SEQ ID NO: 1887734 - DNA, 4001 bp, Homo sapiens
aaaaataaaaaaattagccaggcgcagtggtaggcgcctgtagtcccagctactcgggaggctgaggcaggagaatcgcttgaacctgggaggtggaggctgcagtgagccgagatcgtgccactgcactctagacagagcgagactccatctcaaaaaaaaaaaaaaaaaaagaaaggccaaggtggcaggatcacttgagcccaggagtttgagaccagtcggggcaacatagcaaaactctatctctacaaatacaaaaaaattagccaagaatggtggtgtgcatctctagttccagctgttcatgaggcagaggcaggaggattgcttgagcccaggggggtcaaggctacagtgaggcaagatcacgccactgcactccagcctgggcaacagagcaagacactgtctcaaaaaaaagacacggcctctacatcaccccaggcttgagcgcagtggtgccatcacagctcactgcagccctgaactcctgggcccaagagatcctcccgtctcagactcttgagtagctaggattacaggtgtgcaccaccaatgccagctaatttttcaattttttgtagcgacaacgtcttgctatgttgcccaggctagtctcaaactcctgggctcaagcaatcctccagcctcacctgccaaagcgctgggattacaggcaggacttgttttttggagtgataaaaaataatctaaattcaacaagatgataaacgctttgaataccctaaaagcgctgaatcgtaagcttcggtgggtgagtggtatgctgtgcaatttacatctcagtaaagctgctacaaaagagagaaaagagagaagcataagcagagctgagtctacccaacgggcagctgccagggcttggcagtgtggccctgggccatgcctcagggtcctcacagggacaggccccagcctgggtgagcccagagccatctctgctctgtaagcctgtgcgcctctgaggcagaagttggcattgggaaggacatgttgctcccagtggcctcggatatctgaggctcttgacaaacacccactctacactaggccctgtgctgggcaccaggacagagatggagacccaagctggagaaacacatggacatggggtcccccagagctaaaggggaggatgtgagggcgcttgaaagcaaggctgctggacggacacttagaaggacagcaaggggttcaatcaggcaggagacagggaaaaagctgccaggcccagcaatagcacaggccagggtgggcagggacggatgtggggccagcgcttggacaggcgatgaggagggcccctccctgcaaggcattatgtgccaagttcctgggtcatgaaaaaaacctttccagcactttcggaggccacagtgggagaatcacttgagtcaagtttctttccttttctcaaagggcatggatacacctggttctcaatgctctcttttctcaccaatttcttttctttctttttttttttttgagacagggtctcactgtgtcacccaggctggagtgcagtggtgtgatcatgactcactatagccttgacctcccggctcaagcaatcctcctacctgagcttcccaagtagctgggactacaggtgtgcaacaccacactcagctaagtttttacgtagagacggggtgttactatgttgcccaagctggtctcaaactcatgggctcaagtaatcctcccacctcgccctcccaaagtgctggaattacaggcgtgagccactgcgtccagccccaattcctcttttaaaagtggggaagtgggcatggggaaggaactctaaggggaatccgcaggggcatcggcagcactcacattctcatccttcgacgggtggatctgctcaatcagccgctggacgatcttctcctcgttgagccactgagggtgagaaggcgagggatgcatcgctgtccaccacgcccagccccccacccccagaggagccggccctgctcacattgacaacatcctgcctcagctgaggccgctccacacaggtgagcaggcgcagcaggaggtccatgatggccgaggtgccaatgtgctgcagcagcaggtccacgaagtcatccttcttccgaagaaaggacacgagctgggggcacacgggctgcgtcatgcacagggcctggcccagccaccacccctcaacccacggtggcgccagggtgggggccagggcacctggtctgtcttgcggttgatgaggatgcccatgaccttgctgaagaagctggccagcagtgggttgaggctgccggtgctctgcaggaagccgtagagccggttcagaagggactcatcagcacccagggcatcattgatctggggcacatctgaggtcagaatctcgcaggccacactggggtacctgggaggcaagcacaggcgggtgggggctcgggtcggaggccgggggcagggggcggcaaggctccaccctcttctctgcaccgggcactgggtttctgggaactgcagagacccctgtccaggaaggggaaagggcagaggacagggtgacgcagaaacaagggcccacaccaggcctcctccaccctgctaacacccaaccatcccatcctaggctccttaccacccccaagacaagctggtcctgaagctcctgcgcttcccaatcccccagcagctaacactcatcccttttgcctctcagcggcttcacttgcaaccccgtatgctgccccagctccggctgactcctggaaccttgctcaacttccaacctcacctcctgcctccctcctccaaactttcacacggtgcctgacggctccaagacaagagctgccccaccagcgtgccactcaaggccctgaggggccacagtctgctccaggactgtggggaggtaccccttgggaggctgaggcaggcatatcacttgaggtcagaagttcaagaccagcctgggcaacatggcgaaaccctgtctctaccaaaaatacaaaaattagctgggcgtgctggcttatagtcccagctacttaggagggtgaggcaggagaatcacttgaacttgggaggaggaggttgcagtgagccgatcatgcctctgcactccaacctggtgataaagtgagtctcaaaaaaaaaaaaaaaagtgtcttttcagcatcgcttggattaaaaaataagtaaagtgtcttcaatagcagacaagtgtttcacaaacatacaaaaaaagtttaataaaaagtaaataaaataaaaggcggcgaataaagagaaaaaccagccgggcatgtcgtcacatgcctgtggtcccagctactcgggcaactgaggcgggaggatcacctgggcccgtgaatttgtggctgccgtgacccgtgactgtgccactgccctccagagcacaggcttggtctgcacccggtgagctgtgaggccttgtgcaggagcctggctgctcccagcctcgtcttcctcatccccaaactggagtttactgacactgacgcatttcagggtagctgtgaggcttgcgtagtgaaggtatgtgtgatgctgatagggacgggctggccaggagctggggaactcacttgtagcgcagccgctcctcaccgctatctggcggctcctgggtgacccaggccaccattgcttgcaggtggggtggctgcagcaggaagtccagcagcttgcggttgacgaccttgcactcctgcagcacgtcttcctcgtccagcagctcgggcaggctcaggtcctcccgctccagcagcgtgtccaggtgcgagcttgtgtgcaggtcaaacttccaaaacatggcgccctgcaggcatagacacaaccagcgccgcgtcagacgccccagggagtccccactggacgaggcactgaccacaggggctgagtgcccaccttgggcacagcctctccccaagtcccagccctctgcctcatgctgagcccgg

SEQ ID NO: 1887735 - DNA, 4001 bp, Homo sapiens
tagcctgctgggacatggcttcctcctcctatctgcctggggaggttaggcccacaaatgcctgtccccttgtcctgggccccaacaatcagaagagatggggtgcagaattccaacagccaccccatcatgggaagcgggagaggggctggctggcaggagtgcccctggagggatgggaaggcgagtctgtccttcacttgctgccctagccgtctccctccctgctccatgaaacctttcctcattctgctcaaccccaccaagccctcaggggctccaccacaaacactgcttcaatgggtgaccaggagggaccaccacgaatgcggggaacaagcaccctctcctgttagctgagcgagcccccaggtgacctccaagccaactgccaccccagtgaggacgctgtcctcatggcccggtccacacgctccggtttcccagcgccgctcaccggtgccactcgctgcacacgcagcctacacttctaccttctacctgaaagactcagacctactgggcgccagtacccagcctcaatgctgggcttggttactgggggtaagcaggggcaggagcagggatttgagcctgtcggtggcttctatcctctgcccaaggccctgcccacaggtggggtagacctggcaggagccctcacagccagtgcctggcccagcctggggcctctgcagccacagggctccctctggcaggacagtgtgggggcagactgggtcaggagcacccccagcctctggggtgcagggataatacaggctccccaccccgcatcccagaacgtaaggtctgaccagcagaatcgtaaactgccttcctttatttatatttgcaatatgaaatagaagctcggcacaaacgcacgcacactcacaccagcctgggaggagggagctggggacaaggtcacttggcaacagggctgggacctcagaccctcaaggcccctggggctgttgccggggaggcccctgctccccagagccggactggcctggttgaaagtgcagggtctgggcaaaggcacggcccccactcgggaccctctggcacccccacccacgctgggccgtcccccatggtggacctgagctaaaaggccgggtgtgggcgtggccgtctgcgctgcagcgtgggacagctgggcacgtgggtggcaaccttgggacccctaacaccagctcccgctgggacggaacagggaaggctgtgctttggagccgccagcccagttcggtgtcctcactctctctcgctctcctccctctctctatataatatataatatatgtttctctctctccattctctctatttgactctctgtatctttattctaggaggcaacgctccaaaacttctcttctcagtgcaaatgggggtgggttgggcctgtctccctggcaccagcctcctgggggtccagaggagagaatgtgggggtgtcagggtgatgagggcaatgggggccatcgtgggacccgccctgcccccaccccgggagatccacgggaggacggaagatttggccgccgctgccgcaccaggcagctatctggaaacagagggagatgtcgtgtgagggtctagcaggcccagccccacctacccagcccgaggctgcagccacactcactgggagcctggggatgcaggcccttccggggcagagccattgggtatcggaggaggcgtgagggcctgggcactgtcaggggagagaggggatgtgcagaggtcacttcctgccccaccagccccacccccacccccccgccctgctgccctggtgctcacctctggctttggggaagccccaagggctctgggctcttctccccttctgtggtctgggggggctggtgggccccggaggctgggacagaggtagaggggtctctggttgcactgtgggtgagaggcaggtgcggctgtcagcgtggcccccaccgtcacctgctgacaccctcacatcccacccgactgaagtcggctcactgggtgtgtgtctgccacctgccccacggggaggggcctcccgaggacgcagctggctcagcgtggagggacagcacagccctggacaggaagacaagcacccctcttcccgcctcctgtccctgtggaggaggtactcgaggccggctgagacagccccaaagggtcttctgcatgctctcaccctcccaatccttcacaccctccaacgagcccttcccaaccctggggctcaagggccccaagcatcccaggctactaagagaagaaccagcctacagagtgcaaggggctggggcacaacatgaggctgcgcctgggggtcctgcaaaggaggcctggagcagctcagggacaagatgaacccagagcccacctcagcgaagaggagaaaagacttctcccgatactaggcagccccacctcgctgctcacctgtccgaggagctgggggcagaacggatcccgtggaaggtggcctgaaggtccccgatgctaaccaaggcctggcaaggggctgtgggggataagagatctcagctgcagctcccagcaagctcggagctggccaggctgctctctctgcccagggccgcgggtgggcagggcaaagcggggctcacctgagggctccgtgactttgctgccttctgtggcttcctgaggtgctgaggggggtgtggggtcctgagacctggtaggcgagagaggcagcccaagggggcagctagggttagcactcgagcctatgagaggacggggaccccatggccacctcctggcctcgggataccagcaccatttagcccgttccatccggttctcacctgagctgcagggcgtcacgggcaggagggctggccaggctctgagtggggaggccctggggcacactgaggggcccctgtggggctggaggcccagtgtgcagctcttcctccccggagactcgggggctggtcggggcatctgtaggcactgggtcaaaggtggctgtccagctggggcctgggatagaggtgggggagcgggatggagggtgaactcagtagcaggcagacagccctgtgtacacctgaccacaccgcccattcattcacctggaggctgagggccagggctggggtaggacagaggggtggcccctccacgggctgcacagccaatgccctcctcgtcttcctcctcctcctcgtcctcctcttcttcgtcctcactgtctgtgctgcctccactcctgccccagaaaccacctcgtcagctagctgtgtgggacagaccggccgacacccatcctgttccctgcagcccagggtcagcccaaggagagcgggctgggatgacaggcaggtcacagaagggtccagggagcctggggtgtgacgacaccaggagaggctgggagagggagttctgagccaacggcaagaacacaggcgggcagggacagaatgcggccgtaaggagaccgtccgtcgccagtcatccgtggagggcaggccctggggaagtgggctgagcctcagccatggcaaccagagcagacagacccactcaccagctctcaagccacctcccagccgtcacctcacacggtcaccacagtgacaggccttcccaccagcaggcccaccctctggacagaggcttcacactactctctccctccaactagaaactccaagaaggcagagatggctgagttttgccactgctgtatcctcagccctgagaaaccaccaggcacccatagctgctccaaaaacactggctgaatgttgactaacacacacctgtgagcatgaagaaaatccaagcaacctacgtgctgatcaaccggggaaggggtaagcaaagtaacactaaaactaagctttaacaacgagggtgcactctgaaaaacgccatcattaggcgattttgctattgtgtgaacattctagagtgcacttacacacacctggatggtggcgcctcct

SEQ ID NO: 1887736 - DNA, 4001 bp, Homo sapiens
ctttatacattcaatatgcaccattcatcaagcatctcattatatgctggtgtgctagacaaaccccttgcccaccagcacaagacaaacatgagacagataaacctgccagcttgtgggctgcaaatcagtgctgtggaggacaactgaagcaggtgccaggggagaggcctcacgagaaggggccatctactaacgtgagcagtgagctctccttatgaaggcggagtcccagcgcagtgaggccagccagagatgggcctgagtgggactgggacagtgggggctcctgagcaggtacgaagtcaccagcggagtgaggccagctggaggtgggcctgagtgggattgggacagtgcggggggtcctgagcaggtaccaagtcacccaactcagttttaaggcaacacctctcaatctgagctaatagacccaactaagggaaggacaaaggaaatggtaattcacagcagacaggggctggcaagtggtcagatctgctctccttcgagctgggcaagactggagcagacaggactgaggtcggaagggcagtggtctgcctcaaaacgcagggctcccagccccgtacgaccccaaccaatggcaagtcgaggccctgacagtccccttactctcagtcagagccgggggtggtctcagacagggagcagagtccttctttgaatcgggtaccccaggatggcaggaaccaggggtgccatggatgctggatccttggtccctggcagtggctgacagagttaggtgcccaggaaacatgtgaggatcaacagcaggactctttccccatccaggcctcactgtgtgtcatggtgtcttccaggctggagtgtagtggtggggctcatgggctcactgcagcctcatactcttggctcaagtgctccgctcacctcagcctctactcaacctctgaggagctgggaccacaggcggtgcaccaccacacccagctaattttattttagagacggtgtctcattatgttgcctaggatggtctcaaactcctggcctcacaagctgtaataaacactagggagcaaacaggccaaaggaaacaagagggctgggcaatcaggaaagcttgggtgacagggtggcccaggagcggccactgagatgagacctaagtgacaagagccagctcaaagagacaggggagggatggggacacctggaggacgggagtagggggacaatgctaaggctgctcaatgcctgctggctgtaccctggggctgccatctcccttacagttataagccaccacccaccaagttgcccatctcagagatgaggttgcatcaagtaaagcccatcccctccaaatgtggctgcacccactccctggatgcaaaagtcatctcatcttcctcccgtgatgtctgtcgtcccccaggtcttgggaacaccccaagtccccaaaccgtgctacagcaccagggcccagggcccagccctcagcctgcacccttctgggctagaaaaggcctttcttcttctgaatggaagccactgccccagctgggattcttcaggccacctcacaatgggacagtaggtctcaatcacaagtcagcaaactttttctgtgaagacagtgacccttgccctcaccagggacaaggcagctaccccacccctcctgcatggccagccattgacatcacctccagatggacaaggtgacatgcagagttttgatgacatggcctgaatgacaacacacagggccagagctccccagagcgtttcaaaaagggaggcccagtcgaggcaggtgagaaagccagctgactttattgctctgggggcagggggctcaggagctcttggtggggcgggtccgcttcctcttcaccatcacaggcttctggctgcgcaggatggcgctggccctgcggatggctgcctgggggcgggggagcagagcaaggctcagcccatacactccacaagccgccccctaggccaatgctgggtgtggggagtaggctgaaagcaagaatccatccctctccagcccatattgcaaccagtagtgggaggcccttccccacagcactggccagtctccccaagcctgatccccaaaccccagctcaccatgcgcaggtcggggcggtacttgttcttgcggatcatgtgtctgatgctgctgagcgtggcgcgagcattcttgttgatggtggtccgcacataggaggtggcaggcttccgctggcctggttgggggtcagggaggtcctggggtcagtccacctaacctgcacctttagcacacctcgcaggtgtggacagtctcacattgagaagctgagcagcgtgggcccgtggcgggtgcctgggcaggccagcaggtagctgttttcccacctgtccatttcacagaggctcactcgtcatcacggagtactgaggacacagcttctgccacactcatagcccaattctgtccaccatgaaaacactcctttctcatgccagaaagctgccgcttcagttaggatctgatccaggtccagccagagcccacgctcctggcaatgggtatgaacagcttcccaggaaccccaggcccatccccacagcagtggttcaacatcagcttggctgagaggcccagcctcactcaggccagtcccttagtctaggaagggccacccatgtattcggcaatccaagaggtgaaagctttcaggactccccagaacggggtccccaagtgccaagcaattggctgctccctggactacgtgtccctgagacaggaggatcactagccaacagactgcgtttgttgctgccactgagtaaaaggacccttggctctgaggcagttccaatcaaggacctgagaaaaactcactctaaaaagaaaatacagccctgtcaagaacacatgtgaagctggactcctccattagagacccccgactcacacgaacattcagggaatccccaaaaaggcctgcacctgacagcacaatgtatggagtggggtccccaagacctcttctctaacctacacaggcaaaatgggaatcaaatggctgcaaccaacccagcctgtcccctcctaagtgtggtagcgagggcccctcccctgttgtgcctcaatcttcccacctgtgggatgaaaccatccatccccaccctgacttgctttgagaatttcatctgaaaacatcaaccccgtgccttaactctcaacaaccaccgaggaagttcaggtcctttttcatttctccactttacaggtgaggacacgggctcagacgcgcgcggctcacagagctgacaagtcggccgagagggaagccggtacccagaccaacaccctggcgccagggatgcccgccgcgatggcagttaccgctcttcctgcctgacagtaaaaaatcacagctcccagacccgggaaaggggccgctctctggcccaaaccagacaaaactcaccggatctccgcttaatgaccaccacgacacctttgccgtcggctgccggctccacgcccacagtcttgcggtgaatcagtccgttgtagcggaaggaattgcgggccttcaagttattgggctcctgggaaggaggcggcacaaggcatcgtgaataagggacccggagacatgcgaaggtcccgccctctgacccagagtcaagagactcaggaccctcctcccgcaggagccacgcatccgggccccacttacagtgctgtaggtctgcttattcctcttgatcaggaaactggagcagttccgcacgaccatccattgcagatgcgcagacatggcggcggctgcggggaaacgggcacagggaaagcgtcagacacagagaactaaagcagcgttaggccacgggccacgctcggacagcagaggaagagagcgactgggaacttgggtgaatgggagacccctgagggcagacagcgacctagaactcttgtcaggcgggactgagtg

SEQ ID NO: 1887737 - DNA, 4001 bp, Homo sapiens
gggaaactgaaatccagctgagggaaggtgttgagtaactggtacaggatcacagttagctagtggcccagttgggatttcagctccagaatgttctcctccaggtccacaggcagtctcccctgctcccccagccatctgcttggccctgtctcccccttccttcctctatccagaaacatcacaccacctgcttttaccagaatacaccagtgcaaatcacactgccaggcctttgaccccaccattccctctgcattttaccctttctctgagctttggccaaccctgtgggaggatggggccactccctccttcctctccctgtctctgtgacatctgcttgggcatagaccaacctctgttccagagaggcctgtttctcccagagctgaacaaattatcctaacagttgcagttaccatttatttaatctgtgccaggcaccatttcaggtgctgcacgggtattgccttgtatctcgcaacaccactaaggtgggcgtttttattacaatccccattttacccatgagtaaactgaggcacaagggagtcacatggccaggaagagcagcagcggttggatctactgagccttgatgatgcagctgtatccagactccacattcctcctgcacactgcacgtttcctcccagtgtgtggtatgcccacctcctatctgttgccaataggccaggccaagcccatctgagacgagccaccactccctgctctggattgtcccaaggctgggtcttccctgcatcccactggacctccctgggttgggatgtttgtgtgggtctctgtgagtaacagtgcccagctgagcctggggcaggtctgacccacccaaatcctggaggccagcccagggtgggcatagagaaggtacacagggacatctggtatttccgtcacccccaacagccaccccaggcacccaggccctcgtctggtttcctctgagaaacagccagttgctcactgttagtccctgggatttggttggccaaacacaaacataagatcccaaccaggccagtgggggctcagaccagggacctcttattgttattaccccggggtttctacattggtaagacataagcctggggttcctggctatctttaacccctttggaaagagaacctaaaataagaatgaagctaacacagaaaaaaccaactgagaaacagaacaagagaggaagaagagagttctgatgctgtcaacagatcttctggatatagccgtatctgctgcctccttacccttctttgcttcagcccatttcagctcgcttttggtcacctgcaaccaaaacacacctgtctacaacagtgtgtgagagttacggtaaagtacaaatgtgagaatgggtgcatgagcaaccccaaaccagagccctgtgctcccatgttcctgtccagggtgtatctctggtgtgccgtgaagctgcccacggcgcccctttacctctcttgtccagcacctgagtcagatcctccaccagcacagcggcttcctctccgctcttgggactctgggctcccacccaggcttggatctctgggggcagcgcacccaggaactgctccagcaccagcagctccagtatctgctccttggagtgcgcctcgggctgcagccactgacagcacagcgctcggaggtgggccagggcctcgtgtggaccagatgcctcctcatagcggaagtgccggaagcgcaggcgtgcagcctcagagtgagcaatgtggtcatggctggattctccgccctgggagaggctggcttcctcttcctcctccaccttcacttgaaggaagctgtcctcttcccacggcactgggctcagggagtgcttggggatggccatcgggcagcagtgctcagtgagacacaggatgccggagccttggaactgggcctgcaggaatgtcagagcttcagcatcacatggaacctgggccctgcctcatgcctacagagcagggaaaacacaggcttgtggcccgtgagatgtgaaagactctcacaaagacatagacaatcctcataattaggacagcacccacttggtgctgagcactgttctaagctactactgcttgcatgtagactcatttaaaacttacaacaaacaccatcctggctaacatggtgaaaccccgtctctactaaaaatacaaaacaaattagccagacgtggtggcgggcacctgtggtcccagctactcaggaggctgaggcaggagaatggcgtgaacccgggaggcggagcttgcagtgagccgagactacgccactgcactccagcctgcgcaacagaacaagactctgtctcaaaacaaaaacaaacaaacaaaaaacttacaacaaactcaggaggtgggactttctacctattttatggatggaaaaacagacactcaggaggaaaatatttgcccaaagtccctcagctagtgaagggttaacagagagctaagctacaaacccacgcaaacctacagccagcctgtttaaggcgtgctcctccccaacagagccaagtctttctccctctgttccccaggtagccacatggtcattctctcactttacttgctaattattttgtagtgtttgagattgatacataattgactttcgcctttcctcttttctaatgcacatatttaaggctataaatttctctctaaacacagctttagctatacatcacaagtttgatatgttgtatcttcattatcatttagttaaaaatattttctaatttctgttacaatttctaccttactcattaattattttttaaaatttattttatttttttgagacggagtctccctctgtcgcccaggctggagggcagtgacgctatctcggctcactgcaactccgcctcccgggttcaagcaatcctcctgcctcagcctcccaagtagctggaactacaggtgtgcaccaccatgtgaggctaatttttgtatttttagtggagacggggttttgccatgttggcggggctggtctcgaactcctgacctcaagcgatctgcctgcctcggccccacagagtgctgggattacaagcatgagtcaccatgcccagtcccattggttatttatttaaaactctcctgcttcattgccaaacaactgggggttttctagttgtctttttattactgatgtctagattaagtctgttgtggtcagaaaacatgctacaatggatttcgatcatttaaaatttgctgaaacttggtttgtgacccagtgtatggttaattttggttaatgttccatgaatacttgaaaataatgcaaagctgtcttagctatgacaccaaaagcataagtaacaaaagaaaaaataaataaactggactttatcaaaattaaaagcttttgtgatttgaaggaccacatcaagaaagtaaaaaagcagcccacagagtgggagaaaatatttgcaaatcatatatttgataagggacctgtatctagaacaactccatagtaaaaagatgaataatacaattttaaaatgagcaaagaatgtgactagacatttctccaaggaagatacacaaatgggcaataaatacatgaaaagatgcttaacatcactagctaccagggaactgcaaatgaaaaccacaatgagatagcacttcacacctgctgggatgcctataatcagataacatgtgtaggcaaggatatggagaaactgtaatcctcatatgctgctgctgggaatgtaagatgggatagccactgtgggaagtacagtctgggagttcctcaaaagcttaaacagagttaccccatgacctagcaattctactcctacgtatagacccaagagaaatgagtatatgtcctcacaaaactttatacataaatgtgcataacagcattactcataacagcaaaaaaggagaaacaatccaaatgtccacctgatgaatggataaaatgc

SEQ ID NO: 1887738 - DNA, 4001 bp, Homo sapiens
aaggccatgggcaccatgaacagacaggtgcgcttttcccaatcccccttcccactcccacgacccatggggatcacactcacactcctgtcacttccagctgaagttgccccagatccagaagatcatgatggagtttgagcggcaggcagagatcatggatatgaaggaggagatgatgaatgatgccattgatgatgccatgggtgatgaggaagatgaagaggagaggtatggggaaactggatgggagggtggagatgtttgcctggccctcacggagtgcatagccctcactgagttctctctcttccctagtgatgctgtggtgtcccaggttctggatgagctgggacttagcctaacagatgagctgtcgagtgagtgctccaaatcctggaccccatttcccacccaaggcccagccacagctccaagccctccctttccctgcattactcccctccgctgcctgaccccacctgctcaaacccccactttctctgcagacctcccctcaactgggggctcgcttagtgtggctgctggtgggaaaaaagcagaggccgcagcctcagccctagctgatgctgatgcagacctggaggaacggcttaagaacctgcggagggactgagtgcccctgccactccgagataaccagtggatgcccaggatcttttaccacaacccctctgtaataaaagagatttgacactagtctccaggcccatgtgacttttggcctgatgtgggaccagactggggtccctgggaggatgggcatcactaaggcaagaggcacttggtactaagctaagggtgggggtttggggcaggggtgaacaagcaaagtccacctgggattttcaggagctgggagcttcaggtgagctgtgggcccttctccatcacctctcccaagatactggactgcccaaacaccctggtaggatcttgagagtccaggcctcatctgccaggctgtagtgtccaacactgtttggtccagtgatggtttaatgacaacactcaaggacagtccagaccaaccaatagaggcaagggggtggccttgggattcacacaggctcgactgtagagtaactaaatcataacacagagatgaatgataatgttaagtggactcagcaaagggagacagggaaaaaaaccacatctggaaggtctcagttcactgtgggaccttctgaagatgagaaacagctacagcaccaaaatttaggaagcattcagtagagtggctgtgctacacctggggctaaccctgcctacacagggatgtaggtcacacctacccagtatcccacagggtacccaacaagcctctagtgtgtacatcctttgccctgggtgaccctccccatacccagaaagggcaaggaggcagtcttccccactccctaggcatccatacacatgggcttcgataggtgggggacaagacccccctcccttgtgccaccagtgcttgataaggctgactagtagatacagtcaataaaccaggccccaggaccacagtcccccaaccagccaacgcctgaggaactggtgaagtttttattaaatccacagaagtaaaaaccatatcgtgaggaactgggggatggggccaccagggagtgggagtcaggccaccaggggagtggggatggggtgacaggacagagaacagagccaggctgggctggccatgggggctccagcctcaggggccatcaccagggccaccagacagctcctgggaactcaggccagcaccaggcaggctcatcggcgggggctccaccagcacagcagagaacttggtgtcaccgaaggcctcgttcatgcgcgtctcgaagaagcgctgcaggccgatgatggactgcacgtctgccttgtcctgggccaagcaggaatgcagtggatgaatgggtcctagttctttccttcacatctccccctgcccacagcctctccattccactggctcacctcagttaacttgttgaattgcttgaacatgcggcccacatcctgggcaaactcctgtggggagctgtagggaggtgacaacttctcctggaggcgggcacggatcagggtcagatccagggtgccaccgggctggtcctgcaggcagagatcacacatacacacacaaagacacacatatacatgcacaggttgagggcgagacccagcagccaccacccccttcccctttcccatcctaggactcaccagggagaaggtggagtcggtagccagctgatgcagggggcggcagggttcgtgacagaatagggccagcagtacacgctcacatttctacaaacattgtaagggatgtcacagctctgggcagcacctataaagcctctctgggcaaccccacctaagtaaccccagccctcacccgctggttggctggtgagagcttggccaccacgccagtgctgtctgcaccatccaggctgaggctgccatcctcctccttcaggtcagggagcacatggcagagtgagcagctccactcctccctagggtgaagaaaataagggtctgcacatgatcctgtccagacagcccaacacccagacttgacccccaccagcctcacactcaccctggtacatcctgcagggccggcaggtgacagtccaggtggaaacaaaactcacactggttgcacataaccagatcgcctggcttctggcagacacggcaaatggtggcactgtcatccagggttcccgggccaccacctggggctgaggtaccctcaggagccaccacctccagccctgagctggtgctgccactaggtgaggccaggcggggaccctcagcaccaggaccctccgcaagagccataagcacaggtttggtctcagggccctcagtggcagtaggaggggctccaatggcagcctccgtctcctcctcctgcaaggtggtgatgaggggtgttcaacagggtccagacctggactacaggcttcatcctacagctatagttccttgggacaggcttaccttgacaatggccatgccagccaggggtggggcaccaggggttcctgcaggcgcagtccctggctggccggtagctgcagcggcagcgccacgttcaataacaataaggttgtagtcctcagtggtactgcctgggaagaccttgaagacgggtggctggctgtcagctgtgaggtccaggtccaggcgttcaaggctcactcgtggcaccttgcgcataaggccgctcacctcgccctcacctgagcgggacctgtagatgcagcaacctggcatgagtacacccccaccctccatccacctcacccccaggggaggtgccatacttaccgtttcacacctgacacatggggctctgcacttgagtagggatcatctccttagaaaatggagaaagaagactggcaggttggggtagaaacagcactggggcccttccccacccactaggcagacccactcacctgacccaaagccatagccttcctgcacctccatgggctgtgaacaaagcagaaccctctgcctcagtgggacaggaaccctactggaccccattccctgcccaccccccctgcctgggtcctctctcctgctactggaccccattccctgcccaccccttcctgggtcctctctcctgctcacctggctgctgccagagccctgcttgctcaggggccctggggctcttggaggggccatgggtgcagggcctgttgagttagtgccaggacgctctgccacaatcttgcctgcaaaaagaagagagaaacgtaagtaggtgcagcacgtggggtaataacagagtgaggtaaagctggggacccaccaaaggcctcggcactcttggtccaggcattgaggtcccactgaaacttcatctcgccatgtggctccacgggatccacaatcatcttgagggcccggtgcagctggaagtagatctggttggg

SEQ ID NO: 1887739 - DNA, 4001 bp, Homo sapiens
cctgggcctcgtcaatttccacatctggggaacagggccggcgcacctaccctgcaaagtgctgggcgtgtgcacatcgggatcatttctggaaagactgtgtgagattatctcaggagagcccaaccctgcagtcaaactgtctacatttgcctccagctctgctatctgtgggccacacccgggaaactgaggagccaagtgagaagatggggcgggaaggcatggccaaatttttttttttgagatggagtctcgctctggcacccaggctggagtgcagtggcaccatctcagctcactgcaacctccacctcccgggttcaagcaattctcatgcctcagcctcccgagtagctgggattacaggtgtctgccaccacacccagctaatttttgtagttttagtagagacagggtttcaccatgttggccaggctagtttcgaacccctgaccccacgtaatccgcccgcctctgcctcccaaagggctaggattacaggcgtgagccaccgcgcccagccatggcatggccaaatctgaagtggacacctggcccgggccaccatttcctcaagcctaaacaactgcccagcctccttgaggcctctacctcattcttttctaccccaaagttccggacagtctgggtgagtgcctcttccctgcctacagctttccaaggctccgctggacccagcacatcctggcacccactgccctgtgtgagctgcctgtgtctgtcactatcacccaactgctgtgcctggagcacccttcatcaacctaacctggacccctcctgttctgccctcagtctgccccctctgagaggtcatctcaagtgtcatgagctcccagggctggccacctaagcttcctgcattgtggcactcagagctgcctcagagccaggcacaagcaccaactcagtgaactgtcttcaaaaacacaaccccagggcctgggcagtggctcatacctataatcccagcactttgggagaccaaggtaggaggatcacttgaccccaggagttcaagaccagcttgagcaacgcagcaagaccccatctctaccaaaaatacaaaaattagccaggcatggtggggcgtgcctatagtcccagctactcaggatgctgaggtgggaagatctcgagcccaggagttggagcctgcagtgagctacgatcgcaccactgcactccagcctgggcaacggagtgagaccctgtctcaaaataaataagtaggctgggcacggtggctcacgcctgtaatcccagcactacgggaggccgaggcgggaggatcgccaagttcgagaccagcctgaccaatatggtgaaaccctgtctctactaaaaatacaaaaattagctgggcgtggtggtggcaggcacctgtaatcccagctactcaggaggctcaggcaggagaataacttgaacctgggaggtgtgggttgcagtgagccaagatcgtgctactgcactccagcctgggcgacagagcaagactctgtctcaaaaaaatacaagtaagtaaaataagataacataaataaataaataaataaataaataataaaatcctacagggatggaagtgccagcacttccactgcagcagtgggaatctgaggttcagagagggtaccccacaaagtatgtaagttgaggcctggggatgtggactggtcactaagccggcaccgccaccgccccaccacttacttcctgcctgatttgccgttgacccggagcagccagggctggtcctcgggccggaactccttgaggacgatgccgtacttcttcctccgagcctcctcccgaagcttgcggttgaactcactgcccgcgcccgattcgggcatctcctcctcttggtagattttcttgttgctcaagtcccgctccagccgagcctaggggagcaggaagcaaagcctctcagggtccctggctttgcttgcgcagtgcccccctccaggaacgcccttccttgccctaggccaagctctagattctcaaaaccaacttaccacttggcaacaagggaggagaacggtagcctttgacaaatctgggtaaagggaatttgggcgagccttgcgctctatttttgcaacttaaaagcttgaaattatttccaaattaaaattaaagagaaaaagaccacctggtgaccatcaagcaggccatcggaggcaaaattccttatctgaggaatgtagaagtaattaattagacttccctattatctacagcaggcatctggttccaggattcttttcaaaaaatgtctaagtacctagaatttccacacatctctccagaatgcatgcatatcgaaactcattgtgctgtggctcacacctgtaatcccagaactttgggaggccaaggcagaaggatcacttgagctcaggagtttaagaccagcctggcatcagaatggcttgaacctgggaggcggaggttgcagtgagccgagatcatgccactgcactccagcctgggtgatagagtgacactctgtcttaagaaaaaaaaggccaggcgcggtggctcacgcctgtaatcccagcacttcgggaggccaaggcaggtggatcacgaggtcaggagattgagaccatcctggctaacacggtgaaaccccgtctctactaaaaatacaaaaaataagccgggcatgatggcaggcgcctataatcccagctacttgggaggctgaggcaggagaatggcgtgaacccgggaggcggagcttgcagtgagccgagatcctggcgctgcactccagtctgggcgacaaagcaagactcagtccccaaaaaaaaaaaaaaaaaaaaaaaagaccagcctgggcaacatagtgagatcctatatctatttcctaaaaataaaaaggctgggcatggtggaaggctgaggcgggtggatcacttgaggtcaggagttcaagaccagcctgaccaacatggcgaaacttcgtctctactaaaaatacaaaaattagctaggcgtggtggtgggcgcctgtaatcccagctacttgggaggctgaggcaggagaatggcttgaacctgggaggtggaggttgcagtgagcccaggtcgcgccactgcactccagcctggatgacaagagactccatcacaaaaaaataaaataaaataaataaaaagaaactcattgtgcaacacttgctgacattaaggcaccaaaatctctacaaattaacaatttatcgtgacctacatggctaatgtgatccgaattacccttaagctcttgatttaaggtccatatataccatttccaaaacactctagaatcagccacatctcataacctccactgcctccagtgccctgccaggactcacctagaccagtccagttgcttctaccttggtctccgtttatttgccctcaaacccacagtttgtctccccatagcagccagatcacacacactacaacttcccaattgaagatgctttaatggctcccaaagtcctttctagagcctctgatggcaggggctctgggaaagcccccagcccagtcccctcccttgcccagataaaccatggccaaaaatgtccaacagtgggcacagcttctaaatgttctcctttaaggagaggcctctggtgggcctaccaaacctaacttacagggacacccaggagctaggcctgggcctttgccatttccgtttttttttttttttttttttttttttttttgaggcagggtcttgctctgttatccaggctggagtgcagtcgtacaatcatagctcactgcagccttgaacccctgggctcaagcgatcctcctacctcagcctcctatgtaggactacagacccacgctatcagccccaactaactttttaatttttttgtagagttggggtcttgctattgtattgcccaggctggtctcaaactcctggccttaagcaagcttcctgcctc

SEQ ID NO: 1887740 - DNA, 4001 bp, Homo sapiens
ctactaaaaataaaataaattagctgggcacagtggtgttcacctgtagttccagctacttgggaggctgaagtgggagaatcaactgagcccaagagtttgaggctgcagtgaactctgattgcgccactgcactccagactcagtgacagagcgacaccctgtctcaaaacaaacaaatatgagaccagaacacacgcacacaacacacacatttgtatctgagtggagacagtctgagagtctctttccctctggcctggcagttatgtggccaaacacactgggccacatgtaccccacccattgttctgtggcaacagcgagcattgtcttgtttaaaagagatccagggttgggttgggcacagtggctcatgcctgtaatccccgctgtttgggaggctgaggcaggcagattacttgaggctaagggttcgagaccagcctagccaacatggtgaaacccagtctctactaaaaatacaaaaaattagtcaggcatggtggtacatgcttgtaatcctaattagttgggaggttgaggcaggagaatcacttgaacctgggaggcggaggctgcagtgagccgagatcacgccactgcaatctagcctgggcgacagagcgagactccgtctcaaaaaataaaaaataaaaagggggccgggcgtggtggctcacgcttgtaatccaagcacttagggaggccgaggcgggtggatcacagggtcaggagatttagaccatcctggctaacgcggtgaaaccccgtctctaataaaaatgcaaaaaattaaccgggcgtggtggcgggtgcctgtagtcccagctactcgggaggctgaggcaggagaatggcgtgaacctgtgaggcggagcttgcagtgagccgtgatcgcaccactgcactacagtctgggcgacagagcgagattccatctcaaataaataaataaataaaaataaaaagggacgctggccatagcgggcccaccttcacccgcaggcatctgatgatgctctcttccctgcttttcccttccagacaccaagtgtgccttctccagtgttctctgctggaaacccaacattcacctcctgattgtagctgcaaggacagtgtgcgtcccgggttgtcagcaccacactgaaactgtgaaatgccacctctcacgtgcttaggtagcagatgtcacctgacaggtacagagtacaccgggcaggtggcaggggcgatgcttcctgccaggggacacaggtcacagtgtcttgacccaggagctgctgagtcagccatgggcttggaagataccatcctgttgtctagccactaaccagttttttgtttagtttttttttttttttttgagacggagtctcactctgtcacccaggctggagtgcagtggggctgtcttggctcactgcaacctccatctcccaggttcaagtgattctcctgcctcagcctcccgagcagctgggattacaggtgcccaccaccacacccggctaatttttgtatttttagtagagacgaggtttcaccatgttggtcaggctggtcttgatgatccacccaccttggcctcccaaagtgctgggattacaggtgctttgagccaccatgcccagcccactaaccagttcctgaagctccttcctgctccctccattccctctgcagccctcagcgtcgtggatacgcacccatgaacaggatccaccacgatggcccttggcttggagccgttctccctgaataacgttttcctcttcacgcccttggtatccgcaacagagacagtgcccaggacagagtcggtccagtagatgttgctgtggatccagtccacagccagcccgtcgggggcctggatgtctctgctgatgacggtgtcataggaagagacgccgtgggctctgtcaagctgggtgctgaggcaggaggagagaagggcatcagcgccaggagccctcatctcacctgcgggccaaggctgcaggcaggggcgacgctcacctgcagatcattctctgggacaggtcagaccagtagattctattgctggccacctccgtgtccagagcgaccacgttcctcaggttggggatgaggctggtgtactcgctccggtccagcgtcatcttcctgacctcgtgccggttggtgaagaagaggtaggcgatggagcctgggggtccggggagcgaggtcagggggtcagaggggacccgtcgatggaaccaagagtgcctccccatccccttgtgtcatcctgcagggtgcggctgagccagaggaggcacccagaaaaagagggtggaaaagacctcccaacgggaacaggcacagtggcgcccacctgtaatcccagcactttgggaggctgagggaggaggatcacttgaggctaggagcataaggctagcctgggcaagacaatgagaccttattgccacaaaaaaaaaaaaaaaaaaaaaagccaggcacggtggctcaagcctgtaatcccagcactttgggaggctgaggcgggagaatcgagaccagcctcaccaacatggtgaaaccctgtctctactaaacatacaaaaactagccaggtttggtagccggaacctgtaatcccagctactcagaagggtgaggcaggagaattgctggaacctgggaggtggaggtttcagtaagccaagatcgcaccaccgcactccagcctgggtgacagaatgagactctgtctcaaaaaaaaaaaaaaaaaaattaaccaggcatggtggcacatgccagtactcccagctcctccagaggcttaggcgggacgatcacgtgaacccaggaggtcaaggctgcagcgagctatgatggaggctgcactgcactacaggctggaagatagagcagcaccctgtctctaaaaaataataatagccaggtgtggtgtctgtaatcccagcactttgggaggccaaggcaggaggatcacttgggttcaggagttcaagactagcctggccaacatggtgaaaccctgtttttactaaaaatatgaaaattagcggctgggcgcagtggctcacgcctgtaatccgagcactttggaaggccgaggtgggcggatcacgaagtcaggagatcgagaccatcctggctaacacagtgaaaccccgtctctactaaaaatacaaaaaaattggcctggtgcagtggcgggctcctgtagtcccagctactggggaggctgaggcaggagaatggcgtgaacccgggaggcggagcttgcagtgagccgagatcctgccactgcactccagcctgggcaacagagcgagactccgtctcgaaaaaaaaaaaaaaagaaaaaagaaaattagccaggcatagtggcatgcacctgaggtcccagctactccggaggctgaggtgggaggatcaaccaatcctcctgccctcaagcaatcctcccgcctcagccttctgagtagctgggaccacaggtgtgtggcaccatgcccagctaattttttttctttaaccccttgaagtcactccccaggttgtccctgaaaggaaagccggttcctgttccaccagtagggctgagggttccgttaactggatattcccaaaaactaggacatatgcaggcatccccctggcaagcccaagtcctaacagggcggcagactcccctgccagagccctcaggagcaaacagcctcccggtcaggggatatgagtctgtgcaaagttcagaggatgaaactcccccaccactgctgcctgcaaggggtgaggccgcccccacccgccgccttcccgtgctcacccacagccttgcaggccttcgtgtgggggtccagctggaagccttcctcacactggcacttgtagccaccctccaggttcacgcagagctggctgcaggtgtcgggatcctgacactcatcgatatctggaagagagagaaagaggcttggtggggaggctcttcc

SEQ ID NO: 1887741 - DNA, 4001 bp, Homo sapiens
tcccctctgctgcttgtgcgcatgcgtgcggccgcccagcaagctgtgccttttgcgcctcttgcgcgtgcgccggggcacagggagggacagcgggaggtgtcgcggggagcctggtgcccttctagatgggcgacggaggcaaggacaagacgagtccgagctcaataaatgcgctgtgcaccctccccgcccagtgttgtggatccttgggagaggatgtcctgtgaacggcacagggcggggatggtgtccctggagcagtgctcggagcggcccaggtcccagggaggcgtttccgcagttcatggtctctgagtgtgggttcgtggttatggagggactcaggggatgtttgagggataaaacggcatgatgaggggacaagtcacgagtttattgtgggtctctttttgggttcatgtttcaggacattggaggagatatttttgggtgttttgagttttaggcgtgttgtggggtagttcatgagaacatttcgcatgccttattaggtattggggagtctcaagggactttgaggcttgttggaagttctcacactatgtggtcattgtatgttattaagggtagcatagggaattatttaacgggcttgcagggacatttgggtatttggaaagatcttgtaataaagtgaggtctcggggtaagtgagagggtcacaggggcttactattataaactgtctgaacacttccatcatagcgggacgatcctatgtcccagttttcctggaatggtccagggtccactggaatgttccagtgttccatctggttagagctctctttcattccttttggctactagtaaatcccaaattgcatatgaggttcccatggctgaggaggcagagggcgggcctgtgccatgtcccaagccacaagggaacaggcctgtgggcttttcccaacaagcaggctcagtgccagcctctgtgtcagcctccagggcacgccaaccttctcatggtgccccaagccccaccccaatgcacacataggaagtctccaggctgcttgggcagaggcacaatcattttagattaaaaaaaattgaacaaagagaccctcttgcgagaggtgagatgaggccctgccatgcaaaggagtcccagcagaggaggaagaattccatcctggagttcaagtttctgtgcagagacaggacctggggacagagaacggtcctccacccaatttcagctggtctgtcctcatcagctttgggctgagcctgcgggaagtgatggggtccgtttgtgagggtggattgagttcttttctttccagtgtgcaaacacacacatacacacacacacacacaccacttccgtgttcccctgagccccatgctgccccatcttacctggggtgatgagaggtggagtctcccctggatggtgactaaggagacaaaagtggtgagattggtgtccgcccccatttgccctctccctccggatagagggttcttagcctgcccagacatgtcttcctggctgcctttccatttggggggttgtgcaatcccaggggccaaagcatttcaggatttggggccccctggggattaccagctagaaacaataaacctggaaatcttagcggcaggaactctaaagggcagagccccgaggcctctcctgctgggagagttagccctttcaccctgaaaagcgtccagtcagcctgaggcgggcatgccggaacagtatcttacccggacttctggccaaacttgcatttgcattttgcacctgttggggagagctgagtggtcaggggaggggagccccagccccggcccgcctgctcccccgagctcctccactcactcatgacgatgatgatgcccatggcgcacagaaccccagcgcagatgagcccgccaacctggaggctgtgccagtctaggaggaaagtggaggggacctcagtgccagcctgtgtcctctccatctgtccccccattctcttgacaaatatatatggagcacctaggatgcacagggtgctggggacaccgccataagaaaacagacaaaatcccaggtgctcacattctggttcacacaccagcaaacacgatctgtcgtgcagggtcaggcagagataagtggtttgaagaaaaataagtggggtgggagatggaaagtcagagggcgggctgggcatagtggctgacacctattaggttggagcaaaagtgattgcgtttttggctagacatggtggctcacgcctgatatcccagcactttgggaggccaaggtgggcggatcacctgaggtcaggagttccagaccagcctggccaacatggtgaaaccccgtctttactaaaaatacaaaaattagccaggcatggtggtaggcgcctgtaatcccagctactcagcaggctgaggctggagaatcatttgaacccgggaggcagaggttgcagtgagccaagattgcaccattgcactccagccagtcacactctgggtgaaagagcaaaattctgcctcaaaaaaaaaaaattgcatttttgccattaaaagcagttgcaaaaaccacaattacttttgaaccaacctaatataatcccagtgctttgggacttcaggagttcaggagttctagaccagcttgagcaacatagtgagaacccatctctacaaagtatacaaaaattagccaggcatggtggtgtatgcctgcagtcccagctattcaggaggctgaggcaggaggatcgcttgagaccaggagtttgaggctgcagtgagctatgattacaccacagcactccagcttgggcaacagtgtgagacgctgtctctaaaacaaaaaaaaagtcagatggcagctcttttagagggagttgtcagggaaggcctctcagggggctgcatttgagcagagggaagggagggagccatgtggttctgtggaaggaagtgttccaggcagaggaaccagcaggtgcagaggtctgaggctggcagtatgtctgctgtgtctgagaggcttggagcagaaggaatgaggagcgtggagaggtgagggcagagcggggagtagggagcaggtcattggaacctggaggccagatgagggttttgatccaatagctcaccacctccaggaagttttctcaagtcaacacttctcccagcagttgatctgaaccaaccaatggcttcttgcaaactgtcctcacctcctgcgtgtgtctatcttgctggaatagaaccttcccaaaggccaggttgctgcctctagttcctttaatccactgtgtggcatattcagtaaccccatcctagtcccttcgtatctttgtcctgtgatgctcacgtcaggccccaaccctgtatgggaacccttggcaccaagcagtatgtggggttgtggggaggggaaagggggcacgggctctcaccatagtagaaaggactgtttttatctgcaaggaaagaaaaaagatcatgaatccaggattacagccaggatgcaggccttccccacccaggggagaatttgggggtgtgacgggtgagagtccagtctgactcaccttctaggtcattggcgtccaggacaggaaagcctagtgggagaagaggggaaggaggggagatggtgatgccggcctcagccaagcctttgggcagggcctggggagtttcaggggccttgggaaagggtctcctgcgggacaggggtcctgtcactgagcagccacctcatcccctcatatcccaacgaggaaatgtggactcgcccactcagccccacacctccgagtcacgccagcattctgccacctgaaatgggttctaatctaggaggtttttagccactatttggtctcatgtttccagacacgtggttaatccatgcctcctgcagcagcgggggacttttctggtcaagacgacagatggtttcagttcccagattcctgtttccccaagtccaatcatgc

SEQ ID NO: 1887742 - DNA, 4001 bp, Homo sapiens
gcattggccggcggccccgtcaccctgaccctgatcacccccatcagctgggtcaccccgttacccccatgccccggtcattccagtcaccttgtcccctgcctcgcattggccggcggccccgtcaccctgatcctggtcacccccatcagctgggtcaccccgttacccccatgccccggtctttccggtcaccttgtcccctgcctcgtattggccggcggccccgtcaccctgaccctgatcacccccatcagctgggtcaccccgttacccccatgccccggtcattccggtcaccttgtcccctgcctcgtattggccggcggccccgtcaccctgaccctgatcacccccatcagctgggtcaccccgttacccccatgccccagtcattccggtcaccttgtcccctgcctcgcattggccgacagccccgtcaccctgaccctggtcacccccatcagctgggtcaccccgttacccccatgccccggtcattccggtcaccttgtcccctgcctcgcattggccgacggccccgtcaccctgaccctggtcacccccatcagctgggtcaccccgttacccccatgccccggtcattccggtcaccttgtcccctgcctcgtattggccggcggccccgtcaccctgaccctgatcacccccatcagctgggtcaccccgttacccccatgccccggtcattccggtcaccttgtcccctgcctcgcattggccggcagccccgtcaccctgaccctggtcacccccatcagctgggtcaccccgttacccccatgccccggtctttccggtcaccttgtccgagttgttcttgagctgcacaaacttgccctccaggtcgatctcctcgatgctgacgctacccgaggccgaggcctgctgggccaggtggaagccaccgctgccacccgtgcccgtgcccaggacgcttgggccgctgcccaagggctcctccacctccagccgcttccgcttactgcggcccaggcgcccggtggcggacaagctgccgctgctgctcgaggtggctcgtgagacggtgacgcgcgaggatgggctgggggacagcttcagcctgtggggaaggcaaggaaggtgggactggtagtgggagccccagacagcccagggcacgcagagtggcggccacggcccggccccacctccacccctgcccagcactccccgcagccccgtcccgcctctcctcctgccctgcccctcctcctcactctgtgctcccaagcctcctggcctgccgcacctctcctcctcgccctccaggagcttccggtaggcgttgatctccatgtccagggccagcttcacgtccagcagctcctggtactcggccagctgctgctgcatcacgtcccgcatctccgtcatctcctgctccttggcgtccagcatcttccggaacttgtcccgctccccggccatggcctcctccagctcccgaatgcgatcttcagcggcactggcctgcggagggggcgggtggcgaaggtcagggcagcccatgggtcacaaggcccaggtgatcctgggactgcgggagatgggccctcaccacagactggggcagagaccaggcctgggcatggggcgcacgggaggggagggaaggggcatcgctgggcgccccgagggctgcatccgatgccaagaggccagagccccacgccccgcacatccagggcagggcccagaagttgggccagggggacggcagacggtggcgctgtgctcatcacctgcttctggaggccggagagctggtagctgagggactccaggcgcatgcgggcctccttcagctcctcgcgagccgcactggccgccttgtcgttctggtcagagctcagcttggcgctgtccagctgtggggagacgggcgggtgagtgcgggcgcggggcggggcggggttcccaccggccgcccccgcccacccgcctgccggccacaccttggcctggtaggtctgctccagctccagcttgtagagccgcacttgctcgtcgtgctggctccgcagctcctccagcgcctgtgccatcttgaagtcgtactcctgctgccggctgctgtccacctccaccaggcgccgctcgtgccgccgccgcgtctcccgcacctcctgcggaccaaggcttcgtgaccctctggtcccgcctgggccccaagcaccaggcccaagggagggctcaaaaatgtgccaagaggaacctccaggcaattcctggttccttgtgcacaagttacaaaccgatacacgtgcaggtgagaggcgacccaggggccgtccacgcgctagaacgtgactcagccacgaaaaggagcgaggctctgacaccgccacagcatggatgcaccttgaggacgtcacactcaatgagagacgccagacacaaaaggccacacggtgcgtgatcccatttccatgaaatgtcctgaaatgtccaggacaggcccatccacagagacagggaggggatgcgtgggggccagggctggggactgctgatggggagggggttctttttgggtgatggaatgttctagaattagaggtggtggttgcacaaccctgtggagatcctgccaatgctgaactgtacactttaaaaaggtggacttaaaatagccaggtgtggtggcgggcacctgtggtcccagctactcaggaggctgagacaagagaatcgcttgaccttgggaggttgcagtgagccaggatcgcaccattgcactccaacctgggtaacaaagtgagactgcgtctcaaaaaaaaaaaaagtgactctctcttataaaagccattattgaagaaagcgggccaggcgtggtggctcatgcctgtaatcccagcactttgggaggctgaggcaggcagatcacgaggtcaggagttcgagaccagcctagccaacatggtgaaaccccatctctattaaaaatacaaaaattaggccgggcacagtggctcaagcctgtaatcccagcactttgggaggctaagacaggtggatcatgaggtcagaagttcaagaccagcctgacaaacatggtgaaaaccccgtctgtactaaaaatacaaaaattagtcgggttggtggcacccgcctataatcccagctactcaggaggctgaggcaggagaatcgcttgaacccaggaggcggaggttgcagtgagctgagatcatgccaccgtactccagcctgggtgacagagcaagactccgtctcaaaagaaaaaaattagctgggtgtggtgctgtgcacctataatcccagctactcgggaggctgggcccagtgtgggcaacagagcaagactccatctcaaaaacaaaacaaaacaaaacaaaacaaaacaaaaacagtagaaacgcttctgaaggaagctggccacctttgcagtcagcaaggcgggtagcccaggcaagcagagccctgcgggccgcgcacccacctccacggccgccctcccgcctccacggccgcgcacccgcctgcacagccgccctcccgccttcacggctgcgcacccacctccacggccgctcacccacctgcactgccgccctcccacccccacagccgcgcacccacctccacggccgccctctcgcctccacggccaccctcccgccaccacggccgcgcacccacctccacggccgccctcccgccaccacagccgcgcacccacctccacggccgcccttccgcccccacggccgccctctccaggactccgcaccctgtgggctgcacaggcctgcatcatcaagctccctaccgcagctccctgtgagggcccctccagggcctcttcccggcccctgcaccgccttcgtgggtcttttcccaggtgccctgtgggttccacctggggcacgttcctgggcccccgcacagaagctctcgtgagtctcttcacgggctgtctcacaggtttcccc

SEQ ID NO: 1887743 - DNA, 4001 bp, Homo sapiens
gccggcccttaagtgtccacaaattcaattatgcttccccaataaacacctccagcaaccattgccctccagtatctctctgggggagacctagaagaaggatcttcctgtgtgtgctgaggccattcattcatttattgattgatgtattggtttattctttgatgcctttattgattcaacacatgcttattatatgcctgctgtgtgccgggccccggaccaggcgctggggacacagcagtgaaaatactaacattgtttctgccctcacggagctcacagtgtaacagggagacaaatagacctgtcagtagataacatgaaaataattggactatgtgctgcagacacaatatcccaggtctatgagaatgtcaatacagacttcacgtgggaaatggtgaggcaataaggatcgtttcccttgatgaaatggagcttgcagaagaaggcagggtcagttgtggggagctctggttggaggtggagggagtgcattccaagctgcaggaacagcagaggcaaaagccctgaggctggagaacaggtaaccatgtgcagtttttcacttgattagggtgttgcagagaattgggagtgagtcttatatatttatttatttatttattattttttactgagatgaggtcttgctatgttgcccaggctggtctcgaactcctgagctcaagctatcctcccaccttggcctcccaaagtgctgggattacaagtgtgagccaccatgtctggcaaaggtggtgagcctttatgatgtcataagtcaccactgggcacaagttcacacttgtcctatgattggcccatgacactgatgggtagcagacaggaaaggaatcttttctgaaactttttttttgaaacagggtgttgttctgttgcccagtctggagtgcagtggtgcagtcatggctcactgcagccttgatctcccaggctcaagtgttcctcccacctcctaagtagttgggactacaggcatgtgtcaactcacggggtctcactatattgcccaggctggtctcaaactcctgtactcaagcaatcctcccatctcatcctcccaaaatgttaggattacaggtatgagctcccacacccagcccacttctggaacttttattgaaaagtatccttaggctgggttcggtggctcacacctgtaatcttggcactttgagaggctgaggcaggagaccatgtctttacaaaaaagaaaaaaaaaatgttttttgagacagaatctctctctgttgcccaggctggagtgcagtggtgcaatcttgggtcatgcagcctctgcctcctgggttcaagggattcccatgcctcagcctcccgagtagctgggactacaggtgtgtgccacaacgcccagctaatttttgtatttttaggagaaatggagtttcaccatgttgtccaggctggtcttgaactcctggcctcaagtggtccacctgccttggcctcccaaagtgctgggatgacaggcgtgagccacccggccaaaaaaataataattttttttttaatagaaaagtaccctgagaactctggtctagggagggctttaaatgtcattccctcattgggtctcccaggaaagcgccataaggtggttagaggtcttgggtttagagtcaggtatgttctatctccaggcttgtgggggcgtacgagtgatgtgacaaaccccatacatggtgcatggctgtatgagcacaggatgtatgtccttgtttgcttccctcctttgcctgtgcctgtatcgcctggagtgagccagcccccccactccgagtggaagcgattcttccccgacctccccggttctcccccactggccagcccattgaaggcgaaggtcgaagggagtctgcgctatgaggccggctgtgacttgttgtcgtagtacatcagaacaacaaaatcactagtcttccacacagcactagaccacagccactctaatcttcttcaccaccctctgccccatgtctgagacccctgcccagctcctccttctcacctgagccaagctatgacacctgagtttcctgcctctgtgctgcctccctgttttccattcccggttctcctggagagaagcagggtctgatctccaagggcccacctcccacccaggcacgtcagagacatgggatttggagttggactggtggggttgacttacagcttcacttgtgggctgagagtccctgcgtgggttatttttctgcctttctcagggccttgggttccccaaatgtcacatgggcacagtaacacccatgtcctagggttgaagatggcatgatatgatgtatgtaaaatgcttggcacaaggtttctcaccgaagtctggaagagacaccataatgtcatcttagcaggcagctgttaccccagtgaggtatcttacctgttgaaaattccggacttgggccaggcgcagtgactcacgcctgtaatcctagcactttgggaggctgaggtggacggatgaagaggtcaagagtttgagaccagcctggccaacatggtgaaaccccgtctctactaagaatacaaaaattagccgggagtggtggcatgtgcctgtaatcccagatactcgggaggctgaggcaggagaatcccttgaacccaggaggcagaggttgcagtgagccgagatcgtgccactgcactccagcctgggcgacagagcaagactccgtctcgaaaaaaaaagaaaattgcagacttctgtgtgtgcttatctggaaaatactttgtttaaaaatccattacatgaggtgcaggtctccagaaatgccaggcacctcagaccaccctctctcgtcctccccctgcaaaatcagggtcaaagggctctcccgttacctggaggagctgtccagggttctggagacgaaacggagcccgctgggaactgtcctgagccccggtgctgaaacagatcgcggttctcttctcggacctcccgagaggcgctgtccggatatttggtgctgaaataaatagcattctcctccttcggtcggtggagagctgtccctcgtgctgaagaaaacttgattttcctctctctttccccgttcccccacccctcttcgttctcggttcctccgattcttgggaaaccccacccccactcaatttatttcccctcctagcttcttcctggggagcttcagaatggcaatggggtggcgggggggagacacagaggggtcgcaactagcactgatacctgctcctcaccctgtaccatgtccccagaacttacctcccaagcagtcagccctgctggtctctgctttccagaccgtcaaacttcgccgtctctgtccctttctgggaaaatgtccatgcgccaacctgcaaaccagcctcattcccggcatcccacgtccctcagaccacccctcctcccacgcagctgcgggcctccccctctgtgtgcctcacctgcttccagtcttgttggcagatgcaggtgtcccgtggctgccgaggcggggacctgcgcttttataggcttcagggaaggcggagcgccaggaatcctgggaggggcttccccaactggccaatgggattccgcctcagaatgaagctccaaagattacctcataggttgtggcccacgcttcagaataaaagtctggcatctgcccaaaaactgggctaggggattttttcggatggggaaggagcattcattgtggaccatggagtctccccactctctccaatcccctcctgggttcctgagctccaagttcgttcaggtgtcctggctggtacctgtttcttcccattcccaatttttgctattgctcctggttcaggaaagaaaaagctggtaaactgttttgggaaaaaataagggatgtggagaatattaaagtccagttccacctagggcaactgacgtctgtgaaaatggagggctcagaagactctgg

SEQ ID NO: 1887744 - DNA, 4001 bp, Homo sapiens
agtaccctgagaactctggtctagggagggctttaaatgtcattccctcattgggtctcccaggaaagcgccataaggtggttagaggtcttgggtttagagtcaggtatgttctatctccaggcttgtgggggcgtacgagtgatgtgacaaaccccatacatggtgcatggctgtatgagcacaggatgtatgtccttgtttgcttccctcctttgcctgtgcctgtatcgcctggagtgagccagcccccccactccgagtggaagcgattcttccccgacctccccggttctcccccactggccagcccattgaaggcgaaggtcgaagggagtctgcgctatgaggccggctgtgacttgttgtcgtagtacatcagaacaacaaaatcactagtcttccacacagcactagaccacagccactctaatcttcttcaccaccctctgccccatgtctgagacccctgcccagctcctccttctcacctgagccaagctatgacacctgagtttcctgcctctgtgctgcctccctgttttccattcccggttctcctggagagaagcagggtctgatctccaagggcccacctcccacccaggcacgtcagagacatgggatttggagttggactggtggggttgacttacagcttcacttgtgggctgagagtccctgcgtgggttatttttctgcctttctcagggccttgggttccccaaatgtcacatgggcacagtaacacccatgtcctagggttgaagatggcatgatatgatgtatgtaaaatgcttggcacaaggtttctcaccgaagtctggaagagacaccataatgtcatcttagcaggcagctgttaccccagtgaggtatcttacctgttgaaaattccggacttgggccaggcgcagtgactcacgcctgtaatcctagcactttgggaggctgaggtggacggatgaagaggtcaagagtttgagaccagcctggccaacatggtgaaaccccgtctctactaagaatacaaaaattagccgggagtggtggcatgtgcctgtaatcccagatactcgggaggctgaggcaggagaatcccttgaacccaggaggcagaggttgcagtgagccgagatcgtgccactgcactccagcctgggcgacagagcaagactccgtctcgaaaaaaaaagaaaattgcagacttctgtgtgtgcttatctggaaaatactttgtttaaaaatccattacatgaggtgcaggtctccagaaatgccaggcacctcagaccaccctctctcgtcctccccctgcaaaatcagggtcaaagggctctcccgttacctggaggagctgtccagggttctggagacgaaacggagcccgctgggaactgtcctgagccccggtgctgaaacagatcgcggttctcttctcggacctcccgagaggcgctgtccggatatttggtgctgaaataaatagcattctcctccttcggtcggtggagagctgtccctcgtgctgaagaaaacttgattttcctctctctttccccgttcccccacccctcttcgttctcggttcctccgattcttgggaaaccccacccccactcaatttatttcccctcctagcttcttcctggggagcttcagaatggcaatggggtggcgggggggagacacagaggggtcgcaactagcactgatacctgctcctcaccctgtaccatgtccccagaacttacctcccaagcagtcagccctgctggtctctgctttccagaccgtcaaacttcgccgtctctgtccctttctgggaaaatgtccatgcgccaacctgcaaaccagcctcattcccggcatcccacgtccctcagaccacccctcctcccacgcagctgcgggcctccccctctgtgtgcctcacctgcttccagtcttgttggcagatgcaggtgtcccgtggctgccgaggcggggacctgcgcttttataggcttcagggaaggcggagcgccaggaatcctgggaggggcttccccaactggccaatgggattccgcctcagaatgaagctccaaagattacctcataggttgtggcccacgcttcagaataaaagtctggcatctgcccaaaaactgggctaggggattttttcggatggggaaggagcattcattgtggaccatggagtctccccactctctccaatcccctcctgggttcctgagctccaagttcgttcaggtgtcctggctggtacctgtttcttcccattcccaatttttgctattgctcctggttcaggaaagaaaaagctggtaaactgttttgggaaaaaataagggatgtggagaatattaaagtccagttccacctagggcaactgacgtctgtgaaaatggagggctcagaagactctggggcagaggtgggacttaagcctgaagcttttgattccttaactcaaaacccaatttataaaattcagcttattgtagtgctatactgggcaggctctgaaccaaaaaacgaagaaactggggttcaagttcagatttttcttctccttcctttgggacattgggcacagttgtgcctcagtttttgcaactgtgaagtagtgataatagtagagtatttgctgaggaactaatgatatggtgtggattgcatgttagaaataatcagggcaggggctaatgtgagttgggtgaggcaccagcctcaggtgcaaaacttaaaggggcaccaaaaaactcaataatcaaggtaaataatatttcaggccaggtgcaatggctcatgcttgtaatctgagcactttgggaggccaaggtgggaggatcacttgaggccaggatttcaagatgagcctgggcaacatagtgagaccccgtttctgagagagaaagagggagagagggagagagaaagagagaaacagagagagagagagagagagagagagagaatggcacctgtggtctcagctacttgggaggctgaggtgagaggatcacttgaggccaggaggtcgaagctgcagtgagttatgattgcaccactgcactccagcctaggtgacagagcaagaccctgtctcaaaaaaaaatcgatgcaatgttttaagaaatcaaaatgtatgccaaaatccacaatgaacaaaatatcaaaaatgtaaataaaggcagaaccagcctttctgacttttccttttgcctgaggtcccaatatggcttggcatggcactagcaatcatgtctgtttacggtaagttttctaataatgcagctgttattctttcctgatctattccacccatttatttgctcaacaaacttgttgtactaggcactggagatacatacatgaattcagcaaccaaccttgcctttagggagggtaaagacatgaaaactctgctcacatgttggtatgggcattgggttgaaggaacagtcagtgtaagggccctggtgggggtgggggaaagaacaggccctggggggtgagcaagcatagaagggacagttaggatataaatcagggacagctgtacaggacctgatcattcaggccaggacaaaagtgaagttcctcaggttgcacaggaagacctgccaccctttctctctccccttccctaagcttttactctgtgccagggtcagtgccagacattctacctgctgagtgatctgaaggcctcagggcagccccatgagatagatcccagccaggtgcgttgactcacccctgtaattccagcactttgggaggccgaggcgggtggatgacctgaggtcaggagttcgagaccagcttggccaatatggtgacacctcgtctctactaaaaatacaaaaattagccgagtgcggtggcgggtgcctgtagtcccagctactacagaggctgaggcaggagaatcgcttgaacccgggaggcaggggttgcagtaagccaagatcatgccactgcactcc

SEQ ID NO: 1887745 - DNA, 4001 bp, Homo sapiens
ccagccagtcccagcagccagcatcaccagcagggccataaccagccagtcccagcagccagcatcactggggccagattctgggagctggcttcctaagcagcagattcgggactcaagattcggaagttccgacattctgtgcgtcattaatgacactgtgagcgcgggggctgagttggcacatactgcagctccaaggcactgatcttctagttcattcccatttgccaagtcagacacgctcaatcagatgtgctgaatgaatcagccttaaggatctgctgccaggcttgggaacctcaaagaggcaggtgctggggctccagggtcggtatctggttacgaccccaactttgagtctgtgatcctgtcccccagtggaccccgagggcaggaagcaagctggggcaaaggcagagttctgagaggcagggggctctgagtagcttgtacaaattatgtcgctttctgagtctctgctctctctgcttaagatgaggatgataagagtccctgccttggctgggcacggtgactcatgcttgtaatcccagcactttgggaggccaaaggcgggcagatcacctgaggtcgggagttcgagaccagcctggccaacatggtgaaaccccatctctactaataatacaaaaattagccgggtgtggtggctcatgcttgtaatcccaggtactcaggaggctgaggcacgagaatcacttgaacccaggaggcagaggttgcggtgagctgagatcacgccactgcactccagcctgagcaacaagagtgaaaccccgtcttaaaaaaaaaaaaaaaaaaaagtctctgcctcagagggctgtcctgcaaggattcagtaaaacaggacttccacaaatcctctagggaggcaggagagagcaacgcacaagatcacatgggtggggaccatggaggcctggttaaaaaccccagctgtgccccagacaggctgtgtgaccccggggcaggtgattctaccgctctgattctgtctatataaaacgggggtgatagtgactcacagggttgctgtgaggatggaaaaaggtgtatgcagagctgtgcttggcacatggcaggggcccaataaatgaccacagtcattgttactatcgtgggaaattaacgggtgagaaggatgctggggaagttgtgtgcaccacggcagtaacggaggcagggtgagtggaggaaggaggaggagtcctcctcgggaaaccctccctcactcatcaagcccccccacctccccatgcagcttcctgattggagaagacgggctcgtatacgagggccgtggctggaacttcacgggtgcccactcaggtcacttatggaaccccatgtccattggcatcagcttcatgggcaactacatgggtgagtgactgtccagccagttgggatgggggctgacacggggccctacgctatcacttccccttcggggaagcccctgcctgactcctacctctgcctcctccagatcgggtgcccacaccccaggccatccgggcagcccagggtctactggcctgcggtgtggctcagggagccctgaggtccaactatgtgctcaaaggacaccgggatgtgcagcgtacactctctccaggcaaccagctctaccacctcatccagaattggccacactaccgctccccctgaggccctgctgatccgcaccccattcctcccctcccatggccaaaaaccccactgtctccttctccaataaagatgtagctcaaaatgtgttcctcagcaggtcccaccacacacctcccctccttctctccctcccacaagaccaaagccctcccaccccttcccctcccagcactctcctcactggtgcttggaacccagaggccccggccctgaaccaagaccccggagatcccagctcgagagcaacatcacagctcagaacccagaggtctcaggtcagagcccaggaatcagcaccaaggcggccgggatgtcaccaacagtgggtcctgggggtcctcctgggcagtgaaccacgctgcaagacacctccttcccaccacacagccaaaggcatcctgcgcagaaactttgcttggactcctttagggacgggctgctcactactcctcccaggtctgcccttgcactgtttagagagtgtacaagcttttcctaggcctgagtcccaatctgcctccgaggcacagacacacaggtcccaattataccccccaatttctcttcctccacatttctccccactccaccctcaccctttagtcataagctgaggggtccccagggcaaatatgtttatttacaaaatgcacacatcctccctcccagcatgcactgcctggggagagggcagggtcagggcctcacacacctgagaccccaggggcagcaggagggacggggccagggcagggactgggcagggctggaggccaccctggccccaccccccacaccatacccagcaagtgggtgggggatggaggggtagtaccccttctccacgttatgaccgcatgtccagtcggttcatgtactcctgcaaggccttcaggcgtgcgtctatttcggccatgtcagccgcctggtgctccgagctgtactctgtgagagcaggtgtgggtatgggggctgtgaggggcctgaagccccagggagttcctgggcccaatataccactgcccgcactaccattccaacgggtcctggggctgggagaggggatgtggagtcccaggctcacctttgatggggacccagcccccggagttggccagagatttctgatggtggctgcgttccacggggggagacttctggtgatggggaaggtaggaaagggggtcacccaccgtccctctatttctgtccccctaaatcccactggaaatcctgagcctaaggaccttggggaaaaataaggcctgacacctactggccattcattatctgcaaaataacctcctaatgtcctcacagagccctcacctcacatgtgaggtgatgccattaccaaccctggttaactgataaacaaaaactaaggtacagagaggctaaagaactgccttgaaccatacagctgggaagaggaggagacaggtttcaagacctgacagtcagaagccaaagccctaaagagcatcacgtgcccctcattattccttctccaatctaatgctctcaaaacgtgctgttcccaggccaggtgcgctggcccagcctgtaactccagcgctgtaggaggctgaggatggcttgaggccaggagttccagaccagcctgggcaacataaagagacaataccacccccttatcctgtctcaaccccaccctgcccccccaaaaaagcctagtcccagctactccataggccgaggtgggagggtctcttgagtccaggagttgaaagctgccgtgagctacaattgccccactgcaccccagcctgaaagagcgagacgcactcttaaaaaagccctattgccaaaggcattcagagtcgcctctgcacctgatccccaggaaggaatcacaggaaatgggggcagctgtgttccagtggtttatgttgccccttctactcaccatattggacccactccagggcgttgggctgggaggcttcccacggcggcggtgacccctgagaaaaaggagtaaccaaggaccagtggtggggaggctctggtacttcccacctccccgacctttgtggtttcaaggcccccaggctccatcacccaatttccctgcaaaagactgtttctagtctccccagaaaccctttggaggcgatccttttcccaagttcaagttttaccctctggagagcgactcagagaaatcctccaaatcgctgcaggagctggcagacgagcagcggctgcggaaactgtccactagagggagacggagggcgtgaccgctggccctcgctggccccgcccagtgcttccca

SEQ ID NO: 1887746 - DNA, 4001 bp, Homo sapiens
tcagtgtaactaaggggtgctcctggcagggagtgggtggaggccagggactctgctcagcaccctgcagtgccagggcagcctcaccccagagatggatccagtcccgatgtccacagtgctgacggtgagagacttccctgtagagtagaaagtctctgttcgtcagctgtttttacaattcccagtctgttttctgtgtgcgtgtgtgtgtgtgtgtgtgtgtgtgtgtgtgtgtgtgagttttgtttatagcaggttgggtttttttgttttttttttttttgagatggagtttcactcttgtctcccaggctagaatgcaatagcataatctcggctcactgcaacctccacctcccgggttcaagcaattctcctgcctcagcctcccaagtagctgggattacaggtgcctgacaccacgcctggctaatttttgtatttttagtagagacgggtttcaccatgttggtcaggctggtctcgaactcctgacctcaagtgatccacctgcctctgcctcccaaagtgctgggattacaggcatgatcccacacagcgccaggccaggagtcttacctttctaggaggcagagtttatctgttcttttggggctcctttctctagagaatgggggagagggcagcaccagggtgatgatgtccccgcagaacaggccgtcacgggattagcctagtcgatgctagttgtccttattggagatcttggggagacgccctgaaaatgctgtagtctgccttggctggttcaacgtcctttcaccccttttctctcttcctctttcagaaatggcacttctagggtcagtcggcttcattttagaagttagcaaaagaaggaaaaaactgctaaagccggggtcgaaaactgtggcccccaggccaagtcccccatctagttcctgtttttataaataaagttttattggcatacagccacagacatgctgtgcccccaccccaggcccagtctggccctccacttcctgtttttataaatgaagttttattggcacacagccacagacaaactgcagctccctgggccaagttcccccctccactccctgtttgtataaataaagttttattggcacacagccacagacatactgcaggtccctgggccaagttctctgttccacttcctgtttttatgaataaagttttattggcacacggccacagacattcatttacctgtcatcagtgactgctttcatactacaaggacagagctcagtggccttttgcagaaaaggtttgctgaccctcagcctagaggccttgagttatctgatttcatctcataaccactcgtgaggaaagaatgatcgtcactggacagataaggatgctgagacctagcgaggttaagtggcttcatgaggtgacataaccagcagtttagggcttgggctcccaactctgccacctactggctctgtgaccctgggccatctctgtgcttttctgaacctcaatgccctcgtctgtgaaaggggggagaataggcagtgcctgcctctcaaggggttaatgcatgtcaagctgtctaatactaaatgcaccattcttcctctggtcttcatgcctgctatgcctcctcagccccacacagtgctgttgagacaatcagataatgtcatagtcattagacctttttgatgatatactcagacatactcaggaggaaactgctgagttgcttggctgattgtggagggacatgatgtccaaacccttgtgtatgaataagtttgaaagctgaccataaaatcccagaatgctctagtctgcagcacataaagagtgtattagctagctatggctgcgtaacaactaccatgaatgcagtagcttagagtgacacccatttattatctcatggttccataggtcagaagtttggatgtagtgtggctgggtaagaccctgcacagaggacccagccacactatgtccaaacttctgacctcggagatgtgagccagggctgcattctcatccgaaggtttgtgtggtgacggatccccttccaagctcattccaggctcattcagaattcagttctttgtggttgatagactgtttctgttgcgttgttagctgtcaggagggggcaactctcagctctttgaggccactctcaggccacttggccttctccataggcccctcatgcttccaggctctcatttcaggaaaggcccaatcccttttaaagggtcacctgattagaccaggcccacctaggataatcgccctttcagtgaactcaaggtcaactgatttaggaccttatttacctcttcaaaatcccttctttcctgaaaagcaacctaatcaggggagtgatatctcatcatgtccacgggccctgcccacactcaaggggagggggttctacaagatatgttctccagggagatcttagactcctcttggtggcaaagggaagggggggcctgcgttcggcctcagccaggaccgaatcagcaggaccttcactccctttttctggcgtccatcccttcctcttgcaggagtactgccaggtctttggggagagggtgggggttattgggagaaaggaggcatttggaaagtaggtggcaggctgtgtcccagttacacctaaatgtgtctccacttattaaaaaaaaaaaacaacctttattttgaaatcattacagattcagaggaagttgcaaaaatcacacagagcaaaaaacatcacatgtatcttcacagtttcccccagtggtgacatcttacgtaaccatagtacaaaaccaggaaatggaccctggcaccatgtatgtgcaaagctctgtgccctttcgcacacatgcagactcggcttcaccttatttatgggtgtgcaggaacattaagtgtccataaatgtggacggagctcctcttactcgtgggcatggggtcagagggaggcgggagtacaaccaaacaaaaccatctagactttgaccgttgatgtgggtgccaggttccaatcaccgtgtgcccccacactgcgttcagggctacgctcttctgtcttctcccactagtctgtgagtctgtgaggtcttgtccactacctctttaggcagccagcccttctggtgggctttgtcgtggggagggggtggcactaggtgtgttctggggctcctagcactagaagacttgtttcaaatccagaagcacctcctattcgtgtgggcgcccaggcaacttacctgacccgtctgtgactctgtgtccttggggacctcctattctaaacacaagagcgtggcctgctgtcaccgtcaccatcctggcatctgcagaagagccaccaagcgctgcctcctgagaatttctggaaggaggagatgactggtagagtggaaagttattgaaagggacatttggagttctttccaagggacataacccatctcccaatatcccctatccatttgctcaaccttcagagagacctactaagatatccagttgttcacctcaagtcttcaactttccccaaagttctttgctgttttctctgtgccttgcacagagcctgatgcatagtacgtgctccttgggggccactttgtgtgtgtttcctactaatggcacctacagcagcaatggccaccatgtcttttacagctacagtcctaggcagaattccaagatggcgcccaagacccccaccgcctggtgcccacatcttatctaatcccctgcacttgaggatgggctggacctgcgaatacgatggggtgtcactccagtggttaggttaatgcagttaggtcgtgtgttcggtaaagggattttgcagatgcgacgaagattcctagtcagttgacctgagctcatcaaaaaggagacatcctgggtgggcctgacctcatcaggtgagcccataaaagagaccagaagcacatcccgaggtgtcaaattcagagagacagaagg

SEQ ID NO: 1887747 - DNA, 4001 bp, Homo sapiens
gtggagggaagggccagagcacgcgtctgggtccacctgactgcagcacctgctaagtttggctgaccccagacttctcctcaggtaatgacagcaccaacagaaatagccatgggcaaggcccggtggcatatgcctgtaatcccagcactttgggaggccaaggcaggaggattactagatcccaggagtttgagaccagcctgggcaacacagtgagatcccatctctacaaaaaatttaaaaatcagctggctgtggtggtgtgtgcctgtgttcccagctactcaggaggccagggtgggaggatcacttgagcccaggaattggaggctgaagtgagctatgatggcaccactgcactccagcctgggcaaccgtgagaccctgtcttaaaaaaaataaataaaaataaaaagccaggtatggtggctcacaccagtaatcccagcacttagggaggccgaggcaggaggatcacttgaggctgggagttcgagaccagcctggccaaagtggtgaaaacccacgtctactaaaaatacaaaaattagctgggcatggtggctcacgcctgtaatcccagctactagggaggctgaggtgagagaattgcttcaacctgggaggcagaggttgcagtgagccaagatcgcaccactgcactccagcttgggtgacagagacagaatctgtctcaaaaagataacataacataacataacataacataacataacataacataacataacataaaacataacataacataacataacataaggccgggtgcagtggctcacgcctgtaatcccagaactttggaaggccgaggtgggtggatcaactgaggtcaggagttcaagaccagccggccaacatggtgaaacccagtgtctactaaaaatacaaaaattagccaggtgtggtggcagatgcctgtaatcccagctactagggaggctgaggaaggagaatggctggaacctgaggcttggcttgcagtgagccgagatcgcgccattgcactccagcctgggcgacaagagcgagaccctgtctcagataaataaatacatacataaataaataataaaaagttgagttggggcgtaagtaagctgctctgggcaccacccacaccccagcctgacccatcaccaaatgggccagtcagatcactcctggggcttgggattccttgactgccaagtggggctgatgacaaggccatggggaagattcatggtggctctgggcagggccaggagtggcacacagtgagggggcagtaaaaggcagaggagggcggaatgcagatcatgggatggggcagccgagaggccactgcacgctgagagcctggccgacacttggtgggacggtcgttggcgggggcgcccacccggaacacctctcgcccccggcttcccctcggccagctgggatgccacctgctccgagatgccagccagcgcaggctcagccctggtgaccgccccaccctcagccctgacaggacgcctggcagtgtgccctacgctccttctccagccattgccgaacccctgaggctgccggcagccccctcaccactcaccggggccaactgagcctccctcactgagtccctgccccgtgggatgggaaggagagaggcagggaccgcgaaggtggggagggaggaggagaaaggggaatagaaggaaacaagagaaagagagagagggagatgagacagaaaatgaaagatcaaggaaggaggagacagaggcagctcaagggaggagaaatggggaacaggagggaaacagaatggagggggaaggcaagaaacgaagcctggaaaggcagaaggcaagagaatgcaactgggagccagagaaaatcgaaaaggaggtagcggccagcttagccagggctcaggagagcatcacagcctatgaagccataaggcctgggtggtttaggcggccgtttcgctgtgggggccgagccctgccccagcaggcctgcccccgccccagctgccaagccagggctcctgggccctcagccagccctgcctgggactggccttgggcacagattggcaaactgctccataaagagggactgcctccccactcaagctctgtaaggacgcaaagagggcaaggccacgaaggactcagcctggcccatcgtgtccctgctctgccccagtgccagagccagagccagagccactgtggctgctattctgtttgtgatgctagcctagggctcgtaagaagcccccagaaatgggcggccccctatgtgccctcgccctgcagacctacctttgtcactgtcagggtctgagtcgctgaggggcttcaggggcgaatgcaggtcctggaagtagcggtggccagcttcgcactgccacacggccgtggtgtacaggccaaaagtggggtctagctccgccaggtgcggctcgtacgggcagcggtgcttgtggtcctcgtaccagatcaccacgttcttcaggcagttcacgttgcgtcgccgccctatggacacagggccgaggagtgggtataagggacagggctcagcccatggtgacatggctgcctgaaccaccggggctttatgggtcccatgggtttggaggccctcctgagtaccatccaggcctgtacccagtttaaagggggaaactgaggctcagagaggagaggcaccccctggaggtaacggggactgttctattggcaaagtcatgtaaacagtggagcctggtgcacagtaggtgcataataattgttagctgcttgttaattgttctcatcttcatcaaacgcctagaccagcgcagtcctcaggcccaggactcccaggctcccgccctaaccaccccctacagccgcaagggggcgcctgtgaatgcccgagtcaagtctgttccctcctctgctcagaatccactgggccaggcgcaatgactcacacctgcaatcctagcactttgggaggcagaggcaggcggatcacttaaggccaggagtttgaaaccagcctggctaacatggcgaaaacccatctttactaaaaatacaaaaattggccggcatggtggtgtatgccttttgtcccagctacttgggaggctgaggtaggaggatcgcttgagcctgggaggtggaggatgcagtgagccaaggtcgcaacactgcactccagcctggatgacacagcaagaccaactccctcagggtaaaagccaaagtcctcccttcggcccacaaggcccactgtgacttgtcacctccccgccctcacccacttggtgactgcactccactccagccacatggcctcctcgctgttcctggagcgggctaggtgtggccctgcctcagggccttggcacaggctgtgcctgcttcctctagataactgtcttgctccctccccacttcactcaggtctcccccaaatgcatcccctccaagaggccactccctgcccagtcactctagccgaccttaactttgctgtctgttttctccaggtagtacctagatgccatctgtggccatttgtttacatgtgccctgtctgtctctcccaccagaatgtcagctcctcaagagcaggaacactgctgttttgctcctcctgtacccccagtgcccccaaagggcctggttcatagcaggtgctccaggaacatttgctggatgagagaacgctgcatagcgggcgggcatggtggagccggaccgcctgggtttgaatcctggctctgccccttccaagctgggtagctccaggcaagtgacttggcttctctgagccccaggtgcctcctctaggctggggagaataagggattcccatcccggagggctgccaggcaggaggaagggagtgaagacatcgccaggacacagaacaaggctgggcacacagtgagtgctgggaaatggtatctgactcttgtgatggtcctggtccctcagcca

SEQ ID NO: 1887748 - DNA, 4001 bp, Homo sapiens
atctcagctcactgcaacctccacctcttgggttcaagcgattctcttgggactacaggtgcacgccaccacgcctggctaattcttgtatttttagtagagacggggtttcaccatgttggccaggatagtctcaaactcctgacctcatgatctgcccgccttggcctcccaaagtgctgggattacaggcatgagccactgcacctggccttagaagcctcagttcctgatggcagttgggatctgcctttccttccctggactgcctacctcttgtcttttaggttacatatgagaaaacaaacctccaattcaccaaaactattgttatttggggagctgtctcttactatcagccaaacataactcctcaatgacactgttagtttagcactgccattataatcaggagggatctgggtccagctgcgggaacatgaagaggcactagtgggatgaccacagccagcccctgttgattcaccaggagactgcagatgcatgagcaagtccagccaagatcagccagacaagaactcccagcggagcccagcccaatttgccaactctcaaactataatttttttttttttttttgagacggagtctcgctctgtctcccaggctggagtgcagtggcgcgatctcccctcactgcaagttccacctcctgggttcacgccattctcctgcctcagcctcccgagtagctgggactacagacgcctgccaccacacctggctaatttttttgtatttttagtagagatggggtttcactgtgttagccaggatggtctcaatctcctgacctcatgatccgcccgccttggcctcccaaagtgctgggattacaggcatgagccaccgcgcccagccctcaaaccataagttaaatagatgactgttgactcaagccactaatatttggggtaacttttttcttttttctttgctttttttttttgagaccaagtcccactctgtcatccaggctggaatgcagtggcatgacctcggctcactgcaacctccacctctgagggtcaagtgattctcctgcctcagcctcctaagtaactggaattacaggcaccagccaccatgcctggctactttttgtgtgttttcagtagagatggggtttcactatgctgaccaggctggtcttgaactcctggcctcaagtgatccacccgcctcagcctcccaaagtgctgggattacaggcaggggtgagccactgcgcccacctggggtaactttttatgccacaaaagcaaactgatgcaaggcattccaagaggcctttgagcctcttgcaagtcaagctgattgcaagacactctgcctttgataaaatgtagtggacagagaagcagtggtttcagtggcagagatgacaaattgttgcccaatattcgttgtccccttctttctcaacaaaatggaacctctgattatgctgggtttagcatagccatctagaataatggttacatatcccagtgtcgggcctccgagcccaagctaagccatcatatcccctgtgggcctgcacatatacatgaagatggcctgaagcaactgaagatccaaaaaagaagcgaaaatagtcttacctgatgacattctaccattgtgatttgttcccgccccaccctaactgatacgatatattctgcctggtccttaagaaggtactttgtaatattctcccccgcctttaagaaggtactttgtaatattctccctgcccttgagaatgtactttgtacgcccatcccaaacctataagaactaatgataatcccacctttgctgactctgttttcggactcagcccacctgcacccaggtgaaataaatagcctttttgctcacacaaagcctgtttggtggtctcttcacacggacgtgcgtgacatttggtgccgtgactaggatcaggggacctcccttgggagataaatcccctgtcctcctgctctttgcaccgtgagaaggatccacctatgacctcgggtcctcagaccaaccagtccaaggaatatttcaccaattttaaattgggtaagcagtctctttttactctcttctacaacctctctcactatccctcaacctctttctcctttgaatcttggcgccacccttcagtctctcccttctcttaatttcagttcctttccttttctggtagagacagaggagacgtgttttatacgtgaacccaaaaccccagcgctggtcacggactcgggaagacagtcttcccttggtgtttaatcactgcggggacgcctgcttgattattcacccacgtttcagaggtgtctgatcaccacggggacgcttgccttgatccttcacccttagtggcaagcaccactttcctggggggcaagcaccccccaccccttctctccatgtctctactctctcttttctctgggcttgcctccttcactataggcaaccttccaccgtccgaccctccttctcccttagcctgtgttctcaagaacttaaaacctcttcaactcacacctgacctaaaacctaaacaccttattttcttctgcaatgctgcttaaccccaatacaaactcgacaatggttctaaatagccagaaaacggcaattttgatttttccatcctacaagatctagataattcttgtcgtaaaatgggccaaaggtctgaggtacctgatatccaggcattcttttacacattggtccctccctagtctctgttcctaatgcgacttgtcccaaatcctccttctttccctcctgcctgtcccctcagtctcaaccccaagcgtcactgagtcttttcaatcttccttttctaccgacccatctgacctctcccctcttccccaggctgctcctcctcaggtcgctccccaccaggctgaatcaggctccaattcttcctcagcctcctctcccccgccctataatccttccatcacctcctctccccacacccgatccagcttacagttttcttctgcagctagccctcccccacctgcccagcaatttcctctgaaagaggtggctggagccaaaggcatagtcaaggttaatgctccttttcctttatccgacctctcccagatcagttagtgtttaggctctttttcatcaaatataaaaaccccgcccagttcatggctcgtttggcagcacccctgaggccctttacagccctagaccctgaagggtcagaaggcctcttattctcaatatgcattttattacccaatctgctcctgacattaaataaagctccaaaacccccacaacaggacttaattaacctcgccttcaaggtgtacattaatagagtagaggcagctgcatagcaacatatttctgagttgcaattccttgcctccattgtgagagaaaccccagccacatctccagcacacaagaacttcaaaatgcctacgccgcagtggtctagcattcctacaggacctcctccatcaggatcttgcttcaagtgccagaaatctggccactgggccaaggaatgcctgcagcccgggattcctcctaagctgtgtcccatctgtgcaggaccccactggaaattggactgtccaacttgtccggcagccactcccaaagcccctggaactccggcccaaggccctctgactgactccttcccagatcttcttggcttagcggctgaagactgacactgccccatcacctcggaagcctcctggaccatcacagatgctctgggcaactcttacagtggagggcaagtctgtccccttcttaatcaatacggaggctacccactccacattaccttcttttcaagggcctgtttcccttgcctccataactgttgtgggtattgacggccaggcttctaaacctcttaaaaccccccaactctggtgccaacttggacaacactcttttatgcacttctttttagttatccccacctgcccagttcc

SEQ ID NO: 1887749 - DNA, 4001 bp, Homo sapiens
taactaactgaggtgattaatatatggtatttctagttctagatccctgaggaatcaccacattgacttccacaatggttgaactatattgtggcactattcacaatagcaaacacttggaaccaagccaaatgtccaacgatgatagactggattaagaaaatgtggcacatatacaccatggaatactatgcagccataaaaaatgatgagttcatgtcctttgtagggacatggatgaaattggaaaccatcattctcagcaaactattgcaaggacgaaaaaccaaacaccgcatgttctcactcataggtgggaattgaacaatgagaacacatggacacaggaaggggaacatcacacaccggggcctgttgtggggtggcgggtggggagggatagctttaggagatatacctaacgttaaatgacgagataatgggtgcagcacaccaacatggcacatgtatacatatgtaactaacctgcacattgtgcacatgtaccctaaaacttaaagtataattaaaaaacaaacaaacaaacaaaaaaaacaactccgagacctgagcaggcagacacacaagcagctggacgtccgcagatcagcggaagaagaagacactggcggctgagaggagcacgtcagtgcaggaacacacagatggctggatgtcgagaggaacgcaaggacgggcaccagcacaccacaggccaccgactggcagaacgacatggagcttggctgggacagtcagagaggatcccgggccgccaggggcccgactccaggagaaaaccatcgcccttctgctgagagctgtttccactcaatcaaaccttgcactcattctccaagccctcatgtgatccggttcttccggtacaccaaggcgagaaccctgggatacagagagccgtctgtccttgcaggaaggcaggggtctaatggagctgatacacacaagttgcctatggaaggccgaaactaaaagagcaccctgtaacatgcgcccactggggcttcagcggttgtcattttgaatgtggtgaatttatttttatctatttatttatttttaagtttcagtagttttgggggaacaggtggtgtttggttgcatgcataagttctttagtggtgatttttgagattttggaacacccatcacccgagcagtgtacactgtacccaatgcgtagtcttttatccctcaccccctcccattgctccccctgggtccccagagtccattatatccttcttatgcctttacatcctcatagcttagctcccacttatgagaacatatgatgatggttttccattcctgagttatttcacttagaatagtggtctccaactgcctccaggttgctgcgaatgccattattttgttcctttttatgactgaagtattccatggtgtgtgtgtgtgtgtgtgtgtgtgtgtgtgtgtgtatatatatgtatatatacgcatatatacatgttttttatatgtttgttggccatttgtatatcttctttagagaattgtctaaagtcaaaaggggaattggatttggagggaacaattttatggctatttttcagtataatcatcaagtgaagatagtgtctgttcggccagtgttactttaatccattacctgtagccaggaagggagatgtttatcacagagataggcaccaacctggaatgctttcctcaaaagtgattaactgtagtgtgaaccctaaatttcaccgcagtttggtcctgatttggcacaagatatgctttatccactgatgtgaaatgcccaggtgttttttgtacggttttgttgctgaaagacacaataccctctaatctaaggcatcctctccaaatcccactgaacaataccctctaatctaaggtgtcctctcctaatcccactgaacaatacctctaatctaaggcgtcctctccaaatcccactgaacaatatcctctaatctaaggcatcctctccaaatcccactgaacaatatcctctaatctaaggcatcctctccaaatcccactgaacaataccctctaatctaaggcatcctctccaaatcccactgaacaatatcctctaatctaaggcatcctctccaaatcccactgaacaatatcctctaatctaaggcatcctctccaaatcccactgaacaataccctctaatctaaggcatcctctccaaatcccactgaacaataccctctaatctaaggcatcctctccaaatcccactgaacaatatcctctaatctaaggcatcctctccaaatcccactgaacaataccctctaatctaaggcatcctctccaaatcccactgaacaatatcctctaatctaaggcatcctctccaaatcccactgaacaataccctctaatctaaggcatcctctccaaatcccactgaacaataccttctaatctaaggcatcctctccaaatcccactgaacaatatcctctaatctaaggcatcctctccaaatcccactgaacaataccctctaatctaaggcatcctctccaaatcccactgaacaataccctctaatctaaggcatcttttccaaatcccactgaacaatactctctaatctaaggcatcctctccaaatcccactgaacaataccctctaatctaaggcatcctctccaaatcccactgaggcacaggagcgacactaaggagggggtcacggagcttcctgagggagattcgcctcctgaaccctgggcagatcctccccaccttgggatctctgtgaacctctggggtcttctattcaatcaggaccaagttgtgaggtgggattccttccaggctacagtctcccctctccctctttcaatttcatcaagacagatcagaggtttgcgggtggaagtcatggcatctcctccacagcccctggctgtgcagatggacgagaccacagttcctggatggagtaaatctactgggagcctgggttctccatcacgaggttgtcccgtcatcagccccacaagaaggggaactgccctctccaggagcctggctttcatttccccaaggctgggactggggcaggcaccaggctgtcttcagatatttcatacagaaatggtatctccctgacccttttctgcgatttgcctcatctgtcctcatctcatcaagggtcaggacacaggacacagcacctttctgagtctgtcctgtccaagtgagagtgactgggggctttttcttcttctcagagcctccccgtggggtctccttccctccttcagcccgtccatcaacacagcattgcgggatccttaccatggcatccagccctggagatgcttcaggaaagttgcaggtccatgctgcaggacaggctcagatcagcagagacgcatctcacatcgggctgtgaaattcaagttgagctgcaattggcaatgagaaaaaaaggagaaataaagaaatgctgactcttcttttgtctttggagtatgggttttatttcttccagtttccttcttagacttcccttctttttttcttcctattttttaatagcgttcagctccccttcccttaaaagtaacctctgagtcattcctgcctcctcggggtccctcccacccccagccccgcttccttgggcattcccctgcatctcagtctgccttcaaggttttgggaacaagtacttgtcttgagctctgatttggcggtgggatagggagttaattttttctgaattgctcaccttcatccctgcgtgcatgaccttgggcagtaagtcccatctctgagcctcggtttcctcatttggagcctgttgtcatgaacccccctcctgagtggttttgggggccagtggtgcctgggtcatgggagggcctcagtcatggtacatttccagaccgggttaagtcttgaggggctgaaacatgagtggatcctggtgttggactgcacagtcacggtg

SEQ ID NO: 1887750 - DNA, 4001 bp, Homo sapiens
atatatctaatgagcctagtatccccaaagaagattcgctactcaaccacaaagagacaaaaatcccaactttaaaatggacaaaggtcatgaatagacatttatccaaagaaggtatagaaacgaccaacaaacacacaaaaagatgctcaacattattgtcactatggcaatggaaagcaaaactctacaacgattaagatggctgtaattagtaaaacggaacataacacgtgtcggtgaggatgtggagaaattggaattctcatacactgtatttgggaatgtaaaaggattcagccgctgtggaaaagagtctgcaagttcctcaataggttaaacatagagttattgatatggtttatctatgtccctgtccaaactcatgttaaattgtaatccccaatgttggaggtggggcctggtgggaggtgattggatcgtggaggtggaattttcatagttcagcaccatctccttggtgctgttaagacagtgagtaagttctcatgagatctggttgtttaaaagtgtgtagcacctccttcctcactctctttctcatgctcccgccatgtgagactcctccctcgtgcttcactttatgccatgattggaaacttcctgaggcctccccggaagcagaagtcgccatgcttcccttacagcctgcagaactgtgagccaattaaacctattttcctcacaaattacctagtctcaggtatttctttatagcaatgcaagaacagactaatacagttatcatattgactagcaatttcactccttgggatatacccaaaggaattggaaacagatattcaaatgaaaatctgtacataaattttcatggcagcactactactcacatgagccaaaaagtacaaacaactaaaatgcccagtaactgacaaatggataaatggaatgtggtctttccatgcaatgggatatcactcagtccaaaaaaagaaatgaaataatgatgcatgctacaacaaggattatcctcgtaaacatggatttaccttgaaaacattacccttggtaaaagaagccagacatggaaactcatcaagcttagtaggccatttagagaaaacccacaggtaacattacactcaatgatgaaagactgaaattattccattcacattaaatatccagcatagataaatccatggaaataggtacacgttagtagtttccaggggctctgggaagcaggcaatagaaagtgactgtttccctttcagggtgataaaaatgttcagaaactagatggtggtgatgattacacagcactgtgaatgcaataaatgccactgaattttatactttttcttttttttgagacagagtttcactctgtcacccaggctagagtagaacggtgcgatctcagctcactgcaacctccgcctcctggattcaagcaattctcatgcctccatctcctgagtagctgagattacaggcacccaccactatgcccagctagttttttgtatttttagtagagatggggtttcaccatgttgcccaggctggtcttgaactcctgagctcaggcgatccgtctgccttggcctcccgaaatgctgggattacagacgtgagacaccgggcccagcctgaatgttatactttaaattagcaaatggaagaaattcttttctgattttcaaatattactgaaattttaaagaaacagcagagatgctcagggtgaagcaagtgcttactgtgtgaatccatttataggaagttgtaaaacatgtaaaactagttgatggtgacaaatgtcagaacactggttgcttctcagactgtatgtggaggcagagattaatatggaagggcatgaaggatgctgttttctctggtcaaagaatgacccttatcttgagagggtttcagttgtgtgagtacatgccagtctcgccataggacgtctctgggctcccatgggcatcttgcataaactcaggaactgggttcttctattctctgctgcctcccaccaccctactctcagaagataccttgattctggcttaagaggaaataaacacagtgtagtgatagagaccctttcctgactataaaactattcacctcattgcagctgctaccatccctccttcaacttggttgttccatcttaccttgaaaagtgacttatggaacaacttgtccaaacgtctccactttagagggacaccagtttcctgtgtaattatgttgattgcaatgaaatactcctaagagagggctgacattcctgcttccaatcagaaaatgaggtcattaggcaaacgtccagcagagagagtaattagaaaagatgaaaacatgcattccaatctattctgttcttattatgtttttttttttttttttgagatggagtcttactctgtcacccagttggagtgcagtggcatgatcttggtcacagcgatcttcacctcccaggttcaagcgatcctccttgcctcagcctcctgagtagctgggactacaggcacccaccatcacacctggctaatttttgtatttttagtagagatggggtttcaccatgttggccaggctggcctcgaactcctgacctcaggtgatccacttgccttggcccttcaaaatgctgggattacaggcatgagccactgcgcccagcctatgttcttctggctggactggaggacagtaaggaaacagggcagggctgatgctttccaaacacagtgggacatagtcctcaggtcagcagcgagcaggggatgggaacccacctcatctcactaaccctagctgccatcagtagaacaaaaagtcattaataaaatccaaatcctggaacagcttcaaggaaacaaatgtcaacattgaccaagtcaataaacatgtcagtgtcttctggccagagatcagcaggcaccaggaatagatatgtagttgggttattactcattgcagtgaggaaccacgaaaaccatgaggtgtttcagtaagagagaattataactggcttattataggatttggacttgtgttaggtgatttggggaaactttttaaaaagcagtgtttgcttctttggatgtcaggaagtcagcataattctaacactggatcttcatacatctaataaaaaaggagaaagaactagaccaaagctaccttagtcagtttgggctagaataagagatatcacagaccggctagcttaaaaaacaaacatctaactttgggaggccaaggtgggtggatcacaaggtcaggagatcgagaccatcctggctaacacggtgaaaccccgtctctattaaaaatataaaaaattagccgggcgtggtggcggactcctgtagtcccagctactcgggaggctgaggcaggagaatggtgtgaacccaggaggcggagcttgcagtgagccaagatcgtgccactgcactccagcctgggtgacagaacaagactctgtctcaaaaaacaaacaaacaaacaaaaaacaaacatctatttctcatagttctggaggctggaagaccaaaataaagatgtcagtacaactgggttcttagtgaggtccccgctcctgggtcacagatgactgccttctcactatatcctcacatgggagagagagagctctggtcccttcctcattcttacaagtgccataatcccagcatgggcattccacttccatgagctcacctaaatcccattatctcctaaaggccccacctccaaatatcatcacatcacattaagaattaggacatcaatacatgaattttagggtgacaccaacatttagtctataggaaaggctgtggctgtaattggtaaataatcatcagtctttcctgttaccctagatgggaaatatgtagccattttccaatttggacaacattcttgtttgtgtctgtgttaaggcatgactgtgctgtggtcttattcttgtcttgatccattatgct

SEQ ID NO: 1887751 - DNA, 4001 bp, Homo sapiens
ttaccctggcactcgtcgcagaagccagggccccgcttgcggcagtggctgtggaagctgcagccacagtcccgggagcagcggggggctggcggacccggggcgggtgtgggagggggcaggtctgatgtccagcctaggtcacacacgcaggtaaagtccggggggccactgcacacaccatggccacagtcctccaagcacctgaggggccgtgttgggggtggggaaagcgccaggcaggcccagagcccctaaagcaccccatcatctccacccaccatgacaccatcaaagccactggctgtttccatggttttgggctatgtgggtgaccctgtctccaaggtaactccatgcatcaccaagcctgtctctatagcaaccacatagcaccactgtgaaaacctctttcaactaggtcctcctccgcctccatggcaacgctgaagactatggcccacagcctatgggtgccccatttccatggtaaccagggttacactggggaccctgtcactctaataaggacctagtgtgcaaggtaaaaacccctggctaactggggatgctggttccacaggaggggacccagcgccatgatggcttcctccctccacctccatgtgccccagcctggggcaacatctccatagcaacccccgcctcactcacgtgcggttgcagtgtgagatgccatcaccctggtagccccgctggcagtgacactcgtagctgaggggcgtgttcaggcaggtcgcccgcgggtggcaccgggccaggcccaggcgacactcatccacgtcaggacagcgggcgtatgcccagcgggcagggagggccacgggaagccccaggccctcccccacccacagggagcagttacccccaccgaggggccctgagaagtccccctgtaggcacctgcagggtgggagagtgaagaagcgggggacaacatagaaacaggagccatacatagaaacaatgacagggagagaggaggccaattggaaggagagggatgcaaatacaaatttggaaagagagacagagaaaccaggagaagtcgcagacaaaaacaattttggaagacagaagagagacatagacagagatgcagtgaaagggagagcggagagacagaaacagacaaggagaaagaaaacgaatcgcagagagccggaaaaggaggaaaaatggagaaaaaagagcgggagggtaaaataaacaacagaaaaacagtacggaaaagggaaggtggccatgggatgggcaagagggcagagaagcaaagaggccattagaatgaccggtcatggaggaaggacacagccgggcaccctgcccacccacctgcccgggctcaccgtcccagtgtggggttgtcctcattgccacaccagccacactcgtggctctgcagacactcatggcaggtcaggaagccatcgcagctccggcaccgtggctccgagtgtacactgcaggatggcaggggtgggggtcagagccccagccccttgccggtggggaatcttcctctgttagccctgccccagggaccatacctgtcgtcccagcctcgacagcccccgtgtgggtaccgggccaagtaggcagcaaacaggaagcaggtgtgggtggactggcaccaggcgcactggctagagttggccaggcagtcctcacaggtcagtcgcctggggtggggagcagggggccaggtcactccacagccagcacacatccccaggcacatccacccacccactccctgcacccagcctgactcactggctgcagagcgggggacactcctctggactcttcagggcaccccgaccccggccccgccggctgcatgccgcgtcccctttgcggctggtgctctgatgccactcacagaaggggtcctgggggtcagttgggcagaggagtcagaaccccactcagccctttcctttggactcccagtgcccatcccaccccctgccccaccctgcagactgtccctgtaaggccatctccctccccagctgcctgcgtctctggacccctcccttcgaccacagacacccatgggtcggcccgcccagcacccactgtctcctttaggcaatagcaccccttctgtgtggtccgggtggggcttattcaatcctcaggatccagaggtgggcaaggggccacattccctccccacaactccagtcattggcccaggagcctgtacaaggcccaaccagagccacagaagtgcaattctgggacttctgttgagctcctggatggtggtggggtggggggagagaaataggaagcctcactctgtttgagacagagcagggacttagagcctggacccttaacggctcccttgccactcacaaggaaacaaaccctcccagggaacaagaggaagcagggtgtcgagggctgcctgacatcacttggaggtggcaggcctgaaggcctactcctgggctccagtgcctatgctgagaaactccccgctagtggaaaaggatggagttgcattctctggcccctacaacagggagagtcctgactccccaggtgcctctctctacagctccatctcaccctccccaccaggctctgcagatcaaggccaaaagcccttgctgtttcccccacaccccccaccaggggttcccttgactgcccattgcctgctgtggctccctccaccttgtgacctcccctggtggccccacaggcacctgggtgcaggcgtggcagtcccgatgctcctcgcagagtgggcagagggtaggcaccagcaccagcagggacccaccagccccgtcatccccgcaatgggctccgccctggcgcaggtggcaggtggcactggtcaggcaccagccacagccctggtctgccaagcagcccaggcaggaagaataggaggtgcaggacgacgagcggtagggctccaggaagaagaaggagatctcctggggaaggggtcacaggaaggcagcagtcaaggtctggggcaggggtcagagtctggcgctaactgaaagtaagggtttggagcccaggttgagaactcaggcacataggaagtcaggatttaggaaatcagtaaagaggtccaaggtctggaggaatctggagattattataggtcaaagtatggagggcagaggtcagggtcagcagggtcaagggtgaggagtcagaagatgggggtcaaaatatgggatcaggttagggtctataggcagaggtcaggggccacagggttcaagaggaggtccagagttcagaggccaagagttaaggagtccgaggccagaatctagggatttcagagtttgtggcctggggttcagaaagcccaggtgatctgaggctggggcctgcggctagggttggaggtaggtcctgggtactcacgctgcctcctggcacaccagtccgatcccacagcagagttagctcgctgtgcccagggcctgccgagccattgagctggccctggatctctactgcatacttgtggtcccgcccaggcagagggaagaggcgagcagacccagggcgctgcagccgccgcgtctccttctcctgatgagccacccagcgccccacctcctcctggggtaggtgtgagtgataggcaggggcctcagaacccttcccattccttcctcagacccctgatacctccaaacccaccctgtaccccaccccctcctaagaagagggcctcagagctccttagatcctgagaacctcagaggtgagacccccagggaccctcctcctcaggggcttttttttttttttttttcttgagacagggtctcattccatcactcaggctgaagtgcagtgatgcgatcatggctcactgcagcctcaacttcccaggttcaagtgatcctcccacctcagcctcccaaatagctgggactacaggtgcatgctaccatggccagctaatttttgtattttttggagag

SEQ ID NO: 1887752 - DNA, 4001 bp, Homo sapiens
ggttatcaccaggacccccacactacagaaacacacatgcccagggtcactacggaatccaacagggtgccctggaaagatatcacacaccggccaggtgcagtggctcatgcctgtaatcccagcactttgggaggccgacacaggaggatcatgaggtcaggagttcaagaccagcctgaccaacatggtgaaaccccgtctctactaaaattacaaaaattagccaggtgtggtggtgcacacctgtaatcccagctactcgggaggctgaggcaggagaatcgcttgaaccggggaggcggaggttgcagtgagccgagatcgtgccactgcactccagcttgggcgacagagcaagactctgtcttgaaaaaaaaaaaaaaaagatatcacacaccacgtcctccttagaaacaatggtacagtgacaatgatggcaacattcacaaccaaacacaccagaagtcccagagtgacacacaggagattgtctgtctgagactcacaacatcactctgggagtcaactggattcagtgcacgggtgtgcacacacacgaaggcacttccgccaggtccatctcatgaaagaggcccatgcacccaagggatatggtacaaaaatagtttattacaaaagaaatccaaccaaaatgcttaataatttacatcgtgatccgtgcccgttacggcccacctctcccctcctcagttatctggtagagagtggaggggagtggctgttccctgggtccaccagctctgggaggggacatggaaatggaagatgtgggtggcattccggacagggactggtgcctgagaatgctggggtcagagtcctgggagggagcgagatgggggaacatctgtgctcagaagagggggtgtatgggtaggtgcatgtgcttctgtgcaaatcctggtcccgaagatggggggggggggcagagtgagatcttcacagtttccagaagggttgaccccacagggcaggggggcccctcctcatgagtccaagatctgcccccccatccccctcagctgcctcctggagctggggaggggggcaccggccggccagggcctcggaggaccccagcaaagggcaggaaggcgggtggagatggggaaggaaggaagaaattgggaggagccatggggaatccaggggggtccctggggggagactgggagggtgaggaggatggtgatgcggagagaagacctgaggaaggaagagagacagaggggtgggtggtgagaggctagacccagagagcaggggctggggcctgagatctgggtctgagggaggaggggctgggggtctggactcgggtctgagggaggaggggctggggatttaaactcccgggtctgaggaaagaggcatctggggacctagactcctgggtctgaaggaagaggggccgggggtcagaaggaggaggggctgggggtgtgagggaggaggggctgaggtctgagggaggagggtctggaaatctggactcctgggtctgagggaggaggggctgaggtttgagataagaggggctgggggtatgagggaggaggggctgaggtctgagggaggaggggctggggggtctgaaggaggaggggctggggtctgagggaggaggggccaggggtctgagggaggaggggctatgggttgggattcctgggtcagagggaggaggctaggggcctggactcctggatctgagggaggaggggctgtgggttgggattcctgggtctgagggaggaggcgccagggctggaggttgggaacggtttctcaccattggagctgaggcggctgctgctctcgggggaggtgttggcgctccggtcaggggaggggtctggctgggaggtggaagcaggccgggtggccttccccctcaggatgtcgatgacctgtaggaagatgggcgtgaccatagagccacccatgcctcacagtcctctctcccatccctcctagctcactggatccaggtggtggcctctccacttctcagtatgaaaagatgggcaaggcactttttttcttggtgccagtctctcctcatttctggaactcacacccgcgctttcagaggctcacccactcccctccacgcaacggcacagacaccctcactcctctgcgctctggcacactcgcctgcaaccagcccgcggacacacgtgtgcaaggggcatgtccacagctgccccggctcaccctgcggctgcgcgccaccatgagcggcgtgtcgttgtggcagttcttgaggctgctgtcagcgccgctgcggaccagcgtgcgcaccagcgggaggagcccgcggccggacgctgagtgcagggcggagctgccggagtacatttgcgcgttcacgttggcgccgtgctgcgggacgggagggccgggtcaggagggcgcgcgggccacccggggtaagggaacagaggctggaggcccgggtgggtggccggcacgtggggcggcaccggatcggggtggggtcacaggaaggtaggagcgagagccaagggcaggccaagcgggactgcgttggcggcgatgaattaaccggagctggacaccgaggcccgcgccccaaggagtcgggggagctggaggggggaaggacaatgcgtggacagggcctagctggaaggcggggtcagccaggccatcgcagggcggggcctaggccgttgaggtggcagaggaggaatgggacaagttcgtagccaggggcgtggagcccgagggtcgagaaaactaggccttaaaggatcagagctggacgcggagcaggagccggagccagaagtggaaggcggggtcagagctaggggctgaggccagagccgggttggggtcagaggatagggtgggcgcgaggctcaggggggctgtacgcacctgcagcagcagctgcaccatgctaaggctgttgttttccacggcgtggatgagcggggagcggccgctcttaatgtcctgcggcggggagggaaggtcttagtttctccaagctctgctccagcagccggcgacccgcatcccgtccacatcccattcgcggggtccagcctctctcttgggtctgatactccaagccccaccccacccgggtgctctcccacgccagccccacactggccccgcccccgccaagaccccgcccctgctaaggccccgctccctcccagctcctagtgcacgctcaccactgcgtcgatgtcggcaccgcgctctagcaagagctgcacggtttcttggcactcggtgttcactgccacgtgcagggcggtgagccctgagggagaggagggctcggtgaaacctaggcccgggctttgcggccgctgatggactccaggtccgctggacagcccagcggtgccccgcggtaaatgcttaccgtcataattgcgggcctccaggtccaacgtgcccggagctgcgctgtccagcagggctcgcaggcaggtcgggctgcggtgctcgcacgccaggtgagcggccgtctggccatggcggtccagcgccatggggctggcaccagctgtcaccaggagccggaccacagacggtaatgtggtgatcacagccaggtggagcggtgtctggggaacagtgactgtgagggacctgtgtccagccctgctctctagtcctgcctcccccaggttttctgaacccttattcctcatcctgcagtcttccccaggaacagaaacctgagacacctcctgtctcagattcaagagtccgggccccatgctcctccttccccaggacccagaagactgggcctccaacctcctctttccctagtacctgaattctgggtccccagccccctccctcctcactaggaggtctttaggccccctccctctcaggaacaaccagtccgaggccccagagcccttcttccccaggaaccaggagcctggagcacctcgctacttagagtccagacc

SEQ ID NO: 1887753 - DNA, 4001 bp, Homo sapiens
caataaactgcttgagagcagggctagagtctgtttcacccctggggatctggatcctaacacacttcctggtaccttagcagatggccaaaaatggcaatgggtgagtggctgaatgaacgagtgacagacacatgagtctctaagccccacggctttctcctgcacaccagacaccatgactatgcttcagcatctgtgtaattacgtgcttcctcccacaagagtgtgagctccaagggcccgtgcccatgtttgatgctgtatttcagcacatctctgcctcctactcttgcctccgagttcctgtcttccctttgtacaccattcacgttagcgtcctgcttaaacccgttccacggccctcaccactcctagaataaaatctgaactcctgacctacgagcccctgcacaatctggccctgtctgtgtctccggcctcaccttgatccccgctcacctgcctcactacccttcagccctcgctgcaagctccttcctgccccggggcctttgcacgtgctgctctgcctgccacactcctgccccagctccgccctgctggcttcttctcatcctttcactgtccactgaaatctcttcctcacaactgggttaggctcccctgatggagcatttcatagcatctcgtttctcctatagcctaactgtaatttattgtgtatgtacatgatcgattaatgcctgtctcatgcacaagatgtttactctatgagacgtcggggcccctggctgttttcctgcctcctgcacgctgagcacggagcacaatgcctagctttttaaggcgcacaaataaattgccggtaatgaatgaatgaatgagaaggccctttctgtgcctcgttcgtgtcccctgctccaatgccttcttatgtaccagtgcctggtacacagtaggtgcttaataagcccttgtggaataatgaatgaaaaaaatgaatgaatgcccgcgtccaacccttctttctgcctttctgcatcccttcgctgtgtctctttatatagggcatatatatagtttgtgggtgtaactatgtattcgtgtattatgggcccctctccaggagttgggctgggctgggagtccctccctcccctccccccgccccgccccccatgcacacagcaaaacatgaaaaagaaaacatctcgaaactgcaaaaaacaccatggccctcccccctccccatagatcccccaaaaaaataaaacacgacgctccctcacagcggccccctccctcccctgccccctccctcggggtccctgcttcggagggggaggggggcggggagggtgggcgtggggcgggcccagcagtctccagcgcgctcacgggggaaagcgggggcgcccccgaccccggcagcctcgatgcacgcgcgcccgcgcacgcgccccggacacgcccctcggctcccccgccgcgcccctacacaggcgtggttttcctgttgagcgtgttggtgttggaggcggcggcctccttggccagggtcccgggggcgggcgcagagggcgcgggtggcgcgggcgcgggcggggcgggcggcccggtgaccgtgaccgtgacgccgccgcccgcctccttggggaaggcgttgtgcagcgtgaggaagccggacgcccccccgcggtcccgctcggcacccgccccgccgccgcctccgccgccgcccccggcgcccccggccgcgccgccgaacgcccccacggcgccgccgccgccgccgccggcccccgccagccccgcggccacgctgcccttggaggggtcgcggctgagcgtgtacatggagatgtccgtggaggcaaagcccgggcccccggggccgccgggagacgcgtcccgcgacggcgacggctcgctggagcgggagctagagcgggagcggcggcggtagcggaagcggtaactgggcagacggaggatggccgaggggccgctcccgccactgccgcccgcgcccccgccggccttgagcaggtccgagcgagactggcagtgcgcctcgcggctgcgctcgatgtagatgttgacggccagcacgcctatcacctcggccaggatgaacgacagcccgccgaagtagaaggaccagccgtacgagtagtggtttttcttctcctcgtcccgcttcgggcccggctcgcccgcgttggcggagatgtacacgatcacgccgatgatgttgctcaggcctgggcggggacggtcagacgggagcctcgaggccacccccggccccgcccccgcccccggccccgacccctgcccgcctgcgccagcgggcccaggcgccacccccaggcggtctaggccccaccccgagtggtctagacccccgtcctggatctggctgacccaagtcctgccagaagtgaacacaactccccgcccgatgctctaggcgcttccctgctggtctaagctccaacccagagggctccggcccactcttagctggcccaggcctcacctctgctggtctaatccaaccccggctggtcgaaactccatcccccaggtggtgtagggccgccaatggtccagactgcatcatgcgtggtcctggcccaggcaggctcaagcaccccctcagatggtctaaattccacccccaggtggtccaggccctgccctgaatggtccagacacggccctggatggtccaggtcctgcccccagatagcccacggcccacctctgccggtctaacccagccctggctggtctaaactctgccccaggtggtctaggacccacccccagatggtctgggctgcccccacatggcataaaccccactcctctagctaaggtcccaactctgctggtctaaaccccaccctggctggtggtaactccaccccaagcggtccaggccccacccctaggtggcctaagccccactcccagcgagtccaggccctgccctgactggtctaaaacccacctttgatgagatgagtttccaggccctgccctagttagtctacctccacccttaacgttataaacctgggtttttcccaagcctcatccctctgctcctttgaactctgttaatgatgtcatcctgctgtgatcaggccctgcctttcacttatctaatctctcttcatataattcctgccggagtatccattctaggccctcccctactggtcaaaaatttgcctttaataaagcaggccccgccttctactctaggccccacctccagcttaccaaaccccgccccgtgcggatcttggccagggtccttgccggtctcgggtccttgccggtctcaggtccagctactccggcctttcagatcctccaagccccaccccttgcagatctagacccatccccaaagcacaccctgctcttcaaatatgcaaagccctccctcttctctgtattctactcctccaaaaaagctctgcccctggaatttcccaatgctactcatacggggtagaaagggggccttaccccttaattgcgtgcctcttaagtgttccagtcctagctctctgctcgtctaggccctagctcttgagacggccaatcccaggtactgactggctttggtcggcctcttgcttcaatcagccaggttgattctctgtgcccttaaggacataacccctccccctttggcttttccaggcatcgccccgtcttttctagcctctccttctccaaatggccacgggcaagggccgattcagtctcccttacccagcccctttagtttccacttcccggccctggacggtttcccaggaccagccccctcttggatccaccaaagtctccaaaggcccgccccttaaagcaggctcctcatcggcgctcagatcactttctacctctcctgggcccgccctccaagacccagccccgcctctctatcctcaagagcccaattgtgtctcaaggtcccaccccctccccagctcctccccttccgtctccaggac

SEQ ID NO: 1887754 - DNA, 4001 bp, Homo sapiens
ccatttcttaggggctccaagtccacatctcccatctccccatccccacacactcaccctgggcagcagccagctcctgcagggcatgggtcatctgggtgaaggtgtcatgcaggtggcttctctcatcatagtctggcggtgagggagggagcaggggctgggggaggcagctccccgcaacaccatgtccctaatgcgaacattctgtttctgagtctctgccctcccaagtctgtatcctcccctctctgactctttgccccacagtcgctatgcttcctgagtccctcccaagtctctatcctccctgagtctctgcccccgaccagtcgctatcctgcttcccctagtctctgcctcatctctgtcctcctctctctgggtttccatcctctttgagtctccatcttccaccctctgagtctccatcctcccctctctgggtctctattccctctccagtctccaacctctcctgactctccatcctcccctttctatgagtctccatcctcctgactctccatcctcccgagtgtccatcctcccctctctgactctccatactcctgagtctccatctttccgagtctccatcttcctctctctctgagtctccatcctccccctctctgagtctccatcttcccctctctgactctccatcctcccctctctgagtctttgccctgctgtcttcccctgtctgtgtctctctgtccctaagtctctgttgttctcatggtctttgagcctttctcctctgactgtttctctctgtctgtccctcagcctgaccctctgggcctctcctgccctccctctgcaccttccccaggacactgatgaagtgtggatggtctcctcactgatttcggtgtcagagaggccctggaaggcggccgtgaaggcctcctcacactcttcaagcttggggctccgcatcccaacaaacatctggcagatgcggaggcgctcagagtaggttgtgaagcagaggagacaggcccaggcgggcaccctgaagacagccagggccagcagggcagacgggacggcactggccagagccagcagggccatcgtgtgggtctcaaggccaggggagaagctagtaacctttatgaagtcaccacagggcgggggaagggccagtggtctggggtcagaggtcaggtttcagttggtggtcaaatgtcatgctctggaggaagggtatgaggagtcaggggtcagaagtcaggccagcaattccccaggtgtgtggttgggccagacgccaggctcccaagaacctcacctgtgaccctggatgtcctcacaggttaaagggtctcagggacctagagactggcaacatggtgtgcggtggcccggtagaccctggggtgggggtcagagatggagataggcacagagacattctgagagccagagacagaaagaccaaaaacgacagaaatagagacacagagagatatcgggaggggcagagacctagaaagccagaataagagggagtcagaggatccactgtgaaagagacacagaagccacagagacacagcagagatggagacagacagggaaggaaaacagatttcaggggaaggaggggatgcagggacaaggacagaaaagagcccggctcttcctcccagggtccctggggcagcccagtggggctaagggtccctgagtggggctgggggtccccgccgggccccgtcccgtgcagggcgcagcctggggaaagctaggaggccgtatagtgatctccttgggtgtcctcctcaactatacaacctcctacctcagcccggggggcgcggcaggtggacagacccgacagacagacagacagggaccaggaggaccagggatgagggggagggccggggaggccccagccgcgatggtgagcccccgacacggacccacagacacgagcttgtgtgcggcgaaggccccgcaaggtcggttctacgggtgggtgccaggacccaggagtccgggcccccggcccctcctccccaaggaacccaggagtccaggccctcagccccttcctcatcagggaccctggagtcaaggctctcatccccctcctccctaaagaacccagaagtctaggcccttcctcaccacagacccaggaatccaggcctctggcccttttctccccaaatgttcctggaatccaaggactcagccccttcctccctcagactcatgagtccagatccaaagcctccttctccccagagacccaggagtccctgcccccagcccctcctccctccggccaggcaggcctcctggggaaggcatggcctgatagaaaacctggcttcctgggtgccggctgggagggaacctcatttgtctcgtaatttggccctttgggcacacctgcttcctacctaccctcctgtcagtctgcagagactccaggcccagggctaaggaggccaggggctagccaaccatcagagcctccctaggtgctttctttcctctctcctcccttctttgggtcatttacaactatgacagccacaatctcccagcgctgaccccataccaggccctgagcaccagtcctctccctgacacctcccactccagagagcgaggtgccctcagcatccccatttggcaggtgagggggctgagcctcagagaggggaagaggctcccaaagtctgcccagccccatctctgtcctccctcttgaatccaggaggtgtccccagccttctccagcttctggaccccgggacccagcacccaccctccccacccctgggctctgagcccctccagctggggtctctcccgtgcccagcccctcctcctggactgtctggttctcgctgcccctgctccaggcgcaccttccggttcctttctcgcagtccaggtctctctggccctgcctttttctctctccctctttctttccaccttccctggttcccagcctcctcctgcatcaggacatccctccctggctctgcgctggcttctctctctgcccatcgcctctctcctctccccgcttctgttttcttccttctctccccctctttctcctgcttttcctctaccttctgtctttcatcctccccttctcccccttccccctctttgtctctctcattctctctctggccctctctcagtctctctcctctttctcacccttctccacccccttttttcggatgtctttcctcacttcctctccctccgccccttccctctctccatccctcacctccgtctcctgctctctctcagtctctgtctctctccctctctctctccttccctccctcttaggtctctctctttcctcccctcccccttctctctttgggtctccctcccttctctctctctcttttctccttccctctctccctccccctcgcagctcgagccaggtctggagctgggggtggggtgggggtggtttgagaaggggcccagggctggggtagcgacctgaggagggggaggagaggcgggaaaggggcggaggaggaaagggggaggcgggggccggagacgggtctacggccagctctcttcccccttccctccttcccaacctcccagaccctcaggcgggggcgagagtcaggccaaggtggggaggaaggggaagggaggaggctgcccccgcccccacccccccacaccaacctggcccggagcccaggcctgggttcccagcatgccccggggctgcctggggcctgaggaggagggtgaggggagaggggaagccgagaatctcagagattccccggacctaagcatctcccccacccgccaaccagtgtctccttggggaaactgaggcggagagagaagggtcaggacttgttcaaggtcactggacaaggcgttggtggaaacgcgaactccctgggcccatagccccgctttggggaaggggtaggctctggacttcccccaggcctaggtcc

SEQ ID NO: 1887755 - DNA, 4001 bp, Homo sapiens
ggcaatttctgcagcgtcccttccccctcaccaccttcagcccctggctcttagagctgccttcagccttcgtttggacaagtagctgagctcaatgtcttcccagctttcccctcccggatcactgcccaactctgggggcctccttcctctgccctgggccctcccacatacccatttcttaggggctccaagtccacatctcccatctccccatccccacacactcaccctgggcagcagccagctcctgcagggcatgggtcatctgggtgaaggtgtcatgcaggtggcttctctcatcatagtctggcggtgagggagggagcaggggctgggggaggcagctccccgcaacaccatgtccctaatgcgaacattctgtttctgagtctctgccctcccaagtctgtatcctcccctctctgactctttgccccacagtcgctatgcttcctgagtccctcccaagtctctatcctccctgagtctctgcccccgaccagtcgctatcctgcttcccctagtctctgcctcatctctgtcctcctctctctgggtttccatcctctttgagtctccatcttccaccctctgagtctccatcctcccctctctgggtctctattccctctccagtctccaacctctcctgactctccatcctcccctttctatgagtctccatcctcctgactctccatcctcccgagtgtccatcctcccctctctgactctccatactcctgagtctccatctttccgagtctccatcttcctctctctctgagtctccatcctccccctctctgagtctccatcttcccctctctgactctccatcctcccctctctgagtctttgccctgctgtcttcccctgtctgtgtctctctgtccctaagtctctgttgttctcatggtctttgagcctttctcctctgactgtttctctctgtctgtccctcagcctgaccctctgggcctctcctgccctccctctgcaccttccccaggacactgatgaagtgtggatggtctcctcactgatttcggtgtcagagaggccctggaaggcggccgtgaaggcctcctcacactcttcaagcttggggctccgcatcccaacaaacatctggcagatgcggaggcgctcagagtaggttgtgaagcagaggagacaggcccaggcgggcaccctgaagacagccagggccagcagggcagacgggacggcactggccagagccagcagggccatcgtgtgggtctcaaggccaggggagaagctagtaacctttatgaagtcaccacagggcgggggaagggccagtggtctggggtcagaggtcaggtttcagttggtggtcaaatgtcatgctctggaggaagggtatgaggagtcaggggtcagaagtcaggccagcaattccccaggtgtgtggttgggccagacgccaggctcccaagaacctcacctgtgaccctggatgtcctcacaggttaaagggtctcagggacctagagactggcaacatggtgtgcggtggcccggtagaccctggggtgggggtcagagatggagataggcacagagacattctgagagccagagacagaaagaccaaaaacgacagaaatagagacacagagagatatcgggaggggcagagacctagaaagccagaataagagggagtcagaggatccactgtgaaagagacacagaagccacagagacacagcagagatggagacagacagggaaggaaaacagatttcaggggaaggaggggatgcagggacaaggacagaaaagagcccggctcttcctcccagggtccctggggcagcccagtggggctaagggtccctgagtggggctgggggtccccgccgggccccgtcccgtgcagggcgcagcctggggaaagctaggaggccgtatagtgatctccttgggtgtcctcctcaactatacaacctcctacctcagcccggggggcgcggcaggtggacagacccgacagacagacagacagggaccaggaggaccagggatgagggggagggccggggaggccccagccgcgatggtgagcccccgacacggacccacagacacgagcttgtgtgcggcgaaggccccgcaaggtcggttctacgggtgggtgccaggacccaggagtccgggcccccggcccctcctccccaaggaacccaggagtccaggccctcagccccttcctcatcagggaccctggagtcaaggctctcatccccctcctccctaaagaacccagaagtctaggcccttcctcaccacagacccaggaatccaggcctctggcccttttctccccaaatgttcctggaatccaaggactcagccccttcctccctcagactcatgagtccagatccaaagcctccttctccccagagacccaggagtccctgcccccagcccctcctccctccggccaggcaggcctcctggggaaggcatggcctgatagaaaacctggcttcctgggtgccggctgggagggaacctcatttgtctcgtaatttggccctttgggcacacctgcttcctacctaccctcctgtcagtctgcagagactccaggcccagggctaaggaggccaggggctagccaaccatcagagcctccctaggtgctttctttcctctctcctcccttctttgggtcatttacaactatgacagccacaatctcccagcgctgaccccataccaggccctgagcaccagtcctctccctgacacctcccactccagagagcgaggtgccctcagcatccccatttggcaggtgagggggctgagcctcagagaggggaagaggctcccaaagtctgcccagccccatctctgtcctccctcttgaatccaggaggtgtccccagccttctccagcttctggaccccgggacccagcacccaccctccccacccctgggctctgagcccctccagctggggtctctcccgtgcccagcccctcctcctggactgtctggttctcgctgcccctgctccaggcgcaccttccggttcctttctcgcagtccaggtctctctggccctgcctttttctctctccctctttctttccaccttccctggttcccagcctcctcctgcatcaggacatccctccctggctctgcgctggcttctctctctgcccatcgcctctctcctctccccgcttctgttttcttccttctctccccctctttctcctgcttttcctctaccttctgtctttcatcctccccttctcccccttccccctctttgtctctctcattctctctctggccctctctcagtctctctcctctttctcacccttctccacccccttttttcggatgtctttcctcacttcctctccctccgccccttccctctctccatccctcacctccgtctcctgctctctctcagtctctgtctctctccctctctctctccttccctccctcttaggtctctctctttcctcccctcccccttctctctttgggtctccctcccttctctctctctcttttctccttccctctctccctccccctcgcagctcgagccaggtctggagctgggggtggggtgggggtggtttgagaaggggcccagggctggggtagcgacctgaggagggggaggagaggcgggaaaggggcggaggaggaaagggggaggcgggggccggagacgggtctacggccagctctcttcccccttccctccttcccaacctcccagaccctcaggcgggggcgagagtcaggccaaggtggggaggaaggggaagggaggaggctgcccccgcccccacccccccacaccaacctggcccggagcccaggcctgggttcccagcatgccccggggctgcctggggcctgaggaggagggtgaggggagaggggaagccgagaatctcagagattccccggacctaa

SEQ ID NO: 1887756 - DNA, 4001 bp, Homo sapiens
tttagataacaaaagaattattttcattttcctcctcaaccttccacttaaaccaaaagtcacagccaactaggaattcatctgcctgaggttacaggcagcaagaaccctggtgaatggtttttttttttttttccttttaagacagaaaaggttggctggatttaaaagcaaaaatgaattcaaattgtgacttttatgaagcaaatcctactttcaactgcacaaatcactcctttgttagattttcagagtagatggtaatgtcactaaaagctgtttacagcccagcaggtgtgttttggtttaaaaggatgtgctttccttttaaactcgagtattcaattaccttcccagccgcagggaaagtgtgagctagggaccaagcgagcttcagaggcagctctgaagatgcaggcaggagggagtggggcagggggagctccacaaggaagagcaacaggggagccaatgccttggactacgcgggatcagtctccttgctctcttcagaactgggaattctcacgacagatgcaccctcgccaatcacgcaggactgaccggggcgtcggaatcgccgtcattctagatgatctacaccttcccggtgccagacgcgccctcgccacaatcacgcaggactgactggggcgtcggaattgctgtcattctagacaatctacacctttcccagtgccagacactcacggagcagaacaatgtgccgcctggtcatcagttatttgccttttgaacgttaaacgctggtttagagtgacaggctcaaaaaccaaatatttcaaaattgatgggcctgtcacagacgtttctgaaaaaagacacacagatctctgggaaggaaacatccctattttcctggcatggcactgattaagaaacagtcaaaaaaaaaaaaaaaaaaggaaatatccctattttaaccacaaatagggtctaccctgagtataatttacatgtattcagtgtttgtaccaatctctccatagatctcacagaatgcctcgtttggatcttcagcttccaaactgacataaaatcaaactagttgctttctcatgaggttattatgagcattaatgaattacacaaatggtgaataagcccattaagagtgggctgggcttcaactgttttgggggagtaggggattgaagtatcagaaatctacacgggaaaaaacagtattaaaacaacacaacacttaacttttcctctagagagaggatttgcacagctagaaaatattcctttcttctcttattttttgttgaagtcgcggttcgggccaaaacctacatttaaaacaaaagaaaatccttgttattacaacagctgacagtgagaaacagtggcaaactttagcacaaatgcagcaggtaatcctgaaggcctataaccatgggatttcagatatttggtccaatccccattgtttcacagatggggaaactgaggcatgagaggccagtggcagacaaagacaaggacctgggcttttgcattgcagctgagcactgtctactgaattgctggaaagcattccctgaacacgaccataatttactatcacagggctgcttgccagatctttccttgagttacagccttacatgcctttttacagctgattctttttttttttttagtgtgaaaaaaaaaagacatttctggaagtgtaaccttggaagcactagaccaaaaccccattaaatggggaacgagaatcagtgccaaccgtgttctggctcaattatttcactgaagcaaatcctaggtatctcctgatcaagattttacttgtcacccgaaagtcatttctaagtcctgaagttacagaataatggctgtcaccttcgcaggccataatcgcttttcccatcggcagaggacatacttggcatccgccatcatttacactcatgtggcaagtggcaatgatttggcacaacgtactcccaggtctcacgccaatgtgtcctggaacgaaatttgcacggtggtttatacaactgtttgctggcgatgttaacgcagacacagccctcaggggcaaaggttagctcgacttagcctcaagtagatggtttaattccacaatcttgcattgagatgctcaatgccaaaaagcagactgacaaacagaaacgacggggctcggtatccagggaggcgcctgcattttttcataaataaaatacagcacagtccctcccaaaggttctatctagatcagttttaaaaggctcctgaataaatcatctccgtgcggaagacctgcctccgacctcggcaggagaggcattttacacaatcaaagctcacaaccctccccaatttggggagttaacagttgaccacagcacacacacaaaaataagagcggaaaaacgactgctcttttggctgccatgtccctgaaagaacggggacagctgcagaccgttcacagcatcaatgggaaggactggcttggctgttgacagaaatgaaaaggaggtttgggggtgggggtggaatttagcaacaacggaggggggcgtccccgcagcagggaagaggaggttcccagcagaggtaggggtggcgtttccagcaagagaggggatcacagcagcagcagaagtaggggtccaggcagcagggacaagatttcatggcggaggaagggttgcggcttgcaggaacgggggattcaggcaacagagaagggggtcacagcagaagcgggggggctcagggagcaagaacgagggctcacggaggaggtggagcggagggtccaggtggcagggatgggggatttcacggttgggggtggggaatccagggaagcagatgggggtccaggcaagagatggggttcacggcagacgtgagggggatccagggaaggagataggggtccaggcagcaaggatgggggagcgggtccaagcaagagatggggtccgggcggcagggacgggaaaaggagtccaggcaaagtgaggggcccacggcgccaggggcggaaaagggggtccgggcagagtgggggacccacggcggtagggaccgggcgctcccggaggagtctctaggccggggccccccctccccccaggcccggcctcctcgcctcagccccgcccggcggaaccgaggggacgcatcccgcgggctcaccgggcccccggctttccccagcgcggcgccccaagcccgggcaaggaggccgcagcggccgcaacagcggaggacccgcccgccaaccgctgccgtccgcgccgcccgcgctcaccgcctccgccaccgccgccgccgccgccgccgccgctccccgcggggccgggggcggggcttgcctcgcggcggcgccaagctccgcccccttccgcccgctgcccaatgggacgcgcgcgctcccaaggagcgccggcctcgccctctccggcgtccacggccgcgcgccggccccgccccttccgccgcgcgtctacccctttttcccgggagtgctgcctgaggagaccggttggcggggcatgtgtggccgctcccgggcgccgccctcccgcgctcccggccctttgtcctgcagtcagaccccggacaccgccctcgcgggtctcggtgggaaaacaggctcccccgcccgcggcgatccctgagagaaccttccagaactttcgagaatcttccaggtcctacggcacctcccagcccgggagctgcgcgccacggacccaattccagcagatcccaaccgatcccaaagccaggcatccccgcaaaggcgtcataagcttctgaactagagcaggacccaccttgggagggtcccaagaccccggggggcaccggaaacagccgcgggtggcgggagccccggagcggtcgctccatcagtgtcaggcctttccctgagcggtttttgattttttttcagacggagtctcgctctgtcacccaggctggagtgcagtggcgcgagctca

SEQ ID NO: 1887757 - DNA, 4001 bp, Homo sapiens
caaggggcccagtgagcctggttctgggaggtatgtaaaaactgttgctcctggaaggacctgctgttgccaaggggaagaggtggtgctggcctagtctcttctccctttccaacccctgttccagcctgcccttaacagatctgcaagtgaagagaggtgtttgtagtctctgccctgcacagtgatgcctaggtgggtaggtctggagcccagccttgtctggtgatgaaatcccatgggattttcccttgacactgagaccagggcctccaagggctgggagaacactcaatcctcagggaggttaccagcctcctgagcaccagtcctccttgctccaagtcagcgttaatgattcattcccatgatactacctctcccaccccagctcagctgtacagctacccttaccctaacagcaccctactccctaaagtggtcctgagcggccaaagctttctacctttatctacctatcagtaggagtacccgctgaagagttgtactcatggggacattcagcatctcacccttagtactagaggaacaaagggaagcagtggggtcacagcacttcttacagctgggagccaaggatcccacttggatctgccaacccccaggtttgtgggtggtactgtgcctaaacttgatgcctgcaacctgcatgctcccctccacaccctgtcacggctgtcccctgggccatgggccaagccaaaccccaggaaaggacccagacaggccagaatctccctagccaaccaagattatgcgatccagcaggagcaaactgacacctggtgatccagattctgcctcaggatgtctttgtaaaactcctttacacctaggaaaccatttcctagttttaaaactagaagatttcacctggaaattcagatttttcaagactttcctgttctcgtgttcacaagcagcaggtgatgagggtgtaggaccctgcagatggaaccccagccagtctgagaagcaaaggctgcaggccctgggccagtttccctgccctgtggtgatcattcccatcgctagagctgaaggcttctcccaccctggccccatgcacattggaaggtttcagtcaggagtagattcagcagcaaaccagtggaaacgcagcttaggtgaaagtggacagatgctgagagcataagttcagcatactgcaggcttcagggcagcgtctccaggacccagtgccattgcctgttttgccctagccatcttccccttccatcccattgtccaggtccttcacacagcccctctcccccaaccctccagtgggtgacttgggtgcaggtaacacaggctgaaaggcagtttcaaagaaggggcttggccttggccagaagccactcctgggggagcatctgcagaatcagaggagtggcgcctgggcccctccgcaggcaagtgccacaccatgcgctcacggggctggcagtttccgtggtgacggccggaagtcgctgaccggcagagttccgtttcctcccgccctccgaggcacgctgagctgtgattggatgggaagctgacccccgcctccatccccttttccagatagtgggggaagcgcagaggctgcagtgcgtgtccgctggaacttgaggcccacgccaatagcggcccgattccgcccccacgtcgcgttccccaagtgtccaccccgacaggtcttcccctacaccactgtaaccctccacagtgcttaccactctctggcacaatacatgttttgttagtttacctcaatcagaatctccaggaacggggatctttgggtttgcgatgggacagggaaggtactcgacctcgcaccctctgggtaacgcatctagtctcactcagggtcttgccgcgatcaccctgccttgtctgtgacccatagggtcaaaggcaggccgggcgggtggcggcagcagcggaggtgaccacccgcgccgcgctctgcacatatatacaacttaagatgaagtgaccgcgagcaaaagcggcccacgtctgccccactcaaagatggcgactaactccgcttcctgcccggccccgcgaaagtcgccggaagtgacctgcaaggccgccgaagcgtcatctccatgaacggaaatgcccgagtccagccgaaggaggccgaaccccaaactccatcgctgagcaacgcgggtttgcggcggctgcgcaggcgcacaacgcaggccgggcgggaagagccaaagcgggcaggcggcggaaatatccgaagcggcggggcgcccgaggccgttgccgacctccgcgctaaagccgctgctgccgcggaagacgatcctccagtacccgcccgccgtcaccgcagctgccgtgtcctcctcccacccctagccgcaccccctcgcggagggatcagctgagcggccaaacggcacggtcgggggagccccgagtccgcagctgcagcggggcctgagaccagagttggcgagggcaaggaaggagcggccccgggcagtgggggcggggccgggcgggcccgagaacagccgaatttggccgagcgctgccgagcgagtccgaggcgctgggccaggccggagccggactacgggagccgaggcgggccgcgcggtgggcgcggagaggagcggagcggcgcggcaggccgggcgggtggcggcagcagcggaggaggccgcagctgcgggtccgaggagcggaggcgacgcgggcggcggcggggggccgggtggccggggtcccgggccccgcggcggcggcagcggcggcggcggcggcaggatgatcaagctgttctcgctgaagcagcagaagaaggaggaggagtcggcgggcggcaccaagggcagcagcaagaaggcgtcggcggcgcagctgcggatccagaagggtagggggtcaggggatggggttggagccggaggtcggaggtcagggcctgaggcagggtgatgtgggagtcaggaaggggtaatgcggttgctgagggtcagaggtgaagggccccgagcgtggggggggtcggaggtcaagtcttgagggttgggatcatgcagtcacggggagggggtcagagataggggcccggtatgtggtggtttaggatattaggaaggcctggtgtctgctactagggactcggaatctcagagtcaggcagtggagtggaggaactgacgactcgagagtctgggggttagacgggaacttgggtttggggtgacaggcggagaagagagggatagtagaggccaggggttggggatatgagtggaagaggatttagtttattatgctggggtctctgggaatctctgagtcaaacgggtgaagtaggttggaggaccagggactcatgggcctgcctgagtcacagcaatttggggtttggggtgacaggtggaggagggaaggttaatgagtaccagggattggagacaggggtgaggggaaatttaggctattgtgctgtgaacctcagagtcagagggggtggggtagggtggcgggggttggggacttgagagtgtgggggtcacatggaaagctgggtctgagagacagagaagaggaaggacagtgaggactgagggttggtgggggtgggcaggatctttgagtttgggtgaacaggtagatactgtagagtggaggtcatggatggggagcctggggtttagggcggtcagaggatgtttgggagtgggggcatttgggagctgtggatacagaaaagttgggggtcaccctgggccaggagttgggacacgcatacacagctgaacatgcatgtttggggtatgctgtgtatccacaagagccaagctggggagcagggagagggctggaggtgtggagcacagcccaggagaggcgcctgggggtccaggaggagacgatgggggctctgctaacaaacacccgccctaagtgtcctgctggctccctctctctctctcttcccctccctctttctg

SEQ ID NO: 1887758 - DNA, 4001 bp, Homo sapiens; identical to SEQ ID NO: 1560738

SEQ ID NO: 1887759 - DNA, 4001 bp, Homo sapiens
cccgggttcaagcgattctcctgcctcagtctcccgagtagctgggattacaagcgtgcgccaccacgcccagctaatttttgtatttttagcagagacagcgtttcaccatgttggccaggctggtctcaaactcctgacctcagttgatccgcctgcctcagcttccaaagttctggaattacaggcatgagccaccaggcccggcctgttttggtttgttttgttaaaacttcataggcagttcaagtgtgcagctaggattggaaacctcttaacaggatgattccttcctaacctgtaacttcattttttcattcatccgctcaacatgtggcttataggttactagggcgggaagacgcctgaaggaaacgcactgctgaagtggcactagacccacgtgccactccctcagcgaatattcactaagcacctgctgcatgccaggccctgggaatacagcagcactgacggcattcccagactgccctccaggaacttctactctccacatccagaaatctggaatcatcacaaattccttgccacctccgttatccagtctgcctttgagaactttccatcatgtaagagctgtctcttacatgctcagcacatagtttgtgatttttgacacatattttctgaatgcctgctttgtgtcaggccttgtgttccaggtacaggcgataaggccgtgatcaagggagatcagcctgctgccttcatggagcttgcagtctgtgtgtgctcgaggtgtccaggacagctggccaacccatgtcttctggaaatgatacacagatgtgcacatagtacccaaacctccatggccttctagggacaaagcagcacagacaggaacccctgaaggccccagagtcggaaacacctggtttacatcctgtccccaccacttgctagcatatcagtcagtggacttactctttctgagcctccatttgattctctctaaactgggataataaacctctttgtagaggtttctttcttgcaaagattagtgagacagatttgcaaaggacgtccgggcacatagtaaaagctcaatgaatcctgaataagtgaaccggcagggagggtaacagtaggcccttgcagaacagttgtaaggaatcagattatcagagccagcatgactgtcaccaagtaggtgttcgataaaggaggtggttattatagctggatcatttttccttgggggcaagaagaatgtattaattattttaaaggtgatactgttaagattatgaactataggccgggcaagggggctcacgcctataatcctagcactttgggaggccgaggtgggcggatcacctgaggtcaggaggtccagaccagcctgggcaacatggcgaaaccccatctctactaaaaatagaaaaactagccaggtgtggtggcgcctgtaatcccagctgctgggaggctgaggcaggagaatcgcttgaacccaggaggcagaggttgcagtgagccgagatcgcaccactgcactccagggtgacagagcaagactccgtctcaaaaaaaaaaaaaaaaaaaatagtgaactgtggagttaccttgtttggtttccagtactgaccgctcgttactagctgtgtgatcttaggcaagttactttacccctctgtgcctcaattccttcatctctaaaatggatttaagtacctacctccacccccttgcgaatttttaataaagtattagatggaatgcacttacagtagttcctggcacataagggcaatattaagttttatgatgatgatgattcgaccttccacacagcatacagcgagaggccgtggccaccacctcccatctctagtcacagactccttatggcagccccttggtccagaaatggaaaggagaagagagcgcgggcgcagtggggcaaagtcgcctgggaggcccgagcaggcgacctggccgccatcttgggagagggcaacgccggcagcttccgtacgtcatcagcccgcgcaacggccgggcacccggcggttcaggtcgcttagagagtcgtaggttgggtagtgcgggttggggcgggggctgcggagagggtgcttaactgaggggcatgatgggggaggcggccgtggccgcggggccttgtccgttgcgcgaggacagcttcacgcgcttctcgtcgcagagcaatgtgtacgggctggcaggcggcgccggcgggcgcggggagctgctggccgccacccttaaaggcaaggtgctcggcttccgctaccaagacctccgacagaaaatccggccagtggccaaggagctgcagttcaactacattcccggtgggtggcgctatggtgctggggggcgggggcctggaacgtggtgttgagaaggcttctgaggctctgtctgagccgggtcaccgtgctggaagaatgggatcaggtggttttaagggggtcactgggatcagcgggcaggcatagttggggcccggatgagcctagggtttcaggattcttcagacttacaggtcaggatccctagtacccagggaacagagatcaggtgatggtggtcaggactcagaccagagggcatgatcattgcggtagccagagctcaccatgttggggagattggaagcatgagtctgcctgacactgaacttagaactctcccctcccagtggatgcggagattgtctccatcgacactttcaacaagtcaccccccaagcggggtctggttgtggggatcacgttcatcaaggtacctagagccccctccacctcccttcgccctcctccttacacacatggtgagttccactgagccgccccggatccctcctgccacccctgccctcccctgaaccccgtgtcctccgccaggattcaggggacaagggcagccccttcctgaacatttactgcgactacgagcccggctctgagtacaaccttgactctattgcccgtgagtgaggcgtggacgggaggagggagagagtccccagcaggtcccccatgctaacctgcctgtgccctgcctacagagagctgcctgaacctggagctccagttcactccgttccagctgtgccatgcggagtgagtgtcccctgcgcatcgacgcccactccactgtaaatgtagaaaccctggcttctcgaaccccttctttacttacagacccctgtagtctgtttccccttctggaaaataaagaggttgtactagattagggattgaaaactaaaatgccagccgggcacggtggctcacacctgtaatcccagcactttgagaggctgaggcagacggatcacctgaggtcaggagtttgagaccagcctggccaacatggcgaaaccccgtctctactaaaaatacaaaaattagctgggcatggtggtgtgtgcctgtaatcccagcctactcaggaggctgaggcaggagaatcacttgaacccgggaggcggaggttgcagtgagccaagattgcaccacagcactccaacctgggtgacaagagcgaaactctgtctcaaaaataaataaataaaataaaatgaaattaaactaaaatgcctttggggaccagagaggtcatgtgagaatggaaagcacaaatgtaatataacagggagcacatgtgcacacacacatatgcagctgaggttggaaagctgtagctaactggagaccacgaacttgtccatagacaatcagattctacatttgttttttaaagcattgcactttttttttctttctttttttttttttttgagatagatgctcgctctgttgccaggctggagtgcagtggctcgatctctgcaacctctacctccctggttcaagtgattctactgcctcagcctcctgagtagctaggattacaggctcacaccaccatgcccggctaatttttgtatttttagtatagataggtttttgccatgttggccaggctagtctcgaact

SEQ ID NO: 1887760 - DNA, 4001 bp, Homo sapiens
cctcactcacacctttgccctcacccctcatgactcagtctttgaaaggcacaagaacgagaagtggggaaaacactttccggaaaatacacccctccccctgcgaagagccccaaggggtaaggagaagagaagagaagaggggaagggagaaattggggaagcatcagaggtaaggtaggggagaacttcttgggtggggtccccaaaactggacttcttttttttttgagacaggacctcccttgtcgcccaggctagagtacagtagctcaatcatagctcactgcagcctcaaaaccctgggttcaaatggtcctcccacctcagcctcccaagtagctaagactacaggcacctgtcaccgtgcctggctgattttttttttctgtagagactgggggtctcactatgttgcccaagctagtcttgaactcctagcctcaagcagttctcctaccttggcctcccaaagtgctgagttgacagtggtgagccattgtgctcagacaaaaaaatagacttcttgaggcctaaacaatttggagggtgtgaatgtgggggagtcttagtttaaatgtcacatgccttggtctccaagatggcgggaatgtgtcacatgtctggagacccccataactggtcatcagagcttggagtgggatctgcagaggcctccaaaaaaacatatccagagaagaaggggagggttcctcactcaagagtcttagtgaaggccgggtgtggtggctcgcgcctgtaatcccagcactttgggaggccgaggcggacagatcgcgagttcaggagttcaagaccagcctggccaacatggtgaaaccccatctctactaaaaatacaaaaattagccaggcatggtggtgcgtgcctgtaatcccagctacttgggaagctgaggcaggagaatcgcttgaacccaggaggcggaggttgcagtgagccgagaccacgccactgcactccagcctggcaacagagtgagactccgtttcaaaaaaaaaaaaaaacaaaaaaaacaaaaaaagagtctcagtgttggaggatctgggacttaaaagggctctgggctggacatggtagttcacgtctgtaattccagcactttgggaagctgaggtgagaggattgctcgagcccaggacatggagaccagcctgcaaaacatagggataccctcttctttacaaaaaatttcaaaaattagctgggcatggtgacacatgcctgtagtcccagctacttgggaggctgaggtggaagaatggcttaagaccacgagtttgaggctgcagtgagccatgatcgcactactgcactccagcctgggtgacacagcaagacccaatctcaacaaataaataaataaaaagaaaaaaattattttaaaaaaggagctctgagccagacgtggtggctcacgcctgtaatcccagcactttgggaggctgaggtgggcagatcacctaaggtcgggagttcaagaccagcctgatcaacatggagaaaccccatctctactaaaaatacaaaattagccggggtggtgtggcacatgcctgtaatcccagctacttgggaggctgaggcaggagaatcgcttgaacccaggaggtggaggttgtggtgagccaagatcgtgccattgcactccagcctgggcaacaagagtgaaactctgtctcaaaaaaaataaataaataaaagggagctctgatcttaggagatgtcagagtagagccctcggggtgagagcccactttagagatctggaaagccaagaaagaagagtcaaggatcctgggtgccaggtttgggaatcactgaaccaggagccccagacttaaagggcaaaaagcagagaatccctcccaggtttgggggtggcaaatggggtcaccataccggatcagtgtggccccagcaggctccacattcagcagaggcagcagcagcagcaagggtagcagcagcagtggtggagacattgctggggagccgggtgtgaacccaggcttcctagttttctttcccctgtgactccaccctgtttatgccccacctcccggtttaggaggtgaccagaacacgaggtctctcagcaggtgacacagggggacaaggatgtttttgaagatttgtgcagagtatttgtgtagtgtcaacaaaagttgtatcctgtgtccttagtgctcctcattccctacttggggggtggtggtcgtggggtgtcctctgctgggactgcctcccaccccccatcctttagcctctgtcacttttacttctcactttcacatcacttttctgagactcattaaccacagtgtttccttggccaagtgggagggaccagcaggtgtctgtgaagggcctggggaagggagagaggaactgattataagcctgccctcccatatgaagtgggactgcctgcgtctgaggacccagactcttatttgtaggtgaagtatgtttcttgtaagcaacaaaacattgggtcttctttttcatccattcatccgttctatatctttttattcgagagtttagtccatttacattcaatgttgttcttgataaggacgtcctcctgacattttgttacttgttttctggttgttttgtagtattctcttctttctgtccttctttcatgttatttatttatttatttattcatttatttttgagacagaatctcattgtcgcccaggctggagtgccgtggtgcaatctcggctcactgcaacctctgcctcctggattcaagcgattctcgcctcagcctcccgagtagctgggactacaggcgcgtgccactgcacctggctaatttatgtatttttaatagagatttggtttcatgatgttggccatactgatctcaaactcctgacttcaggtgatccacccgcctcagcctcccagagtgctgggattacacatgtgagccaccacacctggcctctgttttccttttagagaagataattttccttggtcatatgatttaattttttgcttttttttttgtatctgttgtatgttttttgatttgaggttaccatgaggcttgcaaatattgtctttttttttttttttttttgagatggaatctcgctctgttacccaagctggagtgcagtggctcgatctcggctcactgcaagctctgcctcctgggttgacgccattctcctgcctcagcctccagggtagctgggactacaggtgcctgccaccacacctggctatttttttttttttttttttgtatatttagtagagacgaggtttcaccgtgttagccaggatggcctcgatctcctgacctcatgatccgcctgccttggcctcccaaagtgctggggttacaggcgtaagccactgtgccctgccataaatactatcttataacccattattttaagctgacaacataaacttaacactgtttgcataaacaaaccaacaaaccaacaaacaataagaaaattagtaaaaactctacaccttcactttgtccccaactttttaactttttgttgtttgtatttatatcttattgtactgtctatgtcttgaagcgttgttgtagttattatttttgattggttcatcctttagtttttctacttaagagttgttcacacaccatagttatactgttacaatacaccatgtttttctgtgtgcttactattagcagtgagttttgtaccttcagatgatttttttttttttttttgagacggagtcttgctctgtcacccaggctggagtgcagtggtgcgatctcagctcactgcaagctccacctcccgggttcatgccattttcctgcctcagcctcccgagtagctgggactacaggcacccaccaccacatccggctaatttttttgtatttttagtagagacggggtttcaccgtgttagccaggatggtctcgatctcctgacctcgtgatccacatgt

SEQ ID NO: 1887761 - DNA, 4001 bp, Homo sapiens; identical to SEQ ID NO: 1560745

SEQ ID NO: 1887762 - DNA, 4001 bp, Homo sapiens; identical to SEQ ID NO: 1560757

SEQ ID NO: 1887763 - DNA, 4001 bp, Homo sapiens; identical to SEQ ID NO: 1560772

SEQ ID NO: 1887764 - DNA, 4001 bp, Homo sapiens
gcaacagagcgagactctgtctcaaaaataaataaacaaataaataggcccggcgcagtggcttacccctataatcccagcactttgcgaagccaaggcggctggatcccttgagaccaggagttcaagaccagcctgggcaacatggcaaaaccccatctctatgaaaacaaatacaaaaattagctgggtgtggtggcgtgcatctgtagtcccagctacttgggaggctgaggtgggaggatcacttgagccgaggagttcaaggcttcagtgagctacgatcacaccattgcactccagcctgggtgacagagtgagaccctgtctctaaaaaataaaaaaataaaaaccttatttaatctttttaatcaggcagtccctacagaccagaataggttcagagcaactccctatacctttttttatttttcattttttttatttttagagatggggcttccctttgtcacccaggctggagtgcagtggcgtgatcatggctcactgcaacccagacctcctgggctcaagtgattcttccacctcaacccttagagtagctgggatcataggtgcacaccaccatgcccagccaatttttaaattttttttttctttttgaggcagagtcttgctctgttgcccaggctggagtgcaatggcatgatcttggcacactgcaacccccgcctcccaggttcaagctattctcctgcctcagcctcctgagtagctggggttacaggcacttggcattatgcctggctaatttttgtatttttgtagagacggggttttactatgctggccaggctggtcttgaactcctgacttcaggtgatcctcctgcctcggcctcccaaagtgctgggattacaggcgtgagccaccgcacccggcccaattttttacttttttttttttttttgtagagacggggtctagccatcttttctaagctggtctcgaacttaatgtgctcaaatgatcttgccttagccttccaaagtactgggattacaggcatgagcccctaaatttggcccctacattttctttaatcttaatcaatttacatttaaacagcccatgtggctagcggctactgtactggacagcgcagatccagagtttaggcagagaagagacccccaggcctgagccctgggccacactagcatgtggaggtcaggaagaggatggagccgtcaaaggaggtggaggggcagccagagaggacagaatcatgttctggaagccaagggcagaaagtcaagtcagatgcaggtggaaattaaccactggatttgcaagatgagggttcctggcctcctcctcaggaggaaggttgtgcttgtctgagggagccgaggaaggagggccggtggtgaggacaggaagtgtggctgaccgagcctgaagccctgcagctgtggggtctacgttggtaggagaggctcccctcacaactggagtcggcactggcctggttgtctgggaggcagaggtccctgataaccctggagctgactctgtgtccagagcactgaatgccagggccagagaatcctgcatgacagtgacccaagcatgtttcctcgaaccctccctttgatctattccattctcaaccccctggtcgctaggcagtggccctagcaacgggtctagtggggtactaaagcctgggggccaccgttccaccgcgggagacccgtagttacctgtcctctgataacagaccccacatcagcccaaaatttcttcaccagggaccttacacatcccgtcctcggtcccctgagataccttgctatcctcttcccttcagatatcaacagtgatggtgtcctggatgagcaggagctggaggcactcttcaccaaggaggtgagcatcttggaagcctcgggcacctggagggacgcccaaatcagccacttgtttcctcctgcagtccccttaaatccccctggatgggagctcagtgaaaactacaactcccatcagcccctggggcaaaaacggctcccaggagtggtagcgtgcccaaaggactgctgggagttgaagttgtcgggaatgagctcgctggggacctctcaatgctgtctgcctctcgcttgctcctgcagctggagaaagtgtacgacccaaagaatgaggaggacgacatgcgggagatggaggaggagcgactgcgcatgcgggagcatgtgatgaagaatgtgaggtgggggccaggcgggggagaggacgggcccccagctctgtcactcacccttatctggctccccaggtggacaccaaccaggaccgcctcgtgaccctggaggagttcctcgcatccactcagaggaaggagtttggggacaccggggagggctgggaggtgagaacatgggggatactcggggtcctgaacctctctctcttctagccatgacctttctttcagaatcttaggccccttctctttctctctgggtccccgtccattctcctgggtcactgcatctctatctctgggtctctgttttcccctgtctctaggactcttatttatttatttatttatttatttatttatttatttattctgagacggagtctcactccatcgcccaggctgcagtgcagtggcacgatctcggctcactgcagcctccacctcccaggttcaagcaattctcctggctcatcctcttgagtagctgggattataggtgcgtgccaccacacccagctgatttttgtatttttagtagaggcaggatttcaccatgttggccaggctggtctcaaactcctgacctcaggttatccacccaccttggcctcccaaagtgctgggattagaggtgtgatttttttttttttttttttttttctgaaacagggtcttgctctgtcgcgtaggctggagcccagtggtgggatctcggctcactgcaacctccgcctcttggattcaagcgatcctcccatctcagcctcatgagtagctgggattacaggcgtgagccaccatgcctggctaatttttgtattttttgtagagatggggttttgccatatcggccaggctgctctagaactgctggactcaagcgatccacctgacctggcctccctaagtggtgggattacaggcatgcaccaccgcaccacacctagctaatttttgtattttttggtagagacagggttttgcatgttggccaggctgctctgaaactcctggactcaagctatccacccttctcagcctcccaaagtgctgggattacccaggctggagtgcaggggtgttatcatggcccactgcagcctcaaactcctgtcctcaagtgatcctcctgcctgagcctccctattagctgggactacaggcacatgccagcatgcctagctaatctagctcattcttttatttatttattaatattttttgagacagggtctcctgtcacccaggctggagtgcagtggtgtaatcatagttcactgcagccttgaattcctgggctcaggtgatcctccttccttagcctcctgagtaactgggactacaggcacataccaccatgcccagctaatctaggtctctgttttatttatttatttatttgtttgtttatttttcaatacagagttttgctcttgttgcccaggctgtagtgcaatggtgcattctcagctcattgcaacctccacctcccaggttcaagcaattctcctgcctcagcctcctgagtagctgggattatatgcatgtaccaccatgccctgctcattttgtatttttagtagagacggggtttctccatgttggtcaggctcatctcaaactactgacctcaggtgagccacccacctcggcctccgaaagtgctgggattacaggtgtgagccatggtgcctggcctatttctatatatttttcaagatgcccagccaattttctgtagagacagggtctcgctccgttgcccagg

SEQ ID NO: 1887765 - DNA, 4001 bp, Homo sapiens; identical to SEQ ID NO: 1560823

SEQ ID NO: 1887766 - DNA, 4001 bp, Homo sapiens; identical to SEQ ID NO: 1560831

SEQ ID NO: 1887767 - DNA, 4001 bp, Homo sapiens
ccaggtgtgaaggaggatcctggggaagggggtctgggcacagccattcctgtaaatggctttcaggaaacacatgagaatctttgggatgttggaaattaggggtggacattgagagaacaaaatgtccatggaaaatattataaatgtccatggaaagacaaaacgctgggcagaaaggcagtgaaagatcataagggctccataacgtcctccgtgtgacaaagagttcattaagacaagggaggaaccctagaccctgcttaaaaggacgtggcttcagggagagctcctgtgggcacactcagagttgaggtaaaactcctgggattttgtctaattccagtgtactgggtaggggtagacttttggcaatgtgaggtcaggggtatcagatgaaggggtcaacaaatgcctggacaggattcacgaagatgagagggacgttcgaattcctaaaaagctggtggtcaaaagaatgaggatgaagaggagggtgtcctgaaacctcggagccagaagtggggctgaaggcaagaagcctttcaagggaagaagggagtttggaaagagatggatatcaggccagaaaccttcccccaacctggtgccccaaagcattctaaaaacgggggtgggacacagaagaggttgtctgagcagaggaggatcccggaagccagcgtgggggaaggaagagggtatgaggctggcatgaagtggggactagagaaagggtgagtagttttcagagaaaaggccagtgtccagggctgtccaggagcgaatctggtcacttgttctgaaacaggggtccgggtctggcagtggcagcatggtggggtgggtgagtggcactatggaagagccaaatctccacctctatcctcaaagcctttcttccacacagctttccggttagcaaggctccatgagaatggttagttcctgaaaatagtggaccccagaagggctgactaggagcgtgggcatagggagagggaggggatccagggcccggaggaccttgccagagcgtgtagcccgcagaattgaggaaacgagagtgggggtggggatcagatcccagcatttatggagtgactgcagcccagaaaggtggaaaaaactaagaaggggaccccaagggcttgaaagaccttgccgagtgtggagccctgaagtgcgcaggccactcggttgtccctcaggggcctgggaacctcgcggagtgtggagtctctagaacgcagtccactccgctggggaggtggatttcaggccagaaaccttcagggacctggagccccaacacatgctaaaaacaggggtagggacacagatctgaaagattttggagtacttggaaggcagaagggaaacttgaataagtcagggtggagcgctcagaagatggcggagacagccgagctggaagaatccagaaagagaggcggggacaggggatgggggctcagacgcattcagagcgcacagggcccctccaaggtcgctttcacactgccgggttttcctctgcggctgcagagctgcacttttcctctgtcccaaccaaaatgtgacccttgaaggtctcatcccccatggactgtatctgggcctcatttattcaggggcctcagtcctcaaggaggccattgtcactctccttcccgatagagtcctctcaaattagtaagggcccctcaaggagcccagggtttgtctttatccctccctgaaacttcttcggaaggaggaagttcccaaacacccccaggctttagtgccagaatttcaccctctgaaacctcctccttccctagacccagtccggctcctcatcctcagtccctcagaccccatggaggtgtcccctgcagtgggttttctccagattgagagcctcccctcctcagcacacaacccagagactcaccctgttctgagcagcgagccaccgcataagcagacatgagacctcactccagtcaaataacactttatttttgtaaattcaattgttttgttcccggaggaaagggaggagctcaggagaacagtgtcgtcaaaatttcctggtggttgtttaatcacagccgccgagtaggtcagaaaactcatccggattaccctcttcctcctgaaattaaaggaaatgtgcaggactcatcaactggtaaggtttcgtgacaattgtgcgaatatcgtgctggatatatgaatagaaagttaaatctgaacgacctgtgctgcttgtccagacatcatcttcttcaggaaatatgagatgtttctgaagagtttcagcagcttgtcaggaaaggactctgccttttccagtacatagatgagcatcatctggattagagacctcaacacggcgaatacaatttccgttgctagttttgggacacatgtcatgaattggtcggcacaccatttttctaacatatcggtcagaatactggccactttaggcactatctcttccttggccaggttctttataagtgaaataaatgagcccatgatatgtgcaatgagcgtgctgttggtttcaggcaaagttatataatgagagcgttcctggagagtggaggcattttacagaaggtcacgtggtgggggcgggccaagatggccaattagaagcagctgccttccactgagtgaaaagaaaagcccggggatttttttttttttttttttttttttgagacggagtctcgctctgtcgcccaggctggagtgcagtggcgggatctcggctcactgcaagctccgcctcccgaagcccggggattttgaagtcagcgcgtcaactgaaatattcaggttctcacattgggactgactaggcaaacaacttgacccgggagaacaaagaaaagagggatggatgatgattcaccctgtattggcagagagccaaaggaaccatctccggcatccgagggaaacagtgactgagcgtgtgaccccgccccagaaaccatgcttctcccatggatctttgcaacccatggatcaggagatcccctcttgagctcaggtcataagggccttgggtccaggacacagggctgtgtggagtgttggcagagcagccgctcagacacacatagagacccaggagtttcacatactctggccttgggatgccgggaaaggtgggagttccgtctatacattcccccaggaagggggctgaattcagctgctttaggagtttttaaaacattattttaggcagacagagaggaaaaggggtccttgggaagttttgtttctttttaaagcagttccagaaaagagtcttgtctagcaggaaagccctggcttttagagttctctggtaagctttgattggcaaatgctggccattagaaactgggtccgcccaaacatggggattcccgcccgcttctggcccttgcccctccctgtgtacacaccctgtgatattgggagtaatataatcctctcccctcctgaatattacgaacaatatcacaggggattttacaccttctgtgatattgggaataatagcatcctctcctccttttatattaggaacaatatcccagggggtgtgtacaccctttgcgatattgggactactatcatcctcttccccactggatattaggaacaatatcaccggggggtgtacatgtcctgcaattttggaagtagtatcatcctctcttgccttttatattacaaacattgttacaaagggatgtacatcctctgcgatattgaaagtaatatcatcgtctcccccattggatattatgaacaatattacaaggaggagtacacacagggtgttaattatattgggagtaatattatcctctccccccttaatattacaaacaatatcacaggagggtgtacaccccccatgatcttgggattaatataatcctctccctccttggatatgacaaacgatatcacaaagtgtgtgtacaccccatgcgatatga

SEQ ID NO: 1887768 - DNA, 4001 bp, Homo sapiens; identical to SEQ ID NO: 1560843

SEQ ID NO: 1887769 - DNA, 4001 bp, Homo sapiens
ttactgagcccctcaaaggagctataccattctatgaatgcaaggattgtggtaagtcctttattcatagcacagtcctcactaaacataaggagcttcatctggaagaagaagaagaagatgaagcagcagcagctgcagcagcagcagcccaggaagttgaagccaatgtccatgttccacaagtagttctgaggattcagggcttaaacgtagaggctgctgagccagaagtggaggctgccgagccagaagtggaggctgctgagccagaagtggaggctgctgagccaaacggagaggctgaagggccagatggagaggctgcagagcccattggagaggctggacagccaaatggagaggccgagcagccaaatggggatgctgatgagccagatggtgcaggtattgaagacccagaagaaagagctgaagagccagagggaaaagctgaagagccagagggagatgccgacgagcctgacggtgtgggaattgaagacccagaagaaggtgaagatcaagagattcaggtagaagaaccatactatgactgccatgaatgcacagaaaccttcacttccagcacagcattcagtgaacacctgaaaactcatgccagcatgatcatatttgagcctgcaaatgcctttggggagtgctcaggctacatcgaacgtgccagcaccagcacaggtggtgccaatcaagctgatgagaagtacttcaaatgtgacgtctgtgggcagctcttcaatgaccgcctgtccctcgccagacaccagaatacccacactggctgagggcatggggtaaaggttagaaaaccttcacctaggacttgacccttaccaaaccacagagaatccaaaccaatccatgataatgtcagtaggagacttaaccttagtgtgttacacacctgacttaacatctctaaactcagattgaaaagagaccgaatgtgcagattccacagtcttaagctttccccttcagatgtcagtgtctgcatgtgggaaagccatagcacacatcttacctttccaagtaatcagattgagaaaaccctatgagtattccagactacagagtttgcccaaatcaactgtaaatgacacttgtgtaacgtatatatagtgtttcatgaggtgtatataaaatagcaaattatgacagaacagtgatcacatatatttggatttatatgatatacagttacagtttactctgcagaggtaccttacctggtattctttgaattttttttttttttggaggaggaagagagcaacaaatttgattatatttttaagtgtcttagatcctgagaaagatttattgtgcattatttgaaccctgtcaatatctttttgagtaattgttttgtttcttacccttaaatagtcttgtgaagctgtaggcatgatagataacatggcttttactccttactgtttgaaaagataagtactttagcttctttctgcagccatttcatctgcgccaacactttggaacctaatactgtgtaaggctttacaatatacggattggctttttgtgacccagattgattggttgccacatgttatgtttgttgaagtggttctcatgcaaaaatattacacatttgtgttctgggttttttttttttttaaccaactcaatatgtgtttgatgatagtgaattgataaaacccgaagcttttccctgtaaatcttacatctttgcctttaaagaatgggttacaaccatcactagatcacagtagtgcctaatgaaggttgagaaccgtaggagaggctctcatgctgtaaataatgttgcaggctaataacctttcatcacttcctttgtgcgcttcctgccttaagtgacaagtagcaacatggcttgggtcccctgtgcagcatcagcttatgctgccacaagtcagtttgcaccctaggtgcccaggagctagtatccttagatctttctatcgctaacttaattctcttcgttatttatctgaccctctaactccatgtctaacttgcattaaaaaaaaaaaaattctttacagtcaacccaagcttaacatggactcaggttccccagcagccttaatttgttttgttaacatctgttccttctttttcagctctcctagagtatttctgagtgttgtgttcatctaatcttagtattcttttaattacaaattgacctcacagcttgaggtttcttgtgtcctattctgtggactacctgtgctcctttgcttcccctcccctcgcataataactatattaagaaattttttttggccttgagttggctggaaaaaaaatataaaatttaaaaaatttaaaaaaaaagatttgcaaaatgtaagtgtagatcatttgaacaagcaaaattaaagtacccactgggggaaatgtgtctgaatcttactcttctggatctgcaggattagggcttggaagtatgtcaaagatgcagggagtgtcaaagtttaggaagattgtagagctgagagcaagaagcagaaatgagtgagtcaaagaagggagtcctaatatatcaccagatctaggaggggagaggagacagacagaagaaaacaccagaggcaagaactgtagaaggccaggtttctgagaatgaattgagcggggtgtcctgagcagtttggaaaaggagtttttgatggtatggtgtaggtgagggctggctgcataggaaggactgaggttggaacggacatcgggaaagctgaggggcagtgaggtttactacatgggaaaaggactcttgaaacgagaatcagtgttgatgtcggggtgaactttgtgggtacattacttggtgttaacattgttggcagtggtagccccttttcagaaagcaacttgctgtaagtcagggtgtccgttccaaccttcagctagtgaaaaggtagtaacaaatggtaaacaagagaatgattgtttaaacctatctgtggacacttaatgcaactgtttaaaaatgataatcacgagttatgtagcaacgtggaaatatatttacagaacattaagtggagaaagcaggacacgaaagtatatttatactacagttataactcaacagttcatttatatgctgttcatttaacagttcatttaaacagttcattataactgtttaaaaatatatatgcttatagtcaaaagctgttgtggtgttgttgttgtaggcttatagttgagcattattttcttaaatttcttgaatgttctttatggtagtgttactaaaaagtttatgatcacattttcattgtgaacataatttgaactcattatcacacacttggaaaatacagaaaagtggaggaaaaaaaatcatatccccaccatccaaagacatatactctcctcttatcttgttcattcttgtttctgtgcacaggtttatgattataactgtgtcaaaatgtatattcaaaatagctgttacattacctttgtggaattatggttaaatactttcactttaattttttcaaatgttccctataataatgtcctgataacagtgtattatgtgtgtctccattggtgtgcataatacatacccagaggaaaaattagaaaataaagtaaattattttaaaaaattacctatattcccaacacctaacaactactgctaacatcttgatctgtttcctctatcttgtttcagtgcacacgcttgtgataacagtgttaaatatgtgtgcataaagtcttaaatgaaaagatgtggaaaataactaaaatagtgttgtcattgtgggaatttggttaaatattttgtctcaaattccttaaataatctttggtgttttggtaataaattttatgtatgtattttccattacaaatataatacatactcatacaaaactttggaaattcagtaaagaaaattcacacatattcccaacacccaacaacaattaactgttaacatcttgatc

SEQ ID NO: 1887770 - DNA, 4001 bp, Homo sapiens; identical to SEQ ID NO: 1560848

SEQ ID NO: 1887771 - DNA, 4001 bp, Homo sapiens; identical to SEQ ID NO: 1560859

SEQ ID NO: 1887772 - DNA, 4001 bp, Homo sapiens; identical to SEQ ID NO: 1560860

SEQ ID NO: 1887773 - DNA, 4001 bp, Homo sapiens; identical to SEQ ID NO: 1560891

SEQ ID NO: 1887774 - DNA, 4001 bp, Homo sapiens; identical to SEQ ID NO: 1560895

SEQ ID NO: 1887775 - DNA, 4001 bp, Homo sapiens; identical to SEQ ID NO: 1560901

SEQ ID NO: 1887776 - DNA, 4001 bp, Homo sapiens; identical to SEQ ID NO: 1560909

SEQ ID NO: 1887777 - DNA, 4001 bp, Homo sapiens
aaagcatatatcattcttttttttcctctctctctctttttttttagatgcagttttgctctctcacccaagctggagtgaagtgtcgtgatctctgctcactgcaacctccgccctccaggttcaagcaattctcctgtcccagcctcccgagtagctgggattacaggcgcctgccaccacgtccggctaatttttgtatttatagtagagacagggtttcaccatgttgaccaggctggtcctgagctcttgacctcaggtgatccacctgcctcggcctcccaaagtgctaggattacaggtgtgagccaccacgcccagcctatatagattattcttaaggactttgtcctgcgtaaccacagaccaggatcagacccgtgtagtttacacagatgcactgttgtctaataggaagcccatttccagttttcctctgttgtcccaatgacatctctcattgcgtttttgctttctgatcaggagaacatccggggtcaagcatgaactgcactgcgttgtctttatgaaagagaaacaaaaactcaggaccccaattcactgtgacagaaggaaaaaaaaaaaactggaagctgagtcatgcaagaaactgcctttccttttgttcctaagcagacagctacagagaaaaggttaagtatctccgtaggtagctactctatgttcatcttatctttctttaaaaaaatttttacttatttatttttttttgagagagtatcatactttgtctcccaagctggggcgcagtggcacgatcttggctcactgcgacctctgtctcccgggctcaagtcattctgtcacctcagcctcccgtgtagctgggactacaggcacccaccaccgcgcccagctaatttttgtggttttttttgtagagatgggttttgccatgttgtccatgctggtctcaagttcctgggctcatgagatcctcccacctcagcctttcaaagtgctgggattacaggtgtgagccaccacgcccggccatattcaccttatctttctcaaggtgccaatttactgagcgtgagatgaatacgtgattgattattcccctacctcctgctttctcttacaccatgtggattcagtaatgcgaccacaccctccttctttcaccgccagccagcttttccaccctaaatattgaagtcctcaaaattatctttggaaaaaggcacagaccacagactgtttctatgattgcatggttttttctatgtccttaaccttggcaaaataagcttctaagttgatggagacctgtctcagataccttttggtttacatctcatctctggactcccctttaatctaggagtgctccccacctgcctttcattttctttaatgtcattgaaagcaatggttcacttcttttttttttgtaaagtcttccaccacctggatgtgtctgactcagactatgattagagtagttttaatgatttttggcaatattcttctagctgggtgtcgtgtgtcacattcagaaggcctttaatgcctgtttgtcaaattcttggctaattaacaactgctgtgtgaggtaagccatggaggaggctgtgtgaatgtcctattccccaccacgagacccttctgtctccttgcacacattgtgcccaagctacttccagaaaatcctctgtgatcacggcaaatcacatgatgcttttggtccagctcccctgctgccctcctatccactcttctgcccattacaggaagcctttacacccaggcagctcagcgtccagagctggttccactcatccccttcaaggagaggaaaactgagccctgggaaggagaagtaaagctggagtcacaaagccaggaaatggtggccaggggcacgacccaggccttataaacaacctgcactcttccccctgcaacacagcctgctgaggacgctcatcagtcatctcagtggttcacttccaatctcttcatctgccaagcacccagcatgttccagcaaagacaaattattcctatggcaaactgacctgcatgcagtttacaggactttatgttataaagaggagggatctatggcacttaatgaaaagttacacttaaagattttcataggcctggctgggtgtggtgtctcatgcctgtaatcccagcactttgggaggcagaggtgggtggatcacctgaggtcaggagttcgagaccagcctggccaacatggtgaaaccctgtctctactaaaaatacaaaaattagctgggcatgatggcatgtgcctgtaatcccagctacttggctggggcaggagaatggcttgaacccagggggcggaggttgcagtgagctgagattgtgccattgcactccagcctgggcgacagagtgagactccatctcaaaaataaaagaaaggatctttacaggccttcgtgtactgaccagaggagcaaaaatgaataaaaggattacaacatgaggctgacattgctgtgcgcctatatccttgagtgctggtggccccatggattagatcaacaccttggaagctaatttgacactagaccaacaaagtcctttgacctggagtttcactttggcaaaaaataataaataaataaataaataaaatccctaaagtgtataaagagaaaggaagttgtgatatttggaaattgtgggctttgagtaaagaggctgatattctagacctgctatcatttcactattacctgaacaatttacttcctctttctagccttccatctcttcctgcaaaataaggcatgcttttcaatctcttcaccatacaggaaaaggaaatagaaatagaaataaataaagcccactccaggagcagtggctcacgcctgctgtcccaacactctgggaggctgaggcgggcggatcgcatgagctcaggagttccaggccagcctgggcaacatagagaaaccccgtccctaccaaaaatataaaaaagtagccaggcatggtggtgtgcacctgtagtcccaggtacttgggaggctgaggtggaatgatctcttgagcctgggaagtggaggttgcagtgagccaaaattgcatcattgcacttcagcctggatgatagagcaagaccccctgtcaaaaaagacaaagaaagaaagaaatagacaaagcccaatgctagcagtgctgtggaactaacatcttaggattggtgaagagagtggacatagcacttgtggaaagagccatatttcctgggggccataaggccacatatgccctgtgaagactgaccagggagtgttgggctgctacccacatttcatctatttgtcaggcaaaaatgctttaaagatcattccacttgactttcctttaaataaaaatcatgtgggaatggaatggaattgacgagtggcatggtgtatgctgaaatttttagaagctgccagattgctttccatagtggttgtaccatcttacattcccaccagcagcgtgagcgttccagtgcctccacatccttgccaacacttggcgtggtcactctttttaatcttagccattctaatagttctgtagtggttttattgtcttattttcttattgtggttttattctgcatgtttttattgagacagagcctcattacgttgcccaggctggagtacagtgggcccatcatagctcactttcttttcaggaaagtcttccctgatctttcagtctaggtcagaagcccagtaatatacagtcataaggccccatatttattctttttgtgattttttttgagatggatttttttttcactccagactggagtggaatggcacagtcttggctaaatgcaagctccacctcccgggttcaagccatccttgtgcctcagcctcccaaatagctgggattacaggcatgagccactatacccatctaatttttaaatttttggtagagacagggtattagcatgttgcccaggctggtct

SEQ ID NO: 1887778 - DNA, 4001 bp, Homo sapiens; identical to SEQ ID NO: 1560923

SEQ ID NO: 1887779 - DNA, 4001 bp, Homo sapiens; identical to SEQ ID NO: 1560930

SEQ ID NO: 1887780 - DNA, 4001 bp, Homo sapiens
gactgtccttcctctgcagcgagtgtctgcagggtctggatgtgggaaaggaattctgatctgttgaaatttgtctcctctgtgtgtgtcctgcactaaatgcccaaactccagcatgggacataatgcagagggggacacaggcacagtccaggcctgacaatcctgtgtgtgtgaagtagaagtgacccctgtcccccaacacccagggatcatgtggaatcacttacggtataaggtgaaggtgaaatttccagttactcctctagtcccatcacctcgctgtatgatgtgtaaggtgtaggatactccgtcctcccgggtgacattctggatcagcagggatgcattggaatatactgtttctcgtccactgtatgcaggcccatatgtaattctttgaccgtctactacatatgatgtaatgtaatggtagaggtcccttatttgccctttctaccacatgtaaccagtaagattctggggcaaattgtggacaagtagaagaacatccttcccctcggaaactttgggtggctgggcttcagtcgtgacttgggcaatggtaggtgggttccagaagtttaaaagtgatgctaggaggtggagagagcatcagtcaatattgagacctgtgtattggtgtgaaaacatggggccctgggtcctgagaaggtctcttcagtcctcagccttgacaacacagacacacacacacatacaaacacacacacacacacacaaaagcggcatgtgtgattgtgtgtgtgtatgtgtgtgtgtcctactgtcctactaggtcaaggtcagcagcatgacgcccattccttcaacacttctgaccttggcatttttctgtttggaatcctcttccccaggggtccgcatggccccctccacactgccctcaggtcctgcttacatcagggcatcgttagacttctttcctgatgcctgcttcagagaccctgggtcttccctttctgacctttccctgctctgctccctccagggttcttgtcaacacctgacctcacattctagatctctttgcatgtctgtcttcccccccatgacagcgtgagctccgtgaggacagggacttttgtgatcttggttgcaccccagtgcctggaacaggctgcagactcctgtagatgtgagagttctcagggccctccatgccctgggtgttttttttctcccaattgttgaggttttttgctgaggacagcatttcatgtcctgcttatatttttatttgaagtgtcatctgatatagttattattatcatttttcaaaatgtgctggcctctgatgattaatcaggaaaacagaacacttaagattttcctacctcttaccaattccggttcaatgtgactttcctattttgacccctgtccctctctggtgtattttcccctatccaggcatcaacagagcgttctttccttttttttttctttttttctttttttttttttttgtgacggattctcgtactgtcgcccgggctggcattcagtggcactatctcggctagctgcaacttctgcctcccgggttcaggtgattctcctgcctcagcctcccgagtggctaggattacaggagcacaccaccatacctggttaaatttttgtatttttagcagagacagggcttcactgtgttggccagactgatcgtgaactcctgatctcctgatccactcgcctcagcctcccaaagtgctggcttctttcattttttagaaccccatcctctccaggagaccccatccagtcactctgcttcctcctcctgtcctctcccaggaagttctctcctcacctgtgagcaggacccccttccatttgatgtgctgtgtgcagggaggggctgagaggggccccatggtctctgctgcttgtgtgttctcctctgtggagatgagcctaggttccagaaacttcctgagcacggctgtaggctgtgctgtccttcctccttctgcgctgagcctcttcctggggcaggagcacttctcaggctcatgggtggggttaggcccaggacacctctctgtcccctcctctctacatcctgcctccttgtccctccttctgtttttccttttgtctgtgtttcaggtccctgggaattgtggaggcctctgcctttttcagcagtgattctttcaccaaacctcaacacacactttgtgcagacacaaacacacacagacacacacccccccccccacacacacacagaagagacacacacagacccacagtcacacacataccctgcaggttgggcaagcagagtcctgggcctcagcctccaggtgtccccatgggtcttggttgcggtgcacattcatgccctttgccctctttcatccccatctggctctcccttgcagtgcaggaggctggagctgcaccaggtccctgtcacagtgatgccccattgtgctgtgtgtgagctgtgtgttgcctggtgagaaggacccttcctttctctaatcgtgtctagcttggctgcagcttccaaggatggacattgaggacctgggtgtcacagaggaaagtgtcctacctggaggtgtgcagggtgaatctctcatgcctcttgggaggagaggcctgtgctggttgctctttgggggctgtgattcccatagtcaaagggacagttcttggtcagtctatggctccctcgggtctggcggctgagctgaagctcaggatttctcatgttcttcctgaccatctttgatgtcctctcttctctgcccagctgattgtcctgtggtcaccacaccttccccctggtggtgcaggaggaagtggggagtcacccaggaaccccgtgggacatggctcattgagacgcaggagggggagcctgggacagggcaggggttagaggtggagagattcatcccaacttactccgtggccatgatgggctcagccctccatgtgctgacatacccaggggtctatcctgagggttttgacctggtcaagctgctctctgtagaggaggaagaggcagtggccagagagcctgtctggagggaccttgctcacacctgagagggtgtgtgggggtgagttgtgttctgggatcaaagagcaataacaccccccttctcccagcaagcacacaggagaggtctgtcttcccaagggacagctgggggtaggtggccacatcccggatggtgcctgtgtgtgaccatcacacgcactctgagcaccccggggtgcagcgggcaggcaggtcacagggtgcctgactgattcccggggaggctgtgggtcctcaggcagccgctgttctgtgtcggcgctaggcttggcctgggatgccccagagaagaggacagatggagcaggggcgggtatttagagagcagtgacagaaagagttgatgaggatggagggaggccacgaggggaaagcaccccgtgtagcgtcgcgtgcaccagtgctgccctgggagatgcctttagctgggcccagggaaggagcaggtgtgtggggaggagctacctgtagggggagtggtgttaggttggtggccaccaggtcagggaggagctgacagagtccgtgtggggagcatggagagagctgaggacttaggccgaagtgaccctgatgagggtggatcctgctgggctgtgggttccgctgagggaggttggcatcccctaggaaggctccagggtgggagggactctgtcgccctctggtggacagggagggaagtgtgaacggcagcaatcccaggccaggctgcatgttttattccacatggatctgcacacttcacactaggtcacacatatgttatgttacagctccatcacccttccagccccgtgagtcccagtctctgtggctctatgttcactgttctccctttcacaatcagatgtcccaaacgcagatttttgtcactttctgtgagttcgtgtttgtatgcagtaggcggcac

SEQ ID NO: 1887781 - DNA, 4001 bp, Homo sapiens
actccgtttggccacaatgcaggttggatttggggtttaaggctgggctccagtcagccctcgggagcccctgggcaggaaaacatggacaggcctacgggttcttctgccatttcactggccactcctccgtgtcctttgctggttgcttctcattgtcgtgactgctaaagggatgagtgtcccagtctctttgtgagctcatccagtctccattcaaacactgatgactcccgaatttctctctccaggctatgacatcaatatctatctacattgtttagtcaacatccgaaacagaagtagggactccgtctctaacctcctacagctgtgtctatttctcctctctaccttcactcgactccgcccacactggctcccttttattccttctactttcaggatttgtctttgctgttctgtcctctttgcacacttttccagccatctggaatggcaggttgctcacaggtcgttttcttgacttcccttgcttgctaactttacctcgctatggtcatatcccatcgccctgtggatgtgcgctagttaacacttagcacagcctgtgattatgtctctccccagtggaccgtggggcctgtgagggacgtggtctgattcggtcgtcgccgagcacagaactggacagggtactcataacagatttttgttgttgtttttaaagaaaagctaacatttgagtagtgactgcgccaagcagtcaagcacagcccctcgggctcgatccccataaccactctagggttaggtattacccacgtttaaggaacaaaaatcgagggaaaaatcttatacaactactagtaagtagtcattccattttagcagagcgaatgagcgaatccacggaaggccggggagcgacgtgagtggcgagaagcttggagtcgccagggacggcgggcggagcctgggcgccggggctaatgggcggagcctccagggacagctggccccgcccaggccgcgcggggcccgctgggagttggagtcccttgcccacctcgccacgtcaccgactgcaaaccttcagctgtctcaggctcgggtgcaatccgtaccctcagtgggttccctttcagtgggttcctttgtccccaggcccattattccgtcctcccctcttccctgatgtattttggcgcggtctcctggctctgcgggcccagggctccggatgaggtctcccgccgtcccgacccccgcaaggggccagcttggtgtcgccttcgttcttctgccaccccattcggtaggggctcccgttcccgccacgccccctgaagttgtggctcgcgcgtcttcccaggactcccccgcgccggagaggcccgcaggaccgccgagcccacactccgctcccgcccgggccccgctcccccgcgccgccttggtacgctccggccacgccccctcggacgcgcttggtacgcgccgggctcccccgctcgcctcagtggttcggccgcggcgaccccactccggcggcgcgtcccccgagcttggtacggctcagcccgtctcccccgaagccgcgcgcccgcgcccgcgcccctcagtcggtggagcccgcagccccccttgtggcccgcggcagctccccgcccgctcggcccgcgcccgccatggtccgtccgcgccgtgccccgtaccgctccggcgccgggggccccctcgggggtcgcggccgccctccgcggcccctcgtggtgcgcgccgtccgctcgcgctcctggcctgccagcccccgaggcccgcagcctccgcggatccgggcccgctcggcccctcccatggtgagccccccgccctttttccagagccttccacggccccgcccccccagcccctatcccgggctcacgcctttgtccgcagcccccgccgctccggggtgtcccctgtggcccgaagggtggtcccgcccggggccgggttcccccgtggagcacccggtggttcgcgccgcgctctcccctttgttgcgcgttcgggccggggtggggggttgggggacgggggcggggcgggctcatattactgctgactccgcggcccgatttaaacgcgggctgggggcggcagacaggcagccggcacgctcgcttgtttttcctattggagagttgctcgctctccgggcaggaaacctggaaatgggggcggttttgggggacagcggcgagggaggggcccgcgctttgtaccagcgcccccagatgtcgcacccgtgggcgttctcccctggcggccgctccgtgcccgtggagtgcgcacctagaatacgcgcccgcgcccacatgtgggatgctttgatggactgccgtgagcccagaccttaaacgtaaacattcagcttcgcaggtactttgggctgcacacgcttctccggacccaaaagatgcacatgcttttcagaaaccgtaaggtttacctggggctgtaaaaccgcacatcgcgactttgcaccgtgcacacgcttgccccgatgtgagatttcccctgggttcgcgctcgggtccgcttcttaaatacactgcctcagcggtgtggatggcacagagctgtggcagccctactgaaaccttaaacaggcttcctggggtcataaacatggataccgagacttagatcacctcccacaacttaaacgtaccccttcactccactgccttcgccccttcctgcagcattcgcatctagttgttcaaaagtgctttccgggtcctcagacatgcaccccaaggttttaaacctcagtgcaagtactagatgggcttccctgtgcaatagggatgtcaggcgcgcagttttgcacacgattgccaagatgtgagatttactttaggttgcaccttaaccgtcgtttttaaatatgatcgtcccatcttgatgtgctgctcctgctgtggaaggtatccctgggttttaggcaagcatatgtgttctttactatggctccagatcccagcatatttgaagtcctgagtcaacctgctctcctagacaagcagacattaagtatgtcgcttgggctcttaagtgcgttctcctgacttttacccatctttgtggcagtaaatgcatacgtgtcactgtatatgcggactagatacctcaggtcccagcgccataaacaacttgtatgttgtaagtgtaccctcatctcgaaagtcacctccagctgtgcgttttaactcatctcagatgctggatgtccggtatggtgcctgaagcccccggggcaacatccactctctgtccaactcattctaacgccaagatactcaggttttctatctgatcttctgacgactgcccaaaagtcagaatcacctgcgtgggtgaagaatcacctgcgtgggtggagaatcacctgcgtgggtggagagcaagtttgttcaggtttttctctttttaagcactcacaaaataaaattttttgtgtttgctagtattctggaaggaaagatctccttgtgcttcatagaaaatttggaaaatacctgtttgtaataagataaaaataaatcacccttataatttgttttcccccgcctggaggcgcctattacggggaaactctcgtgggtttcctgctgccaggctgtttgcggagctttcccttgtttgctttgagatgtttttggttttaaaaaacaataagtgaggtcaggcttggtggccctcgtctgtaatcccagcactttgggaggccgaggcgggcggatcacttgaggtcaggagttcgagaccagtctggccaacatggtgaaaccccatctctactaaaaaaaaaaaaaaaaaaaaaattagccgggcatgatggcgcggcttgcagtgagcgaggttgcagtgagctgagatcgcaccactgcactccagtctgggaaatgagtgaaactctgtctcaaaaaaaaaatagtaataaaaatagtggggagagtgcctgtgagtagcatttgtggcgttgc

SEQ ID NO: 1887782 - DNA, 4001 bp, Homo sapiens
tccatggaaaagcggccactgggcggctctgcagggctggagggtgggtcttggcgcggcggcagggaagccagcggagcggggagctgggcaggggttgggatcgtcctgcggctggaaggccctgcctggtaaccacgtgtcctggtcatgccttgccagttgaggcagactctgcaggtcctgtgcaccaggtgagggccgggacctgtctcaggccactggggagccatggggggctgtgagcagatgaggggcagggcctgttcccctgggactagagaatggacccagctggggctaacaggccaaggctcggagggagggatggcaggccccaggacagacagacaggtttcccaggagcctgggcccctcttcccaccccgttcccttccaacaggcagtgggacctggtggtgtcaactcaggcccagtccagatcgtcaacaacaagtttctggcatggagtggtgtcatggagtggcaggaggtgagcactcggcagcccagggacttgggacccccagatcctcacggactgtggctgggaggggacactggcattgggggtctccagccctgagggctcctctttgcctctcccccaaaagcccaggcctgagcccaacagtcggtccaagaggtggctgccatcccacgtctacgtgaaccagggggagatcctgtgagtgctgggctggggggtggaggcagcatccaggggagctggggcttcctgaccctcgtccctttgtgccccacaggaggaccgagcagtggccaaggaagctgtacatgcagctcatcccgcagcagctgctggtgaggggctggggccgggtgctggagcctgcacgcagtagctcttccagagggcggggctgggggcaagagcgcctccccaggtggcctgagctggctgtgagggagcggagctgagggtgctgaagcaggtgtggtgggtagctcctcaggcttggcttcaaggggtcccaggcagccagctggtggctgtgcagggactgagcggggcaggggcagccacgacctgcacctggggggctgccaagggatctgagagcggcttccacagcactccagggttgggctggttgagcggtggagatgacgtttcctgaggtagggaggacaggggagtctcagtttggtcctgggcccgggggactcagcgggctgggagccgggaggccgtggtgggagaagccagagctgggggtcccctcgcttccccgcagaccaccctagtgccgctgttccggaactcgcgcctggtccagttccacttcaccaaggacctggagacactgaagagcctgtgccggatcatggacaatggcttcgtgagtggtgccagcagacgcaggggaggggccggccagggcagagcgagcccggaccgctcacgggggcggacatgggagaggaacagagcaccatgtcccagaccagctggggagagagggtggctagtgtgggcgtgacttctgggggctctgtgctgtccccacggcactggatggggcactgaccctggttctgcgggggcctgctcctcctctgccacatcagggctgactcagcaccaactccgcgctctccactcctcagggacaggcgcccttgtcactcctggtttcccgggagcttgtgccacatcccaaaggcccattgctgggcagggagggctgtctgcccccagcaaggtcccagaatatttggcgattgtcttatctgggggaggctcagctgactcctcttctctctctcgggctcagtttctccatctgtgaggtggagaaggttggactttggtgtttctgagccctccccccgatgtccaccttccagctgggccatacttgggtaatatcccgaaactaccttaaaattaccttcgactcagtctgagtaaactgtccacgaagctgttcgtgggtggggggggcctgggtgtaggtgcttttacatgaaagcaatttcaagcattccctcaggggccgggtgcggtggctcacgcctgcaatcccagcactttgggaggccgaggcgggtggatcacctgaggtcaggagtttgagaccagcctggccaacatggtgaaaccccgtctctactaaaaatacaaaaattagccaggcatgatggccactcaggaggctgagtcacaagaatggcttgaacccgggaggcagaggttgcagtgagctgagatcatgccattgtactccagcctgggcgacaagagcgaaactcagtctcaaaaaaaaaaaaaaagtttcctcaaggaaacccagaaaggctccatgtacctcagcccttgcttgtgctgggccggccgctgcagatccctcgggctcctgagttgaagccatggccggttggctcaggtggctgtggtgaggtggccccagacacagcctggcctgcccaggagctctgaaatgcaggttcttgggcccttcccgacagagcctgttggcctttggcccacccattgctcttggccaccgtgtcatcccaataagggggcccacctccagggtgggtggggggtgtgaggacagagcagttaggctgtgcctggctcatggagcccacggcatgatgccgtggttggagggatgctggtccctgtggtgctgtctggtgacaccacgccctgtgcctgccaggccggctgcgtgcacttttcctacaaagcatcgtgtgagatccgcgtgcttatgctcctgtactcttcagagaagaaaatcttcattggcctcatcccccatgaccagggcaactttgtcaacggcatccggcgtgtcattgccaaccagcagcaggtcctgcagcggaacctggagcaggagcaacagcaacgaggggtgaggtggccggcctccagggctgctcagtctccctccacccccgctgcctgctcaccactggcctctgatttctcgccgtagatgggggggtagtggttaccccgggctgggcccctccaggagtcacagatgaggcccccgcagagactggtgagtggtgaccctgtcatgtacaggagggaccctggggcatgtggggggggtggggttgggaaagaagcagggcgaccttggccttggggagagcagagcagagggagaggcagcagtcccagcggtcctaggctgtcgggaaactgcagcccagcctcagggccatgggaggtggtatccaggcctgggtggggccaggcctctgctcacagggatgtggggtcagtgcttgggagcctgtggccagcagcccccactgcacccctgcccccaggtgacacgcttctgagcaggggcccctggggacttcaactgcccagcaacatggaggatggtgtcctgaggcctccaaggacggtccccacccctctacgtttccccaataaagccttttaaaaacctgcctgccttctctgctcactgcccgatgccttgcagccccctagctctaaggtggcccagcaggctggacagcccgggaactcactgggtctggctctcggctgtccacaccctcttcccccccgaatctccagacccgcaggccttgggttcaagttcagtgtcacagaacctgagctggattttgtcctcaggggtcacacctggccttgagccagcccctcggttgaggctcgtgggctcaccagctggctctcggggggccacacagcgccctccctgtgtgttccccggctaatgtctaaagtgctcatgccaggtcccagctggactcccctcggtagggccccaccttttgttacctgaaaatgtccttaaagcctcctccatgtaagaaactggcaggcctggagcccctcccccgtggggaccaccctccttccagcaaaatgccggccaagctcaaggagaaacagcgtttattgtggaggggagctgggcggggctcagccctcggagaactggcagtacagccgccccagcctcggc

SEQ ID NO: 1887783 - DNA, 4001 bp, Homo sapiens
tctctagctcctggcctcaagtgatcctcccacctcagcctcctcaaagggcatgtttttaggcataagccaccgcagccagccaaaacaaacaaacaaaaagtaacgtatactttgtgttaataattttgcatagtatattgaaaatttgccaagaaagtacattttagatactctcactacacacacagttaattatggaaggcaatggataggttaattgcttaactctcataattggccatgtgtggtgaaaatgcctgtaatcccagcactttgggaggccaaggtgggcgaatcacctgaggtcaggagttcgagatcagcctgaccaacatggagaaaccccgtctctactaaaaatacaaaaaaattagccaagcatggtggtgcatgcctgtaatcccagctattcgggaggctgaggcatgagaatcgcttgaacccgggaggcagaggctgcagtgagccgagagcacaccattgcacttcagcctgggcaacgacagcaaaactccgtctcaaaaaaaaaaaaaaaaactgtcataattattatttcactgggtacatgtgtatcaaaacacacgctgtacaccctaaatatataaaacaaacacatactgtattgtcaggtagtgataaatcctatcactacctgacaatacagcagtatgtgttttattttctatattacctatttttatattttacctatgtggcaaaatataggacaaaagaggggtagtggtaggaggtcctgttggagagcattggtatccagtaaggatttaaaagtatttatttaacaaagaatagcagaaagtggacggttgattcacacttggtgcaatctcggctcactgcaacctccacctcccaggttcaagcgattctcctgcctcaacctcctgagtagctgggtttacaggcaccagcgaccacgcccgactaatttttgtatttttagtagaaacggggtttcaccatgttggtcaggctggtctcgaactcctgacctcgtgatccgccagcctcggcctcccaaagtcctggaattacaggcgtgagccaccgcgcctggctgatctggttattttcaaaagattccatgagacgggtttcttcagtttacagaggaggaaactgaggcacagaaggataacccagtgagtcccaatatagagatggagactgcaaccgagaaaggggacccagcgctgaggtccccggaaatggtcatttatgggcttggggggcgaccagggcagcgcgcgctgacctatgacgtcatcgggacgttaagcatcgtagcattacctggacgtagccccatttctcttcccggacaggtcctctgatagtcgggtaggttctcaatcaagcctctcattagttatttggtctgtcaatccatttcattcctgcagtcttccgccccgccctcttgagctcgcccctgataggctggcgcgtccgtcacttcaaaaaggtccgcattccttccgcctttctccaggacaccgagggcgaggagggtggtaccaagcggcgcccaccctcagagcactacttccatctctgattggcttcgctgggtgcccgtcgctactccactcgccgctgataggccattcaaccgccgctctgcgcggcgccggctccgcccccgtcgggtgtttgtggtggggctgcggagtcgccgatcccgccggaagcgccaggacaatggggacccgggacgacgagtacgactacctattcaaaggtgcggccggtggggcacagacgggcgaagtcgtggcggcgaggcggcgggcagacgggccaaggccgcgctccaggccgctgggcccaggccggagcccggggcttggggcccggcgggtcaggcagccgggaaggccggagccgaccgggcagcatcagcttcgggctaggatgcgcggctatacggagccggaggcccggagagacctgggggacctaggacgcgccggggcggggccagagcctagagggggtggggcccggagcggtgggagaggctgttagggcggggcctccgcagggggtggagctttcccaagatttggcgggccgggctgggctgaaagcgtgattcgggatgggggcggggtttttaggggcggggctaaggcgtgatgggcgtgaccaataggtgggttgggcctgggcaaacggaggcggggctctcacgaggcttgtcctgattggggcagcgtgtttgggggtggggcccgggagaggcggggcaggcaatgggggctgggccgagatgagggcctgggggtgaggtgtgtggtggtgggagccttggattggggtgcaaagctgggattgagtggaaaggcacccgtgtgtgcagcaagaattccatctcttcactcagaactctcaacagtgctaagccagtacttgcacttttctgagcactttacccgaattaactaaaatcctcactgcagccctttgaggttgatactaaccagcctctctttttacacgttgggaaactgaggcccagagtgacaaagacacagtttataagtgttggaacccgattgagcccaggccacctgtaggccttaccacttaggaagcgtgtcttagggggcttgtggccagcatctgggactttgggttgttggaccaacttcttccaacacgtgcgcactgatggccggggccccagccagcctgctggagggtcttccccgcccgagggactgagggggctctaggagcatcacataaggcctaggtagatcaggcagccattgcccatttagggacagctggaggaagccggagtcccttgtttctcagctgagccttctgtgcccagctacactttggcctagtggtctgccctggttgctgggctccctggctgacaatggcagcccttgagggctaacccctggatccaaggtgccttcaccctgcggcctgctctatgagggcctgcgtcgcacatcagctgttggtatcctcacctcgctgagccgttcctccgagtgtgctctgtggcttgcaccaggcctagctgggccttgtgtctggtctcatccagcgtcttctgattgtggggaatgaggcagaggtctccccacctgggctgtccgtgtggcgaaagccttccggggggagggagaggaagtgcctctacaagggcctagagtcgtcctgtggcactgagggctctggcagctgcacacaggttgataatgtcactggtgggtgaggctctgtggtcagcaggtgcccggcccaaggtctcgcccctcgtggcaggaggaagctttggaagggttttggagactgggattctaaggggccgtctggagacagggggactaaactttgggtcctgctgatcgggtgccatctccactcagcccaccgtgaggcagctgctcccaggtcctggctgggcacccacccagacgtggcactgccagggcaggggtgttgctccccacatgccccatccaggtttctgtggttatcccctgcttgttatttttgcccttttgctgtgttaaatgacccagctccgagtgcttgctcaagtcatggttttgccctttagattatttccttgaagtgcgttcccagcagaacagttactgggtcaggagcaatggagaggctgtgtggttcccgggacttgtctgcagagactgcttcctggaaacactgatttagcttctgcggcatctggcatttggcgggcaggcggtgtggggtgggggggggcggtgcctgccctgctgccctccccacactggcctccttttactgagtctagcaggtgccctgctgaccttctcaagctagttggtagcaaaaatctaacccacaagttcagcttttcccaaactggtcatctgccgtctcaccttcacagctgtgcctcatcagaggacctcctctattctctttcaatatttttcttttcctttttcttttcttttttt

SEQ ID NO: 1887784 - DNA, 4001 bp, Homo sapiens; identical to SEQ ID NO: 1560965

SEQ ID NO: 1887785 - DNA, 4001 bp, Homo sapiens; identical to SEQ ID NO: 1560968

SEQ ID NO: 1887786 - DNA, 4001 bp, Homo sapiens; identical to SEQ ID NO: 1560977

SEQ ID NO: 1887787 - DNA, 4001 bp, Homo sapiens
ccgtgtttgccagggtggtctcgatctcctgacctcgtgatccgcccgcctcggcctcccaagtgctgggattacaggtgtcagccaccgcgcccggccacttttttttcgtttatgaggtggggtcttgctctgttgcccaggctggagtgcaatggtgccatcacagctcactgcagcctccaactccttggcttaagcaatcctcttgcctcagcctcccaagtagctgggaccacaggcacacaccaccgtgcccagctaatttttggtatttttcgtagagacaggatctcattatattgcccaggctggtcttgaacacctgggctgaaatgatcctcccgcctcagcctccaaaagtgctgagattacaggcatgagccaccgcgcctgaccttgtttggataacttgagatgtgtaaaatatattattaaaattaatttcacttgctcttttttagttgttttactgtggctaccagaacacttaaagttatgtttgttatttgcttatctttctcttggaaagctgtgttcttgacctgtgggccaaatccagctgcagcctatttttgtatggcttgtgagctaagaatggctcttacatttttaagtggttgaaaaaaaaacccaaaatatgaaaaccattctatcaaacgtggaaattacataacattcaaattccagtgtctgcagacaaagctttattggcacacagctgtgcccatccatttatgtatcatttacggctgcgttttctgtacaacagcagagtggagtagttactctacccaaaaaagctaaaaatactgactgttggcttttttacactttattttttagagacagggtctcacttagtcatccaacctggagcgcagggatacgatcatggctcactgcagcctccaactcctgggctcaagcagtcctcccacctcagcctcccaagtagctggaattacaggcatgcaccaacgtcctcagttaacttttaaaaacatttttttgggggggccgggcgcggtggctcatgcctgtaactccagcactttgggaggctgacgcgggtggatcacgaggtcaggagttcaataccaacctggccaagatgatcaaacctggtctccactaaaaatacaaaaaaaatagccgggtgtggtggcggaagcctgcaatcccagctattcaggaggctgaggcagagaattgcttgaacccaagaggcggaggttgcagtgagccgagatcacgccactgcactccagcctgggcgacagagtgagactgcgtctcaaaaaaaaaaaacaacacaaaacttttttttggcgggcttggtgggtcacacctgtaatcccagcactttgggaggcctaggcgggcaaatcacctaaagttaggagttcgagaccagcctgaccaacatggagaaaccgtctctactaaaaatataaaattagcctggagtggtggcgcatgcctgtaatcccagctacttgggaggctgaggcaggagaatggcttgaacccgggaggcgggggttgcagagagccgagatcgcgcttctgcgctccagcctgggcgacagagcgagaatccatctcaaacaaacaaccaaaaaacccaaaaaccatagtatcctcttgtgtacgcagccggcactcagtaagtgcccctgaagagcacttatttattcattgctgcgcgaagctacgggggcaggtggcacagcgccacgcaggagtagagactgccagattgttctaccgccaaccttagtggcgccacaggagatggacacgggaagactatgacgttactggccctgtgacgtcatggcaggatccgggcaagagaagccaaacgaggtgacgagctgtagactacagcaaaaatatggaacgcttcacgaatttgcgtgtcatccttgcgcaggggccatgctaatcttctctgtatcgttccaattttagtatatgtgctgccgaagcgagcacgactcaagggttactgtcacacctattttaagcccttcaatcaaatcatcttttggttaggataacttatggtcggtttcatatttagcataatttcctacagtggtatgttgcagaacaactttcgtgcttacgcttactttgatgtcttcgatcacgtaaaatcccatatcttatcgtaattttaccgccttatactggcctcatagccgcggtggattgtgggtgccaatatgcaaaagaggtggcccagatgcaggcccgccccctggagcggccgaggtagggggtgaggcctccgcgggcgccgctggcatcccagcgttctctgcgggcgcaggggggccgctcttgcccggcgtggcgactcgctagcgtcagcagcgccgcagccggacgagaaagcggaagatggcggcggcggccgggaggccgtgaggagagcggcggctgcgagggcggccgatggcggccgggaggcgccctcggacacttgcgggtcgttagggcgcgacgctgggaggcatgtcggagcacgtggagcccgcagctccggggcccgggcccaacggcggcggcggcggcccggcccccgcgcgcgggcctcgcacccccaatctcaaccccaaccccctcatcaacgtgcgcgaccggctcttccacgcgctgttcttcaagatggctgtcacctattcgcggctcttcccgcccgccttccgccgtctcttcgagttcttcgtgctgctcaaggtgaccgcggccccgacccccgacccttgaccccagcggctgtcccgacccccaagtctgctacctccgaccgcgacccctggccccgctggggacagcgagcgccaccctgcaccctgaggcctatacccggccctaccgattagggctctccctcgcgacctctgaccctgggattggccagggacaccgtctcgtgaccccatcccgcccggggacgtccacccgggaaggccggatcccgctgcactagaagccgctgttctctactctggaaacctcactgtcagctccctccagggcccatcctgtccccggcgaccgcctttcccaggtccccacctacccaggcttggagtccggtcctggcctgcgaggtagcacctcccgccctttgacccctgactgtgccgcctgagaccctcagttccgaggcctctctcccctcccaatgtgctggcccagaacccagcctgacgcaggtctccctcggaccaacccctgtcctggaagtcgactccccactcccctctctccctccttgtagcctttcagctgcgttccccgctcctgagcctcaggggaatgtgacttagctgaggtcacctcgctagggttagcggcaaagtcaccggcagcagcgtaccaccccatccccggcctcttcctccgctgggtccccactcccttcctgcttcaggagctcaggttgtgggtctgtcgcccgtgcctcccctatgaggcaccggcctccgcgtcttgggctctgtccccctcccgccctcctcagatggcagaggtctcagccgtgcaggacaggcatcggcctgactccctctgagaaggagtcttgcttgggtgacaagaggggctcagtagcagctgcagcccctcagaaaacaagctggccggggtcctgggccacctggcgaaatggggacgtggccgttttcgttctgcatcagaacaccgccgcgccggggcttgggggctgctgaagttgcgccgtgagctttttggatctagcctgcaaagaggggtccgatgctggcgggccaggctgcgatcgtgggcaagttcccagcctgacacaggttggtcaggagctggctgcttttttgggctcggcaagtggagctggaccttggccgtcctgcggacctgggtgtgggtcccagcctgctgccacttcacggaaggccccccagcctccagatccgtgcctccccaggccagagctcagcccatca

SEQ ID NO: 1887788 - DNA, 4001 bp, Homo sapiens
agtggccgttttccctgtgtgttatgtcttgtcttgacatcgtcctctcctcacgtgtctgtgcccaaatatccatctctatgatgcccgtcattaggttaggcccatgctaatcacctccttttaacctgattacctctgcaaagaccctgtttctaaataaggtcacattctgaggtagtgggagttaggaattcaacctctcttttttttttttttttttttttagacagggtctggctctgttgccctggctggagtgcagaggtacaatcccagctcactgcagccttgacctcccagactgaagtgatcctcccacttttgcctcctgagtaactgggcctacaggtgtgcatcaccccacccagctattttatttatttatttatttattttgagacagagtcttgctctgtcccccaggctggagtgcagtggcgcgatctcagctcactgcaacctccacctcttgggttcaagtgattctcctgcctcaacctctagagtagctaggactacaggcatgtgtcaccatgcccagctaatatttttgtatttttagtagagatgtggtttcaacatgttggccaggctagtctcgaactcctgttctcaggtgatctgcgtgcctcagcctcccaaagttcagggattacaggcctgaaccaccttgcccagcgcccctccctccccaaccctgctaatttttaatttttttttgtagagacggggtctggctatgtttcccaggctggtctcaaactcaagctgtcctcagaccttggcctcccaaagtactgggattacaggtgtgtgccaccacacccgggccgctaagaacgttaaatccctacctgctgcctgggaatggggattttctgtaaggtcactgcgtggccctcttggagaactgaaccctgatccagaaaaaacactctgatatttgggccattgttaacctgtaattttagaacagttttatatttgcagaattcttgcaaaaatcatgcagtgaggccgcggtggctcacgcctataatcccagcactttgggaggccggggtggaaggagggcttgaggcctggagtttgaaatcagcctgggcaacatagtgagaccccatcgctattaaaattttgaaaaaacaggctgggcgcggtggctcacgcctgtaatcccagcactttgggaggctgaggcaggcagatcaccaggtcaagagactgagaccatcctggccaacatggtgaaactccgtctctactaaaaatacaagaatttgttgggcatggtggtgcgcgcctgtagtcccagctactcgggaggctgaggcaggagaatcgcttgagcctggaaggcggaggttgcagtgagctgagatcgcgctactgcactccagcctgggccacagagcgagaccctgtctcaaaaaaaataaaaataaaaatagaagagcaccacatccattgcattaaactggcttttggaggaggaggtgggaatagggttggaagtaggaatactcaacggggtcggtgacttcgcttacagtttccccactcttggacattagaaaatggaagaaaggccgggcgcggtggctcacacctgtaatcccagtactctgggaggccgaggcgggcggatcaggaggtcagtagatagagaccaccctggccaacatggcgaaaccccgtctctaccaaaatacaaaaattagccgggcgtggtggcgcatgtttataatcccagctactcgggaggctgaggcaggagaatcgcttcaacccgggaggcggaggttgcaacaagctaagatcgcgccattgcattccagcctgggcaacagagcaagattccgtttctgggagggaaaatggaaaaaaaaaaaaaaatatggaacgcttcacgaatttgcgtgtcatccttgcgcaggggccatgctaatcttctctgtatcgttccaattttagtatatgtgctgccgaagcgagcacgaatattgagttccaccaccagctatttaaagcccctggaacaaatgtctgtacacataggccgacttctcttaaatgacctagagatttaacctctatttatattagcccaatgtgtaatgcaactaacgtagttattgactggagttgagaaagtgctcgttgttctaccaaatatagctacggtggctgctgggaattactggaaatggtcgtatgcaaatagccccggaggcggggcagagcctgagccgcaccgccctcccagaagtctttgggaggcggccccacgcctcaggcgactggttgttaccgaggaagatggcggcgccagacccgaggcgctagggaagatcgcaccgcggacgcccgctgagcttggcgcacgggccgaccaggtgagtgcggggctgcgggggcccggcgagggcggacggacccctgaccgtgtccacggacccgagggaacgcggcgcagccgtggcggggcctgcggggtcgggggcgtggccgggagcaaaggctgctgggtaggcggcctggggcgcggggcgcggggcgcggggcgcggggcgcggggcgcggggcgcggggcgcggggctcggggctcagggtttgcggcggaaacctgggggaggcctgaggcccgcggggctgggttcggggcggggcctaaggagagtttggggcgaggctgaaggcgcttggtgggacttcgggggcggggcctggagtgggtttggggtcgccggggtggagcctggggactggggggctgtagaggcagggcctggagactgcggggttatcggtgcggggcctggagagggaatagggtccctagggtggagactggggactgcggagttataggggtctggagagggtagggggtccctgggatggaccctggagattgggggttataggggcggggcctgaagaggctatggggtccctgggatgaagcctcgtatttgggggcaataggggaagggcctggagagtacgtggggtccccggggtggagtctggggactggggagttttaggggttgggcctggagagctaagggcgttggaggctggacctggagagtacatgggacccctacggtgaagcctgagaatttagggtgaggccgtgggctcaaggggtgaaatgaagtgtgggaagcaaagggggtcaggggtggggctgaaagacttttagaggcttgtggcggagccttgggggtctggggcaggccctgaagaagtagggagccggggttagggtttgaggagaacctggttgcgggtgattccaggctccctgggcttttgcctttgcgaagcgaaacagcccgtctggatgccaggcgcttagaaagcctcgaggaggtgccccctctgttccctgtgacactcagcccccgcctcggccacaggtgttccccaacacactcagccccgcctcggccacaggtgttccccgtcacactcagccccgcctcggccacaggtgttccccgtcacactcagcccccggctcggccacaggtgttccccatcacactcagccccgcctcggccacaggtgttccccgtcacactcagcccccgcctcggccacaggtgttccccgtcacactcagccccgcctcggccacaggtgttccccgtcacactcagccccgcctcggccacaggtgttccccgtcacactcagcccccgcctcggccacaggtgttccctgtcagtcagccccgcctcggccacaggtgttccccgtcacactcagccccgcctcggccacaggtgttccccgtcacactcagcccccgcctcggccacaggtgttccctgtcactcagccccgcctcggccacaggtgttccctgtcactcagccccgcctcggctacagggagccgccccaccgcttgcctgtctgcgggctcttccttcgggagagagctagtgtccacttgctgcccccatcatcactcacctgggc

SEQ ID NO: 1887789 - DNA, 4001 bp, Homo sapiens; identical to SEQ ID NO: 1887787

SEQ ID NO: 1887790 - DNA, 4001 bp, Homo sapiens; identical to SEQ ID NO: 1887788

SEQ ID NO: 1887791 - DNA, 4001 bp, Homo sapiens; identical to SEQ ID NO: 1887787

SEQ ID NO: 1887792 - DNA, 4001 bp, Homo sapiens; identical to SEQ ID NO: 1887788

SEQ ID NO: 1887793 - DNA, 4001 bp, Homo sapiens; identical to SEQ ID NO: 1887787

SEQ ID NO: 1887794 - DNA, 4001 bp, Homo sapiens; identical to SEQ ID NO: 1887788

SEQ ID NO: 1887795 - DNA, 4001 bp, Homo sapiens; identical to SEQ ID NO: 1887787

SEQ ID NO: 1887796 - DNA, 4001 bp, Homo sapiens; identical to SEQ ID NO: 1887788

SEQ ID NO: 1887797 - DNA, 4001 bp, Homo sapiens; identical to SEQ ID NO: 1560998

SEQ ID NO: 1887798 - DNA, 4001 bp, Homo sapiens; identical to SEQ ID NO: 1560999

SEQ ID NO: 1887799 - DNA, 4001 bp, Homo sapiens
gatactcattagacactccaagatatatggccactgtgggtatgttgagttaccccagacagttctgaaactcattaccaagaatagactaaagggctgctgtaaaggccctgtaatttctccaaagcaaaacttcaacccaaagacgtactagtagggtgtgtgtgcctagggaagataaaagaaggagaggcgcagacttttttttttttttaaagtggagttccagaggattattttctactttttttctcacataaaatgtttacagacttgggaggctgaggcagataaatcatctgaggtcaggagttcaagaccagcctggccaacaagacaaaacccactctctactcaaaatataaaaattagcagggcacagtggtggcagcctataatcccagctacttgggaggctgaggcaggagaatcacttgaacctgggaggcagaggcttcagtgagctgagatcatgccattgcactccagcatgggcaacaagaatgaaactctgtctccaataaaaaagtgtttacaaacagaaaacaaatctttaaaaacctgccatccactgcagtgtaaaaacatgattaacaattaaaacactgtgtctgaaatgcacaataaaggacaaatagttgatagtgttgtaaattggagagaggaagttgtttgtcctcatttcctacatttgagaatgtaggaaagaaagtggaaatttataattttactgcaagccttagttaagctaggggaagagggtagtggattagaagaagtcctgcttgccatacattaggaagtcacagaggaaaaccagtcctcctcctgtggagtgttaaagtaattaaaaagcaggaaattagactgaagtggccctagtgccctgtgttcataagtaaaaaatgtaaaacctaactcgagtttatatcttatagattactattttaggcggaaacaaaattcaatcataattgaattttattaaccaatcataaacctgcaattaacctctgattacataaccaggaaatttccacctgtatcatacaaataaggtgactacataactaaccaattcttgcatttggtttgccttctcacacgccctttataaaaccctttgctttatgtctctcaggtgggccacatactatggctggggtgctttccatttcaccaatcacggctcaaataacctctttaaggttttaaccctgactccctttaatttttaagagaagaggcttggcgcagtgcctcatgctcctcctaatcttagcactttggggggccaaggctggcggatcacttgaggccaggagttccagaccaccttccgccatggcgaaaccacttctctactagaaatacaaaaattagccaggcggggtggcgcaggtctgtaatcccagcttctcgggaggcggaggcacgagaatcaccagagcctgagaggcggaggttgccgtgaacacgcactgcacttcagcctgggcgacagagcaagactccgtctcaaacaaaatgtttaacaaaagacactgggagccccataggctgcagttcttcccacgcaaacaccgggtcgggattctgctcttatgacccgcctggcatccctgaacaacctgggaaatactcgaggctgcgtgaagagcttgctcagggggctccagacatggccccgcacggacggggctggacgctggggtcccggctgtgggcccagccgccatcttgcggccagaggggcctgggacggagctgcgccagcggggactcaggtcggcgacctgggagcggactgtggagaggccggttctgctggtttcacagcctggtctcccttctcgggttgcccaaccccgcacactcaccctttcccaggttccaggatgtcctggctgtgcgtctccctgcagatcataggtcaacagaggctgtaacagagtcaccaggggctaccgaggtggaggacgcggaacagaagagaccgatcccaaactctggcgggagcaagaggtaaagaccccgcggaatgtcggaagccacgccctcctctccggctgcgcccctgattgggcggttcccgcgccagcgccactgattggataaagcaacagcattctctccataccaccacccgccccgctcggcagtagggcattttacggacagtaaaggtaaggtaacatgcacagggaattacagctaattaagaagtaagctgagacatgaaatgcacttgctcttttccttacctgggtcttgtataatgcatcttatttgctacttaagggtaagaaagaacatttggacttttttttttttttttgagaccgagtttccgcctcattgccctggctcaagtgcagtggtgcgatcttggctcactgcaacctcctcctcccaggttcaaatgattttcttgcctcagcctcccgagtagctgggattacaggcgcatgccaccacgccctggtactttttgtatttttagtagagatgaggtttcaccatgttggccaggctgctctcgaactccagatcccaggtgttccgcccgcctcagcctcccaaagtgctgggattacgggcatgagccaccgcgccctgcccatttggacattttttaatcattttcataatgcgggaaagaccttcatcccatccctgagcgcctctctcaccatgccgtaccacactgctgaccacatcgtgggatggccattagaaataaggcgggggtgggaggcagcccaggctgagaatggtttagaaagaattatgttaccgggccgggcacggtggctcacgcctgtaatcccggcactttgggaggctgaggtgggctgatcacgaggtcaggagttcgagaccagcctgaccaacatggtgaaaccccgtctctactaaaaatacaaaaattaaccgggcgtggtggcgcacgcctataatcccagctactcaggaggctgaggcaggagaactgcttgcacccgggaggcagaggttgcagtgagcccaaattatgccactgcactccagcctgggcgatagagcaagactccatctcaaaaaaaaaaaaaaagaaagaaagaaagaaagaattacgttacccaaatttgttcatcttagaaaggctcctcagtcattccatgtgaagtggctattccagggtaattgtgccgtgactacgctgcatttcagtttgacttctcttttttaaaatcactggattactctcactaacggggatatttaattttctaattgaacatggccaactgtcctttgtggatgtcctgatttgatttgctagtttagaccctggaggtaggggtgaggaaatattgggtcacattagaataccttatctcacttagaagatatataggaatttcttaataatatctaacagttttctcaatacgcattatatttaacagtgatagtttacagggcaagaaggggacacagaggacacaaccttagaattttaatttggtcataagtgtttctgttttgttttgtttttggagacaaggtctcactctggtgctctggctggaatgcagtggcacaaccatagctcataatttggttgtaacagttctttaaaaaatattgttggctgggtttgatggctaacacctgtaatccaaacactttggaaagccatggtggaatgattgcttaagcccaggggttcaagaccagtctgggcaatgtagtgagactcagtctctacaaaaatttagaaaattggccttgtgtggagttgcctgcctatagtctcacctactcaagaggctgaggtagaaggatcactggaggttgaggctgcagtgacccatcattcagccactacacttcagcctggatgacagagtgagacctctatgtgtacacacacacacacatatatatatacacacacacaaacatatatatatatacacatatataccctatatatatgtgtatatatatataca

SEQ ID NO: 1887800 - DNA, 4001 bp, Homo sapiens
gggtgtagtggtgtgatcatggctcactgcaacctccacctcccaggggctcaggtgatgctcccacctcagtctcctgacaagctgggactataaacttatgtcaccatgcctggctaatttttgtatttttttgtagagactgggtttggcaacattacccaggctagtctcaaactcctgggctcaagaggtcccctccccccaactcagcttcccaaagtgctgggattacaggtgtgagtcactgcgtccaggctaagtaaaaatattgatcaatgaggccaggcatggtagctcatgcctgtaatcccagcattttaggagtctgagatggggggagatctcttgaggccgaggatcgcttgagcttgggagttcaagaccagtctgggcaacatggcaaaaccccatcctacaaaaaaaaaaaaaaacaaaaattagtcggatgatgtggtggggcacgcctgtagtcccagctacttgggaggctgaagagggaatatcccttgagccttggaggttgaggctacagtgagctgtgatcccaccactgcactccactgggccacagagaaagaaaaaaaaaaaaaacaagctgggcacagtggctcacgtctgtaatccaaccactttgggaggctgtggcgggcagatcacttgaggtccggagtttgagaccagcctggccaacatggtgaaaacccatgtctactaaaaatacaaaaattagccaggcatggtggcgcgagcctgtaatcccagctactcagaagactgaggtgagaggaagtcttgaacccgggaggccagaggctgcagtgaaccgaggtcacccaactgcacaaaacaaaagacgtcctggcgcggtggctcactcctgtaatcccagcacttcaggaggccgaggcgggtggatcacttgaggtaaggagatcgagaccagtctcgtcaatatggcgaaaccccgtgtctactaaaaatacaaaaattagccgggcgtgctggcgggcccctataatcccagctactcgggaggctgagttaggagaatcgcttgaatccgggaggcagaggttgcagtgagccgagatcgcgccactgccctccagcctgggcgacagagagagactatctcaaaaaaaaaaaaaaaaaaaaaaagaattccctaagctactccacaatgcccaaactacgtctcctgtcctatcaagacacagccccataccaaacacaagcaaccttttcgggagcctacggccgtccccctccagcctctccgagcctctcaagattcccatttgagataacttgctccaaaactcctcaaaacccgcattctctcagactggcccgcccgtgagctcccacaagagtgtaagctcccgtctgtccggttggccagtccagtctcccctgtgtgcagcacggaaccaggtcccataccctcgaatgaatgaactgcgtccctcacctcaccctttccacgtatccccagcccctcttatcccctaaccgcgatcaaaccccacaatcaccgctttcgggcctcggatttcctgagtttgaattctcccgctctctcaggactccccaacgcccccttcagagctcccatccttcggaacggccctcccaaccacttcccagaccttccagaaacatccccaatcaactcctccagtccccccaagagagagacgatcccagagcacagaattcccgcctcctcccttcaaatcacaccttcccgctccttccgggccgcaaacgcctcagaatagacgccccctccagaccctagcggcctcaagccgcgccggccctgaccgtttctgggcctccagtccccacaggcggatctgccggtcatactgtgccgcctcctcctcgctaatgccgccgccagcctcctccttctccaccatggcgccggctcttcctgcctcagctccggtcccgctcaagccaaccgcccgccggacccgcgcgccacctaccgccgccggcagcacgcccggagtgcttctgcgcatgcgcagaccctcccacgcctgcgcagtacctcgtccgcggagcctgggaccaaaagtacctcacgagactcaaaggcgatccggcgactgcatgtcacgtgacggagggtccaaccaatcctagccccaaaaatggcgcggcttaaggccccgagggcgttgcccacgtggtcacttatgtggcacttaaattctgcaaatatttaaggagtgcatactgagatcccagcaatagggatgttgtaaaataacggtattgagtgaaatcgacaaagccctgtcctcatggagtttacgatccagtgagaaaagcccgaagagaaataaatataaacccagcgatgataaatgctttggagaaaaataaagcaggacatggggctacagagtaacaggggtggtcagggaaggcttatcagaggtgacattgaactgtcaatttttttttttttttttcatagagatggggtccctctgttgcctaggctggtctccaactcctggcctcaagccatcctcccgcctctgcctcccaaagtgctgggattacaaccatgagccactgtgcccagcctttcatgtccctactatgtgttgcactttgtgcccagccctggacatacaataataataaaaatgaacacatctctgccttagaggcagtcacggcccagtgggagagaggagcgttaagaaaacaggaataggccaggcacggtgactcgcacctgtaatctcagcacttcggaaggccaaggcaggcagattactttaaatcaggagttggagaccagcctggctaatgtggtgaaatcccgtctttagtaaaaataaaaaaattagcagggcatggtggctcacacttgtagtcccagctacttggaaggctgaggtaggataattgcttgaatccgggaggcggaggttgtagtaagccaagatcatgcctctgcactccaacctgggtaacagagcaagactctgtaaaaaaaaaaaaaaaagaaagaaagaaagaaaggaaggaaggagggagggaaagagagagggaaaggaaggaaggaagggaaaaaaaaaaaaaaccagggatggccccaggtggtcaatatagggaaacgctatctctattaaaaatacaaaaattagcttggtgtggtggtactgagtctatagtcccagctacgtgggaggctgaggtggaaggatttctgatgttagaatcataggctttttggcagggcacagtggctcatgcctgtaatcccagcactttgggacgccagggagggcagatcacgaagtcaggagttcgagaccagcccggccaagatggtgaaacccccatctctactaatactaaaaaattagccgggcgtggtggcacacgcctgtagtctcagccaattgggaggctgaggccggagaatcgcttgaacctgggaggcagaggttgcagtgagccaagatcctgccactgcactccagcatggatgacagagactcccgtctaaaaaaaaaaaaaaaaaagccaccatgcccacctaacttttgtatttttagtagagacagggattgcaccatgttggccaggctggtctcgaactcctgaacttgtgatccacccgcctcggcctcccaaagtgcacggattacaggtgtgagccaccatgcctggcggaatcatagatttttatttaagaattgcttaggccggaggtggtggctcacgcctgtaatcccagcattttgggaggcagaggtgggcggatcacgaggtcaggagttcgagatcagcctggctaacatggtgaaaccttgtctctactaaaactacaaaaaattagccgggcgtggtggcaggcgcatgtagtcccagctactgaggaggctgaggcaagagaatagcatgaacctgggagatggagcttgcagtgagccgagttcgcgccactgcactccagcctgggc

SEQ ID NO: 1887801 - DNA, 4001 bp, Homo sapiens; identical to SEQ ID NO: 1561026

SEQ ID NO: 1887802 - DNA, 4001 bp, Homo sapiens
ccgcacagctccagccgcggggctcgctcaggagcggccgcgaggggacacccaggttgcgctgcaggaaagcccttgtctgagcagggcacggggctccacgacaaaaggacacgatttgacttaaattatgtttttcccttgatgatattttcattttctttaaaaggatgtagttttcttggaccgtggaccaagcttatttcttaaacagattccagcaaactcacaagtgtccttcagctctaggcctgctgtgtgtgtgtgtgtgtgtgtgtgtgtgtgtgtgtgtgtgtgtatgtgtgtgaatgtctggggccaaggccagggatgactgggctgtggtgagaacctgacccttcccagtcttccctgatttctcttgttcctgcagctacctagtttggggatggatggggaaggaggccccaggatgagtcctcacgtctctgcatcccactgggggctgcgtacaaatggatgaggaccccccccttgaaaggctcctgggtggtgtaggccctggatgggagagttggggggtagagctggatgtgggatctagatcagggatgcttggggcttttgatgccctgatatgggattgaggagggggcatggtcaatgctgaatgggtgtgaacagatgactggggatggggagcaagggagattctggtgggggaagcacgggaaggttgaggtcagagctggggaagctgaattccaggttgaggagaaggaggtgtggtcgcagattgcagggaacccagaggacttgagcagggaaccctctggccaggtgggtgtggcagttgacattggagttggggtgggggtggagtcgggggtggagctgcagatggcaggggcagtgttgaaggtggagggtgacggttgaggcagggaaggggcagtggggtggggataccccatcaggttgtcccatgcctctctgagagatgcctgcccttccacccgcccttctggggtcagtccctcccacttcccccttggctgaagaacacacacagaagctggatggatgcaggtgagtttattaggcagcattgtcccgcaggggacaggcctgggtggggaggtggggggcagccgttcccaggcttgccccaatcagcacagcaggagagagagtagaggcagcagcagggcgggagctagggagggtggggccctgggcccagattctcatggttgggacaggcagcctggacaggaacccgaggtgcctatggatggtgttacttcagtatcgtgtcggcacactggttgttgatttcttcctgtggggaggggtgggaggccgaagggaggggtcttctggggaaggagggataggatggggttgattgcggaggctgagcatcagagcgcggaggtccagcgccctgaggtcttgtccctgggcagctgcccgtgtgagaggtggttgcttggtgagaggtggggaggtatttgggtggagagagaggctctcagggaacagagtccctgctctcaaaggaggtcaagggctgtggggtggcgctggtggccgggccctgctgcactcaccagttgctgcacgacggcctctgtctcctcgggggtcattgtgtcggtcacgcagtccttgagtttagaggatgtgtttctttccggctccgtgaggtggtatctgttgacagtgtccatgtaggtgtccttgtccttggtcagaaactggttaatgaccgtcataagctgcgggcagagtttcctgggctctgcggggagagtaggagcgtgtgatcagggaggggtgggtgccccggggctgcagcgcggcccgggcttccctggcggggcctacctgcgagcagcggcagcagcaggagacccagcagcgccagggctcgggcggacgccacgcggttcggggtcggggccggtaggtatgcgggtcacactggggcagtgcggacgcaggtccctctggcatctcgggagacgcggtccttaaactccgtgtcctgggggcgggcccgggtggcgtggcttggctggacagggagggtaggggcggtagtggggtttgtggcactccagcgtagcaggttgcatctgcgggtccccgcccctgccccgcccccagcccctcccatggtgctggatccaggcagctgatgtgcaggcggggacccctggctgggcgcggtcctgggcgcgtccctgcgcggttcaggcttccatgcgcgctgagactccgctggctctgtggcctgccccgtcgtgtgtgcgtcacgaggcttgggtgcacgcgtttgagaatgggatatgtgtgtgtgagtggaatgcgctggtgggagcgtgtggggtgtgtgtgtgtggcacctgaggttggggtgttgactgtgtggggtgggggtctgtgattatatgaatatgagggtgtgattgcggctgggacagggcatgtggctgcctctgcctctgcatctgagagagacaagaagtgatgggagagtcttgtgtgggggccctgcggggcagggacaggggacccttcttcactttatgccatctggaggtgaaaagccagctaagtagcaggcttcatcctggagacagaggctgggagactgcagctgaaaggtgtgggttccgggagggctgcagggggctgagcagcagcgtcagggagcagagggccgccctccctccatcttccttccttctctggaccccagagcactgtgtccccctcccacccctacagctgcaggtggagccagctggaggggtctttagaaggaagggggtcctctgagggcagagagggccaggaggctccctgaggacctgaggcccctctgggcctcccagggctgggcctgtggtctgatctgctttgccctgggagagacgtgctcagtggtggggtttgtgtagctgtcactcagtcacctgcctgtgcccagccacacacctgtgactcccatgggccccacccaatacacatgtgggtcttcaagtgccgtgaggggaagttcctgcctgtgtcacatgcatccatcccacccaccacactgcaggttacaggactgccccacaagcgccaccatgccagcctgacgttacctggcacacaggtatcctcacctgcatgacatgatcagatcatgcactttctatgccagggccagtgccagggcaagcttgtatcttcagctttggggacactgtggggcgggtggtggctggaggccagggaagtcaccaggctggagagggttgatgtcagacatctcccgtgcaccactttgagccacctcagcctcacctgggactctggctggcactgggactagcagttccatgaaggtttagagcatctctaggcttaggaagggcctcccttgtcatcactgtggtccgggctgcatgccttgtgaccaagggctctggacagcagatgcagccagccagagtgtgggggtgaggggcctgggcacaggagggatgggaggccttccctgcacccccatggccaccatttcagagggaggacagcaattatttgggtttgtcctgtgagcggtggcagagagaaggccccagggcaggtctagggccagacaggcaccctctgctgcagcctcggggccaccaggcacgtgatggggccggtgtggggatgtcccctggccaaacacatgggtagggggtgctctggggtcagtgggtgggtccgggcgtttgcaagagccatgttaagatagacagtcctgaaggatggagggagggggcagaggggtcagagaatggatggatgggggagacggctcctgccgcttcctggcctctaagtgggggtgatgggtggtaggtgagtgcagtgggagctgcaaggctgagccagggaagtggaggcagcagagatgcagaccttgcctgaggctgactcgggactggggcttcttagaggccagggccctagagctcctggacagggagtttgca

SEQ ID NO: 1887803 - DNA, 4001 bp, Homo sapiens
tgccttctgggaccacctgacccaatgtggcaccccaagccagtcccacccgatcacatttccctgttgggtggtccttgtggttctcatcactattacaattttcttcagctttacaaccccctcttcaccttggatgtgaacttcagggaagcagcgccctcatctgccttgttcttcatggggtgtccggctctgggaaaaggcctgacctgtggcaggagacactccttccctggctgagtgcatgggtgatgactggggcagacagtgtgttaagtgaaggcaattctggggacaaaggcgagaagacgtggcctgagatgggggccagaaatgtctgacccgggaggaaatgacagctgagaggtaacaaaaagaatgagtggagaggagaaaggatatttggggcagtgagagtctgggagggagacagaggagtttagggcagtgtgggctgatgggcacaggtggccattgcccaggagatccaaggagcctgcagaaagggcctgaggtttggggagggaccttccccagagggagttggtggagccttgtcaatgcattgaaggccactgagacctccagcgaggacgaaatcaactgaagggtgaggtgggacagaggcaccatgcctgagagtggtgctcgttccctgtgacctcagtgtcccctgtcatggtcacatggccacagagacccccatggcttcatgcagattgcctggtcccaacagcccgaggagcagagctgagctgcaggtatttatggggacgctgaggcctgtgactcagccaggagggcaaggtttcccagcctccagcatctggagtcctggggggttgggtcaaggcggggtggggttgtgctgggggtagagagaaggaggacttgggtaggaggagatggaggattgtgttagggttgatttcctgggctcagaaaacacacatgtgtacacattcctgttgagttcttcctcagtcacgtaatttcgcaggcagaccctggtcacacactgcatatgtggtcacagccaaccccacagagacgccagaatacagagctgagctgcaggtgtttactggggattgtttgttgatggatagagtcaggccaggagtgtggggagccctgaggaagggagggccaggtgggttgcaggggtcctcagatcagaaggaagtatctacacatctttgcagtcatcgctgacaacgatcctagactgttgggaaagaaataaagtggggacctgggagcctctgtgaaagcatccccagacccatcattaacacccagtcccagaggtcagaggagctccttaaggtctgtccatttcttggggatcccaggctctggacaaacacagtgagtgtgggttgtgactcctgcttgagtgtgactctgcatgtgttggtgtaacacacgtgtatgcatgtgcctgtgcaggcatggagtgtgtgtgttgctgttaacagcatcctgtgtgagtgtgtgttgctgtgtgctcatcatcagtgcattgatgtagtgattgtggttccctgtgtccctgggcctctcccgggcaccaggggcagaggttctccccttgcagggttgcagtgtctgggttcagggctgaaaaaggtgaggcaggaggccctgttgaggcctgtgggcaccttcatctgatcatgagcatcctgggatgtggcttcctgctcaggatatggcaagcaggaagggaaggtaagtgcagggcataaggcctgggacttgtggctgtgcagcatgtgcaggttccccagggcacacttaccatattccaacaacagcaaggctttctgggaatgaaacagaggcaaagcattgctagaacttgaggaaggactcctctgtcagggggctggggttgtattgagcaagctcccgcttcaggtcctctgggtatgcaaaagcaactctcccaaacaacttatagaaatccaggcaggcatcccctgtggtggatgaggcaagataagaaagcagcagaggtcagaattcactgaaacctcccctggcaaatgtctgcaatagtgacagctgagaccctgggatggcaatgacggtgaaggagcagggccacctgtttcctctcagccctgcccgcttctttctcacccagctggacgctgcagattagagccagcagaagagcacaggcggtgggtgtcatcctcatgacagtggagtctggtcccagcaggcagaggcagggacttggccatggatgagctttatgtgtatctggacaactgacacacaccttcgtgtgtgtgtgtgtgtgtgtgtgtgtgtgtgtctgtgtctgtgtgtgtctgtgtgtgtctgtgtgtctgtgtatgcacataagtggggtcagggcaggtctgcagagagacccagggcccttggctatgctgttgggctggcagcatatcaggaactcagctcagcctgcagtgggaggggttgggtgttggcgtgacagtctctgtcctccctggagtgtcctgggattgggaacgggctgagcactgtggtgtgagcgcgcaggtctgtgtgtgcatgtgtgcccaggagcccctggggcatgaccctgtgtcttggcaaatgtatctgcacctggcatcccctagatcagaatctgccaccgagtccaggctcaacaaacatttgctaagtgagtttgtctgaatgtttgcctgtgcgtttattgtcccttcacgaagatatttctgggtagacatctgggttcgtgtgtgtgtttctccctgtgtctgtgttcatgagcgacacctgggcgtgcagtggaaggagcacaggctctggactgcacacttgggtgaggcactttcagctctgaagacacagaaactcagcttgctcatctgtgaaactgacagcaattcccacctcccaagctcgttgtgcttcagtttatataaagcccctcacacaggttctgcaaagtgggcactcagttaatagtacttattacatatgagcctttcataaaatattgtgttaattataaatgtttctacttgcatcaaattatgtgagtccatggaaatgtcctaagtgtccgtcagcacataaatgaatacatgtgatatattaatataatttggcgaaaaagatgaactttttctatatgtgtgacatggctgacacttaagaaataaaacgaagtgaaataagccagacgcaaaaggacaaatgtggtatggtttcacttatatgagttacccagaataagcaactaactctataaaacaaaagtagaagagaggttacaagggggcagggcagagcctggggagttatttcttgatgggtacagaatttttgtttgaaatgatgaaaaagttttggacatcgatagtggtgatggtggcacaacattgagaatttacttaatgccactgaactttacacttaaagttaaaatgatttaacttcatgctatgtatattttaccagagtaaaaaaaaaaaaacaaaaaaaaaaacaaaaaaacaaggctggggctgggcaaggtggcactcaccagtaatcccagtgctttgggaggctgaggcaggaggatctcttgaggccaaaagtttgagaccatcttgggcaacatagtgagaccctgcctctacaaacaaaatttttattttaggcactatctgttgactttccaatattgcagatgaagtggaagatttagttatctgtctgctcgtatgccacgttacccatcatcccaatagagttctgcaaaactttggttgttgatataatcacaaatcataaatcacaaatcacaaatcttctgttgttgatatactcataaaggtataaatgttattcacagatgggatatatagtacactgtaattacctttcctaccttcttgtacagccttttttctttttctgtagaaagtaattgtcttcttttttttttctgcttaactttctgacttcttgtggatatttag

SEQ ID NO: 1887804 - DNA, 4001 bp, Homo sapiens
tcccacctcaccctcttagtgtctcaccccatcctcctccacagaactggcctcccaccctaagcactaatcctcagcctgattcgggcccccaaagctggggtcatgctctcctccccttctgctgggggaccccatgctctgtgctacccccaggtgcagctcattcacttcaaccaggaactctacgggaatttcagcgctgcctcccgcggccccaatggcctggccattctcagcctctttgtcaacgtgagcggaggcgagattcagagggagggagcagttgggtgcctggaacccggggtctgagggaagcggggtgctgggaggcccagactcctgggtcctgggggaggagaaggttgagggcttggacttctgggctcctgtgtcctcacctcgtacccccacacaggttgccagtacctctaacccattcctcagtcgcctccttaaccgcgacaccatcactcgcatctcctacaagagtaagtccctggcgtgctgggggcagtggtcacacacgagggggttcaagagtgccatccctctttactctggcctgatattcccgcagatgatgcctactttcttcaagacctgagcctggagctcctgttccctgaatccttcggcttcatcacctatcagggctctctcagcaccccgccctgctccgagactgtcacctggatcctcattgaccgggccctcaatatcacctcccttcaggtgaccctctgtccgcaccgcccttcctaggcctgggtactccactcactggcctgggcatccccttgctcacctgccctccctctcctcatagactgaactcaagtaggtaagagggtcagaccaccttgggggtgggtggggctgagaacagaccccgcccacctgctcccaggggcggggtttcctgcgtgacgtcaccaagaccattcactattcactcccagtttcccaccctccttccactgcagatgcactccctgagactcctgagccagaatcctccatctcagatcttccagagcctcagcggtaacagccggcccctgcagcccttggcccacagggcactgaggggcaacagggacccccggcaccccgagaggcgctgccgaggccccaactaccgcctgcatggtatggtccagtctgcaccccctctaagtcttgggctaaccctcttatatgtgtctccccttggtgtctcagtgtgattcagtcccatcctccttcctgcgtctatatggtctagcctcgtgagctgtctctttttctctctttccctacatgtctatgtggtacagtccacctgccagccctaggccattgctagcccacgatttgtctttcctcttcactgctttgtaacttggtctataacccttgacccctgccttcctatggtccaattacctactgttctgtgcttcctattactgtgaatttccaaaatggtacaatttggatcctctctccctttccaagtcgtactaccttacgctgttccacaatctgatgctcccttcccccttactgagaatctacaaggtacaaccccttccctccacctctgcctccctgtggtttagcccaggaatctcacacacccccggcttcgcaacatggtacagtccacacccccccccccccatgaagaccttcaagtagttcagcctactgctgaatctggacgtcccgattcccccctcctattggcttcttgtggttcagcccagtgcttctcgacctagtacattctggttccccgctcgcagacttccgacggtagggcccagcgcggcgcagcccacgccccctgcacaccccccgccccttccatcctatactgacgccccctgccgttgttctctgtcttacagtggatggtgtcccccatggtcgctgagactccccttcgaggattgcacccgcccgtcctaagcctccccacaaggcgaggggagttacccctaaaacaaagctattaaagggacagaatacttcctgttttctcagtggtctgattctaggcgcggtggggaaacatttgggtattaaagaacagacttcttccggaaaccaatcttcctctttctaaacctccgctctcggtattttggcttcctgcttctcaaaaccatctttaggaccgcggcccctttaagcggcgccccttttccccccatcacccccctcgccatcaggcagcacgagcagagccatgtgcttccccctcccgcctgcctcattggcccaaactgggtcacggtcccgccccccagtaccgcctcccattgggcaaatgtaggtcagtgtcccgcctcccaccgaaaggcaaggcaacttcacgcgctgagcccctcacgcgccctcctgggccctggcggacccagaggccccattggctgtgcgtctcaaggtgtcggagacgattggtccgtgtttgcagccggagggaggcacgcggctgggttgcatgcccatagaggctggcggggctggacgcgccgggcggggacccggaggaggggcgcgcgctgtggcgtcgggtgttttggtttggatttttttttccgcgaaagaagtttgctttggccacgcctcaaggcggccgcctcctcctgccccctcctccgcccctccgcgcacacctctcggtgcagattgcaaagcgccttccgttgcgagagctgcagattttgcaagagccaggctcgcccaccttgtagaaggagcgccttgagtcccctctcaccctcggttgcaaagagccgaccgcttgatctggacaccccctcgcccagattgcatgatctcccgggaccctcttgagttgcacgtttctgcaccgaggacctcaaatccccgtcgctcctaggatttgcagcgttctggatactggagggttgcaggctacactcgcccgcccctgggcagacactcgtccaaaccactggagtgtgctggtgactggcaggccagcccttcgcctctccatgaacccgtgagcctgggggcaggtgccaggcgatggcgcggcctgtgagcgacaggaccccggcccctctgctgctgggcggcccggccgggacaccccctggcgggggagcgctgcttgggttgcggagccttctgcaggggaccagcaagcccaaagagccggccagctgtgagttctaacccccatctcacccacttcggacaccctacccccttagggactcaggtgccgtggggtggggtcccatagaaacctgcgtgcggggagtccatcttcccaaccttaatctactcaattactcaggtgtttaggcccctagatcccttagcgcccaggacccaaaagcgccggctctgaagcccgtccaccctaaggacccaggcaccaacgtccccaacgtcctccccgcttagttcacaagagtgtaggccccagcctcctcttccttttggtccgggagtctggacccctggggtcccagggagggggtgtgtcgggtgctcacacggtggtgacacgggcttgggcggggcgtcatggggtcacatggagtctagggatgagggatgtgccccaggaatagagccccttcctgccccttacagatggtgggggaggggaagggggtacagcgcgcaggggatgggggttgggtaattacagtgaaattacagagctgtcattttttctctcacctgcccaaccctccacctaccctgtccctgcccccctattcctgaacttccgtctctctttctctggttcgctgtctttctgtgtgtctattccttcccggcattctgtccccatctctgtgaatctgtccacctgtctctgccacccccgtctccattctttctgggtctctctcccactctgcgtctccgtccctttttctcccgtctctcctctccgaccccccgtcccctctttctctggatctccgccctgtgcctctcggactcggggtctcttctccatctct

SEQ ID NO: 1887805 - DNA, 4001 bp, Homo sapiens
acaggggaccggctctagacggaccagggacttccctctgggcaaagggaagcgtcctggagactgaggtgggggaagtgggtgggatagaagggcagggcagaatcacccactgagtcccagacacaaactgcatgagggtctacacaggtaagaaggtcagtccccgaggcctggggttcaagaccccctcagctctgggacactgagcccagcccctgtatccctctgccctcccaatggactccaggcccctgctaggcacactcacactgcacagagaggtccagggctcgctgctgggagccaagcctgttctccgctcggcaggtgtagcgccctgaatccccggcccttaccccacgcagctccagccccagggttctggggccccaggggtgggacgaggagaggactctgtcctgcaggacccagctcagcgtggcagggggctggctgtcagcagcacagaggagccgcaggaactggcctttctgaacttccagatatatgacgtttccctggagttccagggctgaagacagggaaagagagagggtgggggtggagagagagaatgggtgggagggggggctgcaaagaggaccacatcccctcacccccctgaagccttttcatccctaaagaggactggcccagccccagcccgaaggccctcagtacctgacgtgttgtcatgtgaaatgctgataataaggtctttgggggcatctgcaacaagattgtgagctggcttcagggagggacaatttgttcctcacacctggaaaaaactccctcagggaaaagaaagtgggaacatcccaggatggacaagtgacaaccagctccagggctcacacatgtggacagaggatcagacgccattcccatccccctcccagggctgagccggcatcctgggaccccacagcttcctctccctggatgctcctgagctgggagccactcactgtcctgctgggctcctccacctccccacccaccggggctgtctgcacgccccaccctcccaggccacactcacaggccacacggagtcggacggtcctctgtgcgctcacaccctttctggagaagtccacatggcaggtgaggtcggtgtcgtggtcctgggggctgggcgtgaagctgagcactgagaagtgggaggtgcttggtctggttcttctaggggagagggcagcccccgtccaggagaaagaaggggctggacatttcttgaaagcccagttaaacacacagatgaccgtcaccggctgcccgggctccagggtctcggggatgtagacatcaggcttctgagtcagggctggggcagagaccggggtggggaattcttgtgctgcaggggtccctgaaagccctctctgctcagcccatagcctgtccccagggtccctccccagtgtgacaggcaggggttcccaccccattccatacctgttacttttagaacaaattgttcacgaaactatgtctcacacggcttcctctctccacccgaaagaagtaccatgcctcatcctccctctgcgcgtctctgatcaccaaggagcagctccctttgccgggatccccagtgagctggaatcggtcccgggtgctcatttccacctctcgactctggttgttagtggccacaggagcacccgtctttgggctggtccatcctttgaaccagtagccataagcagcagtagactcgtcccagccatcccgggggtaggagaggttgcaagacacgatgacacacaggccctccggcaccggcacctgcctctgcacttgaagactgtaactgggatccttgttcagggaccctggggagatgcagaggctcagcggcagccccagcccctgcctgggacccccagccaccgacccactcacccgcccccagcacgggcagcagcaggggcagcagcagcatctctgggctctggggctgggcctgtcccgggaccatctggcttctgggccggcctggctgggaaggaaactcctccagcaggaagcctggtggaggggcagtgaccatccacagaggaggagcctcgggaaccgcaatgtcctgaaagctcgcctcccaacttctcctttcacaggggaagcagcagggcagagggcatgaggaccagccccaaaccaggaaggagccaccctggccagcctcggaggtgggcagtgctaggaggggactgtcaggggacacaggtgagtcatggctgcaggtgaagtgatggatgcagagtcccattcattcattcattcattctccaggcaaaatctactccatgcagtggggggaggcaaagaagacatgaccatccaatccctgcccacaggatcctcacctccacttatgtcaactcagggtccccgggctccccaaaggcactgagctcccctgcctgttgcggggccgtctctgcagcttacaccaggctcccagctccacagggagaagggggcaattacataagaccccagtgagctcagggggcctcatgcttggggtttagtgctctgaggttgccccctggacattcttaataatttatcttttgatctgtgttttgtaaatgaggtctaattggttcatggagcccccactggggaacttggaccttacatcacagggtcccagctctgtcacctccccaccctgatgcccagactagtttgtggctcagcccagccccaattaccacctgggcatagaggggggtctgggttgtgcagactcaagggcaggggccccagcacctcccgattccccaaggctgaggatttggacattaactagcaaatttaaaactccatgaacaaaatgtggtttattcatttaatggagtattattcacccctaaaaaagaattacattgtgacacctgccacagcatagatggtcctgacaacattatactaagtgaaagaaaccagacaatattgcatgattctgttcatctgatatgaccagaagaggcaaatgtagtgacaggaagtagatttgtcattttgggggcctggggggagggaagaatgggaagtgactgtttaatgggtacttggtttcttttttcaatgatggaaaagttctgcaactagatggagctgatggttgcacaagaatgtgaatgtacttagtgccaatgaaatgtacacttttttttttttttgagtctcactttgtcacccaggctgagtgcagtggcgcaatctcggctcactgcaacctctgcctcccagtttcaagcagttctcgtgcctcagcctcccgagtagcagggattacaggcatgcaccaccatgcccagctaattgtgcactttaaaatgatgaaagtaggccagatgcagtggctcatgcctgtaatcccagcactttgggaggctgaggcgggtggatcacctgaggtcaggagttcgagaccagcctagccaacatggcgaaaccccgtctctactaaaaatacaaaaattagcagggcatggtggcgctcacttgtagtcccagccactcaggagactgagacatgagaattgcttaaatccgggaggcagaggttgcagtgagccgagatccgtcactgcactccagcctgagcaagagagtgagactccatctcaaaaaaaataaataaataaaaaataaagtggttaaagtagtaggtttgtgttatgggtattttactacaatttatattatttttaattagcaaataataataattatatatgtttatggatacaatttgatgttttgctaaatggatttacaaaaacataacccaactttatgctacatataagaaagtcactcacttggaaagacatatacactgaaaacaaagagattgaaaaaaatattccatgcaaacagaaaccaaaaaagacaagcaggagtagttatacttactccagataaaacagacttaaaaggccaggtgcggtggctcacgtctataatcccagcac

SEQ ID NO: 1887806 - DNA, 4001 bp, Homo sapiens
agggcctgactcatgtcaggcccacctgcagttatctggaggcctaaccgtctccctgtgatgctgtgcttcaatggtcaggctcctagtccgccttcatgttccatcttgtacacctgactctgccttttagatagcagtagcaaaattagtgaaagtactaaaattctctgataagcagaaataatggtgtaagctgtctctctctctctgtctctctgcctcggctgccaggcagggaagggccccctgtccagtggacacgtgactcacgtgaccttatcagtcattggagatgactcacactctttaccatgccccttttgctttgtatccaataaataacagcgcagccaggcattcggggccactaccggtctccgtgtcctgatggtagtggtcccccggacccagctgtcttttatctctttgtcttgtgtctttatttctgcaactccctcgtctccaaacatgagagaaaaacctaccgaccctgtggggctggtccctacagacaggtgctcaggtgtccatgggagctgaggatagggagggtccctgagttggccaacaaggagtctctggttaccatggtgagtcaggatgaggcaggagcccagctcttccctgagctgaaggccctgctcctccagcctccagatggggactctgtcctacctgtgccgtcttctagggaggcttcaatcactgggttcattagaggatctaagccagcaagagaggatttctcatttagttggggtgggagtgagatgaaggtaggcgctcctctagaagcccgcagaaatggcaattgacagcttggatccttctagttcccctactcagcaaggcctccaagacacagccaccaagtggccccagtcctggacctcctctctcctggtcctctccccattcacaccctcaggcacccaggcatcctggccccatcactcacaggagacactgagctggatggttctctccgtggtcacaccagctccggggaacgtcacctgacagatgaggttggtgccgtggtcctgaggccgtgggatgatcgtgagcactgaggagtggagggtcctggggcccagggaggtgggggcagctgacatccaggagaagatggggggtgttccctgctcacagacccagggcacagagcaggtcaggttgctgggatggccagactttaggaactccgggatgaggatgtcgggcctgtgggtcagggctgttgtggacagaggtggggacgcaggatcaggagggggatccaaggtgcagccctgtgggaagctcaggctctggtccagttcctcccctgagcctgacgtgctttattcccatccccattccaggacatgagtcccatctgagcccttcccagtggcccccataaccttccccttgtgccactcctggagcccgtgccttacctgtcacatacacagagagcggggaatatttgtaactaaattttgttcttcctctcgccacccaaaagaagtatgaaccgttgtccctcctcctggcgtctctgatgctcagggagcagttgttccttgagggatcaccgaggaggtggaatcggccctgggtctccttctgcactttttgagttgagttgtttgtggccactggagtctcctggtctacactgaccccttcccggaaccagtggccataagcaggggtagaatctttccagccatactcgaggtagaagaccgaacagtgcacaaagatgcacagaccctcctgcaccgtcacggactctggcatctccagccggaatcttgcatcctgagcgagggccctgtggagacatgagggtcagatgggctcatccccacggcccctctccccagggccactcacctgcccacagcaggggcagcggcagcagcagcggcagcatctctgaggcagaggcttcctgggcttcctgtgtgagcagagaagagggctgtggggaggagcatgagatcttggcagttcacagaagaggaacctcaaacccacacgtggtcagaggtcatccgcctctgcacagagtggagggagactgcaaagccaagtgacctcagagacctgcccagaggggagcagagaaggagcagagaccacttcctgcctcccacctcgggtcttccgtccaatgccagagcctggaccaggacctctggggacatctgaagcatgggacacctgtgtctaaaaccctctcactctgaagtgtttttctgtgaaccattgtttacgtctgggaactggtcacttctggccccagacagtcacagcctcatcttgagccatgagatagtcgatcctgcaggatgtaggattctgtagggtctatgggagtgtctgggactgaaaaaatgaagagtggtcctaggtgcagtgaaggtgacagccattcattcattcaccaaatatatagtgagcatctgtatgtaggtggggatggagagaagaagagatagcactgacctggcccctacccttgagatggtccctatccatagcctcatgtccttagcacacacacactgtctggctttagagctgcggacactgatgagtttgccatgtgtcatggtagcatattgggtatttttaaagaaatgtgactatagaatttttccctgataaatagtatacagatttgcagtttcaatgacacctccaaaataagaaccatgcagcatcttcacgtaaaacataaagaaggacacatgttctatgaaccagtgtagaagaaactccttttcggttaatgctgcctctcagtgtagtgtgggcaggagcgatttttttaaggtcctcatcatagagattagcatttcctttcatgaaaaaatgtgcttctcacagttacatgtggcccaaagacaatattttccgataatatgaggggaatatacagacaaaattaaaatttcaggcttagtttttatgtttatgactatttgtctttcgtgagttgcttgtttgggcattaattgtcttgttggaatttagtttttcacaggtttcctaaccctcttgctccctcttgtttgtcagaagtctcagacaggccaggcgctgtggctcaagcctgtaattccagcactttgggaggctgaggcgggtggatcacgaggtcaggagatcgagaccatcctggctaacacagtgaaaccctgtctctactgaaaatacaaaaaaattagccgggtgtggtggcgggcacctgtagtcccagctactcaggaagctgaggcaggagaatggcatgaacccgggaggcagagcttgcagtgagccgagatcacaccaacgcactccagcctgggcaacagagctagattctgtctcaaaaaaaaaaaaaaaaaaaaaaaaaaaaaaaatctcagacaatgtgatcgtgctgatctcttatgtgagatttggaaatctgccttcctagatcctgtggcacagatttgactgtacccagctatcaccttcctgacaagcacacaactaaatgtcctggcccattctgtttatagataaaaataattttaggttcagtgacatgattttccatctcatctggcaaatcctcaaaatccagggcataataatatttggtaccatatattagtaaaatctttgtaacagtattatctaggtaaatgttcatttgtccttgctaatgtagacagccatttgcattcttaatatataaggaattgagtctttaataagtaacataataccttgtaagttcttctaaaaataagaatgtagcacataataggaatgcaataatttggtcttaatagtaaagcaaattatattgtatttatgggtcagaatgttaaatatgaagatgtgaatttcactggatgtatttagtgaactttattaggcataatttacatgaaataaaatgcacacacctgaaatgttcatttcagtgagttttgataagtgtatgcagccccgctgtgactgccaca

SEQ ID NO: 1887807 - DNA, 4001 bp, Homo sapiens; identical to SEQ ID NO: 1561064

SEQ ID NO: 1887808 - DNA, 4001 bp, Homo sapiens
catggctcactgcagcctcgactttccaggctcaagtgatcctcccacctcagcctccagagtagctgggactataagcacaagccaccaggtccagctaatgaaaaaattttttttgtagagacagagtctcactatgttacccaggctggtctcgaactcctgggctcaagcagtcttctcacctcagcctcccaaagtgctgggattgcagccgtgaaccaacacactcagcctgggaccactcttgaccacccctaatcccttcccagagttctggaaccagccctgtcctttcctattccatatttcggcatgttttaacagacctctctgagtggtctgtgctcccaacccttagcctccagactgattgccctttttccttctcacataaaaaagatatcgcccaagtttccaggtcgttaaatgcctctctcattcacgccacatatccactttctttttgcattgtcaatttttttttccttcccctttcttctgtttaaaagcccatgttagatggtcggaatgagccttgtctaggtcctgggccaggatttgccagtaaagcactgaataactgtggtcaagtattttccctcttcttatttcctcatgtgtaacatgagtgggttttactgctggagatgtaatgatccatttaagtacaaaattctgatttcttctttcttctctccatcagttttagagcatacatgtgatgactcgtcatgcacccattatattttctttttcttttcttttctttttttttttttgagacagagtctcgctgtgttgcccaggctggagtgcagtggcacgatcttggctcactgcaacctctgcctacggggttcaagtgattctcctgcctcagcctcccgagtagctgggactacaggcacgggccacgatgcccatctaatttttgtatttttggaagagacggggtttcaccatgttggccaggctggtcttgaactcctgacctcaagtgatccccggcctcagcctcccaaagtgctgggattacagacgtgagccactgcgcccagcctattttccttgaccaccatgtctctcaattttccttcaccatcatgtctctcaattttccttctgtctcttgttccaaagggctcaggatattctctgttctcagcacacttccatctgtgtatttccttagcagggtgtgagtgatgcaaaggtgttcggctttctaagggaagggctgacttactaatgactgacctatttatggtgaggaaaacgattttctagggaaagccaggataactaacaatgaaactgatagacacacatgggataactgtgtgagtaatgactgggtgccttgcaggggtgtaacttaccaagagaccgacttagcgggagcctaactaaccaatgaacagggcaggttctgaagggagtggattttctcatgaactgattttcaaagggactaaccgttgactcataagggcactgacctgattgtgaacccacgggccgcttgcttaccttcttggtagatggatgtcgccccagctgccctctggctgaccaggtgactgacgtggtggaggctgaggaacgctggctcctggcgaactccctgactatgcttaatctcaccgcctgactgttcagatttagcctctgtctgaccaaagggctctcaggggcctcactggcacgagagccgccctggtggcctaaccgacctgcggctgccccacggcccaaggatccgctgactgacgctgactggaagcccagttagtgcagtttcaatgaaggaacccaacaaccgccaacaactgccagggacccaacaaccgccagaacccaacaactgccagggacgccaacaggccaggcacagccttatgcgactagggatcctcagtcggctgcacagagatagcggcgtgaggggcgtgatagccgctgcaagacctgctagctcgcatccttaggtgagtgcatccacccgcagccaatcagcggctgcatgggcttactttacacagccaatcagaggctgcatgtgcttattttacaaccaatgagaggctgcatgggcttatgttgcagccaatcagaggctgcatgggcttattttatagccaatcagaggctgcatgagctttttctacagccaatcaatgaagcagaagcattgtgcccacaggcgtgtgcccctgggagctgatgcacggctgccagagtcaatcaggaactgcaactgcaactccctcctccaacctttgtgcccaattggatcttgagggcttgagccaatccgcagctgggggcggtgccagggtagtttgtgggccaattttcttcccagcaaggcctttccagcccgtgctgatgaaaccacactcctctccaaccctgaggactccgttcctcttgtttaaccctgtttattttttctcacactttatccgtcacgcactttcttacccattacactttcaaaatgacagaggcatttgagccagagcaactccgtcttgaataggagctgggtaaaatgaggctgagacctgctgggctgcattcccagagggctaaggcattctaagttacaggatgatataggcggtcagcacaagatacaggtcataaagaccttgctgataaaacaggttgcagtaaagaaaccagccaaggctgggctcggtgactcacgcctgtaatcccagcactttgggaggctgaggcgggcggattacctgaggtcaggagtttgagaccagcctgccaacatggcgaaaccctgtctactaaaaatacaaaaattagctgggcgtggtggcaggcacctgtaaccccagctacttgggaggttgaggcaggagaatcgcttgaatccgcgaggtggaagttgcagtgagccgagattgcaccactgcactccagcctgggcaacagagtgagactctgactcaaaaggaaaaaaaaaaaaaagaagccagccaaatcccaccaaaaccaagatgacaatgagagtgacctctggtaatcctcactgctacactcctaccagcaccatgacggttcacaaatgccatggcaacgtcaggaagttacactatatggtctaaaaaggggaggcatgaataattcaccctttctttagcatgtcatcaagaaataaccataaaaatgggcaaccagcagccctcggggctgctctatgaagtaatcattcttttattcttttactttcttaataaacttgcttccacgttactctatggaatagccctgaattctttcttgcaagagatacaagaatcctctcttggggtctggatcagaacccctttcctgtaacaaaaacactttgtgctaaatatcatttgctaatggtatttttgtttatggtttgactgtgccactagaatagaagctcactttttggttttgttttatggtacatgggagacctccactccctattacaacagtctccacctccctgttgcagcagttccccttccactgctgcaaagattcttctccctttattggaataattgttttggataaaatcttgccttatttatgtgcagattttttttttttaatgtgacagactgaaggatgatgttcaccctccagggccttactccatggcccttacagcttgcagagcaggccccagatagacttcccgagaggggacctgactttgttccctttaccctagctgtagcagactgactgctattacctaaacatctgccagcccctcttctacctccttgctttgtaattgatattatcagtacctaaactgcttttcctcgcttctctgcttgctggctcttgctttcccttcaaggtgcagttagaaaggggcttcctctgagaagccttttctaacttctttcccatccctgaaagctcttgcccttgggtccccagaccctaggccataattatccccataatttatatcctttgccatc

SEQ ID NO: 1887809 - DNA, 4001 bp, Homo sapiens
gaggccgaggagggtggattgcctgagctcaggtgttcaagaccagcctgggcaacatggtgaaaccctgtctctactaaaatacaaaaaattagccagtcgtggtggtgtgcgtctgtaatcccagccactcgggaggctgaggcaggagaattgctggaacccgggaggtggaggttgcagtgagctgagattgtgccactgcactccagcctgggcaacagagcaagactccatctcaaaaaaaaaaaaagaaaaagaaatataaatttcatgctgactcagtaagtggacacctatccaccacatctgaaataagcctcctgtagtaataaccacggcacaccctgccacagctctcgctatgttccaggccctgctctaagcatttgcatttttatttatcttttaaattttattactttatttttttttagagtcagagtctcactgtgttgcccaggctgcagtgcagtggtgccatcatagctcactgcagcctccaattcctgggctcaaacaatcctcccttctcagcctcctgagtaactgagactacaggcaacgcccccatatctgactatttttttttttcttgtagagatggcgggggggtctcactatgttgcccaggctggtcttgaacgcctggcgttgagtgatcctcccacgatggcctcccaaagtgctgagattacatacatgagccactgcccctggtcctatattaatttatttagccccgccaataaccttatgagttagatactataatcattatcctcattttatgaaacaggcctggtcaatcagagtgcagtaattcactcagcaatggagaagcgacccaggtctggccaatcagaggcatgggggcaggcatttgactcaaccgggaccaatgggagccaatctctgctgtttggtttgaactactgggaaaaggtgctctctcggtggcagctcctaggctagtggaacctgcatttgcagctgccaggagttacctttaccccaaaacaagaaaagcagcatcagagagagttatgatttttaacaaagtggaagcacctggacccagccgtgcttcaagctggattagagccaacacactcctttttggcttaagccagttccagctgggtttcttgctacttataaagaaaaggtttcaataaatggttcaagtggctggggatgggaggtcacttggggccaggagccaggcaaagtggcccaatcctgacaggggactcacagcgttcgctctgcatgtaccgggccaccccttccaaggtcagctcgtccagcagacgctccttctggctgcccaggctgagcgtctgggagaataagttccgcaggaagtccactgaccggaaagaagagagacagcggcaggacgggcattcagccaggggcatggatgtctccggcaccctggccccagccctggggttcccggcctccccacatctaaaggcacaaggcccggcccagccagcggcctccaggagcctgctctggcactggtacccaacccactgctacatactttggatgtcactcctgatggagttgaggaggtatcacccacacccctgccctgaaatccccccgccccccagaaccctgctccctgtccctccaggaagatactcactgtctgcttctccaccagcggctcctccctcagagtctgaatctgagtcctggaaggggtggggtggagtggccaggcccgagaggtgggattagggagggaggagagggggtgataccaggtttggggaaaaggctgtggcaggaaggtggcctgaggaagtgcggggtggtggagagactgcactggggctagctccagggctctgggacaggctgccggggttggagtcctggccatgcccgtccccaggagcaagacctcatgtgagtggctttgctttgcttttcttttttgagacagtgtctcgctctgttgcccaggctggagtgcactggtgcagtcacagcttgctgcagcctcaacctcccaagctcaagggatcctcccacctcagcctcccaagtagctgggaccacaggcacgtgccaccatgccaggctcattttttgtttgtttgtttgtttgctttgtagagacgaggtcttcctctgttgcccagggtggtcttgaactcctgggctcaagcaagtctcctgcctcggcctcccaaagtgctgggattacaggcgtgagccactgtgcctggtcgtgactttgattttctaagtcttggtgtccctcaccttggaaagggagcttgggtgctgggcgcagcaccaggggcgggggaagtgcttggtaagcgctggctgttgctgttattatcacagcctggggtcttcccttcgttcccgggtcccctggagcgtgggcctgctgtcccttcccagcagccctgggggcctctgaataatgtcccaagtcactctgggaatgattccaatgcaaagccttggccctcacttcaaggacctatgtgccccctgctcgaggcctcagacactctgcccacctctccagcaacctctgtctccttcctcgaagcctcccctcagcccagctccagactggcaggtctctgggactctgtccagggcctctctgctttctctttccactttcctggggttacctgtctcatccatgccaatgacctctgcctcgtcactcatgataccatctctctgccctcagatccggggttccctggcttcctggacaccttgccctaggtgccccccagcctctcactcctactatgtcccaaatggaccctggcatctcctccaagcccatcctcctcccaggcctcatctcaatgcgatcgtactgtcccccccatcagccagatgtttcctgcccccgcctccctcctcgccctcctgccacagcccttcagctccagagcatgtacgctgagcctcctaagggtctgtccaccaaccccctttccctccccggcgctccacctggtccagcctgtcctctcctccgggggtcctgccccagcctcctcccccagcctcccagcctcagtctccacctcccatccaccctgctgccctgcatgtgaggctgtctgggtcagctcgcccctctccacttcaaaggcccttctctctggcttctgcagtcttcccagacatctatggaattgccaggatgtccacaagggcagggactttgtctgggtgcccagcactgagaacagggtctggctcctggcaggagctccaggagctcctctaccttggaatgaatgcctgcttcaggctggaccacggctgggccctgcaatggatttcaccaaaatgcagttctgaccaagccaccacctcagacaactcccttccccggatactcactgctctgcgtccaagtctttttgaataagaccctcccttccgaacatacgacaatttaaaaaattgctttttaagactgtgcaactccggctgggcgtggtggctcatgcctgtaatcccaccactttgggaggctgaggcaggaaggttgcttgatgccaggagttcaagaccagcctgggcaacacagtgagactctgtctctatttaaaaagagagagaaaggctgagcacggtggctcacgcctgtaatcccaacactttgggaggctgaggtgggtggatcacgaggtcaggagatcgagaccatcctggccaacatgatgaaaccccgtgtctaataaaaatacaaaaaattagccaggcatggtggcacgtgtctgtagtcccagctattcaggaggctgaggcaggagaatcgcttgaacctgggaggtggaggttgcagtcagcgagatcaccccactgcactccagcctgggtgacagagcgagactccgtctcaaaaaaaaagagagagagaaagagagagtgagaatgagagagagagagagacagagagaaagagagattggacaacctctgcaaaa

SEQ ID NO: 1887810 - DNA, 4001 bp, Homo sapiens
tatggaatcaacttatgtgtccattagcagatgattggatgttaaaatatggtatacaagctgggtgcggtgatttccccctgtaatctcagcattttgggaggtcaaggaagtcgaattgcttgagtccaagagtttgaaaccaacctgggtaacatggcaaaaaccccacctccactaaaaaaacaaaaataattcgcgttttttttttttttacaggcaggcacctgtaatttcagctattcaggaggccaaggtgatggaatcagctgagcctgggaggcagaggttgcagtgagccgagatcatgccactgcacttcagcctgggaaattggagtgagatcttgtctcaaatatataaacatatatatataaaatatacatatatgctatctacacagatcacatagatatgctatctagatagcatatatatatcggatacaaatgccctataaatagcatatctatcatatatctagatagcatatatatatcacatagatatgctatctagacagcatatatatagcatatctataccaaatacatatgccctatatatagcatatctatcacatagatatgctatctaaatagcatatatatcacatagatatctatatatctataaatatcatatatatgctctctagataacatatatatcacatagatatcctatctacatggcacatatatatagcatatatgtcacatgtatgtgctctatatatagcagatatatatcacatatatatgccgtggaatacttagccataaaaaacagtgaaatcttgtcttctgcagcaacatggagggaactagaggccattatcttaagtgaaatgaccgagaaatagaaagtcaaaaaaactcatgttctcacttctaagtggaagctaaaccatgggtacacatggacaaacagagtggaaaacagacattggaggctcccgtaggtaggagggtgagaagggggtgagggatacagtactacctattggctacaatgtacactatttgggtgatgattgcactaaaagcctagtcttcaccactagaaaatatatccatgtagcaaaactgcacttgtatcccaaatccataaaaataaattttttttaaaggctcttaattcttctagggcaggtgagagatgcccaaaagttaaaaagtaaaccaataaatgaataagataatttcagatagcggtgagtgctatgaagacacgaaagaaaatgtaagactaagccaggcgtggtggctcacgcctgtaatgccagcactttgggaggccgaggcaggagaatcacgaggtcaggagttcgagaccagcctggccaacatggcgaaaccccgtctctactaaaaaaaaaaaatgcaaaaaattagctgggcatggtggtgggcgcctgtaagcccagctactcaggagactgaggcaggagaatctcttgaacccgagaggtgaagattgcagtgagcccagctcgcaccactgcactccagcccagacgacagtgcaagactctatgaaaaaaaaaaaaaagaaagaaagaaaaaagaaagagagagagagaaaagaaaagaaaagaaaacgtaagactaaaaaagctacttttgggtagtcaaggacaccaagaacccagccagcaaaaatctgaagactgcaaagtggccagccatgggagtattctacctgtgggaacagcaagtcccaagcttccaagtgtgaaggcgcttcggacaccctgaagctgaaagaagggccatgtgctggaaggtaacggcgagaggaatgcctggtgagaagcctggcccttcttccatgcttaccgacatgcgacagagtgtgacctggacagctggaagcgcttaggacatcctaaagctggaagaagggccatgttgctggaagcaacggcgagaaggatgctagatgggctctttctcaaggagtcaggatgccagtgcacttaggccaagttccaaagcaaagactccatcctactcctccccccacctctggaattccacctcccttgttgcgcccatcgctatggtgacgggcgctctcagtacactgtctctacaggccaggaaagagttgtgtgtctttggggtcccttccgctccgcctagggttcccggccaggccgagagaccaagcagggaccatgcgcgtgttggtacccccggctgagcgcagccaggacacacgcgttggggccccagcatggcgcgaggcagctcaggccatggcgaggaccgcgcacattctgaccgatcgctgcgggcaggaggcggtgaccatgtggcagcccaaggacagcgtgctggacccgaacgtggcccaccacctcggccgcgccgcctacatccagccctggcgcttccgcgtggagatgatcaaaggcggcggcaccttggagaagccgccgccaggcgagggcgtcacgctgtggaagggcaagatgaagccgcccgcctggtacgcccgcctgccgctacccttgcaccgcaaagcgcgcgccctgcagaccaccgaggtggtgcacgcgcacgcgcgtggagcgcgcctcaccgccgcccgcctcggccgcgcgcagcaccagattaacgggcgggtgcgacagctgctgcgccagcgcgaggtcaccgaccacaggctcagcgaagtgcgcaagggtctgcttattaaccagcagagcgtcaagctgcggggctacaggcccaagtctgagaaggtgggaccctcccccacgcccaaccccagcctaactgcaaagactgaggcctccgctatgcggtgtccagccccggggaaatcctttccatactttgggaggccaaggctggttgatcacctgaggtcaggaattcgagaccagcctgaccaacatggtgaaacccccgtctctactaaaaatacaaaattagccgggcctggtggcgcatgcctgtaatctcagctacttgggaggctgaggcaggagaatcacttgaacccgggaggcagaggttgcagtgagccgagatcgtgccattgcactccagcctgggcaacaagagcaaaactccatctcaaaaaaaaaaaaaaaaaatatttccatagagagaacacccaactccggtgaataagggcacaagaagatgagggccagatgcagtagctcacgcctgtaatcccagcactttgggaggccttggtgtgaggaccgcttgagtccaggccttccaggttgcagtgaactatgatggcaccactgtgttccagcctgggtgacaggtgagaacctgtctctaccaaaaattttaaaaagttagctgggtgtgttggtgcacacctgtaatcccagcattttgggatgccgatgcgggaggattgcttgaggccaggagttggagaccagcctgagcaacatagtgagaccccgtctctacaaaaaaaaaaaaatttttagtggcccagcatggtggcatgcacttatggtcccagctacttggaggctgaggcaggaggattgcttaagcccaagagtttgaggctgcagtaagctataatcaggccaaccgcaaaccagcatgggcaacacagtgagatcccatctctccaaaaattgcaggtaaattagccaagtttggtagtttgtgcttgtaatcccagcacttcaggacaccaaggcaggaggattgcttgaggccaggagtttgaggccagcctggacaacacagcaagaccctctctgcaccaaagtttaaaaaaaatagtcaggcatggtggtgcatgcctctagtcccagctacttaggaggctgaagcaggattgtttgagctcaggagttcaaggctgtagtgaaatatgatagggccactacacttcagcctaggagatagtgagactcaaaaacaaacaaacaaaaaaagatgatggatacaggcccaggaagagatgcctaagcccccaagacccaaagagtgagccctgcccaagga

SEQ ID NO: 1887811 - DNA, 4001 bp, Homo sapiens
tgagtggagtcctgcaacccccacccaacccctgtacaacgggggttccatttctgagacccccaaagtatggggcatcttagaggcccgccccacagctgagcatcatctcaaggaccttcccccatgacgggatcctcagaaagagccagggccagccgagcagaaccgaggggcagggcggggggcctggtgtggcctcctgcccgccatgcccctcacctggcaggggtggctgcccgacccagaagctccaggggcaccaggaacgggttcaggggacagatcccagctgcttgccaaggcgatttcagttcgctgtgctcggccttctcggtggctgggggggtctcctctggtgccttggagccagccccatccccttctgctgcaggccccaggctccctccagcgggaatgggctggggggctgtcaggcgtaggtacgtctccgtcatatgctcaaccagggctgtgcagggcaggagtggcagctcctctggaagtgacatgagcaggtcgaggaccacagcggactctagtgatggatggaggagaggggtaaggggacacccctgcctgctgccagggacccttgatccctctgctcctgccccctccctcacccttctcaccagctgctgagagctcggggctgcggccacttcgggagacagaggacaagtacttgtagatcttctcaaagtccacagcaaagtcttcttcagtggagggaccagccgacgactcagaaggtttctcaggggcagggtcaggagtcctgggtgcggagctaggtgcagcaggggcagagctaggtatttcaggggcggggtcttcctgtcctccaggggcgctcaggagcaaaggctttccacgggcctgcgtgggcttggggggcttggagtgcaggagggtgaccggttccgtggccgcgatggtgagcacctggcaggcagaacaatcagggaggaagaggagctgggaagtcttctcaccgtctacacattcccccatcctccctgccaccctaagatgctcctcagacaagagatggcctcagagccagggacactgaggctcgaggtgtccagtgactgacggagtccacagagctggcaaaagggcccaggacccaggttcacatgatttggcccatgtgaccctgtcctctgggacaccctgacctgcctgggggaatggcggtacctgcgagaaagccactgccagggcttcttccagtggccctgttatcttctcagccagatccgtccagacctgagtgaagccagaggtacagggtcagcccagggatcagcctgcaatggccccccaagccctgctcctcctggggatcccctaatcaggttatcccccgcaactcccacctacccaccagggacctgccctggacagcctcaccctgttcatctgcctcacctctatgggggctgggggctgtgcctcccggcgccttggtccctgaaggccacccggatgcactttctgaatggcctcccgggctacgcggcccttgagctgctggaggaagacccggatctagaaaggaaagaggcggcggaatgaggcttctatgagctcagggctgcagcagagaagccaaagcccaatcccttgtatgctctgggccccgctactgcgccttagtctcctgctggcccggtgttaggagtcccagtgactgccaaggcccctaccccacccagagcgtgaccagctacctaaggaagttgtaaggcccaggccagttccggctccttcacgcagccagggcccaaccctatgctgactactaccccgttcaactcccttcttcgtcccctcttctctattccctctcacttcaagctcgtatcctgtccaacagcatgcgttgcttttcgcccggactcggcagcatcttactcccagttcattccgcccgtttagccctcgcctcacccacgcattaccccgaggctcgccccgcctttaaagcttgccctcatcccgcccacgcccctcccacgccttactcccaaaacggccccgcccttaagtcttgctattaacccgcccacgccccgcccccaggctcgtcctgcccctcaaactcacccacccactctccaaacctcagcggcacgcacgccccgcccccggcatcgccccgcccctccgcttcacttatgccccgcccacgtctagctcccaagctcgccccgcccctaggtcttctcttcccgtccacgccccgcccctcaccccgcccaggctcacccactaacgccccgccactcagccccacgccacgcccccgctcgcttacattcctggccccgccccgctggctcctgccgcagccccgcccactctccgccccaccccagccccgcctccagcctggctccggtcccgagaaccgcatctcacctcagcctcgctccggccccgcagctcccgggccagctcggtggcgtccggctccggctggccctgccgcgcctgcaggagtcgcactagctgccgcttctcgcgagcgctccaggtcgcgggaccggtcacctcgcccagatagcgcgccggggccgctcgccgcctgggaggtggcttcatgccgctcagaaagaggcaggcgctgtaaggtcgcttctccgatgggcggagctacgggggccgccgaggtcagaaagaaccgcgcggaggcggacgcgcgtgggggcgtggcttcgcgtttggaggcccggggaaccgccccaatggaagtgaaggggagatcggcaccggaactggggcggggcgaaggagaccctcagcctgcactttatctcattcatgaagtggagacgacaccttggatcccatgccctccctctgttgctggactaactcatgaagctactactgtgtgctttgcttctcgcagaggggtgggttctggccgaaaggtcaagtccgaagatccagtcggtcaagagcctgggctctggggtcagacaggcctggggactttgggcaagtgatttagccttgccgagcctcagtttcctcctctgtagactggggctgatagtcccactcttgtctgtgtaaggtagagtggagctcgggcaggagggatttaaggagctctagactagactgacaatctaagaggagggcgaagtccagaccaggagggaactggagcagaggcagaaggtcgaagcggagctagggcagggtccgggcgggggtaatggagagcggagaaggcctggcttgagaaagatcgcaggaggcagatgggcaggtgtccgggtaaggagaggagggagggggaaggtttattttaaacttacgcttgtggggttgggtgccgctttttttttttttttagacagatttttgctcttgttgcccaggctgcagtgcaatggcgcgatctcggctcactgcaacctctgcctcctgggttcaagcgattctcctgcctcagcctccccagcagctgggattataagcacgcgccactacgccctgctaattctttttttgttactttttttagtagggacggggtttcaccatgtcggccacgctggtctggaactcctgacctcaagtgatccacccacctcggcctcccaatgtgctgggattacaggcgggagccaccgcgcccggccgggtgtcgctttctgtttgagacaaaacgccctacagtctcccatggcctgggagtgcacacgggtatatgggcatatgggccccgtccccaggctccacccctgtaagtcacgatttctcaggaataccccccaagtcctgctcccagctttctccccaagcctccccacctatcccccaccccgcacgttgcgcgctcactgactgcaccagaacttagccggtcagtccagaggtttattttgagcacaggtgggagggacagggggaggagagaagcgcaggggtcgtggcctcatcaggtccgaggtccagggaggcgggtccggtcc

SEQ ID NO: 1887812 - DNA, 4001 bp, Homo sapiens
ctcgtgatccgcccacctcgggctcccaaagtgctgggattccaggagtgagccaccgcgcccggccgtccactttgcttcttgcagaggctgatggtttgagtaatttccgagattcatagctcgagcgcgccctcttctgtctatgcagtgaagggcagctttttgcatccgcggctttttgttggcaaggaggaatgtgcagtggccagatttgtttcttccccttttgttgctgttgttgttgttgctgctgctgttattgttgttgttgttgtattttattttgtagcatcctaaagtgtcccctccttctatttcttatccttatccaggtagggtttagaaaagctaacttaaggggcaggggagagagagaaagagaggaagagaaaatgagaatgaatgacaatacatgaacccatgggtcaacctttatttcaaggcagcccaaaaggacggctctcccttctctttcactctcttctctaggtgtgaagctgatgcagcacaggcgagccccaaaattgaggcttagcccgggggggttcttggcttctcctagaaactaattcaagaagccgggcgcagtggctcacgcctgtaatcccagcactttgggaggctgaggcggatggatcacttgaggtaaggagttcgagactagcctggccaacatgctgaaaaccccatctctactaaatatacaaaaattacccgggcatggggacgggtgcctgtaatcccagctgttcaggaggctgaggcaggggaatcgcttgaacccgggaggcggaggttgcagtgaacagagatcgtgtcactgcactccagcctgggtgatagagtgcgactccgtctgaaaaagaaaaaaaaaaaaaaaagaattcaagggcacgccggtggttttagacggcaacctttaccgaagcctcagtgcacagccacagcagagggacacacacctgtatcttttctaagactgggagaattttacaattgcttgactaattgaacagtgcctcgaggatgttacactaggttataaataaattcctgccgtgtttagctgaggcacgaacacaatgcccactgacaattccactttcctcgagggccattctttatgaaaggctgtaggagttccacgacattgttgattcctggattctccaagtctctagaacttgagaactacttttgtgtatttttttaacctttaagttcagagtttctaatgtccgttttatactactataaaatggtactatgtattctttatttatggtactatttacactttattttatacagactctggctccacaaaaatgttaaaaattagccaggtgcagtggtgcacatctgcggccccagctactcaggaggctgaggcagaaggattgcttgagctcggatggtcagggctgcaatgagctatgatcacacatcacatcaatgcactccagcctgggcaacacagtgagaccctgtctctaaaagaatagaagaggctgggcgcggtggctcacgcctgtcatcctaccactttgggagaccaaggcgagtggatcatttgaggccaggtgttcaagaccagcctggtcaacatggcgaaaccccatctcttggcaggcgactgtaatcccagctactcaggaggcttagataggagactcccttgaaccgacgaggcggagtttgcagtgagcgaagatcacaccactgcactccagcctgggcaacagagcaaggctcggtctcccaaaaaaaaaaaaaaaaaagacacatggaagtaatttaaaaacacttaggaagatgtcatttcttcctatcaaggcgtcctccctttatgttttgtcgttatattgggaacgataaaaaaaagtccttttttccgacccatgtggaccaggctggcctcgaactcgtgccctggaacccccgcctccgtgagggcccgagggcaggcgcaaccggcctgagccacaatggctccgggtgtcggggctgtcctttagtccctttgatcttacgcagggtgagggagccaatcaccagaggctcccccctgtcgtcacccagtccccagggccagtgagggccctgcgttccatggcgccccctggagggaggaaggggaactgtatctgagagttcagtatctgacaataaggaaaaggcataggagatcagatggtgcctagtgttctggagagaagaaacaacggggttggggaatgcggagttgcagtttataatacaggcctcatgtataaggcagacctcatggggaaggtaacatctgtgcagagaaatggagatgagggctaggagccatgcaaatactggaacatgcttgccagcagaagtcgagaaacatggctggcgcagtggcccacacctgtaatcccaggactttgggaggccgaggcaggtagatcacgaggtcagcagttcgagaccagcctggccaacatggtgaaaccctgtctctactaaaaatacaaaaattagctgggtgtggtggcacacgcctgtaatcccagccacttgggagggtgaggtaggagaatcgcttgaacctgggaggtagaggttgcagtgatgcagtgagccgagaccacgccattgtactctagcctgggcgacagagcgagcctccatctcaaaaaaaaaaaaaaaaaaaaaaaagcaaaaacaaacaggcgagattcatttggataaaatagctgatttaacctaatatacctaaaacatcataattttaacataatcaatagaaacatttttgcaagattttatgttattttttaccatacgacgtcttggaaatcttggtttggaccagccatgttcaactgctcagtagccatgtgtggccagaggcggccgtattggacagtgcagatggtgcatgagggtgttcgggcagtgggaacagccagtacagaggcccagtgggggcacatgcctgctgctacgggaacagtgaggagccccgtgtggctgcagtggagtgagagggagaaggtgggagatgtaaccaacagtctcatcattcattcattaaatccttttttttctttttttgagactgagtttcgctcttgttgcccaggctggagtgcaatggtgccatctcggctcaccacaacctccacctcttgagttcaagcgattctcctgcctcagcctccgagtagctgggattacaggcatgcgccaccatgcccggctaattttgtatttttagtagagctggggtttctccctgttggtcaggctggtctcgaactcccgacctcaggtgatctgcccgccttgacctcccaaagtgctgtgattacaggcttgagccactgctcccagtccattgaatgtgtgtatatatagttgaataaagaagacaccggagtttgttctgtatcttctcctttcaaattctgtgccatttgaattttttcctattccttttatatatttttaattgacaaattgtacatatttatcatgtacatattgttttgaaatatgtatataccgtagaatggctaaatcaagatcattaacatatgtattactttacctattttccttttttcgttgtgtctctgccaggtttcggtatcagaatgactctgacctcatagaatgagttagagagcagttgctcctcctcaattgtgtggaataatttcagtaggattggtgccggcttttctttacacatctggtaggattcgactgtgaatccgtctagtctaaggttttttgtgctggttggtaggttttgtatgactaactcaattttggaactcatcgttggtttgttcagggtttccatttcttcctggttcaatcttgagaggttttatgtttccaggaatttctctatttcttctagttttctagtttgtgtgcatagaggcatgtggaatagtctcagggtttcttgtatatctgtgggtcagtggtaatgtcacctttgtcatttctga

SEQ ID NO: 1887813 - DNA, 4001 bp, Homo sapiens
cctcgtgatccgcccacctcgggctcccaaagtgctgggattccaggagtgagccgccgcgcccggccgtccactttgcttcttgcagaggctgatggtttgagtaattttcgagattcatagctcgagcgcgccctgttctgtctatgcagtgaagggcagctttttgcatccgcggctttttgttggcaaggaggaatgtgcagtggccagatttgtttcttccccttttgttgctgttgttgttgttgctgctgctgttattgttgttgttgttgtattttattgtgtagcatcctaaagtgtcccctccttctatttcttatccttatccaggtagggtgtagaaaagctaacttaaggggcaggggagagagagaaagagaggaagagaaaatgagaatgaatgacaatacatgaacccatgggtcaacctttatttcaaggcagcccaaaaggacggctctcccttctctttcactctcttctctaggtgtgaagctgatgcagcacaggcgagccccaaaattgaggcttagcccgggggggttcttggcttctcctagaaactaattcaagaagccgggcgcactggctcacgcctgtaatcccagcactttgggaggctgaggcggatggatcacttgaggtaaggagttcgagaccagcctggccaacatggtgaaaccccatctctactaaatatacaaaaattacccgggcatggggacgggtgcctgtaatcccagctgttcaggaggctgaggcaggggaatcgcttgaacccgggaggcggaggttgcagtgaacagagatcgtgtcactgcactccagcctgggtgatagagtgcgactccgtctgaaaaagaaaaaaaaaaaaaaaagaattcaagggcacgccggtggttttagacggcaacctttaccgaagcctcagtgcacagccacagcagagggacacacacctgtatcttttctaagactgggagaattttacaattgcttgactaattgaacagtgcctcgaggatgttacactaggttataaataaattcctgccgtgtttagctgaggcacgaacacaatgcccactgacaattccactttcctcgagggccattctttatgaaaggctgtaggagttccacgacattgttgattcctggattctccaagtctctagaacttgagaactacttttgtgtatttttttaacctttaagttcagagtttctaatgtccgttttatactactataaaatggtactatgtattctttatttatggtactatttacactttattttatacagactctggctccacaaaaatgttaaaaattagccaggtgcagtggtgcacatctgcggccccagctactcaggaggctgaggcagaaggattgcttgagctcggatggtcagggctgcaatgagctatgatcacacatcacatcaatgcactccagcctgggcaacacagtgagaccctgtctctaaaagaatagaagaggctgggcgcggtggctcacgcctgtcatcctaccactttgggagaccaaggcgagtggatcatttgaggccaggtgttcaagaccagcctggtcaacatggcgaaaccccatctcttggcaggcgactgtaatcccagctactcaggaggcttagataggagactcccttgaaccgacgaggcggaggttgcagtgagcgaagatcacaccactgcactccagcctgggcaacagggcaaggctcggtctcccaaaaaaaaaaaaaaaaaagacacatggaagtaatttaaaaacacttaggaagatgtcatttcttcctatcaaggcgtcctccctttatgttttgtcgttatattgggaacgataaaaaaaagtccttttttccgacccatgtggaccaggctggcctcgaactcgtgccctggaacccccgcctccgtgagggcccgagggcaggcgcaaccggcctgagccacaatggctccgggtgtcggggctgtcctttagtccctttgatcttacgcagggtgagggagccaatcaccagaggctcccccctgtcgtcacccagtccccagggccagtgagggccctgcgttccatggcgccccctggagggaggaaggggaactgtatctgagagttcagtatctgacaataaggaaaaggcataggagatcagatggtgcctagtgttctggagagaagaaacaacggggttggggaatgcggagttgcagtttataatacaggcctcatgtataaggcagacctcatggggaaggtaacatctgtgcagagaaatggagatgagggctaggagccatgcaaatactggaacatgcttgccagcagaagtcgagaaacatggctggcgcagtggcccacacctgtaatcccaggactttgggaggccgaggcaggtagatcacgaggtcagcagttcgagaccagcctggccaacatggtgaaaccctgtctctactaaaaatacaaaaattagctgggtgtggtggcacacgcctgtaatcccagccacttgggagggtgaggtaggagaatcgcttgaacctgggaggtagaggttgcagtgatgcagtgagccgagaccacgccattgtactctagcctgggcgacagagcgagcctccatctcaaaaaaaaaaaaaaaaaaaaaaagcaaaaacaaacaggcgagattcatttggataaaatagctgatttaacctaatatacctaaaacatcataattttaacataatcaatagaaacatttttgcaagattttatgttattttttaccatacgacgtcttggaaatgttggtttggaccagccatgttcaactgctcagtagccatgtgtggccagaggcggccgtattggacagtgcagatggtgcatgagggtgttcgggcagtgggaacagccagtacagaggcccagtgggggcacatgcctgctgctacgggaacagtgaggagccccgtgtggctgcagtggagtgagagggagaaggtgggagatgtaaccaacagtctcatcattcattcattaaatccttttttttctttttttgagactgagtttcgctcttgttgcccaggctggagtgcaatggtgccatctcggctcaccacaacctccacctcttgagttcaagcgattctcctgcctcagccttccgagtagctgggattacaggcatgcgccaccatgcccggctaattttgtatttttagtagagctggggtttctccctgttggtcaggctggtctcgaactcccgacctcaggtgatctgcccgccttgacctcccaaagtgctgtgattacaggcttgagccactgctcccagtccattgaatgtgtgtatatatagttgaataaagaagacaccggagtttgttctgtatcttctcctttcaaattctgtgccatttgaattttttcctattccttttatatatttttaattgacaaattgtacatatttatcatgtacatattgttttgaaatatgtatataccgtagaatggctaaatcaagatcattaacatatgtattactttacctattttccttttttcgttgtgtctctgccaggtttcggtatcagaatgactctgacctcatagaatgagttagagagcagttgctcctcctcaattgtgtggaataatttcagtaggattggtgccggcttttctttacacatctggtaggattcgactgtgaatccgtctagtctaaggttttttgtgctggttggtaggttttgtatgactaactcaattttggaactcatcgttggtttgttcagggtttccatttcttcctggttcaatcttgagaggttttatgtttccaggaatttctctatttcttctagttttctagtttgtgtgcatagaggcatgtggaatagtctcagggtttcttgtatatctgtgggtcagtggtaatgtcacctttgtcatttctga

SEQ ID NO: 1887814 - DNA, 4001 bp, Homo sapiens
ctcgtgatccgcccacctcgggctcccaaagtgctgggattccaggagtgagccgccgcgcccggccgtccactttgcttcttgcagaggctgatggcttgagtaatttccgagattcatagctcgagcgcgccctgttctgtctatgcagtgaagggcagctttttgcatccacggctttttgttgccaaggaggaatgtgcagtggccagatttgtttcttccccttttgttgctgttgttgttgttgctgctgctgttattgttgttgttgttgtattttattttgtagcatcctaaagtgtcccctccttctatttcttatccttatccaggtagggtgtagaaaagctaacttaaggggcaggggagagagagaaagagaggaagagaaaatgagaatgaatgacaatacatgaacccatgggtcaacctttatttcaaggcagcccaaaaggacggctctcccttctctttcactctcttctctaggtgtgaagctgatgcagcacaggcgagccccaaaattgaggcttagctcgggggggttcttggcttctcctagaaactaattcaagaagccgggcgcactggctcacgcctgtaatcccagcactttgggaggctgaggcggatggatcacttgaggtaaggagttcgagaccagcctggccaacatggtgaaaccccatctctactaaatatacaaaaattacccgggcatggggacgggtgcctgtaatcccagctgttcaggaggctgaggcaggggaatcgcttgaacccgggaggcggaggttgcagtgaacagagatcgtgtcactgcactccagcctgggtgatagagtgcgactccgtctgaaaaagaaaaaaaaaaaaaaaaagaattcaagggcacgccggtggttttagacggcaacctttaccgaagcctcagtgcacagccacagcagagggacacacacctgtatcttttctaagactgggagaattttacaattgcttgactaattgaacagtgcctcgaggatgttacactaggttataaataaattcctgccgtgtttagctgaggcacgaacacaatgcccactgacaattccactttcctcgagggccattctttatgaaaggctgtaggagttccacgacattgttgattcctggattctccaagtctctagaacttgagaactacttttgtgtatttttttaacctttaagttctgagtttctaatgtccgttttatactactataaaatggtactatgtattctttatttatggtactatttacactttattttatacagactctggctccacaaaaatgttaaaaattagccaggtgcagtggtgcacatctgcggccccagctactcaggaggctgaggcagaaggattgcttgagctcggatggtcagggctgcaatgagctatgatcacacatcacatcaatgcactccagcctgggcaacagagtgagacgctgtctctaaaagaatagaagaggctgggcgcggtggctcacgcctgtcatcctaccactttgggagaccaaggcgagtggatcatttgaggccaggtgttcaagaccagcctggtcaacatggcgaaaccccatctcttggcaggcgactgtaatcccagctactcaggaggcttagataggagactcccttgaaccgacgaggcggaggttgcagtgagcgaagatcacaccactgcactccagcctgggcaacagagcaaggctcggtctcccaaaaaaaaaaaaaaaaaaagacacatggaagtaatttaaaaacacttaggaagatgtcatttcttcctatcaaggcgtcctccctttacgttttgtcgttatattgggaacgataaaaaaaatccttttttccgacccatgtggaccaggctggcctcgaactcgtgccctggaacccccgcctccgtgagggcccgagggcaggcgcaaccggcctgagccacaatggctccgggtgtcggggctgtcctttagtccctttgatcttacgcagggtgagggagccaatcaccagaggctcccccctgtcgtcacccagtccccagggccagtgagggccctgcgttccatggcgccccctggagggaggaaggggaactgtatctgagagttcagtatctgacaataaggaaaaggcataggagatcagatggtgcctagtgttctggagagaagaaacaacggggttggggaatgcggagttgcactttataatacaggcctcatgtataaggcagacctcatggggaaggtaacatctgtgcagagaaatggagatgagggctaggagccatgcaaatactggaacatgcttgccagcagaagtcgagaaacatggccggcgcagtggcccacacctgtaatcccaggactttgggaggccgaggcaggtagatcacgaggtcagcagttcgagaccagcctggccaacatggtgaaaccctgtctctactaaaaatacaaaaattagctgggtgtggtggcacacgcctgtaatcccagccacttgggagggtgaggtaggagaatcgcttgaacctgggagatagaggttgcagtgatgcagtgagccgagaccacgccattgtactctagcctgggcgacagagcgagcctccatctcaaaaaaaaaaaaaaaaaaaaaaagcaaaaacaaacaggcgagattcatttggataaaatagctgatttaacctaatatacctaaaacatcataattttaacataatcaatagaaacatttttgcaagattttatgttattttttaccatacgacgtcttggaaatgttggtttggaccagccatgttcaactgctcagtagccatgtgtggccagaggcggccgtattggacagtgcagatggtgcatgagggtgttcgggcagtgggaacagccagtacagaggcccagtgggggcacatgcctgctgctacgggaacagtgaggagccccgtgtggctgcagtggagtgagagggagaaggtgggagatgtaaccaacagtctcatcattcattcattaaatccttttttttctttttttgagactgagtttcgctcttgttgcccaggctggagtgcaatggtgccatctcggctcaccacaacctccacctcttgagttcaagcgattctcctgcctcagccttccgagtagctgggattacaggcatgcgccaccatgcccggctaattttgtatttttagtagagctggggtttctccctgttggtcaggctggtctcgaactcccgacctcaggtgatctgcccgccttgacctcccaaagtgctgtgattacaggcttgagccactgctcccagtccattgaatgtgtgtatatatagttgaataaagaagacaccggagtttgttctgtatcttctcctttcaaattctgtgccatttgaattttttcctattccttttatatatttttaattgacaaattgtacatatttatcatgtacatattgttttgaaatatgtatataccgtagaatggctaaatcaagatcattaacatatgtattactttacctattttccttttttcgttgtgtctctgccaggtttcggtatcagaatgactctgacctcatagaatgagttagagagcagttgctcctcctcaattgtgtggaataatttcagtaggattggtgccggcttttctttacacatctggtaggattcgactgtgaatccgtctagtctaaggttttttgtgctggttggtaggttttgtatgactaactcaattttggaactcatcgttggtttgttcagggtttccatttcttcctggttcaatcttgagaggttttatgtttccaggaatttctctatttcttctagttttctagtttgtgtgcatagaggcatgtggaatagtctcagggtttcttgtatatctgtgggtcagtggtaatgtcacctttgtcatttctga

SEQ ID NO: 1887815 - DNA, 4001 bp, Homo sapiens
gagcaagactccatctcaaaagatatattgcagtaatttaaaaacaattctattggaaacgcaatttcttcctgtcgagacctccctttatgacggaacaatgaaaaaacaatttttttcaattttgtccaggttagcttcaaacacatagcatcgccagcttgtgcgccaggacaacctgacggagccaccgaagctggtggaaaagtgctctcaatttttccatttgaccttctggggagcgatgtagccaatcacgagaggctcacccctgacatcacccagtccccagggacagagagggccctgcgttccatggcgccccctggagggaggaaggggaactgtatctgagagttcagtatctgacaataaggaaaaggcatagtagatcagatggtgcctactgttctggagagaagaaacaacggggttggggaatgcggagttgcagtttataatacaggcctcatgtataaggcagacctcatggggaaggtaacatctgtgcagagaaatggagatgagggctaggagccatgcaaatactggaacatgcttgccagcagaagtcgagaaacatggccggcgcagtggcccacacctgtaatcccaggactttgggaggccgaggcaggtagatcacgaggtcagcagttcgagaccagcctggccaacatggtgaaaccctgtctctactaaatatacaaaaattacccgggcatggggacgggtgcctgtaatcccagctgttcaggaggctgaggcaggggaatcgcttgaacccgggaggcggaggttgcagtgaacagagatcgtgtcactgcactccagcctgggtgatagagtgcgactccgtctgaaaaagaaaaaaaaaaaaaaagaattcaagggcaggccggtggttttagacggcaacctttaccgaagcctcagtgcacagccacagcagagggacacacacctgtatcttttctaagactgggagaattttacaattgcttgactaattgaacagtgcctcgaggatgttacactaggttataaataaattcctgccgtgtttagctgaggcacgaacacaatgcccactgacaattccactttcctcgagggccattctttatgaaaggctgtaggagttccacgacattgttgattcctggattctccaagtctctagaacttgagaactacttttgtgtatttttttaacctttaagttcagagtttctaatgtccgttttatactactataaaatggtactatgtattctttattgatggtactatttacactttattttatacagactctggctccacaaaaaggttaaaaattagccaggtgcagtggtgcacatctgcggccgcagctactcaggaggctgaggcagaaggattgcttgagctcggatggtcagggctgcaatgagctatgatcacacatcacatcaatgcactccagcctgggcaacggagtgagaccctgtctctaaaagaatagaagaggctgggcgcggtggctcacgcctgtcatcctaccactttgggagaccaaggcgagtggatcatttgaggccaggtgttcaagaccagcctggtcaacatggcgaaaccccatctcttggcaggcgactgtaatcccagctactcaggaggctgagataggagactcccttgaaccgacgaggcggaggttgcagtgagcgaagatcacaccactgcactccagcctgggcaacagagcaaggctcggtctcccaaaaaaaaaaaaaaaaaaagacacatggaagtaatttaaaaacacttaggaagatgtcatttcttcctatcaaggcgtcctccctttatgttttgtcgttatattgggaacgataaaaaaaatccttttttccgacccatgtggaccaggctggcctcgaactcgtgccctggaacccccgcctccgtgagggcccgagggcaggcgcaaccggcctgagccacaatggctccgggtgtcggggctgtcctttagtccctttgatcttacgcagggtgagggagccaatcaccagaggctcccccctgtcgtcacccagtccccagggccagtgagggccctgcgttccatggcgccccctggagggaggaaggggaactgtatctgagagttcagtatctgacaataaggaaaaggcatagtagatcagatggtgcctagtgttctggggagaagaaacaacggggttggggaatgcggagttgcagtttataatacaggcctcatgtataaggcagacctcatggggaaggtaacatctgtgcagagaaatggagatgagggctaggagccatgcaaatactggaacatgcttgccagcagaagtcgagaaacatggccggcgcagtggcccacacctgtaatcccaggactttgggaggccgaggcaggtagatcacgaggtcagcagttcgagaccagcccggccaacatggtgaaaccctgtctctactaaaaatacaaaaattagctgggtgtggtggcacacgcctgtaatcccagccacttgggagggtgaggtaggagaatcgcttgaacctgggaggtagaggttgcagtgatgcagtgagccgagaccacgccattgtactctcgcctgggcgacagagcgagactccatctcaaaaaaaaaaaaaaaaaaagcaaaaacaaacaggtgagattcattttgataaaatagctgatttaacctaatatacctaaaacatcataattttaacataatcaatagaaacatttttgcaagattttatgttattttttaccatacgacgtcttggaaatcttggtttggaccagccatgttcaactgctcagtagccatgtgtggccagaggcggccgtattggacagtgcagatggtgcatgagggtgttcgggcagtgggaacagccagtacagaggccctgtgggggcacatgcctgctgctacgggaacagtgaggagccccgtgtggctgcagtggagtgagagggagaaggtgggagatgtaaccaacagtctcatcattcattcattaaatccttttttttctttttttgagactgagtttcgctcttgttgcccaggctggagtgcaatggtgccatctcggctcaccacaacctccacctcttgagttcaagcgattctcctgcctcagccttccgagtagctgggattacaggcatgcgccaccatgcccggctaattttgtatttttagtagagctggggtttctccctgttggtcaggctggtctcgaactcccgacctcaggtgatctgcccgccttgacctcccaaagtgctgtgattacaggcttgagccactgctcccagtccattgaatgtgtgtatatatagttgaataaagaagacaccggagtttgttctgtatcttctcctttcaaattctgtgccatttgaattttttcctattccttttatatatttttaattgacaaattgtacatatttatcatgtacatattgttttgaaatatgtatataccgtagaatggctaaatcaagatcattaacatatgtattactttacctattttccttttttcgttgtgtctctgccaggtttcggtatcagaatgactctgacctcatagaatgagttagagagcagttgctcctcctcaattgtgtggaataatttcagtaggattggtgccggcttttctttacacatctggtaggattcgactgtgaatccgtctagtctaaggttttttgtgctggttggtaggttttgtatgactaactcaattttggaactcatcgttggtttgttcagggtttccatttcttcctggttcaatcttgagaggttttatgtttccaggaatttctctatttcttctagttttctagtttgtgtgcatagacgcatgtggaatagtctcagggtttcttgtatatctctgggtcagtggaaatgtcacctttgtcatttctgattgtg

SEQ ID NO: 1887816 - DNA, 4001 bp, Homo sapiens
tctcctgacctcgtgatccgcccacctcgggctcccaaagtgctgggattccaggagtgagccaccgcgcccggccgtccactttgcttcttgcagaggctgatggtttgagtaatttccgagattcatagctcgagcgcgccctgttctgtctatgcagtgaagggcagctttttgcatccacggctttttgttggcaaggaggaatgtgcagtggccagatttgtttcttccccttttgttgctgttgttgttgttgctgctgctgttattgttgttgttgttgtattttattttgtagcatcctaaagtgtcccctccttctatttcttatccttatccaggtagggtttagaaaagctaacttcaggggcaggggagagagagaaagagaggaagagaaaatgagaatgaatgacaatacatgaacccatgggtcaacctttatttcaaggcagcccaaaaggacggctctcccttctctttcactctcttctctaggtgtgaagctgatgcagcacaggcgagccccaaaattgaggcttagcccgggggggttcttggcttctcctagaaactaattcaagaagccgggcgcagtggctcacgcctgtaatcccagcactttgggaggctgaggcggatggatcacttgaggtaaggagttcgagaccagcctggccaacatggtgaaaccccatctctactaaatatacaaaaattacccgggcatggggacgggtgcctgtaatcccagctgttcaggaggctgaggcaggggaatcgcttgaacccgggaggcggaggttgcagtgaacagagatcgtgtcactgcactccagcctgggtgatagagtgcgactccgtctgaaaaagaaaaaaataattcaagggcaggccggtggttttagacggcaacctttaccgaagcctcagtgcacagccacagcagagggacacacacctgtatcttttctaagactgggagaattttacaattgcttgactaattgaacagtgcctcgaggatgttacactaggttataaataaattcctgccgtgtttagctgaggcacgaacacaatgcccactgacaattccactttcctcgagggccattctttatgaaaggctgtaggagttccacgacattgttgattcctggattctccaagtctctagaacttgagaactacttttgtgtatttttttaacctttaagttcagagtttctaatgtccgttttatactactataaaatggtactatgtattctttattgatggtactatttacactttattttatacagactctggctccacaaaaaggttaaaaattagccaggtgcagtggtgcacatctgcggccccagctactcaggaggctgaggcagaaggattgcttgagctcggatggtcagggctgcaatgagctatgatcacacatcacatcaatgcactccagcctgggcaacagagtgagaccctgtctctaaaagaatagaagaggctgggcgcggtggctcacgcctgtcatcctaccactttgggagaccaaggcgagtggatcatttgaggccaggtgttcaagaccagcctggtcaacatggcgaaaccccatctcttggcaggcgactgtaatcccagctactcaggaggctgagataggagactcccttgaaccgacgaggcggaggttgcagtgagcgaagatcacaccactgcactccagcctgggcaacagagcaaggctcggtctcccaaaaaaaaaaaaaaaaaaagacacatggaagtaatttaaaaacacttaggaagatgtcatttcttcctatcaaggcgtcctccctttatgttttgtcgttatattgggaacgataaaaaaaatccttttttccgacccatgtggaccaggctggcctcgaactcgtgccctggaacccccgcctccgtgagggcccgagggcaggcgcaaccggcctgagccacaatggctccgggtgtcggggctgtcctttagtccctttgatcttacgcagggtgagggagccaatcaccagaggctcccccctgtcgtcacccagtccccagggccagtgagggccctgcgttccatggcgccccctggagggaggaaggggaactgtatctgagagttcagtatctgacaataaggaaaaggcatggtagatcagatggtgcctagtgttctggggagaagaaacaacggggttggggaatgcggagttgcagtttataatacaggcctcatgtataaggcagacctcatggggaaggtaacatctgtgcagagaaatggagatgagggctaggagccatgcaaatactggaacatgcttgccagcagaagtcgagaaacaaggctggcgcagtggcccacacctgtaatcccaggactttgggaggccgaggcaggtagatcacgaggtcagcagttcgagaccagcctggccaacatggtgaaaccctgtctctactaaaaatacaaaaattagctgggtgtggtggcacacgcctgtaatcccagccacttgggaggctgaggcaggagaatcgcttgaatccaggaggcagaggtttcagtgagccaagatcacgccactgcactccagcccgggcgacacagtgaggctgcgtctcaaaaaaaaaaaaaaaaaaaaaaaaattgccccttcttaagtttgcatttagatctcttctcctttgaccacttttaatttatcttcacttctgatatgacatttaatttttcattcattttctgtctattattgttcgttttttaacttaaaaaaaaattctgtactttatgaatttctgtttcaaggtgtttttcccatctccaaatgcttatttggaaatgtttcctttcctcttggttcatttcttctggtgtgtgtgtgcgcgcgcccgcgtgcatgtgtgtactcgggtctcattttctgctttcttcctgcagtacctcgtttatgggagatgcacttcgcttttcttatttttttagtagagagggggtttcactggtttagccagaacagtctcgatctcctgaccttgtgatccgcccacctcgggctcccaaagtgctgggattccaggagtgagccaccgtgcccggccgtccactttgcttcttgcagaggctgatggtttgagtaatttccgagattcatagctcgagcgcgccctgttctgtctatgcagtgaagggcagctttttgcatccacggctttttgttggcaaggaggaatgtgcagtggccagatttgtttcttccccttttgttgctgttgttgttgttgctgctgctgttattgttgttgttgttgtattttattttgtagcatcctaaagtgtcccctccttctatttcttatccttatccaggtagggtttagaaaagctaacttcaggggcaggggagagagagaaagagaggaggagaaaatgagaatgaatgacaatacatgaacccatgggtcaacctttatttcaaggcagcccaaaaggacggctctcccttctctttcactctcttctctaggtgtgaagctgatgcagcacaggcgagccccaaaattgaggcttagcccgggggggttcttggcttctcctagaaactaattcaagaagccgggcgcagtggctcacgcctgtaatcccagcactttgggaggctgaggcggatggatcacttgaggtaaggagttcgagaccagcctggccaacatggtgaaaccccatctctactaaatatacaaaaattacccgggcatggggacgggtgcctgtaatcccagctgttcaggaggctgaggcaggggaatcgcttgaacccgggaggcggaggttgcagtgaacagagatcgtgtcactgcactccagcctgggtgatagagtgcgactccgtctgaaaaagaaaaaaagaattcaagggcaggccggtggttttagacggcaacctttaccgaagcctcag

SEQ ID NO: 1887817 - DNA, 4001 bp, Homo sapiens
tctcctgaccttgtgatccgcccacctcgggctcccaaagtgctgggattccaggagtgagccaccgtgcccggccgtccactttgcttcttgcagaggctgatggtttgagtaatttccgagattcatagctcgagcgcgccctgttctgtctatgcagtgaagggcagctttttgcatccacggctttttgttggcaaggaggaatgtgcagtggccagatttgtttcttccccttttgttgctgttgttgttgttgctgctgctgttattgttgttgttgttgtattttattttgtagcatcctaaagtgtcccctccttctatttcttatccttatccaggtagggtttagaaaagctaacttcaggggcaggggagagagagaaagagaggaggagaaaatgagaatgaatgacaatacatgaacccatgggtcaacctttatttcaaggcagcccaaaaggacggctctcccttctctttcactctcttctctaggtgtgaagctgatgcagcacaggcgagccccaaaattgaggcttagcccgggggggttcttggcttctcctagaaactaattcaagaagccgggcgcagtggctcacgcctgtaatcccagcactttgggaggctgaggcggatggatcacttgaggtaaggagttcgagaccagcctggccaacatggtgaaaccccatctctactaaatatacaaaaattacccgggcatggggacgggtgcctgtaatcccagctgttcaggaggctgaggcaggggaatcgcttgaacccgggaggcggaggttgcagtgaacagagatcgtgtcactgcactccagcctgggtgatagagtgcgactccgtctgaaaaagaaaaaaagaattcaagggcaggccggtggttttagacggcaacctttaccgaagcctcagtgcacagccacagcagagggacacacacctgtatcttttctaagactgggagaattttacaattgcttgactaattgaacagtgcctcgaggatgttacactaggttataaataaattcctgccgtgtttagctgaggcacgaacacaatgcccactgacaattccactttcctcgagggccattctttatgaaaggctgtaggagttccacgacattgttgattcctggattctccaagtctctagaacttgagaactacttttgtgtatttttttaacctttaagttcagagtttctaatgtccgttttatactactataaaatggtactatgtattctttattgatggtactatttacactttattttatacagactctggctccacaaaaaggttaaaaattagccaggtgcagtggtgcacatctgcggccccagctactcaggaggctgaggcagaaggattgcttgagctcggatggtcagggctgcaatgagctatgatcacacatcacatcaatgcactccagcctgggcaacggagtgagaccctgtctctaaaagaatagaagaggctgggcgcggtggctcacgcctgtcatcctaccactttgggagaccaaggcgagtggatcatttgaggccaggtgttcaagaccagcctggtcaacatggcgaaaccccatctcttggcaggcgactgtaatcccagctactcaggaggctgagataggagactcccttgaaccgacgaggcggaggttgcagtgagcgaagatcacaccactgcactccagcctgggcaacagagcaaggctcggtctcccaaaaaaaaaaaaaaaaaaagacacatggaagtaatttaaaaacacttaggaagatgtcatttcttcctatcaaggcgtcctccctttatgttttgtcgttatattgggaacgataaaaaaaatccttttttccgacccatgtggaccaggctggcctcgaactcgtgccctggaacccccgcctccgtgagggcccgagggcaggcgcaaccggcctgagccacaatggctccgggtgtcggggctgtcctttagtccctttgatcttacgcagggtgagggagccaatcaccagaggctcccccctgtcgtcacccagtccccagggccagtgagggccctgcgttccatggcgccccctggagggaggaaggggaactgtatctgagagttcagtatctgacaataaggaaaaggcatggtagatcagatggtgcctagtgttctggggagaagaaacaacggggttggggaatgcggagttgcagtttataatacaggcctcatgtataaggcagacctcatggggaaggtaacatctgtgcagagaaatggagatgagggctaggagccatgcaaatactggaacatgcttgccagcagaagtcgagaaacaaggctggcgcagtggcccacacctgtaatcccaggactttgggaggccgaggcaggtagatcacgaggtcagcagttcgagaccagcctggccaacatggtgaaaccctgtctctactaaaaatacaaaaattagctgggtgtggtggcacacgcctgtaatcccagccacttgggaggctgaggcaggagaatcgcttgaatccaggaggcagaggtttcagtgagccaagatcacgccactgcactccagcccgggcgacacagtgaggctgcgtctcaaaaaaaaaaaaaaaaaaaaaaaaattgccccttcttaagtttgcatttagatctcttctcctttgaccacttttaatttatcttcacttctgatatgacatttaatttttcattcattttctgtctattattgttcgttttttaacttaaaaaaaaattctgtactttatgaatttctgtttcaaggtgtttttcccatctccaaatgcttatttggaaatgtttcctttcctcttggttcatttcttctggtgtgtgtgtgcgcgcgcccgcgtgcatgtgtgtactcgggtctcattttctgctttcttcctgcagtacctcgtttatgggagatgcacttcgcttttcttatttttttagtagagagggggtttcactggtttagccagaacagtctcgatctcctgacctcgtgatccgcccacctcgggctcccaaagtgctgggattccaggagtgagccaccgcgcccggccgtccactttgcttcttgcagaggctgatggtttgagtaatttccgagattcatagctcgagcgcgccctgttctgtctatgcagtgaagggcagctttttgcatccacggctttttgttggcaaggaggaatgtgcagtggccagatttgtttcttccccttttgttgctgttgttgttgttgctgctgctgttattgttgttgttgttgtattttattttgtagcatcctaaagtgtcccctccttctatttcttatccttatccaggtagggtttagaaaagctaacttcaggggcaggggagagagagaaagagaggaagagaaaatgagaatgaatgacaatacatgaacccatgggtcaacctttatttcaaggcagcccaaaaggacggctctcccttctctttcactctcttctctaggtgtgaagctgatgcagcacaggcgagccccaaaattgaggcttagcccgggggggttcttggcttctcctagaaactaattcaagaagccgggcgcagtggctcacgcctgtaatcccagcactttgggaggctgaggcggatggatcacttgaggtaaggagttcgagaccagcctggccaacatggtgaaaccccatctctactaaatatacaaaaattacccgggcatggggacgggtgcctgtaatcccagctgttcaggaggctgaggcaggggaatcgcttgaacccgggaggcggaggttgcagtgaacagagatcgtgtcactgcactccagcctgggtgatagagtgcgactccgtctgaaaaaaaaaaaaagaattcaagggcaggccggtggttttagacggcaacctttaccgaagcctcag

SEQ ID NO: 1887818 - DNA, 4001 bp, Homo sapiens
atctcctgacctcgtgatccgcccacctcgggctcccaaagtgctgggattccaggagtgagccaccgcgcccggccgtccactttgcttcttgcagaggctgatggtttgagtaatttccgagattcatagctcgagcgcgccctgttctgtctatgcagtgaagggcagctttttgcatccacggctttttgttggcaaggaggaatgtgcagtggccagatttgtttcttccccttttgttgctgttgttgttgttgctgctgctgttattgttgttgttgttgtattttattttgtagcatcctaaagtgtcccctccttctatttcttatccttatccaggtagggtttagaaaagctaacttcaggggcaggggagagagagaaagagaggaagagaaaatgagaatgaatgacaatacatgaacccatgggtcaacctttatttcaaggcagcccaaaaggacggctctcccttctctttcactctcttctctaggtgtgaagctgatgcagcacaggcgagccccaaaattgaggcttagcccgggggggttcttggcttctcctagaaactaattcaagaagccgggcgcagtggctcacgcctgtaatcccagcactttgggaggctgaggcggatggatcacttgaggtaaggagttcgagaccagcctggccaacatggtgaaaccccatctctactaaatatacaaaaattacccgggcatggggacgggtgcctgtaatcccagctgttcaggaggctgaggcaggggaatcgcttgaacccgggaggcggaggttgcagtgaacagagatcgtgtcactgcactccagcctgggtgatagagtgcgactccgtctgaaaaaaaaaaaaagaattcaagggcaggccggtggttttagacggcaacctttaccgaagcctcagtgcacagccacagcagagggacacacacctgtatcttttctaagactgggagaattttacaattgcttgactaattgaacagtgcctcgaggatgttacactaggttataaataaattcctgccgtgtttagctgaggcacgaacacaatgcccactgacaattccactttcctcgagggccattctttatgaaaggctgtaggagttccacgacattgttgattcctggattctccaagtctctagaacttgagaactacttttgtgtatttttttaacctttaagttcagagtttctaatgtccgttttatactactataaaatggtactatgtattctttattgatggtactatttacactttattttatacagactctggctccacaaaaaggttaaaaattagccaggtgcagtggtgcacatctgcggccccagctactcaggaggctgaggcagaaggattgcttgagctcggatggtcagggctgcaatgagctatgatcacacatcacatcaatgcactccagcctgggcaacggagtgagaccctgtctctaaaagaatagaagaggctggccgcggtggctcacgcctgtcatcctaccactttgggagaccaaggcgagtggatcatttgaggccaggtgttcaagaccagcctggtcaacatggcgaaaccccatctcttggcaggcgactgtaatcccagctactcaggaggctgagataggagactcccttgaaccgacgaggcggaggttgcagtgagcgaagatcacaccactgcactccagcctgggcaacagagcaaggctcggtctcccaaaaaaaaaaaaaaaaaagacacatggaagtaatttaaaaacacttaggaagatgtcatttcttcctatcaaggcgtcctccctttatgttttgtcgttatattgggaacgataaaaaaaatccttttttccgacccatgtggaccaggctggcctcgaactcgtgccctggaacccccgcctccgtgagggcccgagggcaggcgcaaccggcctgagccacaatggctccgggtgtcggggctgtcctttagtccctttgatcttacgcagggtgagggagccaatcaccagaggctcccccctgtcgtcacccagtccccagggccagtgagggccctgcgttccatggcgccccctggagggaggaaggggaactgtatctgagagttcagtatctgacaataaggaaaaggcatggtagatcagatggtgcctagtgttctggggagaagaaacaacggggttggggaatgcggagttgcagtttataatacaggcctcatgtataaggcagacctcatggggaaggtaacatctgtgcagagaaatggagatgagggctaggagccatgcaaatactggaacatgcttgccagcagaagtcgagaaacaaggctggcgcagtggcccacacctgtaatcccaggactttgggaggccgaggcaggtagatcacgaggtcagcagttcgagaccagcctggccaacatggtgaaaccctgtctctactaaaaatacaaaaattagctgggtgtggtggcacacgcctgtaatcccagccacttgggaggctgaggcaggagaatcgcttgaatccaggaggcagaggtttcagtgagccaagatcacgccactgcactccagcccgggcgacacagtgaggctgcgtctcaaaaaaaaaaaaaaaaaaaaaaaattgccccttcttaagtttgcatttagatctcttctcctttgaccacttttaatttatcttcacttctgatatgacatttaatttttcattcattttctgtctattattgttcgttttttaacttaaaaaaaaattctgtactttatgaatttctgtttcaaggtgtttttcccatctccaaatgcttatttggaaatgtttcctttcctcttggttcatttcttctggtgtgtgtgtgcgcgcgcccgcgtgcatgtgtgtactcgggtctcattttctgctttcttcctgcagtacctcgtttatgggagatgcacttcgcttttcttatttttttagtagagagggggtttcactggtttagccagaacagtctcgatctcctgacctcgtgatccgcccacctcgggctcccaaagtgctgggattccaggagtgagccaccgcgcccggccgtccactttgcttcttgcagaggctgatggtttgagtaatttccgagattcatagctcgagcgcgccctgttctgtctatgcagtgaagggcagctttttgcatccacggctttttgttggcaaggaggaatgtgcagtggccagatttgtttcttccccttttgttgctgttgttgttgttgctgctgctgttattgttgttgttgttgtattttattttgtagcatcctaaagtgtcccctccttctatttcttatccttatccaggtagggtttagaaaagctaacttcaggggcaggggagagagagaaagagaggaagagaaaatgagaatgaatgacaatacatgaacccatgggtcaacctttatttcaaggcagcccaaaaggacggctctcccttctctttcactctcttctctaggtgtgaagctgatgcagcacaggcgagccccaaaattgaggcttagcccgggggggttcttggcttctcctagaaactaattcaagaagccgggcgcagtggctcacgcctgtaatcccagcactttgggaggctgaggcggatggatcacttgaggtaaggagttcgagaccagcctggccaacatggtgaaaccccatctctactaaatatacaaaaattacccgggcatggggacgggtgcctgtaatcccagctgttcaggaggctgaggcaggggaatcgcttgaacccgggaggcggaggttgcagtgaacagagatcgtgtcactgcactccagcctgggtgatagagtgcgactccgtctgaaaaaaaaaaaaagaattcaagggcaggccggtggttttagacggcaacctttaccgaagcctcagt

SEQ ID NO: 1887819 - DNA, 4001 bp, Homo sapiens
ctcgatctcctgacctcgtgatccgcccacctcgggctcccaaagtgctgggattccaggagtgagccaccgcgcccggccgtccactttgcttcttgcagaggctgatggtttgagtaatttccgagattcatagctcgagcgcgccctgttctgtctatgcagtgaagggcagctttttgcatccacggctttttgttggcaaggaggaatgtgcagtggccagatttgtttcttccccttttgttgctgttgttgttgttgctgctgctgttattgttgttgttgttgtattttattttgtagcatcctaaagtgtcccctccttctatttcttatccttatccaggtagggtttagaaaagctaacttcaggggcaggggagagagagaaagagaggaagagaaaatgagaatgaatgacaatacatgaacccatgggtcaacctttatttcaaggcagcccaaaaggacggctctcccttctctttcactctcttctctaggtgtgaagctgatgcagcacaggcgagccccaaaattgaggcttagcccgggggggttcttggcttctcctagaaactaattcaagaagccgggcgcagtggctcacgcctgtaatcccagcactttgggaggctgaggcggatggatcacttgaggtaaggagttcgagaccagcctggccaacatggtgaaaccccatctctactaaatatacaaaaattacccgggcatggggacgggtgcctgtaatcccagctgttcaggaggctgaggcaggggaatcgcttgaacccgggaggcggaggttgcagtgaacagagatcgtgtcactgcactccagcctgggtgatagagtgcgactccgtctgaaaaaaaaaaaaagaattcaagggcaggccggtggttttagacggcaacctttaccgaagcctcagtgcacagccacagcagagggacacacacctgtatcttttctaagactgggagaattttacaattgcttgactaattgaacagtgcctcgaggatgttacactaggttataaataaattcctgccgtgtttagctgaggcacgaacacaatgcccactgacaattccactttcctcgagggccattctttatgaaaggctgtaggagttccacgacattgttgattcctggattctccaagtctctagaacttgagaactacttttgtgtatttttttaagttcagagtttctaatgtccgttttatactactataaaatggtactatgtattctttattgatggtactatttacactttattttatacagactctggctccacaaaaaggttaaaaattagccaggtgcagtggtgcacatctgcggccccagctactcaggaggctgaggcagaaggattgcttgagctcggatggtcagggctgcaatgagctatgatcacacatcacatcaatgcactccagcctgggcaacagagtgagaccctgtctctaaaagaatagaagaggctgggcgcggtggctcacgcctgtcatcctaccactttgggagaccaaggcgagtggatcatttgaggccaggtgttcaagaccagcctggtcaacatggcgaaaccccatctcttggcaggcgactgtaatcccagctactcaggaggctgagataggagactcccttgaaccgacgaggcggaggttgcagtgagcgaagatcacaccactgcactccagcctgggcaacagagcaaggctcggtctcccaaaaaaaaaaaaaaaaaaaaagacacatggaagtaatttaaaaacacttaggaagatgtcatttcttcctatcaaggcgtcctccctttatgttttgtcgttatattgggaacgataaaaaaaatccttttttccgacccatgtggaccaggctggcctcgaactcgtgccctggaacccccgcctccgtgagggcccgagggcaggcgcaaccggcctgagccacaatggctccgggtgtcggggctgtcctttagtccctttgatcttacgcagggtgagggagccaatcaccagaggctcccccctgtcgtcacccagtccccagggccagtgagggccctgcgttccatggcgccccctggagggaggaaggggaactgtatctgagagttcagtatctgacaataaggaaaaggcatagtagatcagatggtgcctagtgttctggggagaagaaacaacggggttggggaatgcggagttgcagtttataatacaggcctcatgtataaggcagacctcatggggaaggtaacatctgtgcagagaaatggagatgagggctaggagccatgcaaatactggaacatgcttgccagcagaagtcgagaaacatggccggcgcagtggcccacacctgtaatcccaggactttgggaggccgaggcaggtagatcacgaggtcagcagttcgagaccagcccggccaacatggtgaaaccctgtctctactaaaaatacaaaaattagctgggtgtggtggcacacgcctgtaatcccagccacttgggagggtgaggtaggagaatcgcttgaacctgggaggtagaggttgcagtgatgcagtgagccgagaccacgccattgtactctcgcctgggcgacagagcgagactccatctcaaaaaaaaaaaaaaaaaaaaaaaaaaaaagcaaaaacaaacaggtgagattcattttgataaaatagctgatttaacctaatatacctaaaacatcataattttaacataatcaatagaaacatttttgcaagattttatgttattttttaccatacgacgtcttggaaatcttggtttggaccagccatgttcaactgctcagtagccatgtgtggccagaggcggccgtattggacagtgcagatggtgcatgagggtgttcgggcagtgggaacagccagtacagaggccctgtgggggcacatgcctgctgctacgggaacagtgaggagccccgtgtggctgcagtggagtgagagggagaaggtgggagatgtaaccaacagtctcatcattcattcattaaatccttttttttctttttttgagactgagtttcgctcttgttgcccaggctggagtgcaatggtgccatctcggctcaccacaacctccacctcttgagttcaagcgattctcctgcctcagccttccgagtagctgggattacaggcatgcgccaccatgcccggctaattttgtatttttagtagagctggggtttctccctgttggtcaggctggtctcgaactcccgacctcaggtgatctgcccgccttgacctcccaaagtgctgtgattacaggcttgagccactgctcccagtccattgaatgtgtgtatatatagttgaataaagaagacaccggagtttgttctgtatcttctcctttcaaattctgtgccatttgaattttttcctattccttttatatatttttaattgacaaattgtacatatttatcatgtacatattgttttgaaatatgtatataccgtagaatggctaaatcaagatcattaacatatgtattactttacctattttccttttttcgttgtgtctctgccaggtttcggtatcagaatgactctgacctcatagaatgagttagagagcagttgctcctcctcaattgtgtggaataatttcagtaggattagtgccgccttttctttacacgtctggtaggattcgactgtgaatccgtctagtctaaggttttttgtgctggttggtaggttttgtatgactaactcaattttggaactcatcgttggtttgttcagggtttccatttcttcctggttcaatcttgagaggttttatgtttccaggaatttctctatttcttctagttttctagtttgtgtgcatagaggcatgtggaatagtctcagggtttcttgtatatctgtgggtcagtggtaatgtcacctttgtcatt

SEQ ID NO: 1887820 - DNA, 4001 bp, Homo sapiens
tgacctcgtgatccgcccacctcgggctcccaaagtgctgggattccaggagtgagccaccgcgcccggccgtccactttgcttcttgcagaggctgatggtttgagtaatttccgagattcatagctcgagcgcgccctgttctgtctatgcagtgaagggcagctttttgcatccacggctttttgttggcaaggaggaatgtgcagtggccagatttgtttcttccccttttgttgctgttgttgttgttgctgctgctgttattgttgttgttgttgtattttattttgtagcatcctaaagtgtcccctccttctatttcttatccttatccaggtagggtttagaaaagctaacttcaggggcaggggagagagagaaagagaggaagagaaaatgagaatgaatgacaatacatgaacccatgggtcaacctttatttcaaggcagcccaaaaggacggctctcccttctctttcactctcttctctaggtgtgaagctgatgcagcacaggcgagccccaaaattgaggcttagcccgggggggttcttggcttctcctagaaactaattcaagaagccgggcgcagtggctcacgcctgtaatcccagcactttgggaggctgaggcggatggatcacttgaggtaaggagttcgagaccagcctggccaacatgctgaaaaccccatctctactaaatatacaaaaattacccgggcatggggacgggtgcctgtaatcccagctgttcaggaggctgaggcaggggaatcgcttgaacccgggaggcggaggttgcagtgaacagagatcgtgtcactgcactccagcctgggtgatagagtgcgactccgtctgaaaaaaaaaaaaaaagaattcaagggccggccggtggttttagacggcaacctttaccgaagcctcagtgcacagccacagcagagggacacacacctgtatcttttctaagactgggagaattttacaattgcttgactaattgaacagtgcctcgaggatgttacactaggttataaataaattcctgccgtgtttagctgaggcacgaacacaatgcccactgacaattccactttcctcgagggccattctttatgaaaggctgtaggagttccacgacattgttgattcctggattctccaagtctctagaacttgagaactacttttgtgtatttttttaacctttaagttcagagtttctaatgtccgttttatactactataaaatggtactatgtattctttattgatggtactatttacactttattttatacagactctggctccacaaaaaggttaaaaattagccaggtgcagtggtgcacatctgcggccccagctactcaggaggctgaggcagaaggattgcttgagctcggatggtcagggctgcaatgagctatgatcacacatcacatcaatgcactccagcctgggcaacagagtgagaccctgtctctaaaagaatagaagaggctgggcgcggtggctcacgcctgtcatcctaccactttgggagaccaaggcgagtggatcatttgaggccaggtgttcaagaccagcctggtcaacatggcgaaaccccatctcttggcaggcgactgtaatcccagctactcaggaggctgagataggagactcccttgaaccgacgaggcggaggttgcagtgagcgaagatcacaccactgcactccagcctgggcaacagagcaaggctcggtctcccaaaaaaaaaaaaaaaaaaaaagacacatggaagtaatttaaaaacacttaggaagatgtcatttcttcctatcaaggcgtcctccctttatgttttgtcgttatattgggaacgataaaaaaaatccttttttccgacccatgtggaccaggctggcctcgaactcgtgccctggaacccccgcctccgtgagggcccgagggcaggcgcaaccggcctgagccacaatggctccgggtgtcggggctgtcctttagtccctttgatcttacgcagggtgagggagccaatcaccagaggctcccccctgtcgtcacccagtccccagggccagtgagggccctgcgttccatggcgccccctggagggaggaaggggaactgtatctgagagttcagtatctgacaataaggaaaaggcatagtagatcagatggtgcctagtgttctggggagaagaaacaacggggttggggaatgcggagttgcagtttataatacaggcctcatgtataaggcagacctcatggggaaggtaacatctgtgcagagaaatggagatgagggctaggagccatgcaaatactggaacatgcttgccagcagaagtcgagaaacatggccggcgcagtggcccacacctgtaatcccaggactttgggaggccgaggcaggtagatcacgaggtcagcagttcgagaccagcccggccaacatggtgaaaccctgtctctactaaaaatacaaaaattagctgggtgtggtggcacacgcctgtaatcccagccacttgggagggtgaggtaggagaatcgcttgaacctgggaggtagaggttgcagtgatgcagtgagccgagaccacgccattgtactctcgcctgggcgacagagcgagactccatctcaaaaaaaaaaaaaaaaaaaaaaaaaaaaagcaaaaacaaacaggtgagattcattttgataaaatagctgatttaacctaatatacctaaaacatcataattttaacataatcaatagaaacatttttgcaagattttatgttattttttaccatacgacgtcttggaaatcttggtttggaccagccatgttcaactgctcagtagccatgtgtggccagaggcggccgtattggacagtgcagatggtgcatgagggtgttcgggcagtgggaacagccagtacagaggccctgtgggggcacatgcctgctgctacgggaacagtgaggagccccgtgtggctgcagtggagtgagagggagaaggtgggagatgtaaccaacagtctcatcattcattcattaaatccttttttttctttttttgagactgagtttcgctcttgttgcccaggctggagtgcaatggtgccatctcggctcaccacaacctccacctcttgagttcaagcgattctcctgcctcagccttccgagtagctgggattacaggcatgcgccaccatgcccggctaattttgtatttttagtagagctggggtttctccctgttggtcaggctggtctcgaactcccgacctcaggtgatctgcccgccttgacctcccaaagtgctgtgattacaggcttgagccactgctcccagtccattgaatgtgtgtatatatagttgaataaagaagacaccggagtttgttctgtatcttctcctttcaaattctgtgccatttgaattttttcctattccttttatatatttttaattgacaaattgtacatatttatcatgtacatattgttttgaaatatgtatataccgtagaatggctaaatcaagatcattaacatatgtattactttacctattttccttttttcgttgtgtctctgccaggtttcggtatcagaatgactctgacctcatagaatgagttagagagcagttgctcctcctcaattgtgtggaataatttcagtaggattggtgccgccttttctttacacgtctggtaggattcgactgtgaatccgtctagtctaaggttttttgtgctggttggtaggttttgtatgactaactcaattttggaactcatcgttggtttgttcagggtttccatttcttcctggttcaatcttgagaggttttatgtttccaggaatttctctatttcttctagttttctagtttgtgtgcatagaggcatgtggaatagtctcagggtttcttgtatatctgtgggtcagtggtaatgtcacctttgtcatt

SEQ ID NO: 1887821 - DNA, 4001 bp, Homo sapiens
ctgacctcgtgatccgcccacctcgggctcccaaagtgctgggattccaggagtgagccaccgcgcccggccgtccactttgcttcttgcagaggctgatggtttgagtaatttccgagattcatagctcgagcgcgccctgttctgtctatgcagtgaagggcagctttttgcatccacggctttttgttggcaaggaggaatgtgcagtggccagatttgtttcttccccttttgttgctgttgttgttgttgctgctgctgttattgttgttgttgttgtattttattttgtagcatcctaaagtgtcccctccttctatttcttatccttatccaggtagggtttagaaaagctaacttcaggggcaggggagagagagaaagagaggaagagaaaatgagaatgaatgacaatacatgaacccatgggtcaacctttatttcaaggcagcccaaaaggacggctctcccttctctttcactctcttctctaggtgtgaagctgatgcagcacaggcgagccccaaaattgaggcttagcccgggggggttcttggcttctcctagaaactaattcaagaagccgggcgcagtggctcacgcctgtaatcccagcactttgggaggctgaggcggatggatcacttgaggtaaggagttcgagaccagcctggccaacatgctgaaaaccccatctctactaaatatacaaaaattacccgggcatggggacgggtgcctgtaatcccagctgttcaggaggctgaggcaggggaatcgcttgaacccgggaggcggaggttgcagtgaacagagatcgtgtcactgcactccagcctgggtgatagagtgcgactccgtctgaaaaaaaaaaaaaaagaattcaagggccggccggtggttttagacggcaacctttaccgaagcctcagtgcacagccacagcagagggacacacacctgtatcttttctaagactgggagaattttacaattgcttgactaattgaacagtgcctcgaggatgttacactaggttataaataaattcctgccgtgtttagctgaggcacgaacacaatgcccactgacaattccactttcctcgagggccattctttatgaaaggctgtaggagttccacgacattgttgattcctggattctccaagtctctagaacttgagaactacttttgtgtatttttttaacctttaagttcagagtttctaatgtccgttttatactactataaaatggtactatgtattctttattgatggtactatttacactttattttatacagactctggctccacaaaaaggttaaaaattagccaggtgcagtggtgcacatctgcggccccagctactcaggaggctgaggcagaaggattgcttgagctcggatggtcagggctgcaatgagctatgatcacacatcacatcaatgcactccagcctgggcaacagagtgagaccctgtctctaaaagaatagaagaggctgggcgcggtggctcacgcctgtcatcctaccactttgggagaccaaggcgagtggatcatttgaggccaggtgttcaagaccagcctggtcaacatggcgaaaccccatctcttggcaggcgactgtaatcccagctactcaggaggctgagataggagactcccttgaaccgacgaggcggaggttgcagtgagcgaagatcacaccactgcactccagcctgggcaacagagcaaggctcggtctcccaaaaaaaaaaaaaaaaaaaagacacatggaagtaatttaaaaacacttaggaagatgtcatttcttcctatcaaggcgtcctccctttatgttttgtcgttatattgggaacgataaaaaaaatccttttttccgacccatgtggaccaggctggcctcgaactcgtgccctggaacccccgcctccgtgagggcccgagggcaggcgcaaccggcctgagccacaatggctccgggtgtcggggctgtcctttagtccctttgatcttacgcagggtgagggagccaatcaccagaggctcccccctgtcgtcacccagtccccagggccagtgagggccctgcgttccatggcgccccctggagggaggaaggggaactgtatctgagagttcagtatctgacaataaggaaaaggcatagtagatcagatggtgcctagtgttctggggagaagaaacaacggggttggggaatgcggagttgcagtttataatacaggcctcatgtataaggcagacctcatggggaaggtaacatctgtgcagagaaatggagatgagggctaggagccatgcaaatactggaacatgcttgccagcagaagtcgagaaacatggccggcgcagtggcccacacctgtaatcccaggactttgggaggccgaggcaggtagatcacgaggtcagcagttcgagaccagcccggccaacatggtgaaaccctgtctctactaaaaatacaaaaattagctgggtgtggtggcacacgcctgtaatcccagccacttgggagggtgaggtaggagaatcgcttgaacctgggaggtagaggttgcagtgatgcagtgagccgagaccacgccattgtactctcgcctgggcgacagagcgagactccatctcaaaaaaaaaaaaaaaaaaaaaaaaaaagcaaaaacaaacaggtgagattcattttgataaaatagctgatttaacctaatatacctaaaacatcataattttaacataatcaatagaaacatttttgcaagattttatgttattttttaccatacgacgtcttggaaatcttggtttggaccagccatgttcaactgctcagtagccatgtgtggccagaggcggccgtattggacagtgcagatggtgcatgagggtgttcgggcagtgggaacagccagtacagaggccctgtgggggcacatgcctgctgctacgggaacagtgaggagccccgtgtggctgcagtggagtgagagggagaaggtgggagatgtaaccaacagtctcatcattcattcattaaatccttttttttctttttttgagactgagtttcgctcttgttgcccaggctggagtgcaatggtgccatctcggctcaccacaacctccacctcttgagttcaagcgattctcctgcctcagccttccgagtagctgggattacaggcatgcgccaccatgcccggctaattttgtatttttagtagagctggggtttctccctgttggtcaggctggtctcgaactcccgacctcaggtgatctgcccgccttgacctcccaaagtgctgtgattacaggcttgagccactgctcccagtccattgaatgtgtgtatatatagttgaataaagaagacaccggagtttgttctgtatcttctcctttcaaattctgtgccatttgaattttttcctattccttttatatatttttaattgacaaattgtacatatttatcatgtacatattgttttgaaatatgtatataccgtagaatggctaaatcaagatcattaacatatgtattactttacctattttccttttttcgttgtgtctctgccaggtttcggtatcagaatgactctgacctcatagaatgagttagagagcagttgctcctcctcaattgtgtggaataatttcagtaggattggtgccgccttttctttacacgtctggtaggattcgactgtgaatccgtctagtctaaggttttttgtgctggttggtaggttttgtatgactaactcaattttggaactcatcgttggtttgttcagggtttccatttcttcctggttcaatcttgagaggttttatgtttccaggaatttctctatttcttctagttttctagtttgtgtgcatagaggcatgtggaatagtctcagggtttcttgtatatctgtgggtcagtggtaatgtcacctttgtcatttc

SEQ ID NO: 1887822 - DNA, 4001 bp, Homo sapiens
gacctcgtgatccgcccacctcgggctcccaaagtgctgggattccaggagtgagccaccgcgcccggccgtccactttgcttcttgcagaggctgatggtttgagtaatttccgagattcatagctcgagcgcgccctgttctgtctatgcagtgaagggcagctttttgcatccacggctttttgttggcaaggaggaatgtgcagtggccagatttgtttcttccccttttgttgctgttgttgttgttgctgctgctgttattgttgttgttgttgtattttattttgtagcatcctaaagtgtcccctccttctatttcttatccttatccaggtagggtttagaaaagctaacttcaggggcaggggagagagagaaagagaggaagagaaaatgagaatgaatgacaatacatgaacccatgggtcaacctttatttcaaggcagcccaaaaggacggctctcccttctctttcactctcttctctaggtgtgaagctgatgcagcacaggcgagccccaaaattgaggcttagcccgggggggttcttggcttctcctagaaactaattcaagaagccgggcgcagtggctcacgcctgtaatcccagcactttgggaggctgaggcggatggatcacttgaggtaaggagttcgagaccagcctggccaacatgctgaaaaccccatctctactaaatatacaaaaattacccgggcatggggacgggtgcctgtaatcccagctgttcaggaggctgaggcaggggaatcgcttgaacccgggaggcggaggttgcagtgaacagagatcgtgtcactgcactccagcctgggtgatagagtgcgactccgtctgaaaaaaaaaaaaaagaattcaagggccggccggtggttttagacggcaacctttaccgaagcctcagtgcacagccacagcagagggacacacacctgtatcttttctaagactgggagaattttacaattgcttgaataattgaacagtgcctcgaggatgttacactaggttataaataaattcctgccgtgtttagctgaggcacgaacacaatgcccactgacaattccactttcctcgagggccattctttatgaaaggctgtaggagttccacgacattgttgattcctggattctccaagtctctagaacttgagaactacttttgtgtatttttttaacctttaagtccagagtttctaatgtccgttttatactactataaaatggtactatgtattctttatttatggtactatttacactttattttatacagactctggctccacaaaaaggttaaaaattagccaggtgcagtggtgcacatctgcggccccagctactcaggaggctgaggcagaaggattgcttgagctcggatggtcagggctgcaatgagctatgatcacacatcacatcaatgcactccagcctgggcaacagagtgagaccctgtctctaaaagaatagaagaggctgggcgcggtggctcacgcctgtcatcctaccactttgggagaccaaggcgagtggatcatttgaggccaggtgttcaagaccagcctggtcaacatggcgaaaccccatctcttggcaggcgactgtaatcccagctactcaggaggctgagataggagactcccttgaaccgacgaggcggaggttgcagtgagcgaagatcacaccactgcactccagcctgggcaacagagcaaggctcggtctccccaaaaaaaaaaaaaaaaaaaaaagacacatggaagtaatttaaaaacacttaggaagatgtcatttcttcctatcaaggcgtcctccctttatgttttgtcgttatattgggaacgataaaaaaaatccttttttccgacccatgtggaccaggctggcctcgaactcgtgccctggaacccccgcctccgtgagggcccgagggcaggcgcaaccggcctgagccacaatggctccgggtgtcggggctgtcctttagtccctttgatcttacgcagggtgagggagccaatcaccagaggctcccccctgtcgtcacccagtccccagggccagtgagggccctgcgttccatggcgccccctggagggaggaaggggaactgtatctgagagttcagtatctgacaataaggaaaaggcatagtagatcagatggtgcctagtgttctggggagaagaaacaacggggttggggaatgcggagttgcagtttataatacaggcctcatgtataaggcagacctcatggggaaggtaacatctgtgcagagaaatggagatgagggctaggagccatgcaaatactggaacatgcttgccagcagaagtcgagaaacatggccggcgcagtggcccacacctgtaatcccaggactttgggaggccgaggcaggtagatcacgaggtcagcagttcgagaccagcccggccaacatggtgaaaccctgtctctactaaaaatacaaaaattagctgggtgtggtggcacacgcctgtaatcccagccacttgggagggtgaggtaggagaatcgcttgaacctgggaggtagaggttgcagtgatgcagtgagccgagaccacgccattgtactctcgcctgggcgacagagcgagactccatctcaaaaacaaacaaacaaaaaaaaaaagcaaaaacaaacaggtgagattcattttgataaaatagctgatttaacctaatatacctaaaacatcataattttaacataatcaatagaaacgtttttgcaagattttatgttattttttaccgtacgacgtcttggaaatcttggtttggaccagccatgttcaactgctcagtagccatgtgtggccagaggcggccgtattggacagtgcagatggtgcatgagggtgttcgggcagtgggaacagccagtacagaggccctgtgggggcacatgcctgctgctacgggaacagtgaggagccccgtgtggctgcagtggagtgagagggagaaggtgggagatgtaaccaacagtctcatcattcattcattaaatccttttttttctttttttgagactgagtttcgctcttgttgcccaggctggagtgcaatggtgccatctcggctcaccacaacctccacctcttgagttcaagcgattctcctgcctcagccttccgagtagctgggattacaggcatgcgccaccatgcccggctaattttgtatttttagtagagctggggtttctccctgttggtcaggctggtctcgaactcccgacctcaggtgatctgcccgccttgacctcccaaagtgctgtgattacaggcttgagccactgctcccagtccattgaatgtgtgtatatatagttgaataaagaagacaccggagtttgttctgtatcttctcctttcaaattctgtgccatttgaattttttcctattccttttatatatttttaattgacaaattgtacatatttatcatgtacatattgttttgaaatatgtatataccgtagaatggctaaatcaagatcattaacatatgtattactttacctattttccttttttcgttgtgtctctgccaggtttcggtatcagaatgactctgacctcatagaatgagttagagagcagttgctcctcctcaattgtgtggaataatttcagtaggattggtgccgccttttctttacacatctggtaggattcgactgtgaatccgtctagtctaaggttttttgtgctggttggtaggttttgtatgactaactcaattttggaactcatcgttggtttgttcagggtttccatttcttcctggttcaatcttgagaggttttatgtttccaggaatttctctatttcttctagttttctagtttgtgtgcatagaggcatgtggaatagtctcagggtttcttgtatatctctgggtcagtggaaatgtcacctttgtcatttctg

SEQ ID NO: 1887823 - DNA, 4001 bp, Homo sapiens
gtttagccagaacagtctcgatctcctgacctcgtgatccgcccacctcgggctcccaaagtgctgggattccaggagtgagccaccgcgcccggccgtccactttgcttcttgcagaggctgatggtttgagtaatttccgagattcatagctcgagcgcgccctgttctgtctatgcagtgaagggcagctttttgcatccacggctttttgttggcaaggaggaatgtgcagtggccagatttgtttcttccccttttgttgctgttgttgttgttgtattttattttgtagcatcctaaagtgtcccctccttctatttcttatccttatccaggtagggtttagaaaagctaacttcaggggcaggggagagagagaaagagaggaagagaaaatgagaatgaatgacaatacatgaacccatgggtcaacctttatttcaaggcagcccaaaaggacggctctcccttctctttcactctcttctctgcgtgtgaagctgatgcagcacaggcgagccccaaaattgaggcttagcccgggggggttcttggcttctcctagaaactaattcaagaagccgggcgcagtggctcacgcctgtaatcccagcactttgggaggctgaggcggatggatcacttgaggtaaggagttcgagaccagcctggccaacatggtgaaaccccatctctactaaatatacaaaaattacccgggcatggggacgggtgcctgtaatcccagctgttcaggaggctgaggcaggggaatcgcttgaacccgggaggcggaggttgcagtgaacagagatcgtgtcactgcactccagcctgggtgatagagtgcgactccgtctgaaaaaaaaaaaaaaagaattcaagggccggccggtggttttagacggcaacctttaccgaagcctcagtgcacagccacagcagagggacacacacctgtatcttttctaagactgggagaattttacaattgcttgactaattgaacagtgcctcgaggatgttacactaggttataaataaattcctgccgtgtttagctgaggcacgaacacaatgcccactgacaattccactttcctcgagggccattctttatgaaaggctgtaggagttccacgacattgttgattcctggattctccaagtctctagaacttgagaactacttttgtgtatttttttaacctttaagtccagagtttctaatgtccgttttatactactataaaatggtactatgtattctttatttatggtactatttacactttattttatacagactctggctccacaaaaaggttaaaaattagccaggtgcagtggtgcacatctgcggccccagctactcaggaggctgaggcagaaggattgcttgagctcggatggtcagggctgcaatgagctatgatcacacatcacatcaatgcactccagcctgggcaacagagtgagaccctgtctctaaaagaatagaagaggctgggcgcggtggctcacgcctgtcatcctaccactttgggagaccaaggcgagtggatcatttgaggccaggtgttcaagaccagcctggtcaacatggcgaaaccccatctcttggcaggcgactgtaatcccagctactcaggaggctgagataggagactcccttgaaccgacgaggcggaggttgcagtgagcgaagatcacaccactgcactccagcctgggcaacagagcaaggctcggtctccccaaaaaaaaaaaaaaaaaaaaaagacacatggaagtaatttaaaaacacttaggaagatgtcatttcttcctatcaaggcgtcctccctttatgttttgtcgttatattgggaacgataaaaaaaatccttttttccgacccatgtggaccaggctggcctcgaactcgtgccctggaacccccgcctccgtgagggcccgagggcaggcgcaaccggcctgagccacaatggctccgggtgtcggggctgtcctttagtccctttgatcttacgcagggtgagggagccaatcaccagaggctcccccctgtcgtcacccagtccccagggccagtgagggccctgcgttccatggcgccccctggagggaggaaggggaactgtatctgagagttcagtatctgacaataaggaaaaggcatagtagatcagatggtgcctagtgttctggggagaagaaacaacggggttggggaatgcggagttgcagtttataatacaggcctcatgtataaggcagacctcatggggaaggtaacatctgtgcagagaaatggagatgagggctaggagccatgcaaatactggaacatgcttgccagcagaagtcgagaaacatggccggcgcagtggcccacacctgtaatcccaggactttgggaggccgaggcaggtagatcacgaggtcagcagttcgagaccagcccggccaacatggtgaaaccctgtctctactaaaaatacaaaaattagctgggtgtggtggcacacgcctgtaatcccagccacttgggagggtgaggtaggagaatcgcttgaacctgggaggtagaggttgcagtgatgcagtgagccgagaccacgccattgtactctcgcctgggcgacagagcgagactccatctcaaaaaaaaaaaaaaaaaaaaaaaaaaaaaaaagcaaaaacaaacaggtgagattcattttgataaaatagctgatttaacctaatatacctaaaacatcataattttaacataatcaatagaaacgtttttgcaagattttatgttattttttaccgtacgacgtcttggaaatcttggtttggaccagccatgttcaactgctcagtagccatgtgtggccagaggcggccgtattggacagtgcagatggtgcatgagggtgttcgggcagtgggaacagccagtacagaggccctgtgggggcacatgcctgctgctacgggaacagtgaggagccccgtgtggctgcagtggagtgagagggagaaggtgggagatgtaaccaacagtctcatcattcattcattaaatccttttttttctttttttgagactgagtttcgctcttgttgcccaggctggagtgcaatggtgccatctcggctcaccacaacctccacctcttgagttcaagcgattctcctgcctcagccttccgagtagctgggattacaggcatgcgccaccatgcccggctaattttgtatttttagtagagctggggtttctccctgttggtcaggctggtctcgaactcccgacctcaggtgatctgcccgccttgacctcccaaagtgctgtgattacaggcttgagccactgctcccagtccattgaatgtgtgtatatatagttgaataaagaagacaccggagtttgttctgtatcttctcctttcaaattctgtgccatttgaattttttcctattccttttatatatttttaattgacaaattgtacatatttatcatgtacatattgttttgaaatatgtatataccgtagaatggctaaatcaagatcattaacatatgtattactttacctattttccttttttcgttgtgtctctgccaggtttcggtatcagaatgactctgacctcatagaatgagttagagagcagttgctcctcctcaattgtgtggaataatttcagtaggattggtgccgccttttctttacacatctggtaggattcgactgtgaatccgtctagtctaaggttttttgtgctggttggtaggttttgtatgactaactcaattttggaactcatcgttggtttgttcagggtttccatttcttcctggttcaatcttgagaggttttatgtttccaggaatttctctatttcttctagttttctagtttgtgtgcatagaggcatgtggaatagtctcagggtttcttgtatatctctgggtcagtggaaatgtcacctttgtc

SEQ ID NO: 1887824 - DNA, 4001 bp, Homo sapiens; identical to SEQ ID NO: 1887814

SEQ ID NO: 1887825 - DNA, 4001 bp, Homo sapiens; identical to SEQ ID NO: 1887815

SEQ ID NO: 1887826 - DNA, 4001 bp, Homo sapiens; identical to SEQ ID NO: 1887816

SEQ ID NO: 1887827 - DNA, 4001 bp, Homo sapiens; identical to SEQ ID NO: 1887817

SEQ ID NO: 1887828 - DNA, 4001 bp, Homo sapiens; identical to SEQ ID NO: 1887818

SEQ ID NO: 1887829 - DNA, 4001 bp, Homo sapiens; identical to SEQ ID NO: 1887819

SEQ ID NO: 1887830 - DNA, 4001 bp, Homo sapiens; identical to SEQ ID NO: 1887820

SEQ ID NO: 1887831 - DNA, 4001 bp, Homo sapiens; identical to SEQ ID NO: 1887821

SEQ ID NO: 1887832 - DNA, 4001 bp, Homo sapiens; identical to SEQ ID NO: 1887822

SEQ ID NO: 1887833 - DNA, 4001 bp, Homo sapiens; identical to SEQ ID NO: 1887823

SEQ ID NO: 1887834 - DNA, 4001 bp, Homo sapiens
cgcccacctcgggctcccaaagtgctgggattccaggagtgagccgccgcgcccggccgtccactttgcttcttgcagaggctgatggcttgagtaatttccgagattcatagctcgagcgcgccctcttctgtctatgcagtgaagggcagctttttgcatccacggctttttgttgccaaggaggaatgtgcagtggccagatttgtttcttccccttttgttgctgttgttgttgttgctgctgctgttattgttgttgttgttgtattttattttgtagcatcctaaagtgtcccctccttctatttcttatccttatccaggtagggtgtagaaaagctaacttaaggggcaggggagagagagaaagagaggaagagaaaatgagaatgaatgacaatacatgaacccatgggtcaacctttatttcaaggcagcccaaaaggacggctctcccttctctttcactctcttctctaggtgtgaagctgatgcagcacaggcgagccccaaaattgaggcttagcccgggggggttcttggcttctcctagaaactaattcaagaagccgggcgcactggctcacgcctgtaatcccagcactttgggaggctgaggcggatggatcacttgaggtaaggagttcgagaccagcctggccaaaatggtgaaaccccatctctactaaatatacaaaaattacccgggcatggggacgggtgcctgtaatcccagctgttcaggaggctgaggcaggggaatcgcttgaacccgggaggcggaggttgcagtgaacagagatcgtgtcactgcactccagcctgggtgatagagtgaggctgcgaatcaaaaaaacaaaacaaaacaaaacaaaacaaaacaattcaagggcaggccggtggttttagacggcaacttttactgaagcgtcagtgcacagccacagcagagggacacacacctgtatcttttctaagactgggagaattttacaattgcttgactaattgaacagtgcctcgaggatgttacactaggttataaataaattcctgccgtgtttagctgaggcacgaacacaatgcccactgacaattccactttcctcgagggccattctttatgaaaggctgtaggagttccacgacattgttgattcctggattctccaagtctctagaacttgagaactacttttgtgtatttttttaacctttaagttcagagtttctaatgtccgttttatactactataaaatggtactatgtattctttatttatggtactatttacactttattttatacagactctggctccacaaaaatgttaaaaattagccaggtgcagtggtgcacatctgcggccccagctactcaggaggctgaggcagaaggattgcttgagctcggatggtcagggctgcaatgagctatgatcacacatcacatcaatgcactccagcctgggcaacacagtgagaacctgtctctaaaagaatagaagaggctgggcgcggtggctcacgcctgtcatcctaccactttgggagaccaaggcgagtggatcatttgaggccaggtgttcaagaccagcctggtcaacatggcgaaaccccatctcttggcaggcgactgtaatcccagctactcaggaggcttagataggagactcccttgaaccgacgaggcggaggttgcagtgagcgaagatcacaccactgcactccagcctgggcaacagagcaaggctcggtctcccaaaaaaaaaaaaaaaaaagacacatggaagtaatttaaaaacacttaggaagatgtcatttcttcctatcaaggcgtcctccctttatgttttgtcgttatattgggaacgataaaaaaaagtccttttttccgacccatgtggaccaggctggcctcgaactcgtgccctggaacccccgcctccgtgagggcccgagggcaggcgcaacctgcctgagccacaatggctccgggtgtcggggctgtcctttagtccctttgatcttacgcagggtgagggagccaatcaccagaggctcccccctgtcgtcacccagtccccagggccagtgagggccctgcgttccatggcgccccctggagggaggaaggggaactgtatctgagagttcagtatctgacaataaggaaaaggcataggagatcagatggtgcctagtgttctggagagaagaaacaacggggttggggaatgcggagttgcagtttataatacaggcctcatgtataaggcagacctcatggggaaggtaacatctgtgcagagaaatggagatgagggctaggagccatgcaaatactggaacatgcttgccagcagaagtcgagaaacatggccggcgcagtggcccacacctgtaatcccaggactttgggaggccgaggcaggtagatcacgaggtcagcagttcgagaccagcctggccaacatggtgaaaccctgtctctactaaaaatacaaaaattagctgggtgtggtggcacacgcctgtaatcccagccacttgggagggtgaggtaggagaatcgcttgaacctgggaggtagaggttgcagtgatgcagtgagccgagaccacgccattgtactctagcctgggcgacagagcgagcctccatctcaaaaaaaaaaaaaaaaaaaaaagcaaaaacaaacaggcgagattcatttggataaaatagctgatttaacctaatatacctaaaacatcataattttaacataatcaatagaaacatttttgcaagattttatgttattttttaccatacgacgtcttggaaatgttggtttggaccagccatgttcaactgctcagtagccatgtgtggccagaggcggccatattggacagtgcagatggtgcatgagggtgttcgggcagtgggaacagccagtacagaggcccagtgggggcacatgcctgctgctacgggaacagtgaggagccccgtgtggctgcagtggagtgagagggagaaggtgggagatgtaaccaacagtctcatcattcattcattaaatccttttttttctttttttgagactgagtttcgctcttgttgcccaggctggagtgcaatggtgccatctcggctcaccacaacctccacctcttgagttcaagcgattctcctgcctcagccttccgagtagctgggattacaggcatgcgccaccatgcccggctaattttgtatttttagtagagctggggtttctccctgttggtcaggctggtctcgaactcccgacctcaggtgatctgcccgccttgacctcccaaagtgctgtgattacaggcttgagccactgctcccagtccattgaatgtgtgtatatatagttgaataaagaagacaccggagtttgttctgtatcttctcctttcaaattctgtgccatttgaattttttcctattccttttatatatttttaattgacaaattgtacatatttatcatgtacatattgttttgaaatatgtatataccgtagaatggctaaatcaagatcattaacatatgtattactttacctattttccttttttcgttgtgtctctgccaggtttcagtatcagaatgactctgacctcatagaatgagttagagagcagttgctcctcctcaattgtgtggaataatttcagtaggattggtgccggcttttctttacacatctggtaggattcgactgtgaatccgtctagtctaaggttttttgtgctggttggtaggttttgtatgactaactcaattttggaactcatcgttggtttgttcagggtttccatttcttcctggttcaatcttgagaggttttatgtttccaggaatttctctatttcttctagttttctagtttgtgtgcatagaggcatgtggaatagtctcagggtttcttgtatatctgtgggtcagtggtaatgtcacctttgtcatttctgat

SEQ ID NO: 1887835 - DNA, 4001 bp, Homo sapiens
cgtgatccgcccacctcgggctcccaaagtgctgggattccaggagtgagccaccgcgcccggccgtccactttgcttcttgcagaggctgatggtttgagtaatttccgagattcatagctcgagcgcgccctgttctgtctatgcagtgaagggcagctttttgcatccgcggctttttgttggcaaggaggaatgtgcagtggccagatttgtttcttccccttttgttgctgttgttgttgttgctgctgctgttattgttgttgttgtattttattttgtagcatcctaaagtgtcccctccttctatttcttatccttatccaggtagggtgtagaaaagctaacttaaggggcaggggagagagagaaagagaggaagagaaaatgagaatgaatgacaatacatgaacccatgggtcaacctttatttcaaggcagcccaaaaggacggctctcccttctctttcactctcttctctaggtgtgaagctgatgcagcacaggcgagccccaaaattgaggcttagcccgggggggttcttggcttctcctagaaactaattcaagaagccgggcgcagtggctcacgcctgtaatcccagcactttgggaggctgaggcggatggatcacttgaggtaaggagttcgagaccagcctggccaacatggtgaaaccccatctctactaaatatacaaaaattacccgggcatggggacgggtgcctgtaatcccagctgttcaggaggctgaggcaggggaatcgcttgaacccgggaggcggaggttgcagtgaacagagatcgtgtcactgcactccagcctgggtgatagagtgaggctgcgaatcaaaaaaacaaaacaaaacaaaacaaaacaattcaagggcaggccggtggttttagacggcaacttttactgaagcgtcagtgcacagccacagcagagggacacacacctgtatcttttctaagactgggagaattttacaattgcttgactaattgaacagtgcctcgaggatgttacactaggttataaataaattcctgtcgtgtttagctgaggcacgaacacaatgcccactgacaattccactttcctcgagggccattctttatgaaaggctgtaggagttccacgacattgttgattcctggattctccaagtctctagaacttgagaactacttttgtgtatttttttaaactttaagtccagagtttctaatgtccgttttatactactataaaatggtactatgtattctttatttatggtactatttacactttattttatacagactctggctccacaaaaaatgttaaaaattagccaggtgcagtggtgcacatctgcggccccagctactcaggaggctgaggcagaaggattgcttgagctcggatggtcagggctgcaatgagctatgatcacacatcacatcaatgcactccagcctgggcaacacagtgagaccctgtctctaaaagaatagaagaggctgggcgcggtggctcacgcctgtcatcctaccactttgggagaccaaggcgagtggatcatttgaggccaggtgttcaagaccagcctggtcaacatggcgaaaccccatctcttggcaggcgactgtaatcccagctactcaggaggcttagataggagactcccttgaaccgacgaggcggaggttgcagtgagcgaagatcacaccactgcactccagcctgggcaacagagcaaggctcggtctcccaaaaaaaaaaaaaaaaaagacacatggaagtaatttaaaaacacttaggaagatgtcatttcttcctatcaaggcgtcctccctttatgttttgtcgttatattgggaacgataaaaaaaagtccttttttccgacccatgtggaccaggctggcctcgaactcgtgccctggaacccccgcctccgtgagggcccgagggcaggcgcaacctgcctgagccacaatggctccgggtgtcggggctgtcctttagtccctttgatcttacgcagggtgagggagccaatcaccagaggctcccccctgtcgtcacccagtccccagggccagtgagggccctgcgttccatggcgccccctggagggaggaaggggaactgtatctgagagttcagtatctgacaataaggaaaaggcataggagatcagatggtgcctagtgttctggagagaagaaacaacggggttggggaatgcggagttgcagtttataatacaggcctcatgtataaggcagacctcatggggaaggtaacatctgtgcagagaaatggagatgagggctaggagccatgcaaatactggaacatgcttgccagcagaagtcgagaaacatggctggcgcagtggcccacacctgtaatcccaggactttgggaggccgaggcaggtagatcacgaggtcagcagttcgagaccagcctggccaacatggtgaaaccctgtctctactaaaaatacaaaaattagctgggtgtggtggcacacgcctgtaatcccagccacttgggagggtgaggtaggagaatcgcttgaacctgggaggtagaggttgcagtgatgcagtgagccgagaccacgccattgtactctagcctgggcgacagagcgagcctccatctcaaaaaaaaaaaaaaaaaaaaaaagcaaaaacaaacaggcgagattcatttggataaaatagctgatttaacctaatatacctaaaacatcataattttaacataatcaatagaaacatttttgcaagattttatgttattttttaccatacgacgtcttggaaatgttggtttggaccagccatgttcaactgctcagtagccatgtgtggccagaggcggccgtattggacagtgcagatggtgcatgagggtgttcgggcagtgggaacagccagtacagaggcccagtgggggcacatgcctgctgctacgggaacagtgaggagccccgtgtggctgcagtggagtgagagggagaaggtgggagatgtaaccaacagtctcatcattcattcattaaatccttttttttctttttttgagactgagtttcgctcttgttgcccaggctggagtgcaatggtgccatctcggctcaccacaacctccacctcttgagttcaagcgattctcctgcctcagccttccgagtagctgggattacaggcatgcgccaccatgcccggctaattttgtatttttagtagagctggggtttctccctgttggtcaggctggtctcgaactcccgacctcaggtgatctgcccgccttgacctcccaaagtgctgtgattacaggcttgagccactgctcccagtccattgaatgtgtgtatatatagttgaataaagaagacaccggagtttgttctgtatcttctcctttcaaattctgtgccatttgaattttttcctattccttttatatatttttaattgacaaattgtacatatttatcatgtacatattgttttgaaatatgtatataccgtagaatggctaaatcaagatcattaacatatgtattactttacctattttccttttttcgttgtgtctctgccaggtttcggtatcagaatgactctgacctcatagaatgagttagagagcagttgctcctcctcaattgtgtggaataatttcagtaggattggtgccgccttttctttacacatctggtaggattcgactgtgaatccgtctagtctaaggttttttgtgctggttggtaggttttgtatgactaactcaattttggaactcatcgttggtttgttcagggtttccatttcttcctggttcaatcttgagaggttttatgtttccaggaatttctctatttcttctagttttctagtttgtgtgcatagaggcatgtggaatagtctcagggtttcttgtatatctgtgggtcagtggtaatgtcacctttgtcatttctga

SEQ ID NO: 1887836 - DNA, 4001 bp, Homo sapiens; identical to SEQ ID NO: 1887834

SEQ ID NO: 1887837 - DNA, 4001 bp, Homo sapiens; identical to SEQ ID NO: 1887835

SEQ ID NO: 1887838 - DNA, 4001 bp, Homo sapiens; identical to SEQ ID NO: 1887814

SEQ ID NO: 1887839 - DNA, 4001 bp, Homo sapiens; identical to SEQ ID NO: 1887815

SEQ ID NO: 1887840 - DNA, 4001 bp, Homo sapiens; identical to SEQ ID NO: 1887816

SEQ ID NO: 1887841 - DNA, 4001 bp, Homo sapiens; identical to SEQ ID NO: 1887817

SEQ ID NO: 1887842 - DNA, 4001 bp, Homo sapiens; identical to SEQ ID NO: 1887818

SEQ ID NO: 1887843 - DNA, 4001 bp, Homo sapiens; identical to SEQ ID NO: 1887819

SEQ ID NO: 1887844 - DNA, 4001 bp, Homo sapiens; identical to SEQ ID NO: 1887820

SEQ ID NO: 1887845 - DNA, 4001 bp, Homo sapiens; identical to SEQ ID NO: 1887821

SEQ ID NO: 1887846 - DNA, 4001 bp, Homo sapiens; identical to SEQ ID NO: 1887822

SEQ ID NO: 1887847 - DNA, 4001 bp, Homo sapiens; identical to SEQ ID NO: 1887823

SEQ ID NO: 1887848 - DNA, 4001 bp, Homo sapiens; identical to SEQ ID NO: 1887812

SEQ ID NO: 1887849 - DNA, 4001 bp, Homo sapiens; identical to SEQ ID NO: 1887813

SEQ ID NO: 1887850 - DNA, 4001 bp, Homo sapiens; identical to SEQ ID NO: 1887814

SEQ ID NO: 1887851 - DNA, 4001 bp, Homo sapiens; identical to SEQ ID NO: 1887815

SEQ ID NO: 1887852 - DNA, 4001 bp, Homo sapiens; identical to SEQ ID NO: 1887816

SEQ ID NO: 1887853 - DNA, 4001 bp, Homo sapiens; identical to SEQ ID NO: 1887817

SEQ ID NO: 1887854 - DNA, 4001 bp, Homo sapiens; identical to SEQ ID NO: 1887818

SEQ ID NO: 1887855 - DNA, 4001 bp, Homo sapiens; identical to SEQ ID NO: 1887819

SEQ ID NO: 1887856 - DNA, 4001 bp, Homo sapiens; identical to SEQ ID NO: 1887820

SEQ ID NO: 1887857 - DNA, 4001 bp, Homo sapiens; identical to SEQ ID NO: 1887821

SEQ ID NO: 1887858 - DNA, 4001 bp, Homo sapiens; identical to SEQ ID NO: 1887822

SEQ ID NO: 1887859 - DNA, 4001 bp, Homo sapiens; identical to SEQ ID NO: 1887823

SEQ ID NO: 1887860 - DNA, 4001 bp, Homo sapiens; identical to SEQ ID NO: 1887814

SEQ ID NO: 1887861 - DNA, 4001 bp, Homo sapiens; identical to SEQ ID NO: 1887815

SEQ ID NO: 1887862 - DNA, 4001 bp, Homo sapiens; identical to SEQ ID NO: 1887816

SEQ ID NO: 1887863 - DNA, 4001 bp, Homo sapiens; identical to SEQ ID NO: 1887817

SEQ ID NO: 1887864 - DNA, 4001 bp, Homo sapiens; identical to SEQ ID NO: 1887818

SEQ ID NO: 1887865 - DNA, 4001 bp, Homo sapiens; identical to SEQ ID NO: 1887819

SEQ ID NO: 1887866 - DNA, 4001 bp, Homo sapiens; identical to SEQ ID NO: 1887820

SEQ ID NO: 1887867 - DNA, 4001 bp, Homo sapiens; identical to SEQ ID NO: 1887821

SEQ ID NO: 1887868 - DNA, 4001 bp, Homo sapiens; identical to SEQ ID NO: 1887822

SEQ ID NO: 1887869 - DNA, 4001 bp, Homo sapiens; identical to SEQ ID NO: 1887823

SEQ ID NO: 1887870 - DNA, 4001 bp, Homo sapiens; identical to SEQ ID NO: 1887814

SEQ ID NO: 1887871 - DNA, 4001 bp, Homo sapiens; identical to SEQ ID NO: 1887815

SEQ ID NO: 1887872 - DNA, 4001 bp, Homo sapiens; identical to SEQ ID NO: 1887816

SEQ ID NO: 1887873 - DNA, 4001 bp, Homo sapiens; identical to SEQ ID NO: 1887817

SEQ ID NO: 1887874 - DNA, 4001 bp, Homo sapiens; identical to SEQ ID NO: 1887818

SEQ ID NO: 1887875 - DNA, 4001 bp, Homo sapiens; identical to SEQ ID NO: 1887819

SEQ ID NO: 1887876 - DNA, 4001 bp, Homo sapiens; identical to SEQ ID NO: 1887820

SEQ ID NO: 1887877 - DNA, 4001 bp, Homo sapiens; identical to SEQ ID NO: 1887821

SEQ ID NO: 1887878 - DNA, 4001 bp, Homo sapiens; identical to SEQ ID NO: 1887822

SEQ ID NO: 1887879 - DNA, 4001 bp, Homo sapiens; identical to SEQ ID NO: 1887823

SEQ ID NO: 1887880 - DNA, 4001 bp, Homo sapiens; identical to SEQ ID NO: 1887814

SEQ ID NO: 1887881 - DNA, 4001 bp, Homo sapiens; identical to SEQ ID NO: 1887815

SEQ ID NO: 1887882 - DNA, 4001 bp, Homo sapiens; identical to SEQ ID NO: 1887816

SEQ ID NO: 1887883 - DNA, 4001 bp, Homo sapiens; identical to SEQ ID NO: 1887817

SEQ ID NO: 1887884 - DNA, 4001 bp, Homo sapiens; identical to SEQ ID NO: 1887818

SEQ ID NO: 1887885 - DNA, 4001 bp, Homo sapiens; identical to SEQ ID NO: 1887819

SEQ ID NO: 1887886 - DNA, 4001 bp, Homo sapiens; identical to SEQ ID NO: 1887820

SEQ ID NO: 1887887 - DNA, 4001 bp, Homo sapiens; identical to SEQ ID NO: 1887821

SEQ ID NO: 1887888 - DNA, 4001 bp, Homo sapiens; identical to SEQ ID NO: 1887822

SEQ ID NO: 1887889 - DNA, 4001 bp, Homo sapiens; identical to SEQ ID NO: 1887823

SEQ ID NO: 1887890 - DNA, 4001 bp, Homo sapiens; identical to SEQ ID NO: 1887814

SEQ ID NO: 1887891 - DNA, 4001 bp, Homo sapiens; identical to SEQ ID NO: 1887815

SEQ ID NO: 1887892 - DNA, 4001 bp, Homo sapiens; identical to SEQ ID NO: 1887816

SEQ ID NO: 1887893 - DNA, 4001 bp, Homo sapiens; identical to SEQ ID NO: 1887817

SEQ ID NO: 1887894 - DNA, 4001 bp, Homo sapiens; identical to SEQ ID NO: 1887818

SEQ ID NO: 1887895 - DNA, 4001 bp, Homo sapiens; identical to SEQ ID NO: 1887819

SEQ ID NO: 1887896 - DNA, 4001 bp, Homo sapiens; identical to SEQ ID NO: 1887820

SEQ ID NO: 1887897 - DNA, 4001 bp, Homo sapiens; identical to SEQ ID NO: 1887821

SEQ ID NO: 1887898 - DNA, 4001 bp, Homo sapiens; identical to SEQ ID NO: 1887822

SEQ ID NO: 1887899 - DNA, 4001 bp, Homo sapiens; identical to SEQ ID NO: 1887823

SEQ ID NO: 1887900 - DNA, 4001 bp, Homo sapiens; identical to SEQ ID NO: 1887814

SEQ ID NO: 1887901 - DNA, 4001 bp, Homo sapiens; identical to SEQ ID NO: 1887815

SEQ ID NO: 1887902 - DNA, 4001 bp, Homo sapiens; identical to SEQ ID NO: 1887816

SEQ ID NO: 1887903 - DNA, 4001 bp, Homo sapiens; identical to SEQ ID NO: 1887817

SEQ ID NO: 1887904 - DNA, 4001 bp, Homo sapiens; identical to SEQ ID NO: 1887818

SEQ ID NO: 1887905 - DNA, 4001 bp, Homo sapiens; identical to SEQ ID NO: 1887819

SEQ ID NO: 1887906 - DNA, 4001 bp, Homo sapiens; identical to SEQ ID NO: 1887820

SEQ ID NO: 1887907 - DNA, 4001 bp, Homo sapiens; identical to SEQ ID NO: 1887821

SEQ ID NO: 1887908 - DNA, 4001 bp, Homo sapiens; identical to SEQ ID NO: 1887822

SEQ ID NO: 1887909 - DNA, 4001 bp, Homo sapiens; identical to SEQ ID NO: 1887823

SEQ ID NO: 1887910 - DNA, 4001 bp, Homo sapiens; identical to SEQ ID NO: 1887814

SEQ ID NO: 1887911 - DNA, 4001 bp, Homo sapiens; identical to SEQ ID NO: 1887815

SEQ ID NO: 1887912 - DNA, 4001 bp, Homo sapiens; identical to SEQ ID NO: 1887816

SEQ ID NO: 1887913 - DNA, 4001 bp, Homo sapiens; identical to SEQ ID NO: 1887817

SEQ ID NO: 1887914 - DNA, 4001 bp, Homo sapiens; identical to SEQ ID NO: 1887818

SEQ ID NO: 1887915 - DNA, 4001 bp, Homo sapiens; identical to SEQ ID NO: 1887819

SEQ ID NO: 1887916 - DNA, 4001 bp, Homo sapiens; identical to SEQ ID NO: 1887820

SEQ ID NO: 1887917 - DNA, 4001 bp, Homo sapiens; identical to SEQ ID NO: 1887821

SEQ ID NO: 1887918 - DNA, 4001 bp, Homo sapiens; identical to SEQ ID NO: 1887822

SEQ ID NO: 1887919 - DNA, 4001 bp, Homo sapiens; identical to SEQ ID NO: 1887823

SEQ ID NO: 1887920 - DNA, 4001 bp, Homo sapiens
cagaacagtctcgatctcctgacctcgtgatccgcccacctcgggctcccaaagtgctgggattccaggagtgagccaccgcgcccggccgtccactttgcttcttgcagaggctgatggtttgagtaatttccgagattcatagctcgagcgcgccctgttctgtctatgcagtgaagggcagctttttgcatccacggctttttgttggcaaggaggaatgtgcagtggccagatttgtttcttccccttttgttgctgttgttgttgttgtattttattttgtagcatcctaaagtgtcccctccttctatttcttatccttatccaggtagggtttagaaaagctaacttcaggggcaggggagagagagaaagagaggaagagaaaatgagaatgaatgacaatacatgaacccatgggtcaacctttatttcaaggcagcccaaaaggacggctctcccttctctttcactctcttctctgcgtgtgaagctgatgcagcacaggcgagccccaaaattgaggcttagcccgggggggttcttggcttctcctagaaactaattcaagaagccgggcgcagtggctcacgcctgtaatcccagcactttgggaggctgaggcggatggatcacttgaggtaaggagttcgagaccagcctggccaacatggtgaaaccccatctctactaaatatacaaaaattacccgggcatggggacgggtgcctgtaatcccagctattcaggaggctgaggcaggggaaccgcttgaacccgggaggcggaggttgcagtgagcagagatcgtgtcactgcactccagcctgggtgatagagtgaggctgagaatcaaaagaagaaaaaaaaaaaaaaaaaaacaattcaagggcaggccggtggttttagacggcaacttttactgaagcgtcagtgcacagccacagcagagggacacacacctgtatcttttctaagactgggagaattttacaattgcttgaataattgaacagtgcctcgaggatgttacactaggttataaataaattcctgccgtgtttagctgaggcacgaacacaatgcccactgacaattccactttcctcgagggccattctttatgaaaggctgtaggagttccacgacattgttgattcctggattctccaagtctctagaacttgagaactacttttgtgtatttttttaacctttaagtccagagtttctaatgtccgttttatactactataaaatggtactatgtattctttatttatggtactatttacactttattttatacagactctggctccacaaaaaggttaaaaattagccaggtgcagtggtgcacatctgcggccccagctactcaggaggctgaggcagaaggattgcttgagctcggatggtcagggctgcaatgagctatgatcacacatcacatcaatgcactccagcctgggcaacagagtgagaccctgtctctaaaagaatagaagaggctgggcgcggtggctcacgcctgtcatcctaccactttgggagaccaaggcgagtggatcatttgaggccaggtgttcaagaccagcctggtcaacatggcgaaaccccatctcttggcaggcgactgtaatcccagctactcaggaggctgagataggagactcccttgaaccgacgaggcggaggttgcagtgagccaagatcacaccactgcactccagcctgggcaacagagcaagcctcggtctcccaacaaaaaaaaaaaagaaagatacattgaagtaatttaaaaacacttaggaagatgtcatttcttcctatcaaggcgtcctccctttctgttttgttgttatattgggaacgataaaaaaatttttttttcaacccatgtggaccaggttggcctcgaactcgtgccctcgaaccctcgcctaccctgagggtccgagggcccgcgcaaccggccggagccacaatggctccgggtgtcggggctgtcctgtaggccctttgatcttacgcagggtgagggagccaatcaccagaggctcacccctgacgtcacccagtccccagggccagtgagggccctgcgttccatggcgccccctggagggaggaaggggaactgtagctgagagttcagtatctgacaataaggaaaaggcatagtagatcagatggtgcctagtgttctggagagaagaaacaacggggttggcgaattggcagttgcactttataatacaggcctcatgtataaggcagacctcatggggaaggtaacatctgtgcagagaaatggagatgagggctaggagccatgcaaatactggaacatgcttgccagcagaagtcgagaaacatggccggcacagtggcccacacctgtaatcccaggactttgggaggccgaggcaggtagatcacgaggtcagcagttcgagaccagcctggccaacatggtgaaacactgtctctacaaaaatacaaaaattagctgggtgtggtggcacacgcctataatcccagtcacttgggagggtgaggtaggagaatcgcttgaacctgggaggtagaggttgcagtgatgcagtgagctgagaccacgccattgtactctagcctgggcgacagagcgagactccatctcaaaaaaaaaaaaaaaaaaaaaaaagcaaaaacaaacaggtgacattcattttgataaaatagctgatttaacctaatatacctaaaacatcataattttaacataatcaatagaaacatttttgcaagattttatgttatttttttaccatacgacgtcttggaaatcttggtttggaccagccatgttcaactgctcagtagccatgtgtggccagaggcggccgtattggacagtgcagatggtgcatgagggtgttcgggcagtgggaacagccagtacagaggccctgtgggggcacatgcctgctgctacgggaacagtgaggagccccgtgtggctgcagtggagtgagagggagaaggtgggagatgtcaccaacggtctcatcattcattcattaaatccttttttttttttttttttttttttgagactgagtttcgttcttgtttcccaggctggagtgcaatggtgccatctcggctcaccacaacctccacctcttgagttcaagcgattctcctgcctcaccctcccgagtagctgggattacaggcatgcgtcaccatgcccggctaattttgtatttttagtagagctggggtttctctctgttggtcaggctggtctcgaactcccgacctcaggtgatctgcccgccttgacctcccaaagtgctgtgattacaggcttgagccactgctcctggtccattgaatgtgtgtatatatagttgaataaagaagagactggagtttgttctgtatcttctcctttcaaattctgcgccagttgaattttttcctcttccttttatatatttttaattgacaaattgtacatatttatcatgtacatattgttttgaaatatgtatataccgtagaatggctaaatcaagatcattaacatatgtattactttacctattttccttttttcgttgtgtctctgccaggtttcggtatcagaatgactctgacttcatagaatgagttagagagcagttgctcctcctcaattgtgtggaataatttcagtaggattggtgccggcttttctttacacatctggtagaattcgactgtgaatccgtctagtctaaggttttttgtgctggttggtaggtcttgtatgactaactcaattttggaactcatcgttggtttgttcagggtttccatttcttcctggttcaatcttgagaggttttatgtttccaggaatttatctatttcttctagttttctagtttgtgtgcatagaggcatgtggaatagtctcagggtttcttgtatgtctgtgggtcagtggtaatgtcacctctgtc

SEQ ID NO: 1887921 - DNA, 4001 bp, Homo sapiens
cagaacagtctcgatctcctgacctcgtgatccgcccacctcgggctcccaaagtgctgggattccaggagtgagccaccgcgcccggccgtccactttgcttcttgcagaggctgatggtttgagtaatttccgagattcatagctcgagcgcgccctgttctgtctatgcagtgaagggcagctttttgcatccacggctttttgttggcaaggaggaatgtgcagtggccagatttgtttcttccccttttgttgctgttgttgttgttgtattttattttgtagcatcctaaagtgtcccctccttctatttcttatccttatccaggtagggtttagaaaagctaacttcaggggcaggggagagagagaaagagaggaagagaaaatgagaatgaatgacaatacatgaacccatgggtcaacctttatttcaaggcagcccaaaaggacggctctcccttctctttcactctcttctctgcgtgtgaagctgatgcagcacaggcgagccccaaaattgaggcttagcccgggggggttcttggcttctcctagaaactaattcaagaagccgggcgcagtggctcacgcctgtaatcccagcactttgggaggctgaggcggatggatcacttgaggtaaggagttcgagaccagcctggccaacatggtgaaaccccatctctactaaatatacaaaaattacccgggcatggggacgggtgcctgtaatcccagctattcaggaggctgaggcaggggaaccgcttgaacccgggaggcggaggttgcagtgagcagagatcgtgtcactgcactccagcctgggtgatagagtgaggctgagaatcaaaagaagaaaaaaaaaaaaaaaaaacaattcaagggcaggccggtggttttagacggcaacttttactgaagcgtcagtgcacagccacagcagagggacacacacctgtatcttttctaagactgggagaattttacaattgcttgaataattgaacagtgcctcgaggatgttacactaggttataaataaattcctgccgtgtttagctgaggcacgaacacaatgcccactgacaattccactttcctcgagggccattctttatgaaaggctgtaggagttccacgacattgttgattcctggattctccaagtctctagaacttgagaactacttttgtgtatttttttaacctttaagtccagagtttctaatgtccgttttatactactataaaatggtactatgtattctttatttatggtactatttacactttattttatacagactctggctccacaaaaaggttaaaaattagccaggtgcagtggtgcacatctgcggccccagctactcaggaggctgaggcagaaggattgcttgagctcggatggtcagggctgcaatgagctatgatcacacatcacatcaatgcactccagcctgggcaacagagtgagaccctgtctctaaaagaatagaagaggctgggcgcggtggctcacgcctgtcatcctaccactttgggagaccaaggcgagtggatcatttgaggccaggtgttcaagaccagcctggtcaacatggcgaaaccccatctcttggcaggcgactgtaatcccagctactcaggaggctgagataggagactcccttgaaccgacgaggcagaggttgcagtgagccaagatcacaccactgcactccagcctgggcaacagagcaagcctcggtctcccaaaaaaaaaaaaaaaagaaagatacattgaagtaatttaaaaacacttaggaagatgtcatttcttcctatcaaggcgtcctccctttctgttttgttgttatattgggaacgataaaaaaatttttttttcaacccatgtggaccaggttggcctcgaactcgtgccctcgaaccctcgcctaccctgagggtccgagggcccgcgcaaccggccggagccacaatggctccgggtgtcggggctgtcctgtaggccctttgatcttacgcagggtgagggagccaatcaccagaggctcccccctgtcgtcacccagtccccagggccagtgagggccctgcgttccatggcgccccctggagggaggaaggggaactgtagctgagagttcagtatctgacaataaggaaaaggcatagtagatcagatggtgcctagtgttctggagagaagaaacaacggggttggcgaattggcagttgcactttataatacaggcctcatgtataaggcagacctcatggggaaggtaacatctgtgcagagaaatggagatgagggctaggagccatgcaaatactggaacatgcttgccagcagaagtcgagaaacatggccggcacagtggcccacacctgtaatcccagcactttgggaggccgaggcaggcagatcacgaggtcagcagttcgagaccagcctggccaacatggtgaaaccctgtctctactaaaaatacaaaaattagctgggtgtggtggcacactcctgtaatcccagccacttgggagggtgaggtaggagaatggcttgaacctgggaggtagaggttgcagtgatgcagtgagctgagaccacaccattgtactctagcctgggcgacagagcgagactccatctcaaaaaaaaaaaaaaaaaaaagcaaaaacaaacaggtgagattcattttgataaaatagctgatttaacctaatatacctaaaacatcataattttaacataatataaacatttttgcaagattttatgttattttttaccatacgacgtcttggaaatcaagaaacagagcaagcctcggtctcccaaaaaaaaaaaaaagatacattgaagtaatttaaaaacacataggaagatgtcatttcttcctatcaaggcgtcctccctttatgttttgttgttatattgggaacgataaaaaaatttttttttcaacccatgtggaccaggttggccttgaactcgtaccctcgaacccctgcctccctgagggcccgagggcaggcgcatccagccggagccacagtggctccgggtgtcggggctgtcctttcttccctttctccctctcgtctcctgtctcccgtctccctctccccacggtctccctctccctctccctctcctgtctcccgtctcccgtctccctctccacatggtctccctctccctctctttccacggtctccgtctgatgcccagccgaagctgcactgtactgctgccatctcactgcatcctccctgcctgattctcgtgcctcagcctgccgagtgcctgccattgcaggcacacgccgccacacctgactggttttcgtatttttttggtggagacggggtttcgctgtgttggccgggctggtctccagctcctaactgcgagtgatccgccagcctcggcctccccaggtgcggggattgcagatggagtctcgttcactcagtgctcaatggtgcccaggctggagtgcagtggcgtgatctcggctcgctacaacctccacctcccagccgcctgccttggcctcccaaagtgccgagattgcagcctctgcccggccgccaccccgtctgggaagtgaggagcgtctctgcctggccgcccatcgtctgggatgtgaggaatccctctgcctggctgcccagtctggaaagtgaggagcgtctctgcccggccgccatcccatctaggaagtgaggagcgcctctgcccggccgcgaccctgtctgggaggtgaggagcgtctctgcccagccgccccgtctgagaagtgaggagcccctctgcccggcagccgccccgtctgagaagtgaggagcccctccgcccggcagccaccccatctgggaagtgaggagcgtctccgcccggcagccaccccgtccgggagggaggtggggggggggtggtcagccccccgcccggccagccgccccgtccgggagggagg

SEQ ID NO: 1887922 - DNA, 4001 bp, Homo sapiens; identical to SEQ ID NO: 1887920

SEQ ID NO: 1887923 - DNA, 4001 bp, Homo sapiens; identical to SEQ ID NO: 1887921

SEQ ID NO: 1887924 - DNA, 4001 bp, Homo sapiens
caaagtgctgggattccaggagtgagccgccgcgcccggccgtccactttgcttcttgcagaggctgatggtttgagtaattttcgagattcatagctcgagcgcgccctcttctgtctatgcagtgaagggcagctttttgcatccgcggctttttgttggcaaggaggaatgtgcagtggccagatttgtttcttccccttttgttgctgttgttgttgttgctgctgctgttattgttgttgttgttgtattttattttgtagcatcctaaagtgtcccctccttctatttcttatccttatccaggtagggtgtagaaaagctaacttaaggggcaggggagagagagaaagagaggaagagaaaatgagaatgaatgacaatacatgaacccatgggtcaacctttatttcaaggcagcccaaaaggacggctctcccttctctttcactctcttctctaggtgtgaagctgatgcagcacaggcgagccccaaaattgaggcttagcccgggggggttcttggcttctcctagaaactaattcaagaagccgggcgcactggctcacgcctgtaatcccagcactttgggaggctgaggcggatggatcacttgaggtaaggagttcgagaccagcctggccaacatggtgaaaccccatctctactaaatatacaaaaattacccgggcatggggacgggtgcctgtaatcccagctgttcaggaggctgaggcaggggaatcgcttgaacccgggaggcggaggttgcagtgaacagagatcgtgtcactgcactccagcctgggtgatagagtgaggctgcgaatcaaaaaaacaaaacaaaacaaaacaaaacaaaacaaaacaaaacaaaacaattcaagggcaggccggtggttttagacggcaacttttactgaagcgtcagtgcacagccacagcagagggacacacacctgtatcttttctaagactgggagaattttacaattgcttgactaattgaacagtgcctcgaggatgttacactaggttataaataaattcctgccgtgtttagctgaggcacgaacacaatgcccactgacaattccactttcctcgagggccattctttatgaaaggctgtaggagttccacgacattgttgattcctggattctccaagtctctagaacttgagaactacttttgtgtatttttttaaactttaagtccagagtttctaatgtccgttttatactactataaaatggtactatgtattctttatttatggtactatttacactttattttatacagactctggctccacaaaaaatgttaaaaattagccaggtgcagtggtgcacatctgcggccccagctactcaggaggctgaggcagaaggattgcttgagctcggatggtcagggctgcaatgagctatgatcacacatcacatcaatgcactccagcctgggcaacagagtgagacgctgtctctaaaagaatagaagaggctgggcgcggtggctcacgcctgtcatcctaccactttgggagaccaaggcgagtggatcatttgaggccaggtgttcaagaccagcctggtcaacatggcgaaaccccatctcttggcaggcgactgtaatcccagctactcaggaggctgagataggagactcccttgaaccgacgaggcagaggttgcagtgagccaagatcacaccactgcactccagcctgggcaacagagcaagcctcggtctcccaaaaaaaaaaaaaaaaagaaagatacattgaagtaatttaaaaacacttaggaagatgtcatttcttcctatcaaggcgtcctccctttatgttttgtcgttatattgggaacgataaaaaaaatttttttttcaacccatgtggaccaggttggcctcgaactcgagccctcgaaccctcgcctctctgagggtccgagggcccgcgcaaccggccggagccacaatagctccgggtgtcggggctgacctttaggccctttgatcttacgcagggtgagggagccaatcaccagaggctcacccctgacgtcacccagtccccagggccagtgagggccctgcgttccatggcgccccctggagggaggaaggggaactgtatctgagagttcagtatctgacaataaggaaaaggcataggagatcagatggtgcctagtgttctggagagaagaaacaacggggttggcgaattggcagttgcactttataatacaggcctcatgtataaggcagacctcatggggaagataacatctgtgcagagaaatggagatgagggctaggagccatgcaaatactggaacatgcttgccagcagaagtcgagaaacatggccggcgcagtggcccacacctgtaatcccaggactttgggaggccgaggcaggtagatcacgaggtcagcagttcgagaccagcctggccaacatggtgaaaccctgtctctacaaaaatacaaaaattagctgggtgtggtggcacacgcctgtaatcccagccacttgggagggtgaggtaggagaatcgcttgaacctgggaggtagaggttgcagtgatgcagtgagctgagaccacgccattgtactctagcctgggcgacagagcgagactccatctcaaaaaaaaaaaaaaaaaagcaaaaacaaacaggcgagattcattttgataaaatagctgatttaacctaatatacctaaaacatcataattttaacataatcaatagaaacatttttgcaaaattttatgttgttttttttaccacacgacgtcttggaaatcttggtttggaccagccatgttcaactgctcagtagccatgtgtggccagaggcggccgtattggacagtgcagatggtgcatgagggtgttcgggcagtgggaacagccagtacagaggccctgtgggggcacatgcctgctgctacgggaacagtgaggagccccgtgtggctgcagtggagtgagagggagaaggtgggagatgtcaccaacggtctcatcattcattcattaaatcctttttcttttttttttttttttttttgagactgagtttcgctcttgttgcccaggctggagtgcaatggtgccatctcggctcaccacaacctccacctcttgagttcaagcgattctcctgcctcaccctcccgagtagctgggattacaggcatgcgtcaccatgcccggctaattttgtatttttagtagagctggggtttctctctgttggtcaggctggtctcgaactcccgacctcaggtgatctgcccgccttgacctcccaaagtgctgtgattacaggcttgagccactgctcccggtccattgaacgtgtgtatatatagttgaataataagacactggagtttgttctgtatcttctcctttcaaattctacgccatttgaattttttcctcttccttttatatatttttaattgacaaattgtacatatttatcatgtacatattgttttgaaatatgtatataccgtagaatggctaaatcaagatcattaacatatgtattactttacctattttccttttttcgttgtgtctctgccaggtttcggtatcagaatgactctgacctcatagaatgagttagagagcagttgctcctcctcaattgtgtggaataatttcagtaggattggtgccggcttttctttacacatctggtagaattcgactgtgaatccgtctagtctaaggttttttgcgctggttggtaggtcttgtatgactaactcaattttggaactcatcgttggtttgttcagggtttccatttcttcctggttcaatcttgagaggttttatgtttccaggaatttctctatttcttctagttttctagtttttgtgcatagaggcatttggaatagtctcagggtttcttgtatgtctgtgggtcagtggtaatgtcacctctgtcatt

SEQ ID NO: 1887925 - DNA, 4001 bp, Homo sapiens
cccacctcgggctcccaaagtgctgggattccaggagtgagccgccgcgcccggccgtccactttgcttcttgcagaggctgatggtttgagtaattttcgagattcatagctcgagcgcgccctcttctgtctatgcagtgaagggcagctttttgcatccgcggctttttgttggcaaggaggaatgtgcagtggccagatttgtttcttccccttttgttgctgttgttgttgttgctgctgctgttattgttgttgttgttgtattttattgtgtagcatcctaaagtgtcccctccttctatttcttatccttatccaggtagggtgtagaaaagctaacttaaggggcaggggagagagagaaagagaggaagagaaaatgagaatgaatgacaatacatgaacccatgggtcaacctttatttcaaggcagcccaaaaggacggctctcccttctctttcactctcttctctaggtgtgaagctgatgcagcacaggcgagccccaaaattgaggcttagcccgggggggttcttggcttctcctagaaactaattcaagaagccgggcgcactggctcacgcctgtaatcccagcactttgggaggctgaggcggatggatcacttgaggtaaggagttcgagaccagcctggccaacatggtgaaaccccatctctactaaatatacaaaaattacccgggcatggggacgggtgcctgtaatcccagctgttcaggaggctgaggcaggggaatcgcttgaacccgggaggcggaggttgcagtgaacagagatcgtgtcactgcactccagcctgggtgatagagtgaggctgcgaatcaaaaaaacaaaacaaaacaaaacaaaacaaaacaattcaagggcaggccggtggttttagacggcaacttttactgaagcgtcagtgcacagccacagcagagggacacacacctgtatcttttctaagactgggagaattttacaattgcttgactaattgaacagtgcctcgaggatgttacactaggttataaataaattcctgccgtgtttagctgaggcacgaacacaatgcccactgacaattccactttcctcgagggccattctttatgaaaggctgtaggagttccacgacattgttgattcctggattctccaagtctctagaacttgagaactacttttgtgtatttttttaaactttaagtccagagtttctaatgtccgttttatactactataaaatggtactatgtattctttatttatggtactatttacactttattttatacagactctggctccacaaaaaatgttaaaaattagccaggtgcagtggtgcacatctgcggccccagctactcaggaggctgaggcagaaggattgcttgagctcggatggtcagggctgcaatgagctatgatcacacatcacatcaatgcactccagcctgggcaacagagtgagacgctgtctctaaaagaatagaagaggctgggcgcggtggctcacgcctgtcatcctaccactttgggagaccaaggcgagtggatcatttgaggccaggtgttcaagaccagcctggtcaacatggcgaaaccccatctcttggcaggcgactgtaatcccagctactcaggaggctgagataggagactcccttgaaccgacgaggcagaggttgcagtgagccaagatcacaccactgcactccagcctgggcaacagagcaagcctcggtctcccaaaaaaaaaaaaaaaaagaaagatacattgaagtaatttaaaaacacttaggaagatgtcatttcttcctatcaaggcgtcctccctttatgttttgtcgttatattgggaacgataaaaaaaatttttttttcaacccatgtggaccaggttggcctcgaactcgagccctcgaaccctcgcctctctgagggtccgagggcccgcgcaaccggccggagccacaatagctccgggtgtcggggctgacctttaggccctttgatcttacgcacggtgagggagccaatcaccagaggctcacccctgacgtcacccagtccccagggccagtgagggccctgcgttccatggcgccccctggagggaggaaggggaactgtatctgagagttcagtatctgacaataaggaaaaggcataggagatcagatggtgcctagtgttctggagagaagaaacaacggggttggcgaattggcagttgcactttataatacaggcctcatgtataaggcagacctcatggggaagataacatctgtgcagagaaatggagatgagggctaggagccatgcaaatactggaacatgcttgccagcagaagtcgagaaacatggccggcgcagtggcccacacctgtaatcccaggactttgggaggccgaggcaggtagatcacgaggtcagcagttcgagaccagcctggccaacatggtgaaaccctgtctctacaaaaatacaaaaattagctgggtgtggtggcacacgcctgtaatcccagccacttgggagggtgaggtaggagaatcgcttgaacctgggaggtagaggttgcagtgatgcagtgagctgagaccacgccattgtactctagcctgggcgacagagcgagactccatctcaaaaaaaaaaaaaaaaagcaaaaacaaacaggcgagattcattttgataaaatagctgatttaacctaatatacctaaaacatcataattttaacataatcaatagaaacatttttgcaaaattttatgttgttttttttaccacacgacgtcttggaaatcttggtttggaccagccatgttcaactgctcagtagccatgtgtggccagaggcggccgtattggacagtgcagatggtgcatgagggtgttcgggcagtgggaacagccagtacagaggccctgtgggggcacatgcctgcttctacgggaacagtgaggagccccgtgtggctgcagtggagtgagagggagaaggtgggagatgtcaccaacggtctcatcattcattcattaaatcctttttctttttttttttttttttttgagactgagtttcgctcttgttgcccaggctggagtgcaatggtgccatctcggctcaccacaacctccacctcttgagttcaagcgattctcctgcctcaccctcccgagtagctgggattacaggcatgcgtcaccatgcccggctaattttgtatttttagtagagctggggtttctctctgttggtcaggctggtctcgaactcccgacctcaggtgatctgcccgccttgacctcccaaagtgctgtgattacaggcttgagccactgctcccggtccattgaacgtgtgtatatatagttgaataataagacactggagtttgttctgtatcttctcctttcaaattctacgccatttgaattttttcctcttccttttatatatttttaattgacaaattgtacatatttatcatgtacatattgttttgaaatatgtatataccgtagaatggctaaatcaagatcattaacatatgtattactttacctattttccttttttcgttgtgtctctgccaggtttcggtatcagaatgactctgacctcatagaatgagttagagagcagttgctcctcctcaattgtgtggaataatttcagtaggattggtgccggcttttctttacacatctggtagaattcgactgtgaatccgtctagtctaaggttttttgcgctggttggtaggtcttgtatgactaactcaattttggaactcatcgttggtttgttcagggtttccatttcttcctggttcaatcttgagaggttttatgtttccaggaatttatctatttcttctagttttctagtttttgtgcatagaggcatgtggaatagtctcagggtttcttgtatgtctgtgggtcagtggtaatgtcacctctgtcatttc

SEQ ID NO: 1887926 - DNA, 4001 bp, Homo sapiens
ctcgggctcccaaagtgctgggattccaggagtgagccaccgcgcccggccgtccactttgcttcttgcagaggctgatggtttgagtaatttccgagattcatagctcgagcgcgccctgttctgtctatgcagtgaagggcagctttttgcatccacggctttttgttgccaaggaggaatgtgcagtggccagatttgtttcttccccttttgttgctgttgttgttgttgctgctgctgttattgttgttgttgttgtattttattttgtagcatcctaaagtgtcccctccttctatttcttatccttatccaggtagggtgtagaaaagctaacttaaggggcaggggagagagagaaagagaggaagagaaaatgagaatgaatgacaatacatgaacccatgggtcaacctttatttcaaggcagcccaaaaggacggctctcccttctctttcactctcttctctaggtgtgaagctgatgcagcacaggcgagccccaaaattgaggcttagcccgggggggttcttggcttctcctagaaactaattcaagaagccgggcgcagtggctcacgcctgtaatcccagcactttgggaggctgaggcggatggatcacttgaggtaaggagttcgagaccagcctggccaacatggtgaaaccccatctctactaaatatacaaaaattacccgggcatggggacgggtgcctgtaatcccagctgttcaggaggctgaggcaggggaatcgcttgaacccgggaggcggaggttgcagtgaacagagatcgtgtcactgcactccagcctgggtgatagagtgaggctgcgaatcaaaaaaacaaaacaaaacaaaacaaaacaaaacaaaacaattcaagggcaggccggtggttttagacggcaacttttactgaagcgtcagtgcacagccacagcagagggacacacacatgtatcttttctaagactgggagaattttacaattgcttgaataattgaacagtgcctcgaggatgttacactaggttataaataaattcctgccgtgtttagctgaggcacgaacacaatgcccactgacaattccactttcctcgagggccattctttatgaaaggctgtaggagttccacgacattgttgattcctggattctccaagtctctagaacttgagaactacttttgtgtatttttttaaactttaagtccagagtttctaatgtccgttttatactactataaaatggtactatgtattctttatttatggtactatttacactttattttatacagactctggctccacaaaaaatgttaaaaattagccaggtgcagtggtgcacatctgcggccccagctactcaggaggctgaggcagaaggattgcttgagctcggatggtcagggctgcaatgagctatgatcacacatcacatcaatgcactccagcctgggcaacagagtgagacgctgtctctaaaagaatagaagaggctgggcgcggtggctcacgcctgtcatcctaccagtttgggagaccaaggcgagtggatcatttgaggccaggtgttcaagaccagcctggtcaacatggcgaaaccccatctcttggcaggcgactgtaatcccagctactcaggaggctgagataggagactcccttgaaccgacgaggcagaggttgcagtgagccaagatcacaccactgcactccagcctgggcaacagagcaagcctcggtctcccaaaaaaaaaaaaaaaaagaaagatacattgaagtaatttaaaaacacttaggaagatgtcatttcttcctatcaaggcgtcctccctttatgttttgttgttatattgggaacgataaaaaaaatttttttttcaacccatgtggaccaggttggcctcgaactcgagccctcgaaccctcgcctctctgagggtccgagggcccgcgcaaccggccggagccacaatagctccgggtgtcggggctgacctttaggccctttgatcttacgcagggtgagggagccaatcaccagaggctcacccctgacgtcacccagtccccagggccagtgagggccctgcgttccatggcgccccctggagggaggaaggggaactgtatctgagagttcagtatctgacaataaggaaaaggcataggagatcagatggtgcctagtgttctggagagaagaaacaacggggttggcgaattggcagttgcactttataatacaggcctcatgtataaggcagacctcatggggaagataacatctgtgcagagaaatggagatgagggctaggagccatgcaaatactggaacatgcttgccagcagaagtcgagaaacatggccggcgcagtggcccacacctgtaatcccaggactttgggaggccgaggcaggtagatcacgaggtcagcagtttgagaccagcctggccaacatggtgaaaccctgtctctacaaaaatacaaaaattagctgggtgtggtggcacacgcctttaatcccagccacttgggagggtgaggtaggagaatcgcttgaacctgggaggtagaggttgcagtgatgcagtgagctgagaccacgccattgtactctagcctgggcgacagagcgagactccatctcaaaaaaaaaaaaaaaaaaaaaaagcaaaaacaaacaggcgagattcattttgataaaatagctgatttaacctaatatacctaaaacatcataattttaacataatcaatagaaacatttttgcaaaattttatgttgttttttttaccacacgacgtcttggaaatcttggtttggaccagccatgttcaactgctcagtagccatgtgtggccagaggcggccgtattggacagtgcagatggtgcatgagggtgttcgggcagtgggaacagccagtacagaggccctgtgggggcacatgcctgctgctacgggaacagtgaggagccccgtgtggctgcagtggagtgagagggagaaggtgggagatgtcaccaacggtctcatcattcattcattaaatcctttttttttttttttttttttttttgagactgagtttcgctcttgttgcccaggctggagtgcaatggtgccatctcggctcaccacaacctccacctcttgagttcaagcgattctcctgcctcaccctcccgagtagctgggattacaggcatgcgtcaccatgcccggctaattttgtatttttagtagagctggggtttctctctgttggtcaggctggtctcgaactcccgacctcaggtgatctgcccgccttgacctcccaaagtgctgtgattacaggcttgagccactgctcccggtccattgaacgtgtgtatatatagttgaataaagaagacactggagtttgttctgtatcttctcctttcaaattctacgccatttgaattttttcctcttccttttatatatttttaattgacaaattgtacatatttatcatgtacatattgttttgaaatatgtatataccgtagaatggctaaatcaagatcattaacatatgtattactttacctattttccttttttcgttgtgtctctgccaggtttcggtatcagaatgactctgacctcatagaatgagttagagagcagttgctcctcctcaattgtgtggaataatttcagtaggattggtgccggcttttctttacacatctggtagaattcgactgtgaatccgtctagtctaaggttttttgcgctggttggtaggtcttgtatgactaactcaattttggaactcatcgttggtttgttcagggtttccatttcttcctggttcaatcttgagaggttttatgtttccaggaatttctctatttcttctagttttctagtttttgtgcatagaggcatgtggaatagtctcagggtttcttgtatgtctgtgggtcagtggtaatgtcacctctg

SEQ ID NO: 1887927 - DNA, 4001 bp, Homo sapiens; identical to SEQ ID NO: 1887924

SEQ ID NO: 1887928 - DNA, 4001 bp, Homo sapiens; identical to SEQ ID NO: 1887925

SEQ ID NO: 1887929 - DNA, 4001 bp, Homo sapiens; identical to SEQ ID NO: 1887926

SEQ ID NO: 1887930 - DNA, 4001 bp, Homo sapiens
gggctcccaaagtgctgggattccaggagtgagccaccgcgcccggccgtccactttgcttcttgcagaggctgatggtttgagtaatttccgagattcatagctcgagcgcgccctgttctgtctatgcagtgaagggcagctttttgcatccgcggctttttgttggcaaggaggaatgtgcagtggccagatttgtttcttccccttttgttgctgttgttgttgttgctgctgctgttattgttgttgttgttgtattttattttgtagcatcctaaagtgtcccctccttctatttcttatccttatccaggtagggtgtagaaaagctaacttaaggggcaggggagagagagaaagagaggaagagaaaatgagaatgaatgacaatacatgaacccatgggtcaacctttatttcaaggcagcccaaaaggacggctctcccttctctttcactctcttctctaggtgtgaagctgatgcagcacaggcgagccccaaaattgaggcttagcccgggggggttcttggcttctcctagaaactaattcaagaagccgggcgcagtggctcacgcctgtaatcccagcactttgggaggctgaggcggatggatcacttgaggtaaggagttcgagaccagcctggccaacatggtgaaaccccatctctactaaatatacaaaaattacccgggcatggggacgggtgcctgtaatcccagctgttcaggaggctgaggcaggggaatcgcttgaacccgggaggcggaggttgcagtgaacagagatcgtgtcactgcactccagcctgggtgatagagtgaggctgcgaatcaaaaaaacaaaacaaaacaaaacaaaacaaaacaaaacaaaacaattcaagggcaggccggtggttttagacggcaacttttactgaagcgtcagtgcacagccacagcagagggacacacacctgtatcttttctaagactgggagaattttacaattgcttgactaattgaacagtgcctcgaggatgttacactaggttataaataaattcctgccgtgtttagctgaggcacgaacacaatgcccactgacaattccactttcctcgagggccattctttatgaaaggctgtaggagttccacgacattgttgattcctggattctccaagtctctagaacttgagaactacttttgtgtatttttttaaactttaagtccagagtttctaatgtccgttttatactactataaaatggtactatgtattctttatttatggtactatttacactttattttatacagactctggctccacaaaaaatgttaaaaattagccaggtgcagtggtgcacatctgcggccccagctactcaggaggctgaggcagaaggattgcttgagctcggatggtcagggctgcaatgagctatgatcacacatcacatcaatgcactccagcctgggcaacagagtgagaccctgtctctaaaagaatagaagaggctgggcgcggtggctcacgcctgtcatcctagcactttgggagaccaaggcgagtggatcatttgaggccaggtgttcaagaccagcctggtcaacatggcgaaaccccatctcttggcaggcgactgtaatcccagctactcaggaggctgagataggagactcccttgaaccgacgaggcagaggttgcagtgagccaagatcacaccactgcactccagcctgggcaacagagcaagcctcggtctcccaaaaaaaaaaaaaaaagaaagatacattgaagtaatttaaaaacacttaggaagatgtcatttcttcctatcaagacgtcctccctttatgttttgttgttatattgggaacgataaaaaaatttttttttcaacccatgtggaccaggttggcctcgaactcgtgccctcgaaccctcgcctctctgagggtccgagggcccgcgcaaccggccggagccacaatggctccgggtgtcggggctgacctttaggccctttgatcttacgcagggtgagggagccaatcaccagaggctcacccctgacgtcacccagtccccagggccagtgagggccctgcgttccatggcgccccctggagggaggaaggggaactgtatctgagagttcagtatctgacaataaggaaaaggcataggagatcagatggtgcctagtgttctggagagaagaaacaacggggttggcgaattggcagttgcactttataatacacgcctcatgtataaggcagacctcatggggaagataacatctgtgcagagaaatggagatgagggctaggagccatgcaaatactggaacatgcttgccagcagaagtcgagaaacatggccggcgcagtggcccacacctgtaatcccaggactttgggaggccgaggcaggtagatcacgaggtcagcagttcgagaccagcctggccaacgtggtgaaaccctgtctctacaaaaatacaaaaattagctgggtgtggtggcacacgcctgtaatcccagccacttgggagggtgaggtaggagaatcgcttgaacctgggaggtagaggttgcagtgatgcagtgagctgagaccacgccattgtactctagcctgggcgacagagcgagactccatctcaaaaaaaaaaaaaaaaaaaaaaaaagcaaaaacaaacaggcgagattcattttgataaaatagctgatttaacctaatatacctaaaacatcataattttaacataatcaatagaaacatttttgcaaaactttatgttgttttttttaccacacgacgtcttggaaatcttggtttggaccagccatgttcaactgctcagtagccatgtgtggccagaggcggccgtattggacagtgcagatggtgcatgagggtgttcgggcagtgggaacagccagtacagaggccctgtgggggcacatgcctgctgctacgggaacagtgaggagccccgtgtggctgcagtggagtgagagggagaaggtgggagatgtcaccaacggtctcatcattcattcattaaatccttttttttttttttttttttttttttgagactgagtttcgctcttgttgcccaggctggagtgcaatggtgccatctcggctcaccacaacctccacctcttgagttcaagcgattctcctgcctcaccctcccgagtagctgggattacaggcatgcgtcaccatgcccggctaattttgtatttttagtagacctggggtttctctctgttggtcaggctggtctcgaactcccgacctcaggtgatctgcccgccttgacctcccaaagtgctgtgattacaggcttgagccactgctcccggtccattgaacgtgtgtatatatagttgaataaagaagacactggagtttgttctgtatcttctcctttcaaattctacgccatttgaattttttcctcttccttttatatatttttaattgacaaattgtacatatttatcatgtacatattgttttgaaatatgtatataccgtagaatggctaaatcaagatcattaacatatgtattactttacctattttccttttttcgttgtgtctctgccaggtttcggtatcagaatgactctgacctcatagaatgagttagagagcagttgctcctcctcaattgtgtggaataatttcagtaggattggtgccggcttttctttacacatctggtagaattcgactgtgaatccgtctagtctaaggttttttgcgctggttggtaggtcttgtatgactaactcaattttggaactcatcgttggtttgttcagggtttccatttcttcctggttcaatcttgagaggttttatgtttccaggaatttctctatttcttctagttttctagcttttgtgcatagaggcatgtggaatagtctcagggtttcttgtatgtctgtgggtcagtggtaatgtcacct

SEQ ID NO: 1887931 - DNA, 4001 bp, Homo sapiens
aagtgctgggattccaggagtgagccaccgcgcccggccgtccactttgcttcttgcagaggctgatggtttgagtaatttccgagattcatagctcgagcgcgccctgttctgtctatgcagtgaagggcagctttttgcatccgcggctttttgttgccaaggaggaatgtgcagtggccagatttgtttcttccccttttgttgctgttgttgttgttgctgctgctgttattgttgttgttgttgtattttattttgtagcatcctaaagtgtcccctccttctatttcttatccttatccaggtagggtgtagaaaagctaacttaaggggcaggggagagagagaaagagaggaagagaaaatgagaatgaatgacaatacatgaacccatgggtcaacctttatttcaaggcagcccaaaaggacggctctcccttctctttcactctcttctctaggtgtgaagctgatgcagcacaggcgagccccaaaattgaggcttagcccgggggggttcttggcttctcctagaaactaattcaagaagccgggcgcagtggctcacgcctgtaatcccagcactttgggaggctgaggcggatggatcacttgaggtaaggagttcgagaccagcctggccaacatggtgaaaccccatctctactaaatatacaaaaattacccgggcatggggacgggtgcctgtaatcccagctgttcaggaggctgaggcaggggaatcgcttgaacccgggaggcggaggttgcagtgaacagagatcgtgtcactgcactccagcctgggtgatagagtgaggctgcgaatcaaaaaaacaaaacaaaacaaaacaaaacaaaacaaaacaaaacaaaacaattcaagggcaggccggtggttttagacggcaacttttactgaagcgtcagtgcacagccacagcagagggacacacacctgtatcttttctaagactgggagaattttacaattgcttgactaattgaacagtgcctcgaggatgttacactaggttataaataaattcctgccgtgtttagctgaggcacgaacacaatgcccactgacaattccactttcctcgagggccattctttatgaaaggctgtaggagttccacgacattgttgattcctggattctccaagtctctagaacttgagaactacttttgtgtatttttttaaactttaagtccagagtttctaatgtccgttttatactactataaaatggtactatgtattctttatttatggtactatttacactttattttatacagactctggctccacaaaaaatgttaaaaattagccaggtgcagtggtgcacatctgcggccccagctactcaggaggctgaggcagaaggattgcttgagctcggatggtcagggctgcaatgagctatgatcacacatcacatcaatgcactccagcctgggcaacagagtgagacgctgtctctaaaagaatagaagaggctgggcgcggtggctcacgcctgtcatcctaccactttgggagaccaaggcgagtggatcatttgaggccaggtgttcaagaccagcctggtcaacatggcgaaaccccatctcttggcaggcgactgtaatcccagctactcaggaggctgagataggagactcccttgaaccgacgaggcagaggttgcagtgagccaagatcacaccactgcactccagcctgggcaacagagcaagcctcggtctcccaaaaaaaaaaaaaaaaaaagaaagatacattgaagtaatttaaaaacacttaggaagatgtcatttcttcctatcaaggcgtcctccctttatgttttgttgttatattgggaacgataaaaaaaatttttttttcaacccatgtggaccaggttggcctcgaactcgtgccctcgaaccctcgcctctctgagggtccgagggcccgcgcaaccggccggagccacaatagctccgggtgtcggggctgacctttaggccctttgatcttacgcagggtgagggagccaatcaccagaggctcacccctgacgtcacccagtccccagggccagtgagggccctgcgttccatggcgccccctggagggatgaaggggaactgtatctgagagttcagtatctgacaataaggaaaaggcataggagatcagatggtgcctagtgttctggagagaagaaacaacggggttggcgaattggcagttgcactttataatacaggcctcatgtataaggcagacctcatggggaagataacatctgtgcagagaaatggagatgagggctaggagccatgcaaatactggaacatgcttgccagcagaagtcgagaaacatggccggcgcagtggcccacacctgtaatcccaggactttgggaggccgaggcaggtagatcacgaggtcagcagttcgagaccagcctggccaacatggtgaaaccctgtctctacaaaaatacaaaaattagctgggtgtggtggcacacgcctgtaatcccacccacttgggagggtgaggtaggagaatcgcttgaacctgggaggtagaggttgcagtgatgcagtgagctgagaccacgccattgtactctagcctgggcgacagagcgagactccatctcaaaaaaaaaaaaaaaaaaaaaaaaaaagcaaaaacaaacaggcgagattcatttttataaaatagctgatttaacctaatatacctaaaacatcataattttaacataatcaatagaaacatttttgcaaaattttatgttgttttttttaccacacgacgtcttggaaatcttggtttggaccagccatgttcaactgctcagtagccatgtgtggccagaggcggccgtattggacagtgcagatggtgcatgagggtgttcgggcagtgggaacagccagtacagaggccctgtgggggcacatgcctgctgctacgggaacagtgaggagccccgtgtggctgcagtggagtgagagggagaaggtgggagatgtcaccaacggtctcatcattcattcattaaatcctttttctttttttttttttttttgagactgagtttcgctcttgttgcccaggctggagtgcaatggtgccatctcggctcaccacaacctccacctcttgagttcaagcgattctcctgcctcaccctcccgagtagctgggattacaggcatgcgtcaccatgcccggctaattttgtatttttagtagagctggggtttctctctgttggtcaggctggtctcgaactcccgacctcaggtgatctgcccgccttgacctcccaaagtgctgtgattacaggcttgagccactgctcccggtccattgaacgtgtgtatatatagttgaataataagacactggagtttgttctgtatcttctcctttcaaattctacgccatttgaattttttcctcttccttttatatatttttaattgacaaattgtacatatttatcatgtacatattgttttgaaatatgtatataccgtagaatggctaaatcaagatcattaacatatgtattactttacctattttccttttttcgttgtgtctctgccaggtttcggtatcagaatgactctgacctcatagaatgagttagagagcagttgctcctcctcaattgtgtggaataatttcagtaggattggtgccgccttttctttacacatctggtaggattcgactgtgaatccgtctagtctaaggttttttgtgctggttggtaggttttgtatgactaactcaattttggaactcatcgttggtttgttcagggtttccatttcttcctggttcaatcttgagaggttttatgtttccaggaatttctctatttcttctagttttctagtttgtgtgcatagaggcatgtggaatagtctcagggtttcttgtatatctgtgggtcagtggtaatgtcaccttt

SEQ ID NO: 1887932 - DNA, 4001 bp, Homo sapiens; identical to SEQ ID NO: 1887924

SEQ ID NO: 1887933 - DNA, 4001 bp, Homo sapiens; identical to SEQ ID NO: 1887925

SEQ ID NO: 1887934 - DNA, 4001 bp, Homo sapiens; identical to SEQ ID NO: 1887926

SEQ ID NO: 1887935 - DNA, 4001 bp, Homo sapiens
aatgcccactgacaattccactttcctcgagggccattctttatgaaaggctgtaggagttccacgacattgttgattcctggattctccaagtctctagaacttgagaactacttttgtgtatttttttaacctttaagtccagagtttctaatgtccgttttatactactataaaatggtactatgtattctttatttatggtactatttacactttattttatacagactctggctccacaaaaaggttaaaaattagccaggtgcagtggtgcacatctgcggccccagctactcaggaggctgaggcagaaggattgcttgagctcggatggtcagggctgcaatgagctatgatcacacatcacatcaatgcactccagcctgggcaacagagtgagaccctgtctctaaaagaatagaagaggctgggcgcggtggctcacgcctgtcatcctaccactttgggagaccaaggcgagtggatcatttgaggccaggtgttcaagaccagcctggtcaacatggcgaaaccccatctcttggcaggcgactgtaatcccagctactcaggaggctgagataggagactcccttgaaccgacgaggcagaggttgcagtgagccaagatcacaccactgcactccagcctgggcaacagagcaagcctcggtctcccaaaaaaaaaaaaaaaagaaagatacattgaagtaatttaaaaacacttaggaagatgtcatttcttcctatcaaggcgtcctccctttctgttttgttgttatattgggaacgataaaaaaatttttttttcaacccatgtggaccaggttggcctcgaactcgtgccctcgaaccctcgcctaccctgagggtccgagggcccgcgcaaccggccggagccacaatggctccgggtgtcggggctgtcctgtaggccctttgatcttacgcagggtgagggagccaatcaccagaggctcccccctgtcgtcacccagtccccagggccagtgagggccctgcgttccatggcgccccctggagggaggaaggggaactgtagctgagagttcagtatctgacaataaggaaaaggcatagtagatcagatggtgcctagtgttctggagagaagaaacaacggggttggcgaattggcagttgcactttataatacaggcctcatgtataaggcagacctcatggggaaggtaacatctgtgcagagaaatggagatgagggctaggagccatgcaaatactggaacatgcttgccagcagaagtcgagaaacatggccggcacagtggcccacacctgtaatcccagcactttgggaggccgaggcaggcagatcacgaggtcagcagttcgagaccagcctggccaacatggtgaaaccctgtctctactaaaaatacaaaaattagctgggtgtggtggcacactcctgtaatcccagccacttgggagggtgaggtaggagaatggcttgaacctgggaggtagaggttgcagtgatgcagtgagctgagaccacaccattgtactctagcctgggcgacagagcgagactccatctcaaaaaaaaaaaaaaaaaaaagcaaaaacaaacaggtgagattcattttgataaaatagctgatttaacctaatatacctaaaacatcataattttaacataatataaacatttttgcaagattttatgttattttttaccatacgacgtcttggaaatcaagaaacagagcaagcctcggtctcccaaaaaaaaaaaaaagatacattgaagtaatttaaaaacacataggaagatgtcatttcttcctatcaaggcgtcctccctttatgttttgttgttatattgggaacgataaaaaaatttttttttcaacccatgtggaccaggttggccttgaactcgtaccctcgaacccctgcctccctgagggcccgagggcaggcgcatccagccggagccacagtggctccgggtgtcggggctgtcctttcttccctttctccctctcgtctcctgtctcccgtctccctctccccacggtctccctctccctctccctctcctgtctcccgtctcccgtctccctctccacatggtctccctctccctctctttccacggtctccgtctgatgcccagccgaagctgcactgtactgctgccatctcactgcatcctccctgcctgattctcgtgcctcagcctgccgagtgcctgccattgcaggcacacgccgccacacctgactggttttcgtatttttttggtggagacggggtttcgctgtgttggccgggctggtctccagctcctaactgcgagtgatccgccagcctcggcctccccaggtgcggggattgcagatggagtctcgttcactcagtgctcaatggtgcccaggctggagtgcagtggcgtgatctcggctcgctacaacctccacctcccagccgcctgccttggcctcccaaagtgccgagattgcagcctctgcccggccgccaccccgtctgggaagtgaggagcgtctctgcctggccgcccatcgtctgggatgtgaggaatccctctgcctggctgcccagtctggaaagtgaggagcgtctctgcccggccgccatcccatctaggaagtgaggagcgcctctgcccggccgcgaccctgtctgggaggtgaggagcgtctctgcccagccgccccgtctgagaagtgaggagcccctctgcccggcagccgccccgtctgagaagtgaggagcccctccgcccggcagccaccccatctgggaagtgaggagcgtctccgcccggcagccaccccgtccgggagggaggtggggggggggtggtcagccccccgcccggccagccgccccgtccgggagggaggtgggggggtcagccccctgcccgtccagccgccccgtccgggaggtgaggggcgcctctgcctggccgcccctactgggaagtgaggggcccctctgcccggccaccaccccgtctgggaggtgtacccaacagctcattgagaacgggccatgatgacaatggcggttttgtggaatagaaaggggggaaaggtggggaaaagattaagaaatcgcatggttgccgtgtctgtgtagaaagaagtagacatgggagacttttcattttgttctgtactaagaaaaattcttctgccttgggatcctgttgatctgtgaccttacccccaaccgtgtgctctctcaaacatgtgctgtgtccactcagggttaaatggattaagggcggagcaagatgtgctttgttaaacagatgcttgaaggcagcatgctccttaagagtcatcaccactccctaatcgcaagttcccagggacacaaacactgcggaaggccacagggtcctctgcctaggaaaaccagagacctttgttcacttgtttatctgctgaccttccctccactattgtcctatgaccctgccaaatccccctctgcgagaaacacccaagaatgattaaaaaaaaaaaagaaagtgttaatgacagatttgcctccattaaaagccaagaaagtcaaattattcaaattctgtctagggtatatatgaaagatttaaatgtaaaataatgttgtgaatttcaacacatttacttcatttttcagtatttttcaactagtttagcattccaggaaaaataaatttagaaaaaatatataaaaacttgcgcagggcacagtggctcatgcctgtaatcccagcacaggcctttgggaggccaaggtgggtggatcacttgagcctgggagtttaagactagcctgagcaacatggggagagcctgtctctacaaaaataatttaggaattagctaggcatggtagtgtgtgcttgtagtcccagctactcaggaggctgaggcaggaggatcccttgagcccaggagtttgttactgcagtgagctatgatctcaccaccaca

SEQ ID NO: 1887936 - DNA, 4001 bp, Homo sapiens
actgagtcattgagcacagaagatacatcaattttatgtgttagcaacatgtacaattctttttttttctttatttcttctaaaaaaaaaacaggatacatgtacagaacgtgcaggtttgtcacgtaggtatatgtgtgccatggtggtttgctgcacctgttggcctgtcctcaaagttccctccactcacccgatccttttttctttttttttttttttttttgagatagggtctcgctctgtctcccaggctagagtgcagtggtgtgatcacagctcactgcagcctcgcgtccaactcttgggctcaaatgatcctcccacctcagcctcccaagtagctgggattacaggcaggagccaccatgcttggctagttgaatttaatttttatttatttatttatttatttttttcatagagacagggccttgctattttactcacgctggtctcaaactcctcggctcaaatgatcctcctgcctcagcctcccaaatctgggattagacgtgagccactatgcccagcccagagcatttttatcacccaaaaatgaaactccacaaacattaagtaaacactccctgctctcctcttcccccagcctcgggcaaccactaatctaccatctgtctctgtgctgtacatttcatgtgaatggaattctgtgctaggtggcctcttgtgtctggcttctttcactcagcatcacatcttcgaggttcactcatgttgtagcatgcgtcagtgctgcatttttttctttcttcttttttttttttttttttttttgagatggagtctcgctctgtcacccaggctggagtgcagtggcacgatctcagctcactgcaacctccacctcccgggttcaaacgattctcctgcttcagcctcctgagtacctgggactacaggcacgtgccaccacgcccggctaattttttttgtatttttagtagagatgcggtttcaccatattgtccaggctggtcccgaactcctgacctagtgatccgcctgcctcggcctcccaaagtgctgggattacaggtgtgagccaccgcgcctggctgagttctgtacttttaagcttttctcttgacataaaattcagacgcgaaatgcagtttccgtgcagtgaggcacacaaacacctttgctgtggattccccatttcgcacatgggaacagatgcattttcccaggcaattaaataccaaggacttcctgaaggcactgagtgtccaggccaccgagtttgtccttgagtagctgtaaacaccctcacccccgggtatccaggaatctgcccgatgccctggtggccagctccaggcattaacagcttcctccccatttccagcagtttccttcagttactgagtggaaagttactgagtcagaggctgcggagatgaggttccttggcagatggctttcatttttacctctccctacctccctgtcgtccacacagccccaacacacacacacacacacacacacacacacacacacacacacacacttacacacacacagacctgttttctttttctttttttttttttttgagacggagtctcgctctttcgcccaggctggactgcagtggcgctgtcttggctcactgcaagctccgcctcccgggttcacgccattctcctgcctcagcctcccgagttgctgggactacaggcgcccgccactacgcccggctaattttttttgtatttttagtagagacggggtttcaccgtgttagccaggatggtctcgatctcctgacctcgtgatccgcccgcctcagcctcccaaagtgctgggattacaggcgtgagccaccgcgcccggcctttttttttttttttaatttttttttttttttcaacccatgtggaccaggttggcctcgaactcgtgccctcgaaccctcgcctccctgagggtccgagggcccgcgcaaccggctggagccacaatggctccacctgttttcttatctacaaaacatctgtttttatttaatatacatcattttatttaatatgggagggagaagaacagcagaaatagctccttaaagccccgttctacaggatgtagtggggaagagggaagctctgacgttagtctctcccttcatccatttcttttataaactgcctgctctatttttataaacattttgtcctggataaaccttcccaaaggccataatatacaatgaagaaagactaacagaaagcaaaacactaaacccttcttcctgaaaaaagataccacatacaaagtcaaaagacaaaagcagcctggggggaatgtttgtgacatgtatgacagactgtggatccacaataaataaagagctactacaaataaacaagaaaatgacaaacagcacaggaggaaaatggtcaaaaggtttgtaccaacacagaagaggaatatgaatgactagtaatgttcgacctcattggtaaccaggcacaataaaataaacatagtgagatcgcacagtagcaaagctacatggaaacagggggtctcctcctatgctaccagagagtaaaaatcagcacagcccgtttggagagcaattggggtgaacctatcaaatgacctgttacagatacatgtacccttcagcccagagattcatttccaggtacttaccctccacatgtatgtgaaaatgcacgtgggcaaagacattctttcatcttcattaggaggagccacgcaggcctggttaagtaacataggatgcacccacataacgggattccacacagactatacacagaatcacctccaagatgcactgatagcaagctgcagaaccacatacggtgtgatcctaagacatcgaaaaaaccagttatatcctcacaagtacgtgcatgaaatttatttatgtatttatgtgttttatttattaatttgtttccaatatggagcttcgctctgttgcctaggctggagtgcaatagcacaatcttggctcactgcaacctccgcctcccgggttcaagcgattctcctgcctcagcctcccaagtagctgggattacagggatgcgctaccacatcggctaattttttgtatttagtagagatgtggtttcaccatgttggccaggctggtccacccacctcggcctcccaaagtgcggggattacagatgtaagccactgtgcctggccttatttctttattttgagatagggtttgttctgttgaccaggctggagtgcagtagctagatcttggctctctgcagcctcaataccttgggctcaagcaatcctcccatctcagcctcccaagtagctgggatcgcaggtgtgatacctaccatgtccaggatatttttcttttttttttttttggtggagatgggggtctcactatgttgctcaggctggacacgaactcctggcctcaagcaatcctcctgccctggcctcccgaagtgctgggattataggtacgagccactgcgcctggccgggttcattccttttcaatgttgaggagtgctccattgcctggaggggccagagtttgtttttctattcatttttgaagaatatttaggttgtttccagtttttggtgaataaaaccactataaacattcgtgtggccaggcatggtggctcacgcctgtaatcccagcactttgggaggccgaggtgggcggatcatgaggtcaggagatcaagaccatcctggctaacacggtgaaacttgtctctactaaacaaaatacgaaaattagccgggcgtggtggcaggcacctatagtcccagctacttgggaggctgaggcaggagaatggcatgaacctgggaggcggagcttgtagtgagccgagatcgcatcactgcactccagcctgggagacagagcaagactctctctctcaaaaaaaaaaattcttgtgcattttcgttgtttttctgtttacaactacaaggtaaatgtc

SEQ ID NO: 1887937 - DNA, 4001 bp, Homo sapiens
cctttatattttgttgttatgatatagggaacaataaaattttttttttaaatcattgttgaccaggttggcctataacgtgtaccctgaaccacggcggatccagctgtccgggctctcctttctttcctttggtcttaggcacagcgatatagccaatcacgacaggctcacccgtgacatcacccagtccccagggccagcgagggccctgcgttccatggcgcatcttggcaggaggaaagtgacctgtatctgagagagagcagccaatagggacctctaactcgcgccgggtacctgcaccgtgtgcaacacccctcactcccccacggagacgccagtcactttccacgtccacatccccagtgcttgcggaagaaatcccgctaagagagagatatgcgaaaggtagggaagatccatagttccaggcatccaattatatacaagccttgactcaccaagcatccaatcagagtaatggatccaacgaactgcagcaggcatccaatcaggtaggacagggttgccaggatgacacgagtctctccatagggctcccagggtcagtgagctctagcgctgagcgccccctggcgctgggaaaggcgcggccgtctactccagcaagcgcgcgctggtcgaaggcagccagtaaggcagggacaagcccctgcgacgtcactagtcgccagccggccgccgcggcctgcgagctcgcgcgtgagttcgtgtgagctcccgccagcccgcgggcccgccgcgcgcacctgttgcaaagtggcgattcggccctaggcgctgctgcttccgactctttttattttttatcctgaagggaaagataaagggcgggaaagggcgtcaggcggggcgaggcgagaggctcgaggttcgaaggagatggtcagactgactgatggacctcagggcgacccctctgccccaggacaggcctagaagagcatgagaccccctaggaaacacccagagactgagcggaggaaacagctcccaggggcagagctcccagcaggcacaaacccagaggagcagaggacgattcggagaaggaaggaaagacgctgtgaaggagccagggatgacaggaagagaaggagaccgggaagggccctgaggcgagggaggcagggcctccgaccaggagcgaccagaggggatgtgacagagacggaagtgacagaaaaagactccacggtcacaggtggagcggccgacggcacaggggactgaggcaggggatggggatggcgacaggactgtgagaagacagcagcgaggacagtgcagcagtgggatcaacagcgacgaagaggatacagtccgaggcaaaggggagaggaccagagagagaagacagtgaatctgctgggagcgaactagagaggggacgaagacaaagatcccgggggccaggacagagatcagggagtctaagaaagacgcgagagacggccgagcgcgagggcacacccctgtaatcccagcactttgggaggccaaggggcgagatctcttgaggccagcagttcgagaccagcctcgccaacatggtgaaactccgtctctactaaaaataccaaaattggccaggcacggtggcgtgggcctgtaatcccagctactcgggaggctgagacaggagactcgcttgaacccaggaggcggaggttgcagtgagccaagatcacaccactgcactccagcctgggctacagagcgaggctcagtctcccaaaaaaaaaaaaaaaaaaaaaaagatacattgaagtaatttaaaaacacttaggaagatgtcatttcttcctatcaaggcgtcctccctttatgttttgttgttatatagggaacgataaaaaaaattttttttttcctaccaatgtggaccaagttggcctcgaactctgtaccctcacaccctcgcctccctgagggcccgagggccggcgcaatcggccggagccacaatggctccggctgtcggggctctcctttcttccctttgatcttacgcagggtgatggagccaatcacgagaggctcacccctgacgtcacccagtccccagagccagtgagggccctgcgttccatggcgccccctggagggaggaaggggaactgtatctgagagagagcagccaattgggtccgctgactccggccgggttcccgtgccacgtccaacacccctcactccccaacggagactcaatttactttccttgtccacatccccagtgcttgcggaagatatcccgctaagagagagacatgccaaaggtagggtagatccacatttccaggcatccagttatgtacaagccttgacccaccaggcatccgatcagagtaatggatccaacgaacggcagcaggtatccaatcaggtaggacagggttgccaggatgacacgagtctctccatagggctcccagggtcagtgagctctagcgctgagcgccccctggcgctgggaaaggcgcggccgtctactccagcaagcgcgcgctggtcgaaggcagccagtaaggcagggacaagcccctgcgacgtcactagtcgccagccggccgccgcggcctgcgagctcgcgcgtgagttcgtgtgagctcccgccagcccgcggacccgccgcgcacacctgttccagagtggcgattgggccctaggcgctgatgcttccgactctttttattttttatcctgaagggaaagataaagggcgggaaagggcgtcaggcgaggcgaggcgagaggctcgaggttcgaaggagatggtcagactgactgatggacctcagggcgacccctctgccccaggacaggcctagaagagcatgtgaccccctaggaaacacccagagactgagcggaggaaacagctcccaggggcagagctcccagcaggcgcaaacccagaggagcagaggacgattcggagaaggaaggaaagacgctgggaaggagccagggatgacaggaagagaaggagcggggaagggccctgaggcgagggaggcagggcctccgaccaggagcgaccagaggggatgtgacagagacggaagtgacagaaaaagactccacggtcacaggtggagcggccgacggcacaggggactgaggcaggggatggggatggcgacaggactgtgagaagacagcagcgaggacagtgcagcagtgggatcaacagcgacgaagaggatacagtccgaggcaaaggggagaggaccagagagagaagacagtgaatctgctgggagcgaactagagaggggacgaagacaaagatcccgggggccaggacagagatcagggagtctaagaaagacgcgagagacggccgagcgcgagggcacacccctgtaatcccagcactttgggaggccaaggcgggaggatcacttgatgccggaagttcaggaccatcctggccaacacggtgaaaccccgtctctactaaaaatacaaaaattaggcgggtctggtggcggcgcctgtagtgcctgctactggagagttccagctactggagaggctgaggcaggagaatcgcttgaactcgggaggcaaaggttgcagtttaccaagattgtgtcactgcactccagcctgggcgacagggtgagactacgtcaaaaaaacacaaagcaacaacaacaaaagaaaaaaaaaaaaagaaaaagtgagagaaagagagaagaaggagagggagaggagagggagaaggggaaggagaaggagaaggagaggggaagaagaggaaggaggaagatgggagagataccaaggggacagtaatagaaacagggaggactgtgacagaagggacagagactaagggacagtgataggggagaaagagataaggggatgtggccgacacagagaaggtgacagccatagagacagagaagacagagacccaaaggctataaagatatagtggacagtgttagacacatggcaga

SEQ ID NO: 1887938 - DNA, 4001 bp, Homo sapiens
cgcgttttcctcctccagagtgggaccttcttttcccccgagtggtcctgtctaggggtgccgctgccgggccccctctggtcttcctgctggagactggagcctttcgggagtcagcaggcgcccgggccaaccgcagccagcgtggggtgagcgatacttcaccggtgagtcatcagggtgagctggccgtgtgcgatgcagtcactgtctgggtgacagacccctggactgctgtggacttgggtgtgctcgaggtggaggtgttgggtgaggtgcctgcagctggcagcagttccctccgccagcacttctttgttacccgcttcgaggccgataaatctaaggaaggtggcccgggggtaggtggaggacctgccgccggggtgtggaccggggggcactgggtgtctgagtgcaaggccaagcagtcctatgggcgggcattgaccactgatgcccagggccgtgtggactggcgatggattcaaattggcactgcctgtgtctgcacactcctcagccggactggccgggcctgagacttatacccaggaactggtcaggcagaaaaagaacagagctggatgctgagagacctcagggttggcccagctgctctacggacggaccccagttggggaactcatcaaatcatcgcaaaatctcaactgtctgaatttgagctcaatctctgtaggatgggtgcaacaatgtggggttttgaaggttgaataggaactctcccgggggaacttgagggtaatcatgatgatgatgataataataatagccattatttactgagtgtttactctttcgtagccctaatacataactcctcggatcaactctcatggatttgatcattggtgacctttggtgttaagttgctgactgctcagtcacagaggacaccaccttgctcatcctggggagtgggagggcacatttcacgatgtgcatgggggaggagagaaactggaacatgcaagcagatggccaggggaccttgaggacatggtctacagaaggcctttaagtatctgggagctggggttcaaatgagaaatcttacttggtgagagcaggcaggggttggcttagaatattctgttttgagataaagagctaccgatcacacggggagtataagcaaggttcaatgagaagtgatcaggatgctggagagttcagccctgggcggggagctcaagtcaggtttctagccctcttccctgtgccatcctataccctacattgggaaagaaacagaccttaaaattgtccagcttgatggcatcgcggggaagggactaagtccagataatgtcctccgaggctgcggcctcgggggcaggacacacctcctgcgggcctattcaataatcagttaaatcacccgaagcacacgcatttccggggaccgctccgggcatcctggcttgagggtagagtgggcagaggtccctaagggagaggtggggctcgggctgaatccctcgttggcggcaccagggtcaagtggctaacctggcagcacagtcacggggaggccctctctcattgggcagaaactaagtccgaagccgcgcccctcctgggcgaggaggttccacctcctaggttcctgtgattctcctgcctcagcccgagtagtgggacatcccacttgctcccgccattctgtttaccacaggtgacgaccgccatggctgacaggcagggaggtcccccgaggaccgagcaaggctcggtatcccaaaaaaaaaaaaaaagatacattgaagtaatttaaaaacacttaggaagatgtcatttcttcctatcaaggcgtcctccctttatgttttgttgttatatagggaacgataaaaaaattttttttttttttcctaccaatggggcccaggttgacctcgaactccagtccctcacaccctcgcctagccttgagagcccgagggcaggctcaatcggccggagccacaatggctccggttgtcgggcccatcctttcttccctttgatcttacgcagggtgatggagccaatcacaagaggctcatccctgacgtcacccagtccccagggccagtgagggccctgcgttccgtggcgccccctggagggaggaaggggaactgcatctgagagagagcagccaattgggtccgctgactctggccaggttcccgtgccgcgtccaacacccctcactccctgtctcactcccccacggagactcaatttactttccatgtccacattcccagtgcttgcggaagatatcccgctaagagagagacatgtcaaaggtagggtagatccacatttccgggcaccaaagatggagatgttccaggaaagactgcagggcccctgggcaccttccacctccttccaggccatcactggcatgagaaggggcagacccgtgtgagctgtggaaggaggcctctttctggaggagcgtgacccccagtaagcttcaggtgggtcagttcctgagggtgcggatctgaaatgttggggtatctcaggtcctctgggctgtggggtgggctctgaaaggcaggtgtccgggtggtgggtcctgaatagaagatgccgggaagggtctctgggtctttgtgggtggtgtaccatgcgggatgggaaggccaggactgggggctgcagtctcagacccgggtgaagcagtgtccttgccccagaggctgctgctgttgctgctgctgagcatgggcgggacatgggcatccaaggagccgcttcggccacggtgccgccccatcaatgccaccctggctgtggagaaggagggctgccccgtgtgcatcaccgtcaacaccaccatctgtgccggctactgccccaccatggtgagctgcccggggccagggcaggtgctgccacctcagggccagacccacagaggcagcgggggaggaagggtggtctgcctctctggtcaggggctgcggaatggggtgtgggagggcaggaacagagggcttcctggacccctgagtctgagacctgtgggggcagctggggagctcagctgaggcgctggccccaggcacatgctcattcccccactcacacggcttccagacccgcgtgctgcagggggtcctgccggccctgcctcaggtggtgtgcaactaccgcgatgtgcgcttcgagtccatccggctccctggctgcccgcgcggcgtgaaccccgtggtctcctacgccgtggctctcagctgtcaatgtgcactctgccgccgcagcaccactgactgcgggggtcccaaggaccaccccttgacctgtgatgacccccgcttccaggactcctcttcctcaaaggcccctccccccagccttccaagtccatcccgtctcccggggccctaggacaccccgatcctcccacaataaaggcttctcaatccgcactctggaggtgtctttctgtgggctcagggcaatcacacacacagggtgggtccagcttccaaactattttatacagagtcacagtacagaactctggtagaaaacagggtggacggctgggcgtggtggctcacgcctgtaattgtcggaggctgcggtgggtggatcagctgaggtgaggggttccagaccaacatgaccaacatggagaaaccccatctctactaaaattacaaaatatcgtcgggcgtggtggtgcatgcctatactcccaggtacttgggaggcttaggcaggagaatctcttgatcctaggaggcggaggttgcagtgagccaagatcccgccattgcacttcagcctgggcaacaaaaacaaagctccatctcaaaaattagtaataataataataataataataataataatataattaaaaacgttcgtccaggcgcagtggctcatgcctgcaatcccagcactttgggaggccgaggcaggtgcatcacctgagttcaggacttcgagaccagcctggccaacatggt

SEQ ID NO: 1887939 - DNA, 4001 bp, Homo sapiens
cttgacattgtccccttttcctcctccagagtgggaccttattttcccccaagtggtcctgtctaggggtgccgctgccgggccccctctggtcttcctgctggagactggggccttttgggagtcagcaggcacccgggccaaccgcagccagcgaggggtgagcgatacttcaccggcgagtcatcagggtgagctggccgtgtgcgatgcagtcagtgtctgggtgacagacccccggaccgctgtggacttggttgtgctcgaggtggaggtgttgggtgaggtgcctgcagctggcagcagttccctccaccaacacttctttgtcacctgcttcaaggccgataactctgaagaaggtggcccaggggtaggtggaggggctgccgctggggtgtggaccggggggcactgggtgtctgagtgcaaggccaagcagtcctatgtgcgggcattgaccgctgatgcccagggccgtgtggactggcgatggattcaaactggcacagcctgtgtctgcacactcctcagccggactggccgggcctgagacttatacccaggaactggtcaggcagaaaaagaacagagctggatgctgagagacctcagggttggcccagctgctctacggacggaccccagttggggaactcatcaaatcatcgcaaaatcacaactctctgaatttgagctcaatctctgtaggatgggtgcaacaacgtggggttttgaaggttgaataggagctctcccaggggaacttgagggtaatcatgatgatgatgataataataatagccactatttactgagtgtttactctttcgtagccctaatacataactcctcggatcaactctcatggatttgatcattggtgacctttggtgttaagttgctgactgctcagtcacagaggacaccaccttgctcatcctggggagtgggagggcacatttcacgatgtgcatgggggaggagggaaactggaacatgcaagcagatggccaggggaccttgaggacatggtctacagaaggcctttaagtatctgggagctggggttcaaatgagaaatcttacttggtgagagtgggcaggggtcggcttagaatattttgttttgagataaagagctaccgatcacacggggagtataagcaaggttcaatgagaagtgatcaggatgctggagagttcagccctgggcggggagctcaagtcaggtttctagccctcttccctgtgccaacctataccctacactgggaaagaaacagaccttaaaattgtccagcttgatggcatcgcggggaagggactaagtccagataatgtcctctgaggctgaggcctcgggggcaggacacacctcctgcgggcctattcaataatcagttaaatcacctgaagcacacgcatttccggggaccgctccgggcatcctggcttgagggtagagtgggcagaggtccctaagggagaggtggggctcgggctgaatccctcgttggcggcaccagggtcaagtggctaacctggcagcacagtcacggggaggccctctctcattgggcagaaactaagtccgaagccgcgcccctcctgggcgaggaggttccacctcctaggttcctgtgattctcctgcctcagcccgagtagtgggacatcccacttgctcccgccattctgtttaccacaggtgacgaccgccatggctgacaggcagggaggtcccccgaggaccgagcaagcctcggtctcccaaaaaaaaaaaagatacattgaagtaatttaaaaacacttaggaagatgtcatttcttcctatcaaggcgtcctccctttatgttttgttattatatagggaacgataaaaaaatttttttctcaaccaatgtggacccggttggcctcgaactcgtaccctcgaaccctcccctccctgagggcccgagggcacgcgcaaccggtcggagccacaatagctcggggtgtcggggatctcctttcttccttttgaccttacgcagggtgatggagccaatcaggagaggctcacccctgacgtcacccagtccccagggccagtgagggccctgcgttccgtggcgccccctggagggaggaaggggaactgtatctgagagagagcagccaattgggtccgctgactccggccgggttcccgtgccgcgtccaacacccctcactccctgtctcactcccccacggagactcaatttactttccatgtccacatccccagtgcttgcggaagatatcccgctaagagagagacatgtcaaaggtagggtagatcgacatttccaggcaccaaagatggagatgttccaggaaagactgcagggcccctgggcaccttccacctgcttccaggccatcactggcatgagaaggggcagaccagtgtgagctgtggaaggaggcctctttctggaggagcgtgacccccagtaagcttcaggtggggcagttcctgagggtggggatctaaaatgttggggtatctgagatcctctgggctgtggggtgggctctgaaaggcaggtgtccgggtggtgggtcctgaataggagatgccacgaagggtctctgggtctttgtgggtggtgtaccacgcgggatgggaaggccaggactcggggctgcggtctcagacccgggtgaagcagtgtccttgtcccaggggctgctgctgttgctgctgctgagcatgggcgggacatgggcatccaaggagccgcttcggccacggtgccgccccatcaatgccaccctggctgtggagaaggagggctgccccgtgtgcatcaccgtcaacaccaccatctgtgccggctactgccccaccatggtgagctgcccggggccggggcaggtgctgccacctcagggccagacccacagaggcagcgggggaggaagggtggtctgcctctctggtcaggggctgcggaatggggtgtgggagggcaggaacagagggcttcctggacccctgagtctgagacctgtgggggcagctggggagctcagctgaggcgctggccccaggcacatgctcattctcccactcacacggcttccagacccgcgtgctgcagggggtcctgccggccctgcctcaggtggtgtgcaactaccgcgatgtgcgcttcgagtccatccggctccctggctgcccgcgcggcgtgaaccccgtggtctcctacgccgtggctctcagctgtcaatgtgcactctgccgccgcagcaccactgactgcgggggtcccaaggaccaccccttgacctgtgatgacccccgcttccaggcctcctcttcctcaaaggcccctccccccagccttccaagcccatcccgactcccggggccctcagacaccccgatcctcccacaataaaggcttctcaatccgcactctggcggtgtctttctgtgggctcagggcaaccacacacacagggtgggtccagcttccaaaccattttatacagagtcacagtacagaactctggtagaaaacagggtggacggctgggcgtggtggctcacgcctgtaatcccaccactttgggaggccgaggcaggcggatcatgaggtcaggagatcgagaccatcctggctaacacggtgaaaccccgtctctactaaaaatacgaaaagttatccgggcttggtggcgggcgcttgcaggagaatgcagtgaacctgggagcgggaggttgcagtgagcagagatcgcgccactgcactccagcctgcacgacagagcgagactccatctcaaaaaaaaaaaaaaaagaaagaaagaaagaaaaagaaaagagggtggagatgggggatgacatccagctcaggaggtgtccatggtctggccttccgtggggagaaggaaggccacacgattggtgtggcccagggggcagggcctcagcattctaagccgagctccctcttccaccctct

SEQ ID NO: 1887940 - DNA, 4001 bp, Homo sapiens
ccctagggtgggaaggagccagttgttggggacgggacccgtggggttctgtggtctacagggctgtcctcaggcctgggtcttacgcagaatgggtgcttgtgtgctgaccctgcccaggttctgggcgcctctccaagttcctgggtgttacaacaccccacaggtgaggctggaaaaggcctggtttcctggaaaccacacagctcctccacaggtagaggaaaggctgtgtccttgccctgagtgtggtggtgcccctgtagtcccagctacttgggaggctgaggcaggaggaccacttgagcccaggaggtcgaggctacagtaagccacgatctctccactgcactctagccagggcgacagagcaagaccctgtttcaaaaagccgtaactactacctagtcctggcttcctcctggtcctgggctctctgggacaaaggagggccccataggctgaccccagcacctgcacagcgtcacttcccacatcaatgtggaacccgatgttgagatcaagacagcaagccccagaagggccgctggcccagaacagggctgcccaaggtcacgcaacaaaggatgggaggctcccagagcctgagctcttggctgtgtctcaaacttctccaatgccagcttagcctccacctgacagaaggactcagccagggtgggattagtgtcatgcctggaattttccaggcctgaggcagtttcccagagatgagtacctgtggtgagtccttgacctccttgggcaagatgagggcgtcatctaagaggcccccaaccagtgaaagggaaacagcccccaagcagcagagagcgcccctcgggtgcccacttgtgtctactctgaaaactttgggaaccagagacttaggagaatccccagggagtgaacgccaaccccactatctagggagattctccctggtccagactcagcaggggagcctgggaggcctgtgtctcacaaggcagttgggacagatttagggcccaggacagacagtacccctgcagctcatagcccagggctgccagcagggctgagaactgaccaagcaagagggagctcaggggtgggggcgcctggagggcccactccaggacaggaggatgtgagggtttgtttgtttgcactgaagacccctcccaggacaaagaaatggcagctcagctgcaccccaggagctgactgggccggcctctcatagcacccctttgagctctgcagtgtgcaaagaaaacatgcggcgagcaccggggcgttcctgagtttatttggggcacacccggacgagggccctgcacctagaagaaggtgttgggcctcttggtggtgaagcgtggcttgtgctgacggcgcaggacccggtggggcagcgggaacttgatcttggagtcctgtgaggaagggaggcatgttgagggggttggaagcctcttaacaccccatcctgtggggccaccaaggtgtagccgccccccactgggctcctgcgtcagagcaggcacttccctccaggggagtcccccagggcactcacgtggaactgcttgacagccggccggcggcacttgctggccgcgatctcctccaccttcatgatctgaatggagtgggctcgggcgcggtgccgggcacccatgtctcggtctgtggaaaggagcggggccagggtgacggtgttgcctgggctctgggcattcagcaaacctcctgagtgcctgcccaatgacctgacacatcctgttggtcacagcaactgcctgagggctcggggctcacgggaaggtggtggtggggaagcgagatagcccaaggcctgggtccctgcagtcactggccactagagttgtggaacctccaaattcactttgaggggcacggccacagccccccaaaggcgacaagatccgcttgctgtttgcacctctgtttaaaccaccgctataagaaacagtgattcttgggtttaggtgcaatcagggaggtgtgggggtctcacagaccctggcaggtgagccagggaaaaggtgccagctcccaacactaggcaggggttcaattcggttctcagtgggtcccagaaaacagtggtgatgtggatcccagtctaaacaaggtgcagacccaaaaagggagtttccagatgtgatgtgatttacaaccgagcctggcagggctctcagaaaagcgccatctggggcctggggcatccttttgtcttcctgtgccccgccaccagtcctgagactctcctgcactgggaacctctggcacttgccctgcctcagtgtgagggagtcaaggagggtctaaaaagctggaggcgggacaggcagcttacagcactgggtgacagcgcctgcggtggtcaggtcccggtattcccggtacatgttgtgggtgccgctccgggagtcatagcgcagccagatcccgaagttcttcacccgcaggggggacttctcaaacacctgccaaggagaggccacagggagatgtgagagcagcaagccgatgtgccctagccccatcctcactgaaccctctgcctctaaagcacaccccaggctccaggcctactctatggccagactcttgtgcctcagtttcccagccccacctaccttcaggcatcctcagggagcgtgaggtaagggaacttcccatggcaacagcctgaagtccaggcttctgccacggacaccaacccagccccagatgcagttcctgaactcaagtctcctggaacctgtctgggccaacctagctaccacccactgaccagatagccatcacctctcctcacttaacagacagggcccagggaagacagcaccaaccaaggtgtcccaccatgccacccacccgctccctgggtccctggctttctaatcagggaaatggcacataagctctgctccagtcccgtgacccaggcagaaacacaacccggggctctgatgtctgatgtgatgggattacaggcgttgagctaccgcacccgttcgatgtctgattaattcttgagatgcacgatgtcccaagaggcgcaaatccactccagaccccacgtagccccggcctctccatacctgcccacagtagacaatctcccctgaagacttcttcatcttctttaactgagatacaaagtaccagaagcgggacttggcgacgacatgattaggcgcaaagattcgcatgcggtagaggggcggcgtgtggcatttgggggtgggcaggcagcgacccactaccttgtactctcgtagctgaaaggaaacaggagtgagggtaaggccagcacccagaggcaactgtggagatccacctcactccctttcctacatctagtgaccacagattcgggaagcaggaggcagggccaccctagggcctccatgtggattcttggtgactgtaggtcacactcccgaccacaactttatacacaaaatgaactgaggagagggaggtctccagggaggattaattgagttgcctgcctctcctttgcctgggctaagggtttcagaccaggaaagctgtggcttagacccacagcctcctttcttcatgctgcagtcctgaattgctttgcagtcgccgtcaaacagccactctgcacctcaaaacatccagccaacatcttctttcaccctgaggcccagtgaccagcatgggatctcacagcccattccaggcagaactaggacaagacctcaggtctctccccagccctgggatccctgcactgttgccacgcgagctgcggctgcctccgttttcccaactgcaatccaaacgtttggcccagggaagactcccggtttacagatgcagaggtgagaatctttggtcaagtccaggctctgtgatatggcacaaagaaaccacctctgaaactgactcgccagcttttcactagttatcaatgaaaaatagtcacaaattatcgcagttcctacttttactgt

SEQ ID NO: 1887941 - DNA, 4001 bp, Homo sapiens
cttgatggtgttcaggttcacctggaaggggaggaagagagcatagtccagtagactcatggcaaagtttggggaagtgggggctttgggggatacacacactgttcgtggactgtggcactggctagaaatgctgcttccagctcgcacctgcagttttagctactccagaggctgaagtggtgggactgcctgagcccaggagttcaaaaccagcctgggcaacacggcgagtctccatgtctacaaaaagtagatggaaaaatgagttggatgtggtggtgcacgcctgtagtctcagctactcgggaagcggaggctgcaggattgcttgtgcccaggagttcaagaccaacgtacggagaccccgtctcttaaaaaaaaagtaaagaaggccgggcacggtggctcacgcctgtaatcccagcactttgggaggccgaggcgggcagctcacgaggtcagatcaagaccaccctggctaacacggtgaaatcctgtctctactaaaaatacaaaaaattagccggggtgtggtggcgggcacctgtagtcccagctactcgggaggctgaggcaggagaatggcgtgaacctgggaggcggagcttgcaatgagatgagattgtgccaccgcactccagcctgggagacagagcaagactccgtctcaaaaaaaaaaaaaaaaggtaaacaagaaattctggtcccagagccgtattagcctccctgatgactgatatcttatatataatttataagtcccatctgagagtcactagtgacaaggattaggagctaggactcaggagccagatgaaattaaaaatccagtcctgccccctggaatctaaacttagcatctctgccagcctcagatttgcttttttttttttttttgagacagtgtctcgctttgtcacccaggatggagtagagtggcgtgaacacaactcactgcagccttgacctcctgggctcaggtgatcctcccacctcagcctccccagtagctggtactacaggcatgcaccgccacaccgggctttttaaaaatctactttttgtagacatggggtctcgctatgttgcacaggctgatctcaaagtcttggcttcaagcgatcctcccacctcgccctcccaaagtactgggattacaggccgaagccatagcactgggcccgcagcttccctctgtaaaacagggccctaagaagagatgctacgatcctgctcagcccagcactcaacacacgtgggaaacagagctccatcagtatttctttccaccggctggaaaaggtgcagctcacggggtgtggaccgctgggggaatctctggacacttttgcccagcatcatcagacacaggagtgggatttgacctcaggactcagcagacccaggagctcccagtctcagcgctgggaggagtgagcaatccatctgagggcctgtggcacctctatccgctgcacccccccatacctgccacctcgccaggccagacccaccttgtgcacgttgatggaggggaacaggttctggaacatggtggccatgagcttcacatgcataccatgggggccaaagctgttgagtaccaggaggggtgggtgggcaaactgctgctcgtgcatgcggtgccggcgcagtgaggagaccacatcacgcaccagcgagtactgtaggacaggagagaggagggggtgaccaccaaccacacatggctgcggacaaccccaagtccagctcccaccccacatggctttgtaccacctccacccctctcaccttcttgacctggaaggtcaaggtggggcctcctgggaggcgcatcagcttctgcaggagaagaaaagatcagtgactctggaggggtctagcagaggtgcccggagtaggcacctttgccccatctcttcttcagagcgtttactttgaagccagaaatcacagcagctcagaggcatatgtgttcatcatgagagataggggaagggggggtctgggggagatgaagggtgagggcgtctactcacaaagtagacattggtctctgttttgctcaggatcagaaagtgtgtgaccccgaggggcccagccactgccacgcagtccttcagcgagttcttcttacgaacctggaaatgacaaaaagaaaaaaagaaaacatagcttatcccttgttgtgacaactataagctgacggtgcagatcctgttatggtctgtcttgcatctgaccctttcaacaagcccagaggagcaaaaggatcttagcctttagagtcagtcggacgcagatttgagttctaactctgtctcttgctcacagcgcatcttcccattgacaaatgagcgaactcaggcccagagaggttaagtaacttgcatcagatactggggagaagtcagtttccaaccctgctttgctgcctccagattctagtctttttttttctaacacggtctcctccggtcgcccagactggagtgaagtggcacgatcccgattcactacagccttaatttcctgggctcaaggaatcctcccacctcagcctcccgagtagccgggactacaggcacgcaacaccatatccgactaatttttctattttttgtaaagacggggtttcaccatgctgctcaggctggtctcgaattcctgggctcaagtgatcctcccgcatcagcatccccaaatgctgggaatacaggcatgagccaccacgcccggctccagattccagtcttaactgtcaggcttaggcgactatctatctcccaagctgcgcgccctcactccagcccagcaaaagccctgaaaggcagaaatgatgctccccatgagggtctttttttccagctggggagacttaagtcctcccacagttttacagcgggagccattactgcagctacgaagactaggccgagggtgggtggaggcgggctgggggtggggtacaaacctgcagacggctggcagtgagcggctccatgacccgccgcacgtccaggctgagctgccggatgttgcgacccgtgcagcctcgcgtgaacacgaacgagtgcgggttcgcggcataggcctcgaggttgcggagctgcgcctgggcgcgggcgcgcttctggtgccgggactgcggcgacgagagacaaagggtcagcgccgcgacctcggccgggaccccacctgcgccacctgcctcccaagctgccgggccttaccctccctgactgtcccatgctgctgtgtcctccacgaggcctcctgcgtccgccgcttccggcgctgcgcagctcacttccggcgcctgagagccggcacggcgtgggacgacatcaggcgggcctgcgcactaggtggcctctgggagcggggaggggcaatcagatggagcggttgctatggagacacgggtgcctgtttctagggagaccggggcggggctacgcggctccgggctgcagagaaacgaatccgccggttcgaatcccgcttcggcccatttcctccagctgggctaaaaccactttctgcattccgaggctcctaaaatatcccaaagtaaggctgataatgtcccccgggcccacgaattaggagcgaccatgtatgcacaatgttgggcgctctggcgccaagtacttggggagaagccaccggagggaatgactgtggcaatcattcactttagtctcgcaactcctctgggccagctgtcctccccgggtacccctgtctgcagacaggctgagggatggaaactccacatcaccttctggaaactcagggcaaggcgggcgtttcgtgaataactcgccccctccttctttccgctcaaagcctcagtcttggcctcaggcctctggcttcttccccaaaaccttgcagtgggggaaagggacaccccctcactgggctgaacattactctctcctcccccatcggcctcctctccctccttgctctctctggcaccccaattc

SEQ ID NO: 1887942 - DNA, 4001 bp, Homo sapiens
tctccttacccgagacgttggctgccatgctcccgtgccgatcctcagcctgtgtctgctacccagttccccagcccctcccccagtcaccagtggcttagtgggccctgccccagccccatccccagttactggcccagccagcagagcaggccagcgtgcctttccacccacgtttccttcctcattgtgccacaaccctcctgaggttcaagctcatctgctgaaagtgtgacctgtctgcttgcacggctctttggtgggactggggggaggggccactcatggctgctgctgccaccaatgaaaccaaccccgtgcagggtaggggagagacccagcttccaggaagaaaccaggtgggagggactctcgggtgtggccggcccaggactctctgggttgctttgtatggctccagaatcccccatcccaaacgctgacgtggacccctggccaattcagttctttactggagtggaagggctggggacacaactcctttatgaaaggaaaccgagggccacatctcgggccccaatctggggcgttcaatccagccgctgctccggtgcggcttgggctcaggccactctcttccctgggcggccccggccccggcctcgcccaccatcccgggaagcccctctgggcccccgcctggcctgggctccctgggacttgtccttggtcttgggaaacttctggtcacaaaggcgacccctgcctcgatccatttcccaccgcttccgcttccgccctggagacttggcaagccgtttctgcttggcctcggggaacaggtctgtggggagagacagtgtcagggcccccagagacaaggacaggctctgggtgccctgctgcagaccccactccataccctcactgggcgcctcgcccaccgcctggcagaaatactcgatgtcatcatcttcctgttcatcatcgtcctcacccaactccaggctcgccgtccttgaagggatcccagaggcctcttcatcactacccccgacccgtgccttcttcatgccctccaggctcttctttctggaggagggcgtgggggtcaacatagccgcccatcccagggacccccccttggccctgcccttcccagctctgcctggacctgtgggcctcccgctgctcctgcttgcgctgcacattctgggcctgctgggcctgcctctgcgccttcagccgcagcttcttctccttggcttccaggatggcctgcagctcctcctccgtcttgctcactgagccaagagacgcgggtcaccaagatccgggtgcagctccacacccatgaccccccacccccggcggccccggcctcaccaaaactgtggaacatcactttgccctccccgacgccctcctggaccttgatgagctgcagtgtcatccgcgggccgatctgaggggacgaggaagaagcgtcagcccaccgttgggactggtggagcccgggggtccccctgccctgggcctcacctcggtgagccgcactgcactctgctgggcccgcatgttgccacggccagcgacagcctgaggcagctctgtgatgttgtggtcgccgtcaggctctgcctcgctctccgacagccccgcgcccctgtgtgtaggacataacagggctcagtgggggagctcaggctcccggtcctgttctggggtccccgggccgcagtggcctcccgccctatgccctcctcacgtggccagcagctcgctgatgtcctgcaggcggctcatgttggggaacttctcctggagcagcttcttcatcccgcgactcgcgcccacaggaacaactttgatgctactgcaggaacatgagtggacggcaagggggtggtcagggggcacgtgatggggctggcggtgcccatctcacccttcccacagtgcgtcagggcgtttactttggacagagcaatcacagcgtctcagcagaagtgctgtcatcagccgcatgtggaggcccccacccggcaccccctcgtctcccatcctgctgggacactcactagtggcggaagtccagctcctgggagtcggggttgtagtcgatgaggaggcagcgcttgatggtgttcaggttcacctggaaggggaggaagagagcatagtccagtagactcatggcaaagtttggggaagtgggggctttgggggatacacacactgttcgtggactgtggcactggctagaaatgctgcttccagctcgcacctgcagttttagctactccagaggctgaagtggtgggactgcctgagcccaggagttcaaaaccagcctgggcaacacggcgagtctccatgtctacaaaaagtagatggaaaaatgagttggatgtggtggtgcacgcctgtagtctcagctactcgggaagcggaggctgcaggattgcttgtgcccaggagttcaagaccaacgtacggagaccccgtctcttaaaaaaaaagtaaagaaggccgggcacggtggctcacgcctgtaatcccagcactttgggaggccgaggcgggcagctcacgaggtcagatcaagaccaccctggctaacacggtgaaatcctgtctctactaaaaatacaaaaaattagccggggtgtggtggcgggcacctgtagtcccagctactcgggaggctgaggcaggagaatggcgtgaacctgggaggcggagcttgcaatgagatgagattgtgccaccgcactccagcctgggagacagagcaagactccgtctcaaaaaaaaaaaaaaaaggtaaacaagaaattctggtcccagagccgtattagcctccctgatgactgatatcttatatataatttataagtcccatctgagagtcactagtgacaaggattaggagctaggactcaggagccagatgaaattaaaaatccagtcctgccccctggaatctaaacttagcatctctgccagcctcagatttgcttttttttttttttttgagacagtgtctcgctttgtcacccaggatggagtagagtggcgtgaacacaactcactgcagccttgacctcctgggctcaggtgatcctcccacctcagcctccccagtagctggtactacaggcatgcaccgccacaccgggctttttaaaaatctactttttgtagacatggggtctcgctatgttgcacaggctgatctcaaagtcttggcttcaagcgatcctcccacctcgccctcccaaagtactgggattacaggccgaagccatagcactgggcccgcagcttccctctgtaaaacagggccctaagaagagatgctacgatcctgctcagcccagcactcaacacacgtgggaaacagagctccatcagtatttctttccaccggctggaaaaggtgcagctcacggggtgtggaccgctgggggaatctctggacacttttgcccagcatcatcagacacaggagtgggatttgacctcaggactcagcagacccaggagctcccagtctcagcgctgggaggagtgagcaatccatctgagggcctgtggcacctctatccgctgcacccccccatacctgccacctcgccaggccagacccaccttgtgcacgttgatggaggggaacaggttctggaacatggtggccatgagcttcacatgcataccatgggggccaaagctgttgagtaccaggaggggtgggtgggcaaactgctgctcgtgcatgcggtgccggcgcagtgaggagaccacatcacgcaccagcgagtactgtaggacaggagagaggagggggtgaccaccaaccacacatggctgcggacaaccccaagtccagctcccaccccacatggctttgtaccacctccacccctctcaccttcttgacctggaaggtcaaggtggggcctcctgggaggcgcatcagcttctgcaggagaagaaaagatcagtgactctggaggggtctagcagaggtgcccgga

SEQ ID NO: 1887943 - DNA, 4001 bp, Homo sapiens
ggtgatcctcccacctcagcctccccagtagctgcgaccatagctgcatcccaccataactggcgaatttttggtagagatagggtatggctatgttgcccaggctggtctcaaactcctgggctcaagtgatctgcccgcctcagcctcccaaagtgatgggattacaggagtgaaccactgtgcccagccctatttcctcacctttaaaatgggaataagtacagccctcattggttaggccgctgtgagttcagtgagtgaatccacctgcttaaacccgatagcaggtgttctatcggcagaggtcagctgccaccactccttctatcagtgtggcaagagctgctacgtcacccgcagcagaaggaactgggctattctccaagtcggaatccagtgggggaacctcctcctcacctctgcttcacctcccacctccagacaggccataagccccgcgccctctgcttcacctcccacctccggccaggccataagccctgtgccctctgcttcacctcccaactccggccaggccataagccctgcgccctctgcctgctgtctttttaggatctgcccaggcttggaagggctgccagcttcacagctattggacagaccacgatccagtcggctgatgaccccttcagacacaccctaggccctcaccaggctctggcggtgagttctggcacctacatgcttgtgcgccacggggggacacgcagagtctgcacccgggagcagccgcccgcaggaggcacacaagccacacgtggagcccactgatcagctagaagagattttttattgaagggcgagtctccggcatctgatggcagctacaacctggggacagaggaaaggagctgagggtgggtgagagggtgccccataccccctgccgacctgacaccccctgcctttcagtttccctttggggaccctcccaaccccgctctggtttcagggcctcttctgggcatggccaagggggtgtggctcagccactagccacactctggaaggggccctgggactcggtgggcaccacggggtgggagaagggctcccttccttgcgccgaagccgggtggactcactggatctcacggaacgcccgcttctccaccagcttcaccttgtacttgcgtttgaacctggagcagggacaatggagcaatcagtgcccggggccaatcccagatgccctcgccccacagcagccccggccgccccttacttggctctctctcgaggctcgatcatattcctcctctggaagctcttgaaccggtctcgaaggatgttgccctcgggctacaggacagagagggaggcctcagcagggcctggcagaagcccaagggcctggacctctcctcggggtcctggcagggctcagccccatgcagtctccccccagggcagcctgtgggcaccagggactcagcctggccctcagctgctggggctcagtgttgggatgacagccaccaacctatggccatctctaagctgggcttagaggagtcacgggaagtgggctggtgacgacacagaaaaggggacagcgagggcaaaggctggatcagagggagaaggcacagtccgctcatgagcacaactggctggagccccacggccgggtcggcccaggcgtgtggctgacagaggagctgggcttcctcaggggcactggggagccacagcaggttccgagcaggggagggacagggttggttctgagcttcaggaaggtccctctagtcctaaaggtgaccgggactgcaacagggaccagctggaaggaaaggccttcttagggtcccggactcaaaccttagcctggcccctcaccctgggatctcatcccagcatcccgtgccctcagcccctgggcattggccccactggcccagcccaggggcagccatggtgtcgcccatagcccctggggggcacggggagcaaggatggtgtcatcactgggcacggggctccacggcaggacacagtgagcaccttcagggtcctgagcgagtctgtcagctccgagctcagctgcacgtcgatgtcaggtgcctggtacctgcagaacagggcgggtgttcagaaatatcacccccgcggggcccaggacacccagtccaaagccccctcctggagaagaaggggcctctgagaatgtggggttttgtgggggaagaggtggtctcccgatggggggggtgggcagttcctgaacaaaggcaggaaggtgtcaggacctgggacccggccccctccccagcctctcccagaacccccggcctggttctcacttgagccgccccagccttcggggcttgtcagcctcagcctcccgccgcgcctgccgccgcctctgccgccgcgccagctccgccagcctcagggccacctgggccttgatcccgcgcagccggaacagctcctggtgccggagccgggcggcccgcaacgcggcctgctgtacccgctgtggagacgggggagggtcagggctcaggccggtgctgcccacacagggagaccttctctctacacagggagccttccctgcacaaacctgcctgtccccggaggcccttcctaaccccgtcacatcagcggcccctccagtgccttcccagcagctgtttgctgaagccccttttgtcatccatctcccctggtctgcggtgcagaaacctccccccaccccgcccctcaaacagaagcgccagggaccctgtcccaccccagcccgagccctgcctggaagaggctgggaaatgagtctcagctgtgaggatcccaaacagcccaaaccacaggccacatgcggggcttggggtgtgcaggctgcccgcagcacccagggcagcccatggtgggaggaaggaaggaagggggcgaggcatcagaggcaggccccgctggcccaggcgctcaccagcctgtgcacagccttctcccgccgccgctgctgctccgtcttcttctctgtggtggccaggcgggcgggcgtgggacagacctcggcatccccagcctccggcccctcgccctggcctggctccccctcaccatccgactcctccagcagcccctcgcacagctcctggaatgtggactcctggggaggcggggtgcagtgtcaggggtgggtaggaggcccggggaggggagggagtgggcaggtgcggggctcacctgggtggcggcctgctccgtggcgggcagggccagctgccgctccagcttctccgcctccttctgccgctgcaactccacctcgtgggccgctgagagcagggtctgaggggcgggagtgaggatgggtccctgaacccctcctgggacactgagactagaccctcttacctcccatctgtccctcatccagtgcccgtggatcccgccccggcccaggctttcctccccacaccccgtctaccagcacacccaccctgcacagagccagagggcacctcaaaccctcgccctcacacctgctctgcacgtctgtgaaggcagtctgacctgcacgcttcacattttttttttgagatagagtttctgtcttgttgcccagactggagtgcaatggtgtgatctcagctcaccacaacccccgcctcctgggttcaagcgattctcctgcctcagcctcccgagtagctactattacaggcatgtgccaccatacccggctaattctgtaactttagtagagatggggtttctccatgttggtcaggctggtcttgaactcctgacctcaggtggtccacctacctcggcctcccaaagtgctgggattacaggtgtgagccaccatgcccggcccacagtttcatctatgtgaattggtcagggtgggctggtccctgagacaggaagcctggcagcccaagaccacacgagacagggaattgcgggggtgatggctgacatgtgtgaggtttcctttacggacagtgaaaatgttc

SEQ ID NO: 1887944 - DNA, 4001 bp, Homo sapiens
gtgactaagaccctttccttgctcccagcttcctatgtcccagggctgcctgtggcacctggactgctgctgcccctgggtcccgtacattccagggcaacaatggaggaagggcaggcaacgcatgaggaattaacagtctttattgggctcagaccaggagtccgtgggtcttgaggacctctgtgtatttgtcaattttcttctccacgttcttctcggcctgtttccgtagcctctgccaagaataagtgcaggtggtggtggtcaggaggggttgcattgccctcattacatggactgcatcccaccccaaccccggctggtcctttgccagttaagagtactctgtgagcaaggcacctgccaggcctgtccaggagtgagatgcccccctcagcaccagcccctggcctcaccatgagctgtttcttcttccggtagtggatcttggctttctctttcctcttctcctccagggtggctgtcactgcctggtacttccagccaacctcgtgagccaggcgccccagataggcaaactgcggggggggggggggggggtgaacaaatgaagttgtaaggatatctaagcccccacaccctgaagagccggagctgttgagagctgggaggtgactgacagctgggcatatcataatgcaactgttctctgcaggcctgttagaaaagcacccacccaagcctcctggcatcagctaagccattggcattgtcgccattcccacagggacatccgcagaccatcgtgagataaggacatcatctgccaggctccaggtccccaggtccctcagcaggcctgaaatctcccaagtagatggtgcagcgtaagctgggactcacctttcttgtaggcttcagacgcacgaccttgagggcagcaggaaccaccatccgctttttctgttagagaaagagaggggcttaagagcccgggagggacagacagggaaggaggtcggctggactggcgtctcagccagtgctgctttcatgaggatcaaacaatgtaggtagttgcggaacatcatggacgccacaggtaaggccgctgcctgtggggtttggcatagctcaccttgtcgtagggcggtgggatgccgtcaaacaccttgagacggtccagagcggcctggcctcgcttggttttgtggggcagcatacctgttgggtgacagatagcaggcccagtcagagggcctcataaggatgcccacccaccccactgaggtgggcccatggggtggcctcagatggtagtgcatgtggagtcatctcatggtcgggaaactcgaatgtgagtgggagaagttctcatcaccggccgcctgcccgtcaccacctgcagtccccacgctctgctcacctcgcacggtccgccagaagatgcggctgggggcccggaagtggtaggggcctcgggaagggttggtgttcatccgcttgcggaggaaagccaggtacttcactagggagaggggagagtgtgaggcctgcccagtctaccagcacccccaaaaccccacttccaagggccttctcagaaaccccaagtagcctctcccaacacggctgcaattgctttcagagcctcaacaccccacagggagaccctctccagtgctcctcccaggtcctaacttacacttgtttctgtagaaattgccagaaatgttgatgccttcacagcgtacgaccaccaccttccggcctagagggagggaaaggcttagcagggccgagccgcctgagggtcccaccactgcctatgcagtcaccctccagacacagcgcagtacttgccagagctaagttcctgtttaaatgaaaaactagcctaatacataattacttcttgagcctggagtccccaaccctggggaagagtggctggcaggtctcagagcggtgcatggggttgatctcatggccgtgagactcaaacgaaagatggtgaatgttgctcatcactgacctccagcgggggcccatgacagaggggccacgagcagcgacttacccagcagtacctgtttagccacgatggccgccaggcggcccaggagatggcctcgaccatcaagcaccaggacctgtgggagacaagggcaaaaggactcagagacaaggacagcctttgattgtcctcacaagcaagcattcccttcttttgtcctaccgtgccaacagcgtgccttgcacccagccatcagagctgggaactatgcacggagccccgttctacagatgaggaacagggactgagaaagcaaggctgcctcaggatcagtgagtgagcagtttaagaggcccaaactcccctcatatctgagttcttctatgagtattttatgctcagattgtattttgcaaagcaattggatttgaacgaagaccagcaaggctctgcccactgactacccagttacaagaccttgtaactaataaactgtaggatttggttttgagacagggtctcgctgttgcacaggctgtcctgtgatcctgtgacctcccaggatcaagctatcctcccacctcagcctcatgagtagctgggactacaggcgcgcaccaccacacgcagctaatttttgtacttttttttttgttgagtcagggttttgccatgttgcctaggctgctcttgtactcctcgcttcaagtgaaccgtgtgcctcggccttccaaaatgctcggattacaggcttgagccactgtggccaatcaattgtaggatgttaacacaatctaattctcttctaatgtataggatgtttctaccacaaatttaatttggaagaaaaccgaatttcaggtgggatgagattaggcagagtagtcaaaagcccatgctagctctgctatagagcactctgctttccccggtaaactgctcaggcaccgaacctcagcttcctccggagtagaaatcctggccgggcacaggggctcacgcctgtaatcccagcactttgagaggcctaggtgggcagatcagttgaggtcaggagttcgagaccatcctggccaatatggtgaaaccctgtctctactaaaaacacaaaaattagccaagcgtcgtggcaggcacctgcagtcccaggtactcgggaagctgaggcaggagaatcacttgaacttgggaagcagaggttgcaatgagccaagatcgcaccattgcactccagcctgggtgtcacagcgagactccgtctcagaaaaaacactaaaagtagaaatcctcattgttttaatgcaaaagcatgaagcacacactggttgttacacatgctttgtaagcgttggtacaaagactctaaaatccagacagacttcctgaagtcgtgaccttggcccaaaatcaccaattccaatttaatttcctcctctgtaaaacaaggataccagtaactgcctcaggaatatggttaactgaactacgcaaaacattgcgaactgtgctaggcacaaagacacatgcttggtgaacacaacttgcctagatcggcctggctctgaaatgtcacccgccccaacaacagactactcacaaagaaacctttccagggccaatccctcctttatacttaagtagctacaccaggagccagggaaagggcccccaggtgtcaggcccaaaagatgtcccatccttgtggaaccattcatcacagctctcgacttccagtaacacgcctcaggacaatcgccaatccccaaaacgacggaaaacgagttcattccagagtgccccgcagccaacagctctcgaccccccgcagaaaggcattgagaattaaaagaaccggagctgcaggggaccccgattaacacctccacgtgaaatcaaagtagcccgcgcactgagcgggataaaaataccttccattttggccaaaactcagtttctcattgccccgagaccgcccggccacacttccgcgtgttcctcatcgctgaggacacacaagggt

SEQ ID NO: 1887945 - DNA, 4001 bp, Homo sapiens
gcttatcatttgcaaaatgctagtctctacagaccgccgggactacagcagcctggcagcagggcatgggtccatactttgcagctgaattagaatgagacagctttacattaactaggaagcaccaggcactgctggccacattttatgtctttggtttgtaaacggtgtctataaaggatcattcaatttatagcaagttacatatattctgtatattagcacagcccattctaccctcttcaagctcctcaccccccatttgccaggggcctgcctccacagcagacacagtgcaaagacgccagatttctttaaaagcaatttatttctgattacaaaatacaggtgaggagcatgggcgatgcctgtaaccccttggttgtgcatcttcccagtctatttctgcttctagaaataccctgtgtacaacagcaagctcatgctgtccccaagtgcttgcacattctaacagctgcagagtatatgaccaggtggaaagtccaacagatgccccactcacaagatagggccctccaatcagtcttctggctccctttcactcatagtaactggttgctcttcctattggtcatagataaatgacacctgcacaattctccgagtgctttcaagcaacttcgggaggcagtgactaagaccctttccttgctcccagcttcctatgtcccagggctgcctgtggcacctggactgctgctgcccctgggtcccgtacattccagggcaacaatggaggaagggcaggcaacgcatgaggaattaacagtctttattgggctcagaccaggagtccgtgggtcttgaggacctctgtgtatttgtcaattttcttctccacgttcttctcggcctgtttccgtagcctctgccaagaataagtgcaggtggtggtggtcaggaggggttgcattgccctcattacatggactgcatcccaccccaaccccggctggtcctttgccagttaagagtactctgtgagcaaggcacctgccaggcctgtccaggagtgagatgcccccctcagcaccagcccctggcctcaccatgagctgtttcttcttccggtagtggatcttggctttctctttcctcttctcctccagggtggctgtcactgcctggtacttccagccaacctcgtgagccaggcgccccagataggcaaactgcggggggggggggggggggtgaacaaatgaagttgtaaggatatctaagcccccacaccctgaagagccggagctgttgagagctgggaggtgactgacagctgggcatatcataatgcaactgttctctgcaggcctgttagaaaagcacccacccaagcctcctggcatcagctaagccattggcattgtcgccattcccacagggacatccgcagaccatcgtgagataaggacatcatctgccaggctccaggtccccaggtccctcagcaggcctgaaatctcccaagtagatggtgcagcgtaagctgggactcacctttcttgtaggcttcagacgcacgaccttgagggcagcaggaaccaccatccgctttttctgttagagaaagagaggggcttaagagcccgggagggacagacagggaaggaggtcggctggactggcgtctcagccagtgctgctttcatgaggatcaaacaatgtaggtagttgcggaacatcatggacgccacaggtaaggccgctgcctgtggggtttggcatagctcaccttgtcgtagggcggtgggatgccgtcaaacaccttgagacggtccagagcggcctggcctcgcttggttttgtggggcagcatacctgttgggtgacagatagcaggcccagtcagagggcctcataaggatgcccacccaccccactgaggtgggcccatggggtggcctcagatggtagtgcatgtggagtcatctcatggtcgggaaactcgaatgtgagtgggagaagttctcatcaccggccgcctgcccgtcaccacctgcagtccccacgctctgctcacctcgcacggtccgccagaagatgcggctgggggcccggaagtggtaggggcctcgggaagggttggtgttcatccgcttgcggaggaaagccaggtacttcactagggagaggggagagtgtgaggcctgcccagtctaccagcacccccaaaaccccacttccaagggccttctcagaaaccccaagtagcctctcccaacacggctgcaattgctttcagagcctcaacaccccacagggagaccctctccagtgctcctcccaggtcctaacttacacttgtttctgtagaaattgccagaaatgttgatgccttcacagcgtacgaccaccaccttccggcctagagggagggaaaggcttagcagggccgagccgcctgagggtcccaccactgcctatgcagtcaccctccagacacagcgcagtacttgccagagctaagttcctgtttaaatgaaaaactagcctaatacataattacttcttgagcctggagtccccaaccctggggaagagtggctggcaggtctcagagcggtgcatggggttgatctcatggccgtgagactcaaacgaaagatggtgaatgttgctcatcactgacctccagcgggggcccatgacagaggggccacgagcagcgacttacccagcagtacctgtttagccacgatggccgccaggcggcccaggagatggcctcgaccatcaagcaccaggacctgtgggagacaagggcaaaaggactcagagacaaggacagcctttgattgtcctcacaagcaagcattcccttcttttgtcctaccgtgccaacagcgtgccttgcacccagccatcagagctgggaactatgcacggagccccgttctacagatgaggaacagggactgagaaagcaaggctgcctcaggatcagtgagtgagcagtttaagaggcccaaactcccctcatatctgagttcttctatgagtattttatgctcagattgtattttgcaaagcaattggatttgaacgaagaccagcaaggctctgcccactgactacccagttacaagaccttgtaactaataaactgtaggatttggttttgagacagggtctcgctgttgcacaggctgtcctgtgatcctgtgacctcccaggatcaagctatcctcccacctcagcctcatgagtagctgggactacaggcgcgcaccaccacacgcagctaatttttgtacttttttttttgttgagtcagggttttgccatgttgcctaggctgctcttgtactcctcgcttcaagtgaaccgtgtgcctcggccttccaaaatgctcggattacaggcttgagccactgtggccaatcaattgtaggatgttaacacaatctaattctcttctaatgtataggatgtttctaccacaaatttaatttggaagaaaaccgaatttcaggtgggatgagattaggcagagtagtcaaaagcccatgctagctctgctatagagcactctgctttccccggtaaactgctcaggcaccgaacctcagcttcctccggagtagaaatcctggccgggcacaggggctcacgcctgtaatcccagcactttgagaggcctaggtgggcagatcagttgaggtcaggagttcgagaccatcctggccaatatggtgaaaccctgtctctactaaaaacacaaaaattagccaagcgtcgtggcaggcacctgcagtcccaggtactcgggaagctgaggcaggagaatcacttgaacttgggaagcagaggttgcaatgagccaagatcgcaccattgcactccagcctgggtgtcacagcgagactccgtctcagaaaaaacactaaaagtagaaatcctcattgttttaatgcaaaagcatgaagcacacactggttgttacacatgctttgtaagcgttggtacaaagactctaaaat

SEQ ID NO: 1887946 - DNA, 4001 bp, Homo sapiens
ccaaccgcaaggacagcatgaatctagcttcctttacttcacagcatgtttacttttagtgtttaggctgtttagcgtggagacctgggtatgacgtattactgaacacgactgctagacatcagtaaaatgggaacggggcctgctccagcaagctttgaccagggacattttatgaaattgctacctagtactaaatgctctgtatcagtgccctttctgggattcagactggcagatctaatgggttctcttagtgcataaagcctagcgttatctgttattctagtgcttatcatttgcaaaatgctagtctctacagaccgccgggactacagcagcctggcagcagggcatgggtccatactttgcagctgaattagaatgagacagctttacattaactaggaagcaccaggcactgctggccacattttatgtctttggtttgtaaacggtgtctataaaggatcattcaatttatagcaagttacatatattctgtatattagcacagcccattctaccctcttcaagctcctcaccccccatttgccaggggcctgcctccacagcagacacagtgcaaagacgccagatttctttaaaagcaatttatttctgattacaaaatacaggtgaggagcatgggcgatgcctgtaaccccttggttgtgcatcttcccagtctatttctgcttctagaaataccctgtgtacaacagcaagctcatgctgtccccaagtgcttgcacattctaacagctgcagagtatatgaccaggtggaaagtccaacagatgccccactcacaagatagggccctccaatcagtcttctggctccctttcactcatagtaactggttgctcttcctattggtcatagataaatgacacctgcacaattctccgagtgctttcaagcaacttcgggaggcagtgactaagaccctttccttgctcccagcttcctatgtcccagggctgcctgtggcacctggactgctgctgcccctgggtcccgtacattccagggcaacaatggaggaagggcaggcaacgcatgaggaattaacagtctttattgggctcagaccaggagtccgtgggtcttgaggacctctgtgtatttgtcaattttcttctccacgttcttctcggcctgtttccgtagcctctgccaagaataagtgcaggtggtggtggtcaggaggggttgcattgccctcattacatggactgcatcccaccccaaccccggctggtcctttgccagttaagagtactctgtgagcaaggcacctgccaggcctgtccaggagtgagatgcccccctcagcaccagcccctggcctcaccatgagctgtttcttcttccggtagtggatcttggctttctctttcctcttctcctccagggtggctgtcactgcctggtacttccagccaacctcgtgagccaggcgccccagataggcaaactgcggggggggggggggggggtgaacaaatgaagttgtaaggatatctaagcccccacaccctgaagagccggagctgttgagagctgggaggtgactgacagctgggcatatcataatgcaactgttctctgcaggcctgttagaaaagcacccacccaagcctcctggcatcagctaagccattggcattgtcgccattcccacagggacatccgcagaccatcgtgagataaggacatcatctgccaggctccaggtccccaggtccctcagcaggcctgaaatctcccaagtagatggtgcagcgtaagctgggactcacctttcttgtaggcttcagacgcacgaccttgagggcagcaggaaccaccatccgctttttctgttagagaaagagaggggcttaagagcccgggagggacagacagggaaggaggtcggctggactggcgtctcagccagtgctgctttcatgaggatcaaacaatgtaggtagttgcggaacatcatggacgccacaggtaaggccgctgcctgtggggtttggcatagctcaccttgtcgtagggcggtgggatgccgtcaaacaccttgagacggtccagagcggcctggcctcgcttggttttgtggggcagcatacctgttgggtgacagatagcaggcccagtcagagggcctcataaggatgcccacccaccccactgaggtgggcccatggggtggcctcagatggtagtgcatgtggagtcatctcatggtcgggaaactcgaatgtgagtgggagaagttctcatcaccggccgcctgcccgtcaccacctgcagtccccacgctctgctcacctcgcacggtccgccagaagatgcggctgggggcccggaagtggtaggggcctcgggaagggttggtgttcatccgcttgcggaggaaagccaggtacttcactagggagaggggagagtgtgaggcctgcccagtctaccagcacccccaaaaccccacttccaagggccttctcagaaaccccaagtagcctctcccaacacggctgcaattgctttcagagcctcaacaccccacagggagaccctctccagtgctcctcccaggtcctaacttacacttgtttctgtagaaattgccagaaatgttgatgccttcacagcgtacgaccaccaccttccggcctagagggagggaaaggcttagcagggccgagccgcctgagggtcccaccactgcctatgcagtcaccctccagacacagcgcagtacttgccagagctaagttcctgtttaaatgaaaaactagcctaatacataattacttcttgagcctggagtccccaaccctggggaagagtggctggcaggtctcagagcggtgcatggggttgatctcatggccgtgagactcaaacgaaagatggtgaatgttgctcatcactgacctccagcgggggcccatgacagaggggccacgagcagcgacttacccagcagtacctgtttagccacgatggccgccaggcggcccaggagatggcctcgaccatcaagcaccaggacctgtgggagacaagggcaaaaggactcagagacaaggacagcctttgattgtcctcacaagcaagcattcccttcttttgtcctaccgtgccaacagcgtgccttgcacccagccatcagagctgggaactatgcacggagccccgttctacagatgaggaacagggactgagaaagcaaggctgcctcaggatcagtgagtgagcagtttaagaggcccaaactcccctcatatctgagttcttctatgagtattttatgctcagattgtattttgcaaagcaattggatttgaacgaagaccagcaaggctctgcccactgactacccagttacaagaccttgtaactaataaactgtaggatttggttttgagacagggtctcgctgttgcacaggctgtcctgtgatcctgtgacctcccaggatcaagctatcctcccacctcagcctcatgagtagctgggactacaggcgcgcaccaccacacgcagctaatttttgtacttttttttttgttgagtcagggttttgccatgttgcctaggctgctcttgtactcctcgcttcaagtgaaccgtgtgcctcggccttccaaaatgctcggattacaggcttgagccactgtggccaatcaattgtaggatgttaacacaatctaattctcttctaatgtataggatgtttctaccacaaatttaatttggaagaaaaccgaatttcaggtgggatgagattaggcagagtagtcaaaagcccatgctagctctgctatagagcactctgctttccccggtaaactgctcaggcaccgaacctcagcttcctccggagtagaaatcctggccgggcacaggggctcacgcctgtaatcccagcactttgagaggcctaggtgggcagatcagttgaggtcaggagttcgagaccatcctggccaata

SEQ ID NO: 1887947 - DNA, 4001 bp, Homo sapiens
gagtcggcttctctggtggatgagaatccatgtggggactctggcaggggtaggcaccacccatgttcactgattctcagggaaaacacaagccactgcggtctcttcagactcttctggaaaggttaataagcccctgatggaatggtgtggcaagttataatctgctatcaacacaatgcacatcactgtccactcatctttctctggggtaaggttgtacatgtaagtatacaggtaacaaacagttactcctgaatcttggcatccaaccgcaaggacagcatgaatctagcttcctttacttcacagcatgtttacttttagtgtttaggctgtttagcgtggagacctgggtatgacgtattactgaacacgactgctagacatcagtaaaatgggaacggggcctgctccagcaagctttgaccagggacattttatgaaattgctacctagtactaaatgctctgtatcagtgccctttctgggattcagactggcagatctaatgggttctcttagtgcataaagcctagcgttatctgttattctagtgcttatcatttgcaaaatgctagtctctacagaccgccgggactacagcagcctggcagcagggcatgggtccatactttgcagctgaattagaatgagacagctttacattaactaggaagcaccaggcactgctggccacattttatgtctttggtttgtaaacggtgtctataaaggatcattcaatttatagcaagttacatatattctgtatattagcacagcccattctaccctcttcaagctcctcaccccccatttgccaggggcctgcctccacagcagacacagtgcaaagacgccagatttctttaaaagcaatttatttctgattacaaaatacaggtgaggagcatgggcgatgcctgtaaccccttggttgtgcatcttcccagtctatttctgcttctagaaataccctgtgtacaacagcaagctcatgctgtccccaagtgcttgcacattctaacagctgcagagtatatgaccaggtggaaagtccaacagatgccccactcacaagatagggccctccaatcagtcttctggctccctttcactcatagtaactggttgctcttcctattggtcatagataaatgacacctgcacaattctccgagtgctttcaagcaacttcgggaggcagtgactaagaccctttccttgctcccagcttcctatgtcccagggctgcctgtggcacctggactgctgctgcccctgggtcccgtacattccagggcaacaatggaggaagggcaggcaacgcatgaggaattaacagtctttattgggctcagaccaggagtccgtgggtcttgaggacctctgtgtatttgtcaattttcttctccacgttcttctcggcctgtttccgtagcctctgccaagaataagtgcaggtggtggtggtcaggaggggttgcattgccctcattacatggactgcatcccaccccaaccccggctggtcctttgccagttaagagtactctgtgagcaaggcacctgccaggcctgtccaggagtgagatgcccccctcagcaccagcccctggcctcaccatgagctgtttcttcttccggtagtggatcttggctttctctttcctcttctcctccagggtggctgtcactgcctggtacttccagccaacctcgtgagccaggcgccccagataggcaaactgcggggggggggggggggggtgaacaaatgaagttgtaaggatatctaagcccccacaccctgaagagccggagctgttgagagctgggaggtgactgacagctgggcatatcataatgcaactgttctctgcaggcctgttagaaaagcacccacccaagcctcctggcatcagctaagccattggcattgtcgccattcccacagggacatccgcagaccatcgtgagataaggacatcatctgccaggctccaggtccccaggtccctcagcaggcctgaaatctcccaagtagatggtgcagcgtaagctgggactcacctttcttgtaggcttcagacgcacgaccttgagggcagcaggaaccaccatccgctttttctgttagagaaagagaggggcttaagagcccgggagggacagacagggaaggaggtcggctggactggcgtctcagccagtgctgctttcatgaggatcaaacaatgtaggtagttgcggaacatcatggacgccacaggtaaggccgctgcctgtggggtttggcatagctcaccttgtcgtagggcggtgggatgccgtcaaacaccttgagacggtccagagcggcctggcctcgcttggttttgtggggcagcatacctgttgggtgacagatagcaggcccagtcagagggcctcataaggatgcccacccaccccactgaggtgggcccatggggtggcctcagatggtagtgcatgtggagtcatctcatggtcgggaaactcgaatgtgagtgggagaagttctcatcaccggccgcctgcccgtcaccacctgcagtccccacgctctgctcacctcgcacggtccgccagaagatgcggctgggggcccggaagtggtaggggcctcgggaagggttggtgttcatccgcttgcggaggaaagccaggtacttcactagggagaggggagagtgtgaggcctgcccagtctaccagcacccccaaaaccccacttccaagggccttctcagaaaccccaagtagcctctcccaacacggctgcaattgctttcagagcctcaacaccccacagggagaccctctccagtgctcctcccaggtcctaacttacacttgtttctgtagaaattgccagaaatgttgatgccttcacagcgtacgaccaccaccttccggcctagagggagggaaaggcttagcagggccgagccgcctgagggtcccaccactgcctatgcagtcaccctccagacacagcgcagtacttgccagagctaagttcctgtttaaatgaaaaactagcctaatacataattacttcttgagcctggagtccccaaccctggggaagagtggctggcaggtctcagagcggtgcatggggttgatctcatggccgtgagactcaaacgaaagatggtgaatgttgctcatcactgacctccagcgggggcccatgacagaggggccacgagcagcgacttacccagcagtacctgtttagccacgatggccgccaggcggcccaggagatggcctcgaccatcaagcaccaggacctgtgggagacaagggcaaaaggactcagagacaaggacagcctttgattgtcctcacaagcaagcattcccttcttttgtcctaccgtgccaacagcgtgccttgcacccagccatcagagctgggaactatgcacggagccccgttctacagatgaggaacagggactgagaaagcaaggctgcctcaggatcagtgagtgagcagtttaagaggcccaaactcccctcatatctgagttcttctatgagtattttatgctcagattgtattttgcaaagcaattggatttgaacgaagaccagcaaggctctgcccactgactacccagttacaagaccttgtaactaataaactgtaggatttggttttgagacagggtctcgctgttgcacaggctgtcctgtgatcctgtgacctcccaggatcaagctatcctcccacctcagcctcatgagtagctgggactacaggcgcgcaccaccacacgcagctaatttttgtacttttttttttgttgagtcagggttttgccatgttgcctaggctgctcttgtactcctcgcttcaagtgaaccgtgtgcctcggccttccaaaatgctcggattacaggcttgagccactgtggccaatcaattgtaggatgttaacacaatctaattctcttctaatg

SEQ ID NO: 1887948 - DNA, 4001 bp, Homo sapiens
gtaaaggcgcggaagatcccaagtctggcctgggaatgagaaaataactttatttcattgtggggagcgggccgatgtccagcctcagaacttctggaactgcttcttggtgccggcagccttggtgaccttgagcacgttgaagcgcactgtcttgctcagaggccggcactcgcccactgtgacgatgtcaccgatctggacgtccctgtggaggcaggtagggccatgtcctcaggaggggccaccccagcagaccccaggaggccctccctccccttcaccaggctaaaggctctctgcttcggctccaccaaaccccaaccaagctctactcgccaattcaacctgtcccctcctttcgtacaagttttgtgccaagcaccaagctcaacgctgtacacagagcaggccaccacccctccgaggaccgctggggtggacgagctccatttcacaagcaaactggaggcccccaagttgtcagcagcctcaccacccttccccagcagagcagcagggggatcctgcagcactgacaaccacaggtcccttatcgctcagcatcagtttgggccaccctcctctccacccacaggactcctcaccttgctcccaagatcctccccgcccagagggccaccaatatcagctgcccacatccccattctggttatacttggctgtcatctggcacccacactgcttgaaggtgccctctgagggagcaggactttgttcctggctcaccactgaaccccaaacatctcacaccacacctggtacgtgataagctctaactaaaacatgctgagggaatgaacaaacgtttaattccaacatttctgaggttcccatctggtatgacatcctaaccttttggttcaaacgcacctgcctattacaggttcagcaccctaatccaaaaattctgaaacgctgcaaaatctgaatttgtgtgtgtgtgggagagacagggtcttactctgtcgcccaggccggagagcagtgctgccatctcggctcactgcagcctccactttctgggctcaagcaatcctcccaccccagccgcctgaagacctgagactacaggcacatgctaccacacctggcaaacttgtattttttgtagagagagggttttgccatgttgcccaggctggtctcaaactcctgggctcaagggatcctcctgcctcagcctcctacagtgctgggattactggcttgagccacggtgcctggctagaatctgaaacttcttcaataccagcgtgacacctttgctttccaatggttcaatgtacgcaaactttgtttcacacagaattataaaacgcactgcgtaagactactttcaggctatgtgaataaggtgtatatgaaacaaatgagcttcttgtttagacctatgtcacatccccaaaacatctcactatgtatgcgagaacattccaaaatctggttccaagcatttcaggtagagatattcaccctgtagaacgctttgattctgaagaacatatgatatacaaatcctgagattctggggcttcccagagatgccacctcagtctttccctccctcagttggccttaaattggtccgatctggaatctgaaggctgagagagcgtggcctgagcaacctgatgggccactgcgctcacctgaagcagggggacaggtgtacagacatgttcttgtggcgcttctcgaagcggttgtacttgcggatgtagtgcagatagtctcggcggatgacaatggtcctctgcatcttcatcttggtcaccacgcctaggagcgggggccgatcataggtcaggtcccatgggaaagagggccataggtaacccagggcatgctgggactcagaagcagctgagcagggatcccaaaaagccccatttccggcatcagttttaccaagtggctttctcagcagtgcccacgtgggcatctgaagaccatcgtgaaaacaaacatcatctgccaatgtacctggacctacaagtttgcattcctaaccacccctctcacccaggacccaggagtctgggccccaagacccttctttcagtatttcaggccccagacaccagtaactcccgcacttaccagagaggatccgccctcgaatggacacattaccagtgaaggggcatttcttgtcaatgtaggtgccctcaatagcctgaaaggataggaaagataaaggagtgagccttgggcgggcggttccttaaaagagccaggggcgtggcctcagggaagcaactacaattcccagcagccccagaagccacttagatgcaggcagggcaactcgtcgtgggcacacgtgcaggaacgccaggttccccttctttcttctgaggttccccgcacctccttgggtgtcttgaagcccagaccgatgttcttgtagtaccgcgggagcttctccttgccagtttctcccagcaggaccctcttcttgttttgaaagatggtcggctgcttttggtaggcacgctcagtctacagattatgaggagaaaactgatgagctgctaagtttgaagccggcagccaaccagccctagagaccttcccagaacctcccagaccccatgctctacatttacttgcaaagcgccggcgtccaaggcctggtgccccagaatcaccctctaagacatgaccaccctgaccttacctgtaattcatactcagatctaagcccgaggttatttcaatttatatactccagaaggcctctcagggattgcaaaattcatcctctaaaccaggatcaaccctctcacaccctggacacctttcagcgaggatcattctccaagacccaagatcgcccacccaggattcactccttatgtagtacataaggattcagaattaaataccagacggcaggctccctggattagcccttaggagtccgtttccacagaattacccctgaagaccggagaactccaaaaaaaccttcttaaacttggtttttaagaaggtaagtcctaaaacgcttgagcctccattaacgccaggagcccccaggaattaggaagcactcatctagaaacaaaagcaagcgccctccactccagttaatctctagaaaataatcacggacgcccggaattaacccccgaacttggccgccgggctctgccctcccggacgcgcccctgaaggccaaggcggaccccgcaccctggcatccaaccccgagtccgcacctgaatgtccgccatcttcccggccgcctgaaaaaaagaaaggggcagcagcgtccgggtttccttatcgattacgcaggggctggagaggaagtgacgtaaggagaaacgcagcacggccttgggcggggcctcgagagctgctctgattgacaggctgcacttaaaccagcgggcgattcgggcactgtgaaggactgacgggcgggaagtgctagacggtgtctcgcgagagtcttaggccccacaacgccgggcgcgattatttaggcagggaagatgtgaccagccttcagcccgcccgtattatcgcgagagtcgtacggagtccatcctgtttcggcgtggcgtaggctcccgtgggatttggataccgcgtggctctgttcgttcagccttcaaaccggatgaggcggctgccatctttttgaagggtgggcggccggggagtgctaggagcatgtgtggcggcgtcgccatctttgttaggggcaggagctgcccacgaactttcagaggtgcagtgaaagttactctcggcctagcgcggtggctcacgcctgtaatcccaacactttgggaggctaaggcaggcggatcacctgaggtcaggggttcaacaccagcctggccaacatggtgaaaccccgtctctactaaaaatacaaaaattagccgggcgtggtggcgggcccctgtaatcccagctacttggaaggctgaggcaggagaatcgcttgaacctgggaggcg

SEQ ID NO: 1887949 - DNA, 4001 bp, Homo sapiens
gatcctgaccttcaggccagtggagaccagccccgagaagactcgtccaaaggcgtagaaccgacctttgtcggaggttggcaccattttggaaatatacatcataagagggcctttggggtcacagcttttaatgcctgagggacagagaaaacccgcaagctttattccagtgcagctcagccttctggaaccctgcaacccacaaccttgggcaacaggaagtcatccggctgcatctcagggcccggccaccgggaccacgtacccatggcagcctcgtcgtccgggggcccctcgtacaggagctcgcagcggtacttctgggccgtcacaggggagggcaggtggatggtgatcatctgcaacaaggcgtctccggcaggcagccagcggcgcatcacagcctgcgggggcagagagcggtgcatgagacacctggggagcccaggatggccccaccccgtacacgcttcctctcttgaagccaaggaagccaaagtcaggactaacgttctccaaagcacagtcccttctggaaggcggcaaaggccatgcacactcctgccaaggccctcacccacacctgtcccggatggggctggctgctgggatgtgtctccagcagcacccagagtctaaagcgaaaggggcagcagctgtccctgcccagctgaggacttcagcccccaggcctgggctgtcagagcatccggaaacagcagcctgtgttccctccaccccgagggctgggcccaggccgcaccttcagcaggggtttgccttctttgtccttgtcctcgctgtccagtttgatgtccagtttctctatcagttttgctgtctcctctttcttgaaattcatgatcgcatcaaacacctacattccccaccaagaaacaagaaagcccatttgggaacagcaggaggaagcctggcactgcttcctgcttggaagactcaggtcagcgcagggggacgcagcacgggagcaggagcaggcctggcctgcctaccacgggcccagccagctgagcggatcgggagctggaggaaacctcgtggtggagcagaggaaaaagcccactctgactcagacaaggacccaagttctgacttacaagcactgaaccgccaaagccacaagttattcaaccccctcaatgcaggagaggtcccaaggctctggctatgcagtccagatcttaagagaggagccctgactccacctcagttaggagctgtgcctcctcccatctcgcatctgccccacaaggagacgggcccagtcagccgacaggctaccggccggagcccacagggccgagggccaatagtcgcatcggcggggtgcctggcgcagccctcactcaccttgaagatggggtccaggatcagctggcagaaggtgcgtggcagcttcttcccttcggggctggtggctgacttgctgaacttgccgttggctgggtcaaagtacctggcaaggagaggccaagccaaatcaagttagggtctccaggggatgacttggggagggtggtcgccaaggggacatgcttgggcaagacctggtgggcttgagccacgctgtgaatagcacaccacgcccctacgtcgctgccactacccccaggtgtcaggaatcccccaccatatcccgcggggctcacctgtcaccccacagcttcttcatcatgtcctctactttcttggcccgctcggcaggccccaactggccctcccccttggcggcgaacttggccacatacatctcggcaaactgcttcagggtgaaggcccacccgtggaggccagacccaaagcccacggtaccgaggacaggatcgatctggaagtgtgagaaacgagaagcagccgtgagggcccctgcgcagagcctgaagctacgggctgggcgccttgggcatgggcctcagacgcaggctttcttcagtagacatctggtcaaagtgaagaaatgatcagtcatcacgaataggggggccagcccctccaccacccagggcagcgttccctgagctcgtctcttccagctgcccaaagatcaagggctgggtcaagtcggatgaaaacattccagcccccttctctgtcacccaacattcctggcaaaaacacacttccagtccccctcagctcaactccactccccaccggctcctgcagatcccgctgcggcaagcccaccacccagctagggagggccgtaccatgatgttgcccatggggccgctctcgccctcgccgtaggtggagatgatgacgttcacgttctccacgatgcgctggaaagtctggtagagctcctcgggctccagctgcagctccagcagggcgcggtccatcttgttcatcatcagcacaggcttgatgcgctcggcaatggcctgccgcagcactgtctccgtctgcacgcacacgcctggggacacgggggacagggcggcgctgtcatcctcaagcaaggatggcccccggttccaggccgtgcctcagggggacccactgcttacctgacacgcagtccaccaccaccaatgcgccatcggtgactcggagggcagcagtcacctccgaggagaagtcgacatgcccgggggagtcaatgaggttgatgaggaagccggcaccgtccttgctctgcttgatgaagttcaagtcattctccgagagctcgtagaagagggagatggcactgatggagggagggactcgtcagggggacaggagccacacacctggcccagggagtctgggatgctgtcagaagccaggctgctcctccctccatgactcatccctggagaggctcccacaagagccaacccacccttgtcctttgcctctgtccgagacatgccacccccatgacagggaactcctggtaccagccccatagccagatcctcagagccctcctgaccagacatcctgccccaccgacttggtcccaagattcatcacacctgactcaaagtagcaactaaaagacccagcaggacggcaaaagcctccagagactccgaccctcccctcctcacttctgcccctgctccaggggaaatgaagagccttagccagagtccctcaccaatgtaccaacccaggacaaaaagcagttggggtcaccgtactctgcgctccccctactcatatcggggccagaaactgacatggaatgaacatcatccagtgcaacacaggagcttcccagcgtcccaagcactagaacaccctcccctcccaggtgtgacagccaaacctctccagatattgtaggagtgggggcaagtcccccagggagggagaaccacggagttaagccccctcctcaagaaaaccttccagctcgcagtaccccgaatccctgtgcctctccatcctgtctcgctggactgaacctcactcattctcccatgaattaagaaaccaggggaaagagacgttgccaagtctctccccgcgcaccctggcccagtggcctccagctgccaggccagcacctccctgcctgggtacagagggcacagggagctcacgttgacttgatggtgatgcaacgctcctgctcgtccttccgggtatcagtgaagcgtgtctccccggcccgggccgaggcgatgatgcccgccttgcacaccagggagtctgtcagcgtggacttgccatggtccacgtgggcgatgacagacatgttgcggatgttggccttcttgtccatgatggcgcggatctggtctaccgtgaagttcacctgggcaagacaaggaggctcagaccagctcgtgatttccaggaacacagcatggcacggagcgttcagtccaaacgaaccagcatgcccaaggccaggagggggttggtgctggggtgccccaagcccaccgaatcttgccagcctaacaccccttaagagccaccccgcaatctccaaggaaccaccgttaataggtgtcattcatgattgacaacccaga

SEQ ID NO: 1887950 - DNA, 4001 bp, Homo sapiens
aataataacaagaacaaacttctgtatgcgttcagtacagatgtaatttttcctctgagtattttcaatctgaggttacttgaatcttgggatgtagaacccacagatacagagagccaactgtgctggggcagggacttgggctttcacattttctattttcttttctttctttttttttgaagacagagtctcagtttattgcccaggctggagtgcagtggcatgatctcagctcactgcaacctctgcctcctgggttcaagcaattctcctgcctcagccttccaagtagctgggattacaggcgcctaccaccatgcctggctaatttttgtatttttcgtagagacaggatttcaccgtgttggccaagctgctctcaaactcctgacctcaagtgattcacctgccacagcctcccaaagtgctggattataggcgtgagcacctggcctcacattttctattttcaatactgtttgctttaaaaaaaatttttttttttaattttagaactggggtttcactatgttgcccaggctggtctcaaactcctgggctcaagcaatcctgcctcggcctccaggattactctttaaaataattagaacagcaccttttccctgatttcctttgggcacaaccaggccctgactccccaccaggggcagcccacgcaggctgctgggtgtcatcactgtccagggtccccacccacctgcatgcactggaacagcaatgtcatgatgttgctgcgggccaccagctgctccacgtgaccacccaggccctcggccaggccgctgagcagatccagtgctacgatcatgaagtccttgtcgggagcctcatactgctcagggtgctgggtgtacatctagacacagatgccgacaggggcacgggtaagtggagcaggcccgaggcaggccaatgcagaagcacaggtgacgggcctagggttgctcaccatggcctgagccagtgtcttctgcaccagggtgacacagcgctggtagacgggctcacagtaaggcaggaagccactctgcagggcggtggccaccgatgacagacactggcagggaggaaggcaggtggggagaactcaggcagggtgggcaggatgggtttcgggtgaggggcaggagcccactcacctccagcagggggaagaggtccttgtcttcgtccttgagctcattccacttctggatcagtgggggcatcagcttctggatgtattcctggagagggagcacgaaatgggcgctccctgggtcggggtggcagactgtgactcaggtacctgttgcccgagtgatgaggcctgagcgcctcaccgtggctcatgggaccctgaaaggcctgccatctggccagacctcgaggccttcattcttctcacctgtccaagcaccgcccgccccaccccaccccccgggagcctgggttaccacctcctggttcccgaagcacagcacttaccacgctgtctcataactgtctttctcccccactagactgggagcagggcgagggcggggccgggtctgtctgtctgcctgtcgaggtcacggccacgtccctggcgtgcaacacggggttgccaccaggtcactggatgcccaggggcacggggatcgggaggcgggagccgctctggggtctcaccggctggttgaggtggtggcctacagagtcggccagggtgccaatggcgtcatagaggatgagcaggttcttgtgctggtatttcccaaaggcaaagacaagggtgtccaggatgtagctgaggtagggcaccagctccgtgcaggcctcttcctccagggtggcaaaagcactggtgggagggaggatgaagcgggggctcagtggaccatggcaggtgacactgggccatgggcagttggggagggcaactcaggatcagccagtacgaatacgcgataaatcagttccacatcaacagtcacaggtgtcatcacttcccagagggtggccgggggagagtgggggctgtgggatcaggggtccagggtcacctgcaggccgcctcctgtaccctcttgttgccatccaggatgcgtttgagcagctctgtcatcaggggcttgaggtgcatgtcgggtggctggctgaccacccagtgggcatagcggctcagcgtccagcaggcgatggagcggaccaaggccttcttatccgacaggcactggatcaggtgcgggatcagctcaggcaggtagggcaccatgccctgcatgcagcctacaaggaaagggaaccaagagggggcagtttgattgggcccagccacacccaccgtatggagagaagagtcagccgcacacaacatatagggaaactgaggcttagagtttaaatcactggcccagactcatttcacagagccaggtaaaggcaggcacaggaggggaaacaacagaagcctctcatcccaaagccccgggttatctttatttttttttgaggcagagtctcgctctgtcgcccaggctggggcgcagtggtacgatcatggctcaccgcaaccttcacctcctggttcaaacaattctcctgcctcagcctcccaagtagctgggattacaggcctctgccacaatgcccggggaattttttatattttcagtagagacagggttttaccatgttgaccaagatggtctcagtctcctgacctcgtgatccacccgccctggcctcccaaagtgctgggattacaggcgtgagccaccgcgcccagccaaagagctccgtgttattgcgttaattcaattcatgcattaattcatgtgttaattgaattcatgtgttaattcaaaattggctccgttacatagtgagtggggttttatggggcagcagtgacccaaatggaataaaagcactttgcatttgaaacagttcttaagatgtttgtgagttttcttttttttttttttttttttttttttttgagatggagtcttgctctgttgcccaggctagagtgcagtggtgtgatctgggctcactgcagcctctgcctcccgggttcaagtgatttcctgcctaagcctcccaagtagctgggactgcaggcgcccgccaccatacccaactaatttttatatttttagtagagacggggttttaccatgttggctagactggtcttaaaatcccgacctcacgtgatcccacctcagcctcccagagtgctgcgattataggtgtctggccgtttatgattgttctatttctccttatttttgtttaattttttaatttattattattatttttttgagacggagtcttgctctgttgcccaagctgaagtacagttgcacaatcttggctcactgcaacctccgcctccctgattcaagcaattttcctgcctcaacctccccagtagctgggactacaggcgtgggccaccacgtgtggctaatttttcatatttttagcagagacgaagtttcaccgtgttagccaggctggtctcgaactcctgacctcagttgattcaaccgcctcggcctcccaaagtgctgggattacaggcgtgagccactgtgcccagccatttttaacaattttttaatgttttctttgagacagagtctcgctctgtcccccaaggaggagtgcagtggtgtgatctccactcactgcaacctctgcctcccaggttcaagtgattgtcgtgcctcagcctcccaatagctaggactacaggtatgcaccaccacacctggctaatttttgtatttttagcagagatggggttttgccatgttggccatgctggtcttgaacccctggcatcaggtgatccacccgccttggcctcccagagtgctgggattacaggcttaagccaccacacccagggtttttttttttttttaaaatatcacgaactctgctcttttatttaaagagaacaaagataatagcacattgccaataatccaagacac

SEQ ID NO: 1887951 - DNA, 4001 bp, Homo sapiens
caggtgcctgtaatcccagctactccggaggctgaggcaggagaatcacctggacccaggaggtggcggttacagtgagctgagattgcgccattgcactccagcctgggcatcaagagcaaaacagtctcaaaaacacaaaacaaaccaatccttataaaaacggagtaaaagcttcaagatgcttttatgtcaagggtgtggggttgccctgcttggcctgcagtgctttggggccccatgtggtggaggggtgggcacccatggtacccacccaccctgctgcctgggcagaagtgcaacatggcacacgatgcctgggggatcactccccccagggactcatggtcagtgtccactcacaaggcctgcttccctcatgacatctggccagtgacacccacaggggaggttgggggcagacacccttctcttccggtacccttgaacatggtgtcagggtgtggctagctcgacggacaccgaacagctccacagggagggtagtgcccaaggctttttgcctcccctaccatgtcccgcacttcctgaatgcagctcaaaccaggagcagctcccccaggattctggcctgcttcacccctggagcaccaggccaggcggtgtctgtccttgagagccaggcccaggtctcacggtggcgtatggacagctcctccccataggcctggtcacaatagggaagcgggggtggctcctcccctagcctgcaggaagcccttggtagcccacttatccaccttctcctgggtgtgtggctcagcagccaagtccttgtgcactgggttgggtcccagcatgagcctggtggcctggcgggccctggcaccatggagagcagcctgctgccagtgatggcctggatctccaagacggcctccagcactgtcatgcccttgaccagctagtgctggtacaggacctgggtaacaggcatgtccttgggcgtcactggctcaggggcagaggacgaggttgaggaggaagctggatacccctgtccatggtgggctggggctggaagggtggctcagtggcctcgaagtgccgggaggactcccagctggcaccaggccatcagcagccgggtgggcagtgccgtgctgctgttgccctcagggccttgcagtggtagctgaagatggcaccttatcaggttggatcaggtcacccggcagcagcagctctcgagagctgaggcacaaggcaggggcccggctgtacacctgcaggacccaggagagcctgttgcagttcttgcccgaagcgccgagatagccagctcagtgtccctgcagcaggagcagaaccagctctggcccaggtgggtgggtggcagcgctttcctagccatggctgcagccacgcctaggcaggaaacagcagagtgtctggagggatgctgtcaggggaaggacacagaaaaggcacgaatgggggaaacagccacacccccaccatcacctcccggagtggggcccctcagaaccccggatgtcaaaggtcccggggtgcaccgtgtcctcaggggcagtcagagcccagtgctggacatcacggggtccccaagtgcagccctttcaagaaccctggacactggacatctcactgcaacccagccccagcccccatcccacctccgccccccaacagggttactaaggttaatgagcccagtgcttagggcagcgcctggctcagcacttgctgggcacctgtctacatctgccttctcaccaacaccaggagtaacaggcagcctcctctgttcttaatgagtgatggtcaggcccttcagcacctggaggcaggagggcacaggggaggggagaaggtcagtggggtgcagggcagccaagatacccaccagccctccccagagccagggcccctcagacccccgggtgtcaaaggtcccggggggcaccgtgtcctcagtggcagtcggagcccagtgctggacatcatggaggccccggtgccctcaccccctcctgatgtgggtcccaggaccacctactgtcctaagggggacatcacagaagagtgctgagagatcaggcaacaaactgaatgacacttggtccctgggggtgccaggctacctcccctccccatccagctcagcctgggtatggctccttgtatgatctaggcccactgacctcacccctccccgccccccagcagcagtgtttctctggaaaacgggactagagatgcctgcagacaggcacatctgtggggttcagtgagaggacggggccaaacccttctgcttgggcctcccatgcctaacgggatacccctcaatcgcctctgctgcccccggcccagctcttctaagctgctctgacttcaccagaaccttctgtgacatggggaaggggcagctgcctctcactgggaccctggcaggataagttcagtttattctccgcaaaagcactaacactgtgggtgctcgctcagtgggtgctgctgtttaacaacctcagaaacaccaaaagccccattttgcatagaaatatgctttgtaggaagaggggggtccttgtttaaactaatcaaggaaaattaaaaacccagcccccagccacaaactagccacattccaggtgtccaagagccacccgtggccagtggctgccagactggacaaggcgaggaacatttctatctggacagtcgtaaggaaggcgccggcccagaatccacaaatgctacgtgtcccttctgtctccctatcccgcatcagctctgtcgtctcacctctcacacatccctacccaactggcaccgacaccactcatgtccccaagaatcccctctaagccagccatgacaaacgctcagctccattcactaccccacagaggatctcggattaagagcacaggacccggccgggcatggtggctcacgcgtgtaatcccagcactttgggaggctgaggcgggtggatcacgaggacaggagatcaagaacaccctggctaacacagtgaaaccccacttctactaaaaatacaaaaaaaaaaaaaaaaaaattagccgggcgtggtggcaggcgcctgtagtcccagctactcgggaggctgaggcaggagaatggcgtgaacctgggaggtggagcttgcagtgagccgagatcgcatcactatactccagtccaggcgacagagcaagactccctctcaaaaaaaaaaaaaaaaaaaaaagcacaggaccctcagaaagatactcaggggaactgcaatcccagccaaccctgcccaaaagccagcttccctgccagaaatagctgaaacctccaagaacccggagaacacactttcagttctatttcgctgcagccacggttccagctcctgacacctaaggaacaaatgaaaatcttcccagagctgagaacacctgtctcttttctgataacacacactcatgcttgtctgattttgctctttgaaacaattctcctgataaagcctgttatttttattgtgaaaataggagttccctgaattctatcagtttatatataaacggttcactgcaggctaagctgtgcttaaagacacattgcattcagcctacaaaacccatgaagtaacgtgacagaatcacctggtagttactgtctcttttccactgctgagttttgacatgtttgattagttctttcccctgaaacgcaaatgcttgttccctccagtccacgcattcctcttcttattcaagccccaccttcagaaggcgggaagcgctagtgccccgggccatttgctcggtgcctgttccacagacacagcagtgaggcgcaaaagagtgatggcctggtgaatgtctccaagcctgtaaacagcagagctggggtttggacccaggcctgcctgccaagttttccatagttgtgagatgggtgtttttttttttgagatgggagtttcactcttgttgtccaggctgaagtgcaatggt

SEQ ID NO: 1887952 - DNA, 4001 bp, Homo sapiens
gagtgttctgtccgctgtttaacaggggcccctgtgcccaaggcctcagctgtgaggtcagaactgctagggctcagtgagtcctcacagagctgtcacctgagattccggccccagcacaccctaaacccagaccaacacagaagccacacacagcaaaagcagacccatcagaagggactggctgcccacagcacacagccaatgcacgctttcagagaaggcatagcaacagagaccttaagagaaaacccgtgacaggccaggcatggtggctcacacctgtaatcccagcactttgggaggccgaggtgggcggatcacctgaggtcataagtttgagaccaccatggccaacaatggtgaaacctcatctctactgaaaatacaaaactagccaggcgtggtggcaggtgcctgtaatcccagctactccggaggctgaggcaggagaatcacctggacccaggaggtggcggttacagtgagctgagattgcgccattgcactccagcctgggcatcaagagcaaaacagtctcaaaaacacaaaacaaaccaatccttataaaaacggagtaaaagcttcaagatgcttttatgtcaagggtgtggggttgccctgcttggcctgcagtgctttggggccccatgtggtggaggggtgggcacccatggtacccacccaccctgctgcctgggcagaagtgcaacatggcacacgatgcctgggggatcactccccccagggactcatggtcagtgtccactcacaaggcctgcttccctcatgacatctggccagtgacacccacaggggaggttgggggcagacacccttctcttccggtacccttgaacatggtgtcagggtgtggctagctcgacggacaccgaacagctccacagggagggtagtgcccaaggctttttgcctcccctaccatgtcccgcacttcctgaatgcagctcaaaccaggagcagctcccccaggattctggcctgcttcacccctggagcaccaggccaggcggtgtctgtccttgagagccaggcccaggtctcacggtggcgtatggacagctcctccccataggcctggtcacaatagggaagcgggggtggctcctcccctagcctgcaggaagcccttggtagcccacttatccaccttctcctgggtgtgtggctcagcagccaagtccttgtgcactgggttgggtcccagcatgagcctggtggcctggcgggccctggcaccatggagagcagcctgctgccagtgatggcctggatctccaagacggcctccagcactgtcatgcccttgaccagctagtgctggtacaggacctgggtaacaggcatgtccttgggcgtcactggctcaggggcagaggacgaggttgaggaggaagctggatacccctgtccatggtgggctggggctggaagggtggctcagtggcctcgaagtgccgggaggactcccagctggcaccaggccatcagcagccgggtgggcagtgccgtgctgctgttgccctcagggccttgcagtggtagctgaagatggcaccttatcaggttggatcaggtcacccggcagcagcagctctcgagagctgaggcacaaggcaggggcccggctgtacacctgcaggacccaggagagcctgttgcagttcttgcccgaagcgccgagatagccagctcagtgtccctgcagcaggagcagaaccagctctggcccaggtgggtgggtggcagcgctttcctagccatggctgcagccacgcctaggcaggaaacagcagagtgtctggagggatgctgtcaggggaaggacacagaaaaggcacgaatgggggaaacagccacacccccaccatcacctcccggagtggggcccctcagaaccccggatgtcaaaggtcccggggtgcaccgtgtcctcaggggcagtcagagcccagtgctggacatcacggggtccccaagtgcagccctttcaagaaccctggacactggacatctcactgcaacccagccccagcccccatcccacctccgccccccaacagggttactaaggttaatgagcccagtgcttagggcagcgcctggctcagcacttgctgggcacctgtctacatctgccttctcaccaacaccaggagtaacaggcagcctcctctgttcttaatgagtgatggtcaggcccttcagcacctggaggcaggagggcacaggggaggggagaaggtcagtggggtgcagggcagccaagatacccaccagccctccccagagccagggcccctcagacccccgggtgtcaaaggtcccggggggcaccgtgtcctcagtggcagtcggagcccagtgctggacatcatggaggccccggtgccctcaccccctcctgatgtgggtcccaggaccacctactgtcctaagggggacatcacagaagagtgctgagagatcaggcaacaaactgaatgacacttggtccctgggggtgccaggctacctcccctccccatccagctcagcctgggtatggctccttgtatgatctaggcccactgacctcacccctccccgccccccagcagcagtgtttctctggaaaacgggactagagatgcctgcagacaggcacatctgtggggttcagtgagaggacggggccaaacccttctgcttgggcctcccatgcctaacgggatacccctcaatcgcctctgctgcccccggcccagctcttctaagctgctctgacttcaccagaaccttctgtgacatggggaaggggcagctgcctctcactgggaccctggcaggataagttcagtttattctccgcaaaagcactaacactgtgggtgctcgctcagtgggtgctgctgtttaacaacctcagaaacaccaaaagccccattttgcatagaaatatgctttgtaggaagaggggggtccttgtttaaactaatcaaggaaaattaaaaacccagcccccagccacaaactagccacattccaggtgtccaagagccacccgtggccagtggctgccagactggacaaggcgaggaacatttctatctggacagtcgtaaggaaggcgccggcccagaatccacaaatgctacgtgtcccttctgtctccctatcccgcatcagctctgtcgtctcacctctcacacatccctacccaactggcaccgacaccactcatgtccccaagaatcccctctaagccagccatgacaaacgctcagctccattcactaccccacagaggatctcggattaagagcacaggacccggccgggcatggtggctcacgcgtgtaatcccagcactttgggaggctgaggcgggtggatcacgaggacaggagatcaagaacaccctggctaacacagtgaaaccccacttctactaaaaatacaaaaaaaaaaaaaaaaaaattagccgggcgtggtggcaggcgcctgtagtcccagctactcgggaggctgaggcaggagaatggcgtgaacctgggaggtggagcttgcagtgagccgagatcgcatcactatactccagtccaggcgacagagcaagactccctctcaaaaaaaaaaaaaaaaaaaaaagcacaggaccctcagaaagatactcaggggaactgcaatcccagccaaccctgcccaaaagccagcttccctgccagaaatagctgaaacctccaagaacccggagaacacactttcagttctatttcgctgcagccacggttccagctcctgacacctaaggaacaaatgaaaatcttcccagagctgagaacacctgtctcttttctgataacacacactcatgcttgtctgattttgctctttgaaacaattctcctgataaagcctgttatttttattgtgaaaataggagttccctgaattctatcagtttatatataaacggttcactgcaggctaagctgtgc

SEQ ID NO: 1887953 - DNA, 4001 bp, Homo sapiens
ctaccccacagaggatctcggattaagagcacaggacccggccgggcatggtggctcacgcgtgtaatcccagcactttgggaggctgaggcgggtggatcacgaggacaggagatcaagaacaccctggctaacacagtgaaaccccacttctactaaaaatacaaaaaaaaaaaaaaaaaaattagccgggcgtggtggcaggcgcctgtagtcccagctactcgggaggctgaggcaggagaatggcgtgaacctgggaggtggagcttgcagtgagccgagatcgcatcactatactccagtccaggcgacagagcaagactccctctcaaaaaaaaaaaaaaaaaaaaaagcacaggaccctcagaaagatactcaggggaactgcaatcccagccaaccctgcccaaaagccagcttccctgccagaaatagctgaaacctccaagaacccggagaacacactttcagttctatttcgctgcagccacggttccagctcctgacacctaaggaacaaatgaaaatcttcccagagctgagaacacctgtctcttttctgataacacacactcatgcttgtctgattttgctctttgaaacaattctcctgataaagcctgttatttttattgtgaaaataggagttccctgaattctatcagtttatatataaacggttcactgcaggctaagctgtgcttaaagacacattgcattcagcctacaaaacccatgaagtaacgtgacagaatcacctggtagttactgtctcttttccactgctgagttttgacatgtttgattagttctttcccctgaaacgcaaatgcttgttccctccagtccacgcattcctcttcttattcaagccccaccttcagaaggcgggaagcgctagtgccccgggccatttgctcggtgcctgttccacagacacagcagtgaggcgcaaaagagtgatggcctggtgaatgtctccaagcctgtaaacagcagagctggggtttggacccaggcctgcctgccaagttttccatagttgtgagatgggtgtttttttttttgagatgggagtttcactcttgttgtccaggctgaagtgcaatggtacaatcttggctcactgcaacctctgcttcccgggttcaagtgattctcctgccttagcttcctgaatagctgggattacaggcatgtgccaccacgcctggctaaatttttttttttttttgagacacagtcttgctctgttgcccaggctggagtgcagtggcacaatctcggctcactgcaacctctgcctcacgggttcaagcaattctcctgcctcagcctcctgagtagctgggattacaggcacccgccaccacgcccagctattttttgtatttttagtagagatgggggttttcaccatgttggtcaggctggtcttgaacccctgacctcatgatccacctgcctcggcttcccaaagtgctgggattacaggcgtgagccactgtgcccggcctaattttttgtatttttagtagagacggggtttcaccatgttggctgggctggtctcgaactcctgacctcaggtaatccacctacctcagcctcccaaagtgctggaattacaggtgtaagccactgcgcccagcctgagatggtttttgtatgtaaacactgagtacaatcattggcacatcaatcagtttctagaggtacggtatgaagtcaacctagacagtgagatattttaaacccaggtgagtgaaggagcaggagcaagggttcttacctggataggcatggtgggtggtcctaagcttgaagctgcacctgtaacacagaaagacacagtgagagtgggggaggaaacagtctgcaagtccacaagccattaaaactggggcccctcagacccccaggtgtcaaaggtcctggggtgcactgtgtcctcaggggtgatcagagcccagtgctggacatcatgggagccccagcccctctgcaaccaggtcctgaggccacttaccttcagggacagaggccaagctaacagagcttaaagagtaggaaacgcggccgggcacggtggctcacgcctgcaacctcagcactttgggaagccgaggtgggcagatcacgaagtcaggagttcgagaccagcctggccaatatggtgaaaccctgtctctattgaaaatacaaaattagccaggcgtggtggagaatgcctgtaatctcagctactcgggaggctgaggcaggagaattgcttgaacccaggaggcggaggttgcagtgagccaagtcgtgccactgcactccaacctgggcgacagagcaagacttgtctcaaaaagagtaggaaatgcaaaactcatccagaaggtaggaatgaccagttttgctcatggagacaccaagatgccccaacctccccagtgtcacaggtcctcgggggactgtcctcatgggatgggtaggaccccaaatgcactacatgaagatgtccccggtgttcatcccccactgtttgcaggtttctttagcactgcctacatctgcacataacccataaacagagaaagctgccaagacacaaatcccctggaagaacttattgagagaaggaagaagaaacaaagccaacttgtaaataataatgaggagagaccctcgactgagtcaggtttgaacatatcagctgtaaaagacatttcgaagatgactgaggaacaacaggcacaaagcagattgttaaattgcagtattaagggtgacaatgctaataacattaagtagaaaaatgttactgtaggtacacaagtacactattttgagtgaaatatgaacctttctttcaagtaagagtctgctctgttgcccaggctggagtgcagtggcgcgatcttggctaaaggcattctcccacttccttcataagtagctgggactacaggcccgcaccaccacgcttggctcactttactatttttttgtagaaatggggttttgccatgttgctcaggctggtcttgaactcctagggtcaagcgacccacccacctcggcctcccaaagtgctgggataacaggcatgagccaccgcgttcggccatgaaacttactttcaaaacacttaagcacaaggtttttgaatatggcaagatggtgcaaatgttaacttttcccatttgttggtagattttaatattgccaaaggacgacgtgccaacgatgaatgcatgaaaaaatactttcacttgtgacatgaacaaactcaacgattttctaggtggttgcctgaaggaggtaagtcaagtagagatccttgctggggtcgtggtgggggagataggaaatgggctagctgcttccaggctgagcctcctcggcaggggcatgggccccgctcaagtcaggaaaccgatgttcaagaccttaaaggacctaagccaaaaactaacgttaacaaaaccctctcacgtggcatgaacggtcagaacgactcccgcaggtaagcaaaggcctcgtttgcttccttctatatccattcctacacgactctcaaacccggcaattcacctagaaacttcactctcacttctttggtaactcgataccctatctgtgcccccatggaaccccccaaaaccctctcccgtcccccagtctttgttctaggttgcacaaaaatgccagccatccagaattttaaaagcaagagagaattcctaaggaagcacctgtaggtagcacgaaaatggaaacactcggaaagaactcaatgtcgcctcccagcccgcccacccctctcccccaaccaaatcgacaagatggcggaggcccgcggcgtgcgggcagcacaaggggcgagctccgccgcggggcagacggaggggggtccgccccagcatccccgctcgcgccagctataggagtcgcaaactcccaggcggcccaaacagccaccaccatccccgcagaaaactcccagg

SEQ ID NO: 1887954 - DNA, 4001 bp, Homo sapiens
cgtggggatcatggccatggtgatcaggcatgattaccgcccatgctgcccatcggcattgcgtggcccccagccctgaggtctcttcgcacagccacacacctcaaggctgtcacatgtgcctgtctcaccaggacagtcacaccttgtctcttttcactgctgtcacctgagtgatccactctgctgttcctgttttcccgccctctaattgcctcacacctcaaaaatgtggaatcactttataagaaatctgtgtgtgtgtgtgagtgtgagtgtatgtctctgagcgtgtctgtgtgcgagtgtgtgtgtgttctatcctagaggaagatgccttccctaagatcaggctcatcaggcagccccaacccctgcactgagctccatggccatcctaggaggcaagaagattgtcccactttacagatgggtaagttgaggccaggagaggggcagtgacacacccagaacttcatagccagtaagagtgtgagccatgcagccatggcagaacctatgcctacccgaccccatctggacttccagctctaggcaatttctgcagcgtcccttccccctcaccaccttcagcccctggctcttagagctgccttcagccttcgtttggacaagtagctgagctcaatgtcttcccagctttcccctcccggatcactgcccaactctgggggcctccttcctctgccctgggccctcccacatacccatttcttaggggctccaagtccacatctcccatctccccatccccacacactcaccctgggcagcagccagctcctgcagggcatgggtcatctgggtgaaggtgtcatgcaggtggcttctctcatcatagtctggcggtgagggagggagcaggggctgggggaggcagctccccgcaacaccatgtccctaatgcgaacattctgtttctgagtctctgccctcccaagtctgtatcctcccctctctgactctttgccccacagtcgctatgcttcctgagtccctcccaagtctctatcctccctgagtctctgcccccgaccagtcgctatcctgcttcccctagtctctgcctcatctctgtcctcctctctctgggtttccatcctctttgagtctccatcttccaccctctgagtctccatcctcccctctctgggtctctattccctctccagtctccaacctctcctgactctccatcctcccctttctatgagtctccatcctcctgactctccatcctcccgagtgtccatcctcccctctctgactctccatactcctgagtctccatctttccgagtctccatcttcctctctctctgagtctccatcctccccctctctgagtctccatcttcccctctctgactctccatcctcccctctctgagtctttgccctgctgtcttcccctgtctgtgtctctctgtccctaagtctctgttgttctcatggtctttgagcctttctcctctgactgtttctctctgtctgtccctcagcctgaccctctgggcctctcctgccctccctctgcaccttccccaggacactgatgaagtgtggatggtctcctcactgatttcggtgtcagagaggccctggaaggcggccgtgaaggcctcctcacactcttcaagcttggggctccgcatcccaacaaacatctggcagatgcggaggcgctcagagtaggttgtgaagcagaggagacaggcccaggcgggcaccctgaagacagccagggccagcagggcagacgggacggcactggccagagccagcagggccatcgtgtgggtctcaaggccaggggagaagctagtaacctttatgaagtcaccacagggcgggggaagggccagtggtctggggtcagaggtcaggtttcagttggtggtcaaatgtcatgctctggaggaagggtatgaggagtcaggggtcagaagtcaggccagcaattccccaggtgtgtggttgggccagacgccaggctcccaagaacctcacctgtgaccctggatgtcctcacaggttaaagggtctcagggacctagagactggcaacatggtgtgcggtggcccggtagaccctggggtgggggtcagagatggagataggcacagagacattctgagagccagagacagaaagaccaaaaacgacagaaatagagacacagagagatatcgggaggggcagagacctagaaagccagaataagagggagtcagaggatccactgtgaaagagacacagaagccacagagacacagcagagatggagacagacagggaaggaaaacagatttcaggggaaggaggggatgcagggacaaggacagaaaagagcccggctcttcctcccagggtccctggggcagcccagtggggctaagggtccctgagtggggctgggggtccccgccgggccccgtcccgtgcagggcgcagcctggggaaagctaggaggccgtatagtgatctccttgggtgtcctcctcaactatacaacctcctacctcagcccggggggcgcggcaggtggacagacccgacagacagacagacagggaccaggaggaccagggatgagggggagggccggggaggccccagccgcgatggtgagcccccgacacggacccacagacacgagcttgtgtgcggcgaaggccccgcaaggtcggttctacgggtgggtgccaggacccaggagtccgggcccccggcccctcctccccaaggaacccaggagtccaggccctcagccccttcctcatcagggaccctggagtcaaggctctcatccccctcctccctaaagaacccagaagtctaggcccttcctcaccacagacccaggaatccaggcctctggcccttttctccccaaatgttcctggaatccaaggactcagccccttcctccctcagactcatgagtccagatccaaagcctccttctccccagagacccaggagtccctgcccccagcccctcctccctccggccaggcaggcctcctggggaaggcatggcctgatagaaaacctggcttcctgggtgccggctgggagggaacctcatttgtctcgtaatttggccctttgggcacacctgcttcctacctaccctcctgtcagtctgcagagactccaggcccagggctaaggaggccaggggctagccaaccatcagagcctccctaggtgctttctttcctctctcctcccttctttgggtcatttacaactatgacagccacaatctcccagcgctgaccccataccaggccctgagcaccagtcctctccctgacacctcccactccagagagcgaggtgccctcagcatccccatttggcaggtgagggggctgagcctcagagaggggaagaggctcccaaagtctgcccagccccatctctgtcctccctcttgaatccaggaggtgtccccagccttctccagcttctggaccccgggacccagcacccaccctccccacccctgggctctgagcccctccagctggggtctctcccgtgcccagcccctcctcctggactgtctggttctcgctgcccctgctccaggcgcaccttccggttcctttctcgcagtccaggtctctctggccctgcctttttctctctccctctttctttccaccttccctggttcccagcctcctcctgcatcaggacatccctccctggctctgcgctggcttctctctctgcccatcgcctctctcctctccccgcttctgttttcttccttctctccccctctttctcctgcttttcctctaccttctgtctttcatcctccccttctcccccttccccctctttgtctctctcattctctctctggccctctctcagtctctctcctctttctcacccttctccacccccttttttcggatgtctttcctcacttcctctccctccgccccttccctctctc

SEQ ID NO: 1887955 - DNA, 4001 bp, Homo sapiens
caaagagggggaagggggagaaggggaggatgaaagacagaaggtagaggaaaagcaggagaaagagggggagagaaggaagaaaacagaagcggggagaggagagaggcgatgggcagagagagaagccagcgcagagccagggagggatgtcctgatgcaggaggaggctgggaaccagggaaggtggaaagaaagagggagagagaaaaaggcagggccagagagacctggactgcgagaaaggaaccggaaggtgcgcctggagcaggggcagcgagaaccagacagtccaggaggaggggctgggcacgggagagaccccagctggaggggctcagagcccaggggtggggagggtgggtgctgggtcccggggtccagaagctggagaaggctggggacacctcctggattcaagagggaggacagagatggggctgggcagactttgggagcctcttcccctctctgaggctcagccccctcacctgccaaatggggatgctgagggcacctcgctctctggagtgggaggtgtcagggagaggactggtgctcagggcctggtatggggtcagcgctgggagattgtggctgtcatagttgtaaatgacccaaagaagggaggagagaggaaagaaagcacctagggaggctctgatggttggctagcccctggcctccttagccctgggcctggagtctctgcagactgacaggagggtaggtaggaagcaggtgtgcccaaagggccaaattacgagacaaatgaggttccctcccagccggcacccaggaagccaggttttctatcaggccatgccttccccaggaggcctgcctggccggagggaggaggggctgggggcagggactcctgggtctctggggagaaggaggctttggatctggactcatgagtctgagggaggaaggggctgagtccttggattccaggaacatttggggagaaaagggccagaggcctggattcctgggtctgtggtgaggaagggcctagacttctgggttctttagggaggagggggatgagagccttgactccagggtccctgatgaggaaggggctgagggcctggactcctgggttccttggggaggaggggccgggggcccggactcctgggtcctggcacccacccgtagaaccgaccttgcggggccttcgccgcacacaagctcgtgtctgtgggtccgtgtcgggggctcaccatcgcggctggggcctccccggccctccccctcatccctggtcctcctggtccctgtctgtctgtctgtcgggtctgtccacctgccgcgccccccgggctgaggtaggaggttgtatagttgaggaggacacccaaggagatcactatacggcctcctagctttccccaggctgcgccctgcacgggacggggcccggcggggacccccagccccactcagggacccttagccccactgggctgccccagggaccctgggaggaagagccgggctcttttctgtccttgtccctgcatcccctccttcccctgaaatctgttttccttccctgtctgtctccatctctgctgtgtctctgtggcttctgtgtctctttcacagtggatcctctgactccctcttattctggctttctaggtctctgcccctcccgatatctctctgtgtctctatttctgtcgtttttggtctttctgtctctggctctcagaatgtctctgtgcctatctccatctctgacccccaccccagggtctaccgggccaccgcacaccatgttgccagtctctaggtccctgagaccctttaacctgtgaggacatccagggtcacaggtgaggttcttgggagcctggcgtctggcccaaccacacacctggggaattgctggcctgacttctgacccctgactcctcatacccttcctccagagcatgacatttgaccaccaactgaaacctgacctctgaccccagaccactggcccttcccccgccctgtggtgacttcataaaggttactagcttctcccctggccttgagacccacacgatggccctgctggctctggccagtgccgtcccgtctgccctgctggccctggctgtcttcagggtgcccgcctgggcctgtctcctctgcttcacaacctactctgagcgcctccgcatctgccagatgtttgttgggatgcggagccccaagcttgaagagtgtgaggaggccttcacggccgccttccagggcctctctgacaccgaaatcagtgaggagaccatccacacttcatcagtgtcctggggaaggtgcagagggagggcaggagaggcccagagggtcaggctgagggacagacagagagaaacagtcagaggagaaaggctcaaagaccatgagaacaacagagacttagggacagagagacacagacaggggaagacagcagggcaaagactcagagaggggaggatggagagtcagagaggggaagatggagactcagagagggggaggatggagactcagagagagaggaagatggagactcggaaagatggagactcaggagtatggagagtcagagaggggaggatggacactcgggaggatggagagtcaggaggatggagactcatagaaaggggaggatggagagtcaggagaggttggagactggagagggaatagagacccagagaggggaggatggagactcagagggtggaagatggagactcaaagaggatggaaacccagagagaggaggacagagatgaggcagagactaggggaagcaggatagcgactggtcgggggcagagactcagggaggatagagacttgggagggactcaggaagcatagcgactgtggggcaaagagtcagagaggggaggatacagacttgggagggcagagactcagaaacagaatgttcgcattagggacatggtgttgcggggagctgcctcccccagcccctgctccctccctcaccgccagactatgatgagagaagccacctgcatgacaccttcacccagatgacccatgccctgcaggagctggctgctgcccagggtgagtgtgtggggatggggagatgggagatgtggacttggagcccctaagaaatgggtatgtgggagggcccagggcagaggaaggaggcccccagagttgggcagtgatccgggaggggaaagctgggaagacattgagctcagctacttgtccaaacgaaggctgaaggcagctctaagagccaggggctgaaggtggtgagggggaagggacgctgcagaaattgcctagagctggaagtccagatggggtcgggtaggcataggttctgccatggctgcatggctcacactcttactggctatgaagttctgggtgtgtcactgcccctctcctggcctcaacttacccatctgtaaagtgggacaatcttcttgcctcctaggatggccatggagctcagtgcaggggttggggctgcctgatgagcctgatcttagggaaggcatcttcctctaggatagaacacacacacactcgcacacagacacgctcagagacatacactcacactcacacacacacacagatttcttataaagtgattccacatttttgaggtgtgaggcaattagagggcgggaaaacaggaacagcagagtggatcactcaggtgacagcagtgaaaagagacaaggtgtgactgtcctggtgagacaggcacatgtgacagccttgaggtgtgtggctgtgcgaagagacctcagggctgggggccacgcaatgccgatgggcagcatgggcggtaatcatgcctgatcaccatggccatgatccccacgaggtgccagaccctggaactgtggaggctcggagttgcaggagttacagagccctgcgctatagaataaactggcttcctcttaggtccaggagctcagggcttattcccacaccca

SEQ ID NO: 1887956 - DNA, 4001 bp, Homo sapiens
tcaccgtcagagggcagggggtctctgcagtatcctgggaaggagaggaggaggaggaggaggaggagggggtgagtgagcctggggcagggagagaggcagagagtgagttccttgagcccagcttctcctcccgctcccaggccagcccacagtgcacatcacctgggctgctcacctcgacccagtgcggccagcgcagccagcaggctcttctggaactcatcagcctctgcagggctctgaaacgtcagtccaaacttgcagtcacccaggctccagtggtgaaagatgggattcaccttgttgtaaaccaagcctggcttcagtgtacactccaaggttgtctgaggggcagaaggaaagcagggtcagataccccaacccagacatgcctgtgacgtctcgtccatcaccagcccccatgcataccctagtgtcttctcacaaacctcatttcccaaccctaagtgtaaccctgaactctgatcaacactgatacgactccccagttttacttgttttgttttttgaaacagtcttactctgtcacccaggctggagtgcagtggtgtgatcagggctcactacggaatcaacctcccagtctcaagtgatcctcctgcctcagcctcccaaagtgctgggattacaggcatgaacccccacacccagctacgcccaattttactgaacacacctctgatgctcaaatattttcccaaccccttgatccctacattttcctaatacctccctctgatgcccctgtagaaaccccgaatcttgctgaatggcccaaaacattgttaacccctttctgataacccaacatcccccctctggctcaacaatacttcccagactttactgaacatctcacaatattattgtgaatcctcttctgataataatctctggaaactttacccaaaaaatattctctctctctttttttttttttttttccagatgagctctctctgtgttgctcaggctggtctcaaactctggactcaagcattcctccggcctcagactcatgagtggctgggattataggcactgtacccagccagcacttactccaaaacagtcttatcagacttccacagattccccttcagatgctagccaacaccctattgatgttccctcaaatccttgcctagtatcaccatattccttcactccatttcaaatccctccactgactcctgctccaaaaaaaaaacctttcccccaagcctttcacacaatccatatctttctactacatccctagctgaaactgattcaacactgtccctccacattgtgcccgacagcccagttattcctgatgaacccatgtatagaattgtcaaccatctctgacactttcaaatggaccccagcaaatgcttcactatacttagggcagacaggggccaggtggtgtagggcctcgtggcaaggatctctgagcaagatggagggttttgagcagaggagggacatggtgtgagtcggggcgggggggggggggcagtgccccctgtggaacagcctggggttggagcggggaggaggagcagtacagggagacagcgaggatagtctggctggaagtggcagtggacaggaccctccaaacaccccatgtatcctgcaattcccaactcttatctacaggacagatattcactcccaaacttcacaccccagcttgattcctaggctgggaggcaacctgacctctgctccacatgccagcccctctcccctccctccccaggtccctaccctccccgcatgccccagggtggctcactttctggtcccggaggcgttccccgtggatgacgtagtgcccctggcgggcccccccctcgggcctggcccctcggacccgacacacgctcacctggctgaggcccccgccccccacaggcagccagcccccactggagtcatctcgggccatcaccacagctcggacccgcaccatgtacctgcaggaggtggggggaaggacagggacaacacagtcatgagctcaaaccctgctctcccatggaatgttccctcaaccctcatctcccctccaacttcatctctcacgtccaggtccactgcaccctaagctagcaatacccaccttcaaccccatggccaccgtcttccacacagctcctttcttcctcatgccatctcttctctctcacctctatcttcttctccatgtctgccctttctctctgtacccacctttcccccatctctccgtccccacccccatagccctggtgttgcccttccctccccctcctgcttatccctatcacccccttctcctccctcagcacatacccacagccccacccagtgctccccctcacagctgggtgcctgcgcatatatattttctctgggcccatcaactcagctcctgttctcccaaccctgcctccgcaccctgtcgtccaggccacaggctgggtgagaaacccaggctctttcccccccacccaccccttcccggatttatgaatgagaccggatgcaaagctcactgagtcacccagcaacgggagatgggcagggaacagggagagaaccagaaatggccagaaagagaggctcagagggagacggaggcagaggaagtcagaaacgggcgaccgaagacacatccagagagcatttcattcacaaaaatcaaggctgctcccccaggccccagccgagggaagccaggggggaaagatgggatgggggggcagattgatccttcctccctcttcccttcccgccccccagccccagcatccttcagaaccattttaccccgccccccagctcagaggacgtagccctccgcccagtaatcgggatcagtgtccagcccttcactgccatccagcacagggaccctggcgtcccaaccttagggacccggacgagctctagccccctcccccacctgcaggctgctgggtttcccgggcccttcaggaggggaaggggcggctgcagcgcccccagcccccttttctcaatgggatgggattttgtgaatgagcagtcacgtgacgctgcttcctttgtccgcccgcctcccccgacaacaggtgaagcagggaatgagagcaggggtccccccagggcctagctggaatggggcactggcatttcagggtggcctacgctccccacacatcctgtgtcccccggggggagtggtcctcagcgttcctcaacggtgagggtccaggacggaattttgtgaatggggcatcctcggagaaagtccagaccccacaaatgaagactggtaccctgaatggctgccgcgcagtttggggggtccccactctctagtcctcctagccggggccttgggggcgcctgggtgggcagaaggcgcagcgcggtcacggccgccccctcatcggggcaggcagtctgtcagcccccgccccctcgcccccctcggcacctgcctgcgaggctccggccgggctccgagcggcggcgacgcggcctcctcctcctccttttcgttccggctccctggctggctccggcggcgctggagacgggcaccgggagccggggcgaggggggagggagggggaacctggaagacgggtggggggggaaggggcggcttgggggaggggtaagagcgaggcgggcttacttgcctgctgggtcctagagcccggcactagctccagagagcaaccccccagcccccattttcttaagatccagaggggatcccccacttttccacccatctgcgccattggtctctaatgctatgaggaggggacggggcagggacagggactggtctcaaggttctaaagaggtggtggtctacgctgtggcttgggtgcctggcagagttcgataaggggtggggcgagaggggagccttcacaagtgggtggggttggagggcctgggtataaggaggtttggatgctgcaggcgaggactagtgcgtgcgt

SEQ ID NO: 1887957 - DNA, 4001 bp, Homo sapiens; identical to SEQ ID NO: 1561124

SEQ ID NO: 1887958 - DNA, 4001 bp, Homo sapiens; identical to SEQ ID NO: 1561155

SEQ ID NO: 1887959 - DNA, 4001 bp, Homo sapiens
gcgcccttctctgcagacccctccttgggccagaagacgccccacttgagggtcgtcttggccaggggacctctttggggacccagatatccaagtgtgagtgtgggtaacggacactggagtggggctgtgggaaagataaggcggtagggagagaccagagaaggaagagagagacagagcttcagagacagagaaaaacagcagagaaaaatgcagagacaccagagagataaagagacacagacacacatgttgagacacagcgagaaaaagagcagagaccaaaataacagagacagagacacagagagagaaatacacagcgggaagagacagaaatggacagagacacgcagagaaacagagagacaaaagagacacacagagagaaaaagagcagagacagaaatggagagagacagagaaagagagacagaaatggagagacacacagaggaaagaaagcagagaccaaaatgggcagagacacagagagagacagagacaaaagagacagagactcacagagacacagagagagatgcgcgcacacacagacagaactggacagggacacagagacagagacacagagagacagagagaaaaacagcagagacagagacaaatggacaaagagacagagagacagggagagagagacacacacatacacagacacagagaaaaacagagacaaaaatggacaaagagacaaaagagacagacacagagagacacaaggagaaaaacagcagagacagaaatgggcagagacacaaagagacaaaggggaagagagacagagacacacacacagaggaaaaaagcagagaccaaaatggggagacagagaccagagagggagacagaaaagagagagggagacagagatgagggagaaacagggaggaaaacagcagagagagaagtgggcagagacacagagtgacagagaaaagagagacagagacagagacaatcacaggcaaccaaatcatcagggaaagaaataaacagaggcagagatggagagagacacacagagaggaaaaaacagagaccaaaatggagagagagacagagacaaagacaaaagagagagaggtgaggagacaaagatgagagacgcagagataaaagagacagagacaagagacagaaacaagagggagacagagataagagatggagatgagacagccacaaaagagatgagagagacaaagatgaaagagacagagataaaagagagacacagacaaaagagagagatgaaagagacaaagagaggcacagagataagagtcagagacaagagacagaaagaagagggagagagatgagagacagagacaaaagaagaagagacagagatgagagacagagacgagagagtgacaaagatgagagtgacagagacaaaagagagagaggcagaaaaacagcagagacagaaacaggcagagaaacaggcacagacagagagcccgaaagcaagacctgacaccggcaaggccgggtcaggagagaggccgggcgggcagcgcgaggtgggaaagcagtgccggcccgggaggccgccttgggcgcccgcctcccccgccgctctccaggggtccccggccgccgcccccgccccaccccaccccgagccccgcggccacctggggtcgctgacgagcagcagcaccgagccgtcctgcaggcgcgcgtcgcgcaccgtctggtggtcgtccagccgccgcgcgttgtagtagaaggcgcgcttccaggagctcacgccctggcccaccagctgggcgcgcaggtcgctgagcgtgtcccgcggccgcacggtcagcggtagcagcagcgcctcgtccgccaggtgcaccttgatgtggtagcgcttccagcgcgacagcccccgccgcagcccctccatggcgcccgcccggctccggctccagctctggccccgggccccgagcgccccgcgcacccgcccgactagcctggccgcccgcccccgccgcgcccgcgctccgcccgcccggacacgcccggcacgcagtgggcaggcccggcccggcggggcggggcgggtgccacggtcccctcaggcgtccgctccccactgctggccccagagtgcgcccgggggtctagaggcggagtggccactcagcacagagccatcagcgaggtcatcccagccaaggagacgcgcgaatgtccagggggttacatggtggaggctccagggagggaggctgggaggccactttatttgatctttttaaggacaggctggagcgcagtggcgcaatcatggttcgttgcagccttgacctcccgggctcaagcgatcctcccgcctcagcctctcaagtagctgggactacaggcgctgccaccaagcccagctcacttttgtagtttttgtagagatggggcctggccgtgttgcccaggctggttttgaactcctgacgtcaagtgattctccgccttggcctcccaaagcggtgggattataaccctcagccaccacgctcagcctacattaaaaaaaaaatttacttttaggccaggtgcggtggctcatgcctggaatcccagcactttgggagactgaggtgggcggatcacatgaggtcaggagttcgagaccaacctggccaacatggtgaaaccccgtctctactataagtacaaaaattagccaggcgtggtggcacatgcctgtagttccagctactcaggaggctgaggcagaagaatcgcttgaacccgcagacagaggttgcagtgagccgagattgtgccactgcactccagcctgagccacagagcgagacttatcgcaaaaaaaaaaaaaaaaaaaaaaaaaaaaaaaatggccgggtgtggtggctcacgcctgtaatcccagtactttgggaggcccaggtgggcagatcacaaggtcaggagatcgagaccatcctggctaacgcggtgaaacccccccgtctctaccaaaaatacaaaaaattagccgggcgtggtggcgggcgcctgtagtcccagctactccggaggctgaggcaagagaatggcgtgaacctgggaggcggagcttgcagtgagccgagatcgtgcgccactgcattccagcctgggagacacagcgagactccgtctcaaaaaaaaaaaaaaaaaagaaagaaagaaagaaagaaagagggagagagagagaaagagaagaggaaagaaagaatgaaagaaagaaagagagagagagaggaagagaaggaaaaaaagagaagggctgggtgcaggggctaacgcctgtaatcccaacactttgggaggccgaggtgggcagatcacctgaggttgggagatcgagatctacctgaccaacacagagaaaccccgtctctacaaaaaatacaaaaaaattagccaggcgtggtggtgggtgcctgtaatcccaactactcaggaggctgagccaggagaatcgcttgaacccaggaggtggaggttgtggtgagcggagatctgccattgcactctagcctgggcaacaagagggaaactccgtctcaaaaaagaaaagaaaagaaaagagcacctgctaagtgacagacagtcttctaggtactttattggggtgggggaagcatctcttacttttctcatgacactatgacttcccattttacaagtgagaaaactgaggcatagagaagaaaagagatttcccagaggaaacagagagaaaagtggcagagctgggattcgaacccaggccacctagcattagcagttttgttgtaatccattcattacacaaacatcacttttttttttttttttttttttgagacagagtttcactcttgttgcccagggtggagtacaatggcacaatctcggctcaccgcaacctccgcctcccaggtgcaagcaattctcctgcctcagccttcccgagtagctgggattacaggcatgcgccaccaagc

SEQ ID NO: 1887960 - DNA, 4001 bp, Homo sapiens
tcgtctctacagaaaacaaaaaattaggcatggtggtgcacacccgtagtcccactgaggtggcaggattgcttgagcccaggagtttgaggctgcaatgggctatgatcacaccactgcactccagcctgagtgacacagcaagaccttgcctcgccgtagctcacacctgtaatcccagagctttgggaagccaaggcagacagatcccctgaggtcaggagttcgagaccagcctggccaacatggtgaaaccctgtctctactaaaaatacaaaaattagtcagtcaggcgtggtggcacagctattcaggaggctgaggcaggagaattggctgaacctgggaggcagaggttgcagtgagctgagatcgtgccactgcaatccagcctgggtgaccaagagagatctgttagaaaataaataaataagtagttaattaaaatactaataaatgtacagaacatatttgcttgtggttaagagcatagttgctgaaaccagcatgggttcaataccaactctgctagttggtctgtgtggccgtgagttgctcagccatcttgtatctcactttctccacctgtaaaatggggatgacttgagcacagggtctgcttcacaaggtggtttggagatttacggtatgagttatttatgatatgagttccttaaacctttacaccagggtttatacctagaaatgaactacttttttttttttttttttttttgagacggagttttgctcttattgcccaggctggagtgcaatggtgcgatctcggctcactgcaacctctgcctcccaggttcaacttccacctcctgggttcaagtcattctctggcctcagcctcctgagtagctgggattacagacgcccgccaccacacccggctaatttttgtatttttagtagagacggggtttcaccatgttggccaggctggtctcaaaactcctgacctcaggtgatccacccgcctcagcctcccaaagtgctgggattacaggcgtgagccaccgtgcccggcctgaaatgaactacttattttaagagctgctactcttactataattcagttggagggcacaactacggaggggaggctgggtcagcccaaggggggcaccccaggtgaatcctagagatctggaaggagtggccccagcgcagcctggacacaccttgatgtcctccattttaacatccagcatctcctcgggctccacagcctctgcccatccttcgacctcctcgtcatcctggaggctgtcaaagatcagttcaaagaacaccagcttctcggagatggtgctgaaggagttgtcaaagcacagcttgtagtccccggcctccgttggctccaccctgggcagacagacacacagacatgacccagggtggccagccagccgactcagcggggcagtcagggcggtaacctgaggccgcctgggaagggcagggctgtaactgaacccaggcaggcatcaagactgaactcacgtgtgtaccccatcagccttgcgggactcgctgaccaacagcacgccctgagggctctccagcgtgaagtccacgtccagtccagcacctccgatcacctggggggcaggtaagagcgggtggagggctagcggtaggccaagggcgcctgccgaagagggctacggctgaaccaacactgatcaatacagaccaccaagggcttacctgaacggcggcacacccacacccgccccaacctgtcccagtggctgcgccccttgcctccaccctcattgatatgacagcttggggtccatactttcagctgaccacgcacctaccaaaagtacttaatggacgtttacctgaccacgcccctggttggctccgcctccgaaagaggataggcccagcctttttccttagtctaacccccgagaaaggcctgtgtgggcaacgcccccgcagttgacctatcagcactatcgccacgcccaccagccagagtcctgtcctctcagaggctccctatacttatcgatggccccgccccctctggatctcttactctagccccgcctgcttcattactccctccccttccgctcccacacaccgtccccgccccatctgtccatctctttctagctccgcccccgcgctcccaagcacggattcctcccccttcctcctaaagcgcgcctcgcctcgaccgcttggccacgccccctctccctgactctgctggccgcccagcccgcgaccctctacctggtattcggtctcgaggcttgcgttggccggcgcggactggtagaaacactgcttcctccccgccggcaacaggaacgtgaactcaccgtcctggattggcgggggccccgcccctcccacctccactggtggcattagtagccacaaggccagggctagggccgcgccggccgccatcatccgggtcaccctctggtctgcaaaggggtcgcggctcctttaagcgctagccctgccccggtgctactcggcggagctcattggcagtggcttctgtatgttgtccgtaaccagaggtgccaggagtgaaggacccccccactagagggcaggcggcccgaatgaatgcctgatgtgcccagaaacactcaaccgtctgggaatatttttctcaaaggcttcggctctcttctcggccgctggtggaggaaaattacaaaaataagtgccatgatggcgcatcttttgtaggcagtagctaagacaactaaagttacaggcggcagggtcctttttagtcacctccacgtggttttcccagagtgcgccgcgcgtgacaacctttggcgggaccgacgtggtggagtggacccaaaaatagcgtctaggcgtggccctgtacgcgacccgtagggctcgcctataaaagggctggggcggggcggagatacctgtggcgtcgtgttttgcttgctctgtgagcgtggtccaggttcgacgccttttgcgccttagaggcatcagcgtatcagtttcctcgtaagtcgggagtgatggaacgaccaccctgtagtgcggctgtgagaattgagatgaggcttggttcatattgagtgctcagctttcctggcttatagacagtggaggggcgtggccccaccatgcaccccaagggtctcagactcaagggccagcaggtaaatagagccattacagtagcctcgggtcagaaaaacgacagcccaggtaggaagagataaggacagtgtgggactgggagccacgttgcctggttcagctcctgccccacccattacttgaggcattccctctgttgagcctcagtttcctcttctgcaaaatggggataataggcctacgctactgggctgtctttaggatacgtgaaatgcttgttgagtgcttgcttccgcagtgcgtgggacatcacaggccctcagtaaataataatctgttatttggttcccgtctaaacataaactgtgtacagggagatgtttagtcttcaaagataaacccggaaaaggttggcaggtgatgacaaagatccctcaaatacagctggctgttgtcagcactttcctgcatttggagaatttggggaagtagctctttgtaatatcagtttggtattccttttcactccaactttttctatcatttacactcactgcttggacaatttgaagtaacagtggagaacgggtgactccttttcttttttttctttttttttttaatttttttttcctttttttttttttttttttttgagacagagtctccctctgttgcccaggctagagtgcagtggcgcgatctcgactcactgcaacctccgtctcctggggttccagcgatcctcctgcctcagccttccgagtagctgagactacaggcacgtgccaccacacctggctaattttttgtatttttagtagagagggggtttcaccatgttagccaggatggtctcgatatcctgacct

SEQ ID NO: 1887961 - DNA, 4001 bp, Homo sapiens
ttcctccaagtctctggaggaacctccctcttcagcaaggcaccccctcaaaatatgttctttttgtggccatattcctcacctgaaatttcatttcatagtcactgttggccccagtggtgtgtgcactccaagaaaacagggatttaggggctgccttttcacttttgtggctccaacctggcatacagcaggtgactaatacatgcttagtgaacaaaagacaacagctcccatttttttcaatacttgctcagggccaggccatggccagatgccttctctgtgaggagtggatgccatggtcatggtggacccctgtacatccaccttggtgctgtctccctgcattaactcctgcaggtccactttcccacagtcactgggatcttttgttttaatggaatcacattgcatcacccgttttcaggattgaaaacactcctgtggcctttcatgacactagggctaaaaccctcaggtcctcccttcctgcagctccttctacctcagacactgtgctgagggccccagccggtcagatctttctagtcatctagacccaggctcatggccacccctcagagaggccctccatgctggcccattccaaacgcttgcattattcctaggaaagggatgtactggtacagcatgagggtgtttgtgacctgtgccctttggccagaccctgacacagtgccttggtcataccctgcacttggtcataccctccagtccagagactggacacagtagggctacatcaaatattatagatgaatgcatggatgggcgatagagttaagagtcggggcctcagctcctggaggtccttgctctgccggacacacttatctttgaaattctgacttccaggtcgtctctacggacttcctcggtgatacccactcgtccatcttcgatgctaaggccggcattgcgctcaatgacaatttcgtgaagctcatttcatggtaagggggaaggagctggagacttagagggaggggaactaaggggtggtcggaaggaacccccttgaacctcccgacccctcctccacaggtacgacaacgaatatggctacagtcaccgggtggtcgacctcctccgctacatgttcagccgagacaagtgaaacgggaaggtcctttctttccttcccaggggccggggccggaacatgtgcctcccgttccagcatctggctgcccgggggaggaaggacacccggggcgggcgccccacgccgatgggtccatggtgaaataaaaaacagtgctcacggctgcgtcccgtatctctgcgccggtcagggcgggttctgatccgggtttgaggcccgccccacccttactcgatcgcctgcgcccacgggcgaggggtcgcgctcgactccaagccgggttccacttcaggagaccgggaccgcgatggcagcggtagaggccccgcatggccggaagtcactccccaaagcgctgggccggcagcggtgggacccagggccggccacgggctctctgacgtcactgggcgcgacgccccgcgccgggactactgctcccagaaggtcgcgcgcgggcccccgccagtcaggtgggtgccaggccctggccgtggcgaaagagccggcggagccggagacccgctcccggagacgccgcctcgcgatccccgcgcgggcgggaccgggcggccggcatcatgaccctgtttcacttcgggaactgcttcgctcttgcctacttcccctacttcatcacctacaagtgcagcggcctgtgagtgcgggaagggcgcggggcggagagggcgcggggcccgggccgaccctcacctcccgcttctccaggtccgagtacaacgccttctggaaatgcgtccaggctggagtcacctacctctttgtccaactctgcaaggtgagggccaccgggaagccacgtgttctggcccccaggctctgcagacccagggacccgcccccgttgcctatccgcgcccccgccgccccacggtgggaccgccctcgggactccgcactgggaggcgtcaggatacctagagaggatggactttaaagagggcacgacctgagaagagacctagaagcaacttttgcgtagcacttagtaaaactgagaaaacctcagtagtgtggttggctaacaggttttttttggtgcggttaagagtgatcactgattccgtacgtgctgctaacactgcccaaggagcagcaccttcagacctgactcagatgccctgtgatcacccagaactcaaacttccagccccctcggggacccggggacctatcctctatctccccgattcctgtaattttgccaccatctggtggttcctcttccagatgggcccccagaacctgtcctgccctcttcctacccacgaacttcccacaaatcccacgtggtttatcttgatcccctcaccttgaagtgacctctttctgctttctgttctcagatgctgttcttggccactttctttcccacctgggaaggcggcatctatgacttcattggggtgagaggggccagggaagggaagggagttcaggaatggggctccctgtccccctgtgcttacttaagcctcaacctgacccgcaggagttcatgaaggccagcgtggatgtggcagacctgataggtctaaaccttgtcatgtcccggaatgccggcaagggagagtacaagatcatggttgctgccctgggctgggccactgctgagcttattatgtcccggtgcgtacagcagcctggagcccagacccctgagaagggacacctgggttccacgggggtgctggagggcaggggctcaaagcctggtgctgaaggtgtctgagtactggagaatcccatcctttgccttcctcagctgcattcccctatgggtcggagcccggggcattgagtttgactggaagtacatccagatgagcatagactccaacatcagtctggtaggcagtcgtgctctcccacatacacatttctgctggcggccatactcctccccaaggcctggccccgactttctgcctccctctaggtccattacatcgtcgcgtctgctcaggtctggatgataacacgctatgatctgtaccacaccttccggccagctgtcctcctgctgatgttcctcagtgtctacaaggcctttgttatggagtgagttgggtggggtttagggctgggtccaaagtggggtgggttatctagtctcccttccttattgtgacattttcctgcaggaccttcgtccacctctgctcgctgggcagttgggcagctctactggcccgagcagtggtaacggggctgctggccctcagcactttggccctgtatgtcgccgttgtcaatgtgcactcctaggcttggtgtctcagacattgatgtaccttttccctgcctcactccaggttttagtgaagtaaacagtatttggaaagttgttgctgcctccatttctctctcttgggaactgtctcccaataccgtgtccacctgggtctcagaggccctggttctgtctcaggagccaggtagacaagctggaagctagccagtcactgacttgtcccatgtcttgttcctcaggctcctggtttgccaggagtagacagaaggtttggatgatctttgagcagtggcagaggccagggccctcagggaacagatgatagaggggagctagaatccaagagaaggcccttggggggctcttcctcctcacagccccaacctgggcctcctcacatgggcccttcccgggctggttgcctctgaggctcctggccccagtgtccccctccaatccatcctctgtatggcagccaggggatctatctgaaacccgtctaaccaggtcatcctcccacttgcagccacttgcggccccttgttacacagtggacagtccaattgcttggcctttggttttacccaaccagcaaaa

SEQ ID NO: 1887962 - DNA, 4001 bp, Homo sapiens; identical to SEQ ID NO: 1561183

SEQ ID NO: 1887963 - DNA, 4001 bp, Homo sapiens; identical to SEQ ID NO: 1561543

SEQ ID NO: 1887964 - DNA, 4001 bp, Homo sapiens
aagaaagaaattaattattattgataatgagttctttataaataacattgttcacaaggaaatactaattgatctactgatatgtgacatgagacagaatgtactatttttaaatataaaagaaatttcattaagtttagataagctgagaatacacaaaagatttccaggctatttaatcaagtaatttacaatgtacacattcctgagtatacaccattgtggtgatataatttattttggaattttctccattcagcttaaaaggtgtttcttcccaagaaactgaacttttctgtcaaatgcacttgatcgaataggagaattgggttcataaaatggattcattgaaaattttatatataaatcataaacatcagtaaagaagttctttattccatcttcttgtcttatgtcatgaagcataataaacctcatatgccccgcggtgacaaatgctgacacaaaccactcgttgaacttgtccacagttttcaagtacatgttgttcgacagccacatgttctcatctacgaggtcgagagcagcatgagctatgaactggttcagatgacgatggtcgtctttggattctgccttcccagctggcaaaaactccatttcaaaaactggattatcatggtgaccaacaattacaaagtagaagcttccagacatggtcttcaatatatggctcctgcagcgggaggccgacaacggaaacgcaatgtcagtttccgcggaagagacccgcgctccgcacctttttttgacacggaatctcgctctgtcgcccaggctggagtgcaatggcgcgatcttggctcactgcaatctccacctcctgggttcaggcaattctcctgcctcagcctcccgaatagctgggattacaggcgcgcgtcaccacccccggctaatttttgtatttttactaaagacggggtttcaccatgttggtcaggctggtcttgaacgcctgaccttgtgatccgctcgccttggcctcccaaagtgctgggattaccggcgtgagccaccacgcccggccaccctctattcttttgaagaatctacaccagttctcctctgtagactccacacctttctgtccccctacccatgtgacattttcaacttgagacgcctgagaatcacactggccaaactccaacccatgatcttctccatgaaacctacttctcatgctgctgacttccccaacttcattctttcagatgttcgggcaaaaaaaaaaaaatgacccttcactccctatttttgctcacagacatatctgatacggcaggaaaacctgttggctctatcttccaggtctatccagaatcccatcacattgtccctcttataccacggctctggtgcagcctctgggatccactgcagtggcctcttctgggtctctctgtgtcaattccccatcctgctcgttctaactctggacctgcccctcccactggtcttcccttgacaaccttccatggttataccggctgctcaggctgccattccaagagaaaattcacaaaaccctctctttcccgcagaaacaacccacactccgggctccccgacgcggcccacttggcagcacctccatgctctgaacctgagatccccgaagggagctctgaggctgcatcaaaccagctgatacggggaccccacacaggaacgcccctctcttcgagacaaggggcctgacctgcagggccccttctatgggcttcagcactggaaggaggggtcgggcggaggtgggggggggcctgggacggggcacccacctcgggttcttcggcggggactccgcaagtccagccagggaagagaggggcgggggcgacaaaggcaagacaaggacaccgccgtccccagtccttgtcagctgagcttctgccactgtcagttgtgcctgtgtcactaccgcctctgcgtacaaggaaccaagccgcttctcgcgcttttccgctccgtcacttcggtgacgtcatagagcgccaaaggccggaactagtgaaaacaccagagaaaatcaaatcaaccacggcaagaggacgccggaagtcccgccctcctacgatgcgcgagcacgaggacggacgcacgcacgcacgcacgcacgcaaaggttccttcctgcacattcattgggtcagtcgcgctgccgagaaccgcagtgtcttctgggttatgaagtttcgacaccgcttctggacttgccttagagcgttggtcagtccttatatggcggatagaggctcagtggcaccgtcaggggagctggtaaacagagtgccggactccacggacaggacggggcttgggttgctcttaaaggcgacataaccagattttcttgaagtaaggtctaggatactcacagaaatgtgagggacctatgatatcggattgtgaagcacagcaagttctcaacggctacaccgccaaagggacacactataccacaaaggcactctgtctctactcatgcctctcagccatatgttgcttttcaaatacacatacagttaaactttgacttctatttattaagcttcaatatggttggtccaagagaacaaagaaagactacatggctgggaatttgcacaaaagaagacaggagataccgacgtagattgaaagggtgacgctgtgcctctggatccagaagaaaacatcattactgtctgtagagtcagtgattgtgttcctaccaagagtgcaatgcttttattctaataatacttattacttcatgtctgaaatattttacatttattttaaaagtctcaatcctgtctgaaaatgagagtgactgatacatgccatttcctgacaggacattttgtgccattccatagttggagtatatgtacacagggaacgtattatccccaataaaaactgtgaactttcatgatcttatctccttcctgagaagtgagttatcattttacagggagttgaaattatctgtgaaaatacttgtgaaatgaaaattacagaaatctattaataataactgttaggttttgaagggaaggcgagggttaaagaaaggcagagttggcagctctacagcaatgcaggttttatgtccagcacgagacctgtgatggggagaactagcttagtgccagaacccctcactgcttacaggctggggcaattataggcctggatgagaggggtcaggggtggggggcagggggcgcggcgggagggtatgacttgctgcccaggaggatggtgggtttttttttgtttttggaggagtctcgctcttgtcgcccagccttgagtgcaatggcgtgatctcggcccactgcaacctccgcctcccggagttcaagcgattcttgaactccgcctcccgagtagttggctttacaggcgcgtgccaccacgcccggctaatttttttgtatttttagtagggacagggtttcaccatgttggtcaggccagtctggaattcctgacctcaggtgatccgcccgcctcggcctcccaaattgctgggattacaggcgtgagccacagcacccggccaaaggatgtgcgtaagatgttcctgaggcagtttggccttttatccggcaggatgtgatagtgaccttccttggatcttttcccagaacgatgtgataagaaagtcaggcagttgggcaggatgtttctcaaggccctcactccgtggaatgcttcactctgaccaaggtctgtgagatggcagggggcttacaggatggtgcagtttggactaacagtgattatgttatttcaaaactagtggcagaaatagtcctacagaaatctctctgtgacatgtgaaggggggaaaaagcaaggttacagtagagtttgagcaagagtctgagaagtcaaagaatgaagttgagactggctgtgctggaacctggacacattatgcttctgtctcctatatgtatttcttatttcatacttgaaaac

SEQ ID NO: 1887965 - DNA, 4001 bp, Homo sapiens; identical to SEQ ID NO: 1561216

SEQ ID NO: 1887966 - DNA, 4001 bp, Homo sapiens; identical to SEQ ID NO: 1561225

SEQ ID NO: 1887967 - DNA, 4001 bp, Homo sapiens; identical to SEQ ID NO: 1561233

SEQ ID NO: 1887968 - DNA, 4001 bp, Homo sapiens; identical to SEQ ID NO: 1561234

SEQ ID NO: 1887969 - DNA, 4001 bp, Homo sapiens
cgttgctgcttggctgcctcttctctattgttgaacaccttgaaggcgagattgattaattcctgttgtggggtttgagggccagattccaatttttgaagctttttttgtaatgtcaggagctgactgagtgataaaatgcatattgagaataagatggccttctggcccttcagggtctagggctgtaaagtttctaagggtagccaccaaacgggccatgaactgggctggattttcatctttaccttgggtggcttcttaaagcttgtcataattaacagctttgtatgctgcctttttcagcccttcagctaggcaagagaccatgtaatctcgcctagctatacctggggagcctgtctggtattcccatcaaggatcctctcagggaactgccctgatgccttcttggaggtctggctcatgatgccggcgggtgttagcgtgagattgggctagggtataaactctttcctgctcatctggggagagggtagaggtcaggatgacatttaggtcactgcaggttaaagtgtaggactgagtcaaatattggaattcctgtgtatatttagtggggtctgatgagaaagagcccagacgctgactgattgggaaaggtctgatagagaaaaaggtatatgaacctttactgtgccctcagctccagccacctctctatgaggaaattgttgggcaggtgggggagagctagtcatggaatgaaactaagcctgaccaagtttgaggaggggaggtgatagaagaattataagatgggggagcggaggctgaggaagaattgggacttgattcagcctgccaaggagtggcctggggagggggagagaggtcagaggggtctgcagaaaagggggattcaggggactctgaggttggggtagagactgaaggaacggacgggagagaaagaagaaaaatttgggatgagtcacattgggagcagaggcttgggagggagcgaagtgtaaaaaatgcctggacgcaaggcacctcagaccatgtgcccattttttgacaaaaatgatctaggtcttgtaggatggagaaatcaaaagtgccgttttctggccacttggaaccattgtcaagtttatattgcggccaagcagtattgcagaagaaaataagacgtttgagttttatatcaggtgttagtttaagagaagtttttaagtacacaggctaagggggaagagggaggaatggagggcggaagattgcccaaagtgaaggaggtaagtttaaagagagaagtagagacacggagaagggcgggggtgagcagccaaagcaggcgtccccgcaaatgacttgccaccatgggaatgtgggtgaatgaccaaggcaggcatccccaaggtgatcagacaccagtggaatgtgggtgaataattaggcaggcgtccccgcagtgattagacaccaagggaagactgtcttcctgagtctgtgaccagcgccagagttttgggtccacggataaaatgtgtctcctttgtctctactagagaagaaaaagactggacagggagattggagggtagcgacagaggctggagaaaagagtgaagagaccacttacccgatttgaaattggtgagatgttccttgggctggtctgaggacccgaggtcgcaggtggatctcttcacggaatgagggccaggacagggggccggtctcacgaaggagtccccctggcccagattttggcaccaagtgtcaagcatgtccgtatagaagaccacctaaacaggctttgtgtgagcaacaaggctgttaattcacttgggtgcaagtgggctgagtctgaaaagagagtcagcgaagggagataggagaggggcagctttatagggctggggtaggctgtggaaagttacagttaaaggtggttatctgttgtcagcagaggagggagtcacaaggtgcatggtggagagatgatgggactcattgtccagaagaatgtcacagggtcgattgatcagttggggcagggcaggaacacgtcataatggtggaatgtcgtaaggtgggttaattagttaaggcaggaattggctgtttcacttccttgtttttcagctgctccagacttcttggctcctgtaggccacctggacatatatgtgcaggtcacaggggttacaatggctgagcttcggctcagaggcctgacagttcccttttggaaacgttacagggtgatgtgacctcagcccaccctcttatcttttcctggtcctgggtttcagaactgcctggggctcatctgagatgcccacaagctgccgggtctcttggagggtcatgaatatcagctcctgggtcatttcttcccagaggacagcctgagatgtgcctgtggggcctctcaggggagccgccgggtgcaccccctccccctacctcccgggagggaggagtcccctggtatctccctccgtcatctaaaaggaaaccccttaggacatttagcttttctcaccccaagcccagttttcacttcttggaaatacctctctggtcagccactcagatgctgctattgaagggaaaagactggaatgatccctgtcctttgaatcctcttagcctagtgaagggagaaaactatggctaaggacaggaaaaccaccttcactgaggtgacgcaaaaagctgaaacgcacacaatgcagtgtcttctgggagggtggtcactgagtatatatgtgagcagcacagggtttggggcatgtctgaggttatataggatgacctgatctgacacttgagtcagacttgccggtattccagtttgccctacccctccctgggtttgtcaccttgaaaatttttttttcacttacttacttataatagagtcagggtctcactacattgcctaggctgacctcaaactcccgggctcaagcgatcttcctgcctcaaactcccaaagtgctgggattacaggtgtgagccactgcacccagcctgaacctcagtttttaaaaaattaaatatcaaatggattttattagtagagtttgatagacaagatagaatatatccaaggaggcaagaaagaggtgtatttcagaaaaaaaagaaaaaagaaaagaaatgtctagccttatatttcatccattaattttttttttttttgagacagagtcttgatctgttgcccagcctggagtacagtggtgccatctcggctcactgcaacctccgcctcccaggttcaagtgattctcctgcctcagcctccggagtagctgggattacaggcacctgccaccacacctggctaatttttgtatttttagtagagatggtgtttcaccatgtttgccaggctggtctcgaacttctgacctcaaatgatccaccggctggcctcccaaagtgctcggattacaggcatgagccacccatcatccgataaagcttttaatttacattttgtcttacccagatggcgtgtgatacatttctcatatttgttcttttcttttgggtgatttcaaatggaattccagggcttagccttgagaaggctactggggctgagaatctcagcaaagtaaggaaaatcactcttccattatggctgcagcgaaatgaatacatttccacaataaagtgtcatagttaaattggtaaattacaaagattcattaaaacatccatttttctcctttccagagtgagaacttgtgacggtgaataactcttctctttcctggtacctggacttcagagattaatacaaaaccctgtgggtcaggacttggcaacaccaagaagcattcaaatataatgatttattcaactgtgtattgtcatggaaataataattaaatggcacatctttgttgtctgaaagggatagatacttgtgcttctcttgttgagctatataaaatacaagcgccttacaatttgtcttccctgcctatctatatggacactgagtttgaggg

SEQ ID NO: 1887970 - DNA, 4001 bp, Homo sapiens
caggagaatggcgtgaacccgggaggcgcagcttgcagtgagcagagatcgcgccactgcactccagcctgggcgacagagcaagactctgtctcaaaaaaaaaaaaaaattgtgtctgtttccccattagtttgtcattaactaagacattttctccccaaatttctttttttttttttttttgagacggagtcttgctcagttgcccaggctggagtgcagtggtgcgatctcggctcactgcaagctccgcctcccgggttcacgccattctcctgcctcagcctcccgagtagctgggactacaggcacctgccaccacgcctggttaatttttttttttgtatttttagtagagatggggtttcgccgtgttagccaggatggtctcgatctcctgacctcgtgatccgcccacctcggcttcccaaagtgctgagattacaggcatgagccaccgtgcccggcccccaaatttcttacaggaaatttctaaagtagactagagtccgcagtatttgagccctgcatacctctcacctgatttcaacaacatcagctgcagactgcccgacattgtctcctctatcccccttctctcatactttttcttctgggtattttgaagcacattctagatgccaagtcacttgcctgtaaatactggagcacacatttctctgagtgataagcacattgttttaaagcagtcaggaggttgtgcaatgtcatccatctcccagcagcagagttcacacatccacacgcaacctcctgctgctttatagatgaaggtgccaggtgaggacatgaaaagaatttgcattaaacatcaactgacaagcttttttttttctcctgccctctgtgccgttggcacaacccaccaaattcaatcaagttcttctatatcttccaatacccagtctgtgtcaaatgtctctgattatctgagaacatcgttttatgttgtttgttttattttaagagacagggtctcactctgttgcccaggctggagtgtaatggcacaatctcggctcattgcaacctctgcctcctgggttcaagctattctcctatctcatcctcctgagtagctgggattacaggcacccatcaccatgcccagctaatttttgtatttttgcatttttagtagatggggtttcaccatattggtcaggctggtcttgaactcctgacctcaggtgatccacccgtctcaacctcccaaagtgttgggattacaggcgtaagccactgcacccacccttgtttgttttgttttaagagacagggttttgctctgttgcccaggcaggaatgcagtggtgcgatcatagctcgctgaggcctccaactactgggctcaaacgatcctccaacctcagcctcccaaatagctaggactaacactaccactagtagtaactatgcttaactaatttttttatttttattttttgtagcgacggggtctcactgtgttgcccaggctgatcttgaactccagggttcaagcaatcttcccatctcagcctcccaaagtgctgggattacaggtgtgagccaccaatgcccagccctaatttttgtatttttagtagagaaggggtttcaccatgttggccaggctggtctcgaactcctgactcaggtgatcgccccctcggcctcccaaagtgctgggattataggcgtgagccaccacgcctcgcctgtctcaaaaataaattaattaaattaaatatttcaaaatacagaaaagttggaagacaatacagcgaacacctgaacacccaccacatattatagatgctgctagtcacactgccccaaacttttttaaaacttgcatttccccagtgatgcttccctgacggggtgtggcttcacgggctctgcccgacgggccgtcctccctctgtctccccagtacctggtgctcatgctcatcgtctacatcttcgagtgcgcctcctgcatcacgtcctacacccaccgtgactacgtgagcccggcgaggcctggggaggggcctgacctgcatgggaggggcgagggtcccggcgcggcggggcggaggtcgtcctctctccccacccagccctgccggcccttgttcttccctgttctcctcagatggtgtccaacccatccctgatcaccaagcagatgctgaccttctacagcgcggacaccgaccagggccaggagctgacccgcctctgggaccgcgtcatgattgaggtgggcggggtggaccgggtgctgggagggccctgggctccgtccacagaggccgatagagctcccgatgtgccagcttttagaggagtgagtgccttaaagacatccgctcatgagatctctaggagagcagggctgcggtcatcaccgttctgcggatgagtaaacaggcccagaaagggaaagtcccttgcccgaggccacacagtcggtaagtggtgggagctgggattggaacccggcagcctagctcctgacctccctgctcttagcctacacatactacctcaacagaaatgttgataataacaatgatagtaacagcaccattcactgagctaggtttcacactgttcaaaggacttttatttttatattttgagatggggtcttgctctgttgcccaggctggagtgatcatagctcactgcaacctccaactcctgggctcaagtgatcctcccgcctcagcttcccgagtagctgggaatacaggtgcgccccaccacacccggctaagttttttaaattatcttttgtggagatgggggtcttgctctattgcccaggctggtctggaactcctgggctcaggattggagcgattctcccacctccgcctctcaaagtgccgagatcacaggcatgagccacgagtgcctggcctcaaagcacatttttttttttctttttatctttttttttttttttttttttttgagacagagtcttgctctgtcgcccaggctggaatgcagtggcgcgatctcggctcactgcaagctccgcctcccgggttcacgctattctcctgcctcagcctcccgaatagctgggactacaggcgcctgccaccgcgcccagctgattttttgtatttttagtagagatgggtgttagccaggatggtcttgatctcctgaccttgtgatccacctgcctcggcctcccaaagtgctgggattacaggcttgagccaccgtgcccagcctttcaaagcacttttaaagcttttttaatcctcacgaccactccataagggagatcggccttttagtgatgaggagaccaaagcaagaggttgaatatcttgcatgaggtcacacacctggtaggtcacagaactggaaggattcaaactcagacttccaggtttgaagagatacagtcttcctcaaatccaacatgatattgcactggaaaaggaagaaattggctgggtgcagtggctcaaacctataatcccaacactttgggaggcaaaggcgggcagatcacttgagttcaggggttcaagaccatcctggccaacatggtgaaaccctgtctctacaaaaaatacaaaaattagtcaggtgtagtagtgtgcgcctgtgattccagctacttgggaggctgaggcaggagaatcacttgaacccaggagggggaggttgcagtgagccaagatggcgccactgtactccagcctggacaacagagggagactccgtctcaaaaaaaaaaaaaaaaaagaagaagaaattgaggactcaaggaaaactgaggcgtcaatgtggcccaagtcctctagctagccaggatttgaacccatgtttgaagggtgcccaagcctatgttttcctcattcaggagccacaaattaaacacctggattccttaccaaggccaggaaaagccagaaatctgccctttttgtgttattttatcagcatagttgttgataaaaatattttattttatttta

SEQ ID NO: 1887971 - DNA, 4001 bp, Homo sapiens; identical to SEQ ID NO: 1561254

SEQ ID NO: 1887972 - DNA, 4001 bp, Homo sapiens; identical to SEQ ID NO: 1561268

SEQ ID NO: 1887973 - DNA, 4001 bp, Homo sapiens
gtgccataagtgtaaaatatgcaccaaatttcaaaggctagaaaaaaagaatgtaaaatatcttattattttatattgattacgtgctaaaataaccatatttgggatatactggattttaaaaatatatcactaatttcatctgtttctttttacttttagaaatcacatatgtgacttaaatatttcttttctttttctttcctctcactcagcgtcctgtgattccaaagaaatgagtctctgctgtttttgggcagcagatatcctagaatggactctgacctaagcatcaaaattaatcatcataacgttatcattttatggccccttcttcctatatctggtagcttttaaatgatgaccatgtagataatctttattgtccctctttcagcagacggtattttcttatgctacagtatgactgctaataatacctacacatgttagaaccattctgactcctcaagaatctcatttaactcttattatcagtgaatttatcatcatcccctattttacataaggaaatggggttagaaagaccaaataacattttttcaacatcaaaacactagcttgagatcaagcccagacttggatctgtcgtctgaattccaagctttttgttatttattgatatgttttgttgttttcatgcaataatgcaaatcttagcccaaacattttgttagtagtaccaactgtaagtcaccttatcttcatactttgtctttatgtaaacctaaattagatctgtttttgatactgagggaaaaacaagggaatctaacactaaccagcccgtagtgtgtggtcaacactttcgttactttagtatacatcaccccaattgtttgtcttcaccacacactttggagttaggtagtagtatctatttttacaaataagaaaacccaggcacaaaggggttgattagcaattatcttttgaaaagcctgtagttgctcatctgaagaagtgacggaccacctcttatttagtggacagacagtaactagttgagaagacaggggattttgttggcggaaaaaaaaatttatcaaaagtcgtcttctatcagggagttttatgagaaaccctagctcctcagttccacagtgggtaactgtaattcattctaggtctgcgatatttcctgcctatccattttgttaactcttcaatgcattccacaaatacctaagtattctttaataatggtgggttttttttttttttgcatctatgaagttttttcaaattctttttaagtgacaaaacttgtacatgtgtatcgctcaatatttctagtcgacagcactgctttcgagaatgtaaaccgtgcactcccaggaaaatgcagacacagcacgcctctttgggaccgcggtttatactttcgaagtgctcggagcccttcctccagaccgttctcccacaccccgctccagggtctctcccggagttacaagcctcgctgtaggccccgggaacccaacgcggtgtcagagaagtggggtcccctacgagggaccaggagctccgggcgggcagcagctgcggaagagccgcgcgaggcttcccagaacccggcaggggcgggaagacgcaggagtggggaggcggaaccgggaccccgcagagcccgggtccctgcgccccacaagccttggcttccctgctagggccgggcaaggccgggtgcagggcgcggctccagggaggaagctccggggcgagcccaagacgcctcccgggcggtcggggcccagcggcggcgttcgcagtggagccgggcaccgggcagcggccgcggaacaccagcttggcgcaggcttctcggtcaggaacggtcccgggcctcccgcccgcctccctccagcccctccgggtcccctacttcgccccgccaggcccccacgaccctacttcccgcggccccggacgcctcctacctgcgagccgccctcccggaagctcccgccgccgcttccgctctgccggagccgctgggtcctagccccgccgcccccagtccgcccgcgcctccgggtcctaacgccgccgctcgccctccgctgcgccctccccgagcgcggctccaggaccccgtcgacccggagcgctgtcctgtcgggccgagtcgcgggcctgggcacggaactcacgctcactccgagctcccgacgtgcacacggctcccatgcgttgtcttccgagcgtcaggccgcccctacccgtgctttctgctctgcagaccctcttcctagacctccgtcctttgtcccatcgctgccttcccctcaagctcagggccaagctgtccgccaacctcggctcctccgggcagccctcgcccggggtgcgccccggggcaggacccccagcccacgcccagggcccgcccctgccctccagccctacgccttgacccgctttcctgcgtctctcagcctacctgaccttgtctttacctctgtgggcagctcccttgtgatctgcttagttcccacccccctttaagaattcaatagagaagccagacgcaaaactacagatatcgtatgagtccagttttgtgaagtgcctagaatagtcaaaattcacagagacagaagcagtggtcgccaggaatggggaagcaaggcggagttgggcagctcgtgttcaatgggtagagtttcaggctggggtgatggaagggtgctggaaatgagtggtagtgatggcggcacaacagtgtgaatctacttaatcccactgaactgtatgctgaaaaatggtttagacggtgaattttaggttatgtatgttttaccacaatttttaaaaagctagtgaaaagctggtaaaaagaaagaaaagaggcttttttaaaaagttaaatatataaaaagagcatcatcagtccaaagtccagcagttgtccctcctggaatccgttggcttgcctccggcatttttggcccttgccttttagggttgccagattaaaagacaggatgcccagctagtttgaattttagataaacaacgaataatttcgtagcataaatatgtcccaagcttagtttgggacatacttatgctaaaaaacattattggttgtttatctgagattcagaattaagcattttatattttatttgctgcctctggccaccctactctcttcctaacactctctccctctcccagttttgtccgccttccctgcctcctcttctgggggagttagatcgagttgtaacaagaacatgccactgtctcgctggctgcagcgtgtggtccccttaccagaggtaaagaagagatggatctccactcatgttgtagacagaatgtttatgtcctctccaaatgcttatgttgaaaccctaacccctaatgtgatggtatgtggagatgggcctttggtaggtaattacggttagatgaggtcatggggtggggccctcattatagatctggtaagaaaagagagcattgtctctgtgtctccctctctctctctctctctctctctctcatttctctctatctcatttctctctctctctctatctcatttttctctctctctctttctctcctctgtcttttcccaccaagtgaggatgcgaagagaaggtggctgtctgcaaaccaggaagagagccctcaccgggaacccgtccagctgccaccttgaacttggacttccaagcctccagaactgtgagggataaatgtatgattttaaagtcgcccagtgtgtggtattttgttttgactaatacaacctgaaaacatttttccctcactccacctgagcaatatctgagtggcttaaggtactcaggacacaacaaaggagaaatgtcccatgcacaaggtgcacccatgcctgggtaaagcagcctggcacagagggaagcacacaggctcagggctctgctattcattctttgtgtgaccctgggcaagccatgaatggagcttcagtcaccccattt

SEQ ID NO: 1887974 - DNA, 4001 bp, Homo sapiens; identical to SEQ ID NO: 1561272

SEQ ID NO: 1887975 - DNA, 4001 bp, Homo sapiens; identical to SEQ ID NO: 1561294

SEQ ID NO: 1887976 - DNA, 4001 bp, Homo sapiens
aagctgtgtccatctactgctgcaaaccatgaaagatggctggatctttctaacttatacgccacagctcgtgtattttgcagatcatacatagatatatttaaattccttgtcttttcctcactcctgtttactggaaagaagtccctcctgtatgtttggaccaaagagtcaagaaaattacaatgcttttcactgctccaccacagccttcacagatcttttctcacttttgggactcattcttacattgagaaaagagatccttgaaaatcagctttaatattatgtgggggcatccggctcttaagtttgaaataactgttgaagaagcctaattttccagttaataaatttttgttttaagagccaggttcttgctcggttgcccaggctggagtgcagtgatgtgatcacatctcactgcaccctccagctcctgggcccaagcaatcctcacacttcatcttctcaagcagctaggactacaggcaagtgccaccatgcccagctaattttttatttattttttatttttgtagagatagggtcttgatatgttgcccaatctggtcttgaactccagggtcaagcgatcctcctgctttagcctcccaaagtgttggtattacaggggtgagccactgcatccaacccagttaatacatcttttgaaaaaatcatctctggcgcaaaccaagtcagatatcagtacatttatcttccttaacttgcaaatgacctcagacttgccagtcacggaaagaactgctgacctgcacattaggagccaggtctagaattagtctagggatggtccttccatataatccttatagttaactcagcaacacccaggaaagctgacttgatcaggccgagtgccacagaacttttcctgtctacaaaactttcatgtgactcaatgcattgagttgtagatgggtggatattatcttcctaattttgtgcatgcagaaactgaggcttagcttggagataaggaaaaccaagaaccggtcatggcctttagcgacatacaacacttgagatgcatttaagggtgctgcttgttcttaatggaagtcacgtagacggcgtaacagttggaccagagaattcaagtgttggcagaaagagaacacataggtgtgtttcctttcttccaaaccagcaagtggcttgtttactgatcattttagttacaattaggaagtttctcattttttcagaaagtgggatttttgtgtctagttttcctaatgctaattcaggaaactttctttcttagaattgtctaattcttccacaactgttatagtcagagggacagagagaaaaaaaaactttctgatttctcaatgcccaaggccagagtttttaggctgtttgaaaagctgacgctgaacttgggtcaaatcctattcagaaacagctaacccagcaagcttgagactgcagagcaacacacacgtaatctcatgaactaaatccctcacattcccacataaacaacaccaacacgagtcaagctaacacaatcatgcatggacagcaaaaagccatacacacccaataccatcacagaaagccaccaagtcacgctcatgatctacaagcacgcgagagccattccagcttgctggctcgcgcacacaccacacactcaggcttcctcactcacacacatgcaccctcgttgaccccaacacacaccctctcgaacaaacacaccttcaaacacatcacgcgcccacacttgtagggacattcgcactcgctcacactcttgctagctccctcacctacacggacggactctcaccctctcacaggtttgctcacgcaacactcgcccccacacttgatcacacgcacacacttaatcacgcgtacggacaaactcacctgtacacactcgcacacaactgcaaagctcctcgccccttccaccagccgagacgctcggatctcccgctaaaacgccaccggaagcggaaatacgctcggggcgccgcgcattctgggagttgtagtctggagacggcgtgcaggcgcactacatcccggcacccggcctgccttttcccaggcataaaccacccttcccaagtccttgtctcaggctctgcaaagttatgcaacacggtgatttccaacagtgataagggctcagaaagcaataaaacggggggatgtgcgagagggggaggggatgatgccacttaaagaagtggttaggagaggtctttccaaagagacgacgtctagaatgaagctcagatatgcagaggcggtgatgctcagatttggggaagggtatttcagctgacggaagagcaagtgcagagccccgaggtagggagaagaatggtttgcttgaagaactgagctaaggccagcatagctgggaataaaagctgcaggagagagcgtgatagaggaggctgcagagctgggtggggtccgatcgtggaggacctggagggccgcagcgggaggatgatgggacctgacttatcttttcagcaacaccctgtggctttcgcataggcagggtgtggggagttaaggtggagggaggatgagctttgaaaggtaagactgaagggagggaatccaggcaggaggctgttgtggccaggccatgatgtgctgggttagcatggtggccatggggatggtgtgagggatgggtttggaatagaatagaatacacattgaggatagaattgacaggactcatggatataatgagaagagtgctgggaagaggtgagggagagagagaaatcaatatgcctagagatttttgccctgagtgaccagcagatgtcagtgctgctaactgaggtgaaaacggaaaaaccacaggtatgaaggagacataaagggctgtattttgaactgttaactttgaaatacctgctacatattcattcagtgtgactcacaaccatttattcattcactaaccaatcatttattaagccattattatgtacagatacagtgtttggtcctgggtgaactgtgctggagcaagctgatgtcagctcacaagagccaattataaatattcaggaatgttggaaataagttgttgaactattgatagcttgacatcagctgtggtgagaatatttacaccatagaaactgtcaaatgctatttataattttttttgagagagcaagtttatcaacataccactggataatagtatgcaagcagacataattctaaccttcattctgttttcatttttgcttcagaagacattttaaacaaataattacataattaattaaaattgcagtgtgtgttcgctgagagtatagaaggagaaatgacacaggttggccagcaggggtgatcaggaagtgacatttcagctgtgatctgaaggctgaggagcacattttagcatggaaaatcaagatgttttattgatggagtgtcacaatttgattggcagtgtctttttctttcttaatggaatgcaagatagtggagtatcttacaatcaatggtggtttctattcaatagcatgtattaatctgattagagaagaggtgtctcaaccaggtttgtggagctcaaagatcccatgtaggtgttgcagaaatgactgtgctgaggggttgggaaaacaccaaatagacaaggatcccagccctctcaccctcgtttacacaagaacagctctggtttttgttttttgttgttctgcttcacatttatttcttcataaaaatacatatttaacacctaatatgtgtcaggtactacgctatgcacaggggatacggcattgaagaaaacaagaccgtgccttcatggatattatattcagaggaatggggtggttggggtagaacaaacacactcaataatttatataatttcataagggtggtaaatgtaatggagatagtaaaacagaatgaggtgtttttcacctcagagaggagctctcagataactgtggaagtgacca

SEQ ID NO: 1887977 - DNA, 4001 bp, Homo sapiens
ctccctccttggcctctcaaagtgctgggattacaggtgtgagccaccgctccgggccctgagtttatttccatgaaatatgaaattatcctccactcctgggagtaataggcagttttgcacgtcacctttcagtttccattatccactcaaacaacccaggaccttgcttagtttaataatcccttctaattgccagtgcccgcggcaaccagcgcgccactccacccctttaccgaggtccctgcccctctcccccaccctgccccagacagaggggagctcgccccgcctgccggatgcgtgactctacctgctcaaaaaaggcgctttgcattaaaaccattttcaacttaagaggaaaaacgattcagcgttcagtacaggtggcccaacacaatatgttgttttaccttcgattgtttgaaatattaacttaggggccgggcgcggtggctcgcgcctgtaatcccagcactttgggaggccgaggcgggcggatcacgaggtcaggagatcgagaccatcctggctaacacagtgaaaccccgtctctactgaaaatacaaaaaattagccaggcatggtggcgggcgcctgtagtcccagctactcgggaggctgaggcaggagaatggcatgaacccgggaggcggagcttgcaatgagccgagatcgcgccactgccctccagcctgggcgacagagcaagtctctaaaatggacaggaggcatccctgtgatattaggggtaatatcacggcacatcagaaactatccaccaattagtacccggagaatctagtcctgcagggcaagaggatgacagcagacgacacctggggtccagctgaggagaaagccaggacccgccccctcgagaccctgcccttcaaaacaccacttccagaccttgccctcaagatgacgatcaccctctggcccggcctccaggcagcctcctcattcttgccccgcccagattctgttcaaggccctgccccttctaatcaggtcccaccccaacggccacctacacactctcatagccaggtgtggctgtgatctatcagccttgggctcccaaagtgctgggattacaggcatgagccaccccacctggcccaatcttcttaacataaacactttaatgtaaattaattcttaaactcaaggttaagtcaactcaatctcaagtcaatgcctatttggctctaatgtcaattaaagctttatgatcttctatagtcactgtatttggaacagttatctcaaaaatgaattttctgatgttctgcatggagtgcccacagactgaagaccttgccacacttaagacatttgtaagatttctgtccagtatggattctctgatgtctaatgaggtgtgaacgtgaagtcaagactttgccacaatcatcacacttgtgaggtttctctcctgtatgaattctcctatgttttgcataggatgaagcttgactgaagaccttgccacagtcatgatatttgtaaggtttctctccagtatgagttcgctgataaactgcaagatatgatcgatgtctgaaaattttaccacatttattacacttgtaagatctgtcttcattatggattctccagtgatttgcaatggttgtagcattactgaagactttgtgacaatcattacatttgcaaagtttccctacaccatggattgcttgatgataaaaaagtgacgacttcccacttaaggctttgccccactcattacacttgtaaggtttctctccagtataaactctctgatgttgtgcaaggtttgattgttgattagaaaccttagacagtatgaagtctatgatgacatgcaaggtgtgcttttctactaaaaaccttgccacattcattacatgtgtaaggtttctttccagtatgaattgccttatgcattacaagggctgaattttgagcaaaggtctttccatactcgtgaaatgtgtaaggttctctccagtatgaactctctgatgttgtgcaaggcataaatcatggtggaaaaccttgtcacaacccttacatttgtaagatttccctccagtatgaagtccatgatgtgcaaggtttgcttttctactaaaagccttgccacattcgttacatgtgtaacatttctctccagtatgaactcttacggcatgaaaggcatgaattatcccagaaagccttgtcacaaaccttacgtttgtatggtttttctccagtatgaattctcctgtgtgtttcaagttgtgatcctcaactctaaactttgttgcattcttcacatttgtaatgtttctgtacagtatgaagtctatgatgacactgaagggatgacttctgattgaaggtcttggaacactcattacacttgtaaggtttttctccagtatgaacactatggtgccatgcaaggtattgcttctgatgaaagactttgccacatacatcacatttatactgtttctctcctgaatgggttacgtgatgtctccttaaacatgagctatgattaaaggctttgccacactcattacattggaaaggtttttccctcatgtgtacttcttgtatttgtgtgaataatgaagaatagaggaaattcttcccatacttaatagaaatatgggttttgagcctacaaattatttgggatgttgaagctgaggaagcatcattgatagacttctccacttgattaccaattttcccttgggtctgaaacatgtggagttcaggcagatgcgaatgaaagcttgatccaagctgatctttaataggcttgtttccagcatgtctttgatcacgtcagtctgtactacctgtcaactctttggtttctgtcatgggtgcttcatggccatttctttaaatttcttgccactgaaactcaaagtgatgaatatctttcttgatttctgggaagcaaaaatctccagtgtgatgactttcatgtatttgcaacgtccctgtgtgaatcacttctcctgtattaccgtgcccagttgatgagaactccatcatggattttaaagagctatctaaaaaatataaagaccaataggtttccaattaagtacagatggtaggccaggtgcagtggctcacacctgtagtcccagcactttgggaggacgaggcaggtggatcacaaggtcaggagctcgagaccatcctcgctaacatggtgaaaccctatctgtactaaaaatacaaaaaaattagccaggtgtagtgataggtgcctatagtcctagctacttgggaggctgaggcaggagaatggcgtgaaccctggaggcagagcttgcagtgaggcgagatcatgccactgcactccagcctgggtgacagagcaataatccatctcaaaaaaaaaagtacagatggtaaataatagttaatattgaaatgtgtaaatattacacaaaaagcaacagttattttaaacgtcccaaaagtgatcttcaaagtttaagaacaccttatctctactaaaaatacaaaaatttgccaggcatggtggtgggcggctgtaattccagctacttgggaaaccaaggcaggagaatcacttgaacccaggaggcggaggttgcagtgagtggagatcatgccattgcactccagcctgggcaacaagagcaaaattccatgtccagaaaaaaagagttcagtcaagagcctcctatatatgaggcagtgagcctgaatgatgtcctccgtaggaggaatttctacagcagtgactgctgcttagagaagatgatcattagtttatgtgatgaacactgtcacagtgccagtgaaagatgcttctgtgatgctcctcaaaaaccagaacgggccaggtgcggtggctcatgcctgtaatcccagcactttgggaggccaaggtgggcagatcacctgaggtcgggagttcgagaccagcctgaccaacatggagaaaccctgtctctattaaaaataca

SEQ ID NO: 1887978 - DNA, 4001 bp, Homo sapiens; identical to SEQ ID NO: 1561312

SEQ ID NO: 1887979 - DNA, 4001 bp, Homo sapiens; identical to SEQ ID NO: 1561323

SEQ ID NO: 1887980 - DNA, 4001 bp, Homo sapiens; identical to SEQ ID NO: 1561335

SEQ ID NO: 1887981 - DNA, 4001 bp, Homo sapiens; identical to SEQ ID NO: 1561350

SEQ ID NO: 1887982 - DNA, 4001 bp, Homo sapiens; identical to SEQ ID NO: 1561356

SEQ ID NO: 1887983 - DNA, 4001 bp, Homo sapiens; identical to SEQ ID NO: 1561357

SEQ ID NO: 1887984 - DNA, 4001 bp, Homo sapiens
aagcgactggtcaacaaacagctgctctaccaaaaaagcctggagttacaaagcagatgaacatttttgcagagctggaaactaattccaataaggctaaaaacttgctactgctggtagggaaaatcctaactattgacagtcaaatgcttttgatgcgaggctacttaggttgatgttgataagagaaaagttcccttgtccccctggcagggcgtgcgatgggggtgtggctcgcttcttcagtgtcccgctgctcaaacctccaggggagtatacagacgggcgggctgtggggctctgaccccatggcagtgtctaggggtgaatgtttatagctgaagccccagtgggcgtgttacaggatgctctttagctgtccgcaggcggcttatgttagtcaattcaattagatccctgcgttatcgcaaggacagagggctttcatatcccggggttcctgtcttggtgtaccagaagaatcagatcacacatgggcttggaggatgactgcagggttttgagtggaagtagctctcaacagttgggggagccagaagggaaatggttttcccctggaatcgggctgctccgcagcaccggctctccttggactgccccagccaaactccgcgtccttctggtgggtggcctgcccgcgtgccagcgtctgtcatgtcttcttccgccaacatgttcctctggatgtccagcggcttgtgtgtctgcttgctagggtctcagagtatttatagggacaggatgggggcgggaacaggatgggggcgtggcaggccagggtggtcttgggaaacgcaacatttgggcaggaaaacaaaaatgcctgccctcacctaggtcagttggcacagggccaggggtggagccctagccagggaccacaccctcctgtacccagcacctccctttcccccttccatatcatttaaagggaccccgcccttccctccccagcactccccttccccacctccttatcaatgtcatcaccctggactgactccaggaatcactgtaatgtgggcttaataagaacagagctcggctggccgcggtggctcaccctgtcatcccagcactttgggaggctgaggcgggtggatcgcttgagcccaggagttcgagactagcctgggcaagatggcaaaaccccatttctacaaaaaatatacaaaaattagccaggtgtagtggcgcgcccctgtagtctcagctactctggaggccgaggtgggagaatcacttgaacctgggaggcagaggttacagtaagccgagatagcgccactgcattccagtctgagcgacagagggagaccctgtctcaaaacaaaacaaaaacaaaacaaacaaaaagcggagctgacagtcaaggtgaatttcacgtttgcctgtattcagttttagcattacataaaccaaaagaagaatgccataaaggctacaggcagctaatacagagaggtgttactggaaaaggaaccagaaagagtaaatatctcctaaacgtatgatgggacagaaagataaatgcctattacatatagttaatatctgtttgattagccttatttacattctccttttaaaaggtcttacatttagcatcttagatagaacccacaaaatttaaatatttaatagaaacttaaaattcctgtatcagaggacagaaatatatttttctcacacgtgattagtctaattgccactattaatcctattaatattctgttaaataatagcatttctgtagcgaaaagcaaacagtacggaaagataatttcaaacacctagttttcatatttttgtgttaaagtaataacatattttggtatagattatcattttttgtttgtttttgtttttgctttttctgacctggtgtgttaatgccctgggttggccctctaagaagctggccacctacttcgggcctcaggtgtcagacgccccagcttcgaggtctatggctcccagcaactcgagcgcctgcgcctgcgcattctcagccggacgggagcgcccagaagtctccgggcgccggtgggcggccttgtggactgcgccgggcatgctcggcggtgtgacggctcaggactgcatttcccagaggctgcagctatccggccaatgtagcctgaaactacatttctcagcggccactggaacgacctcaatctctgcctcctcgccagttcattgtggtcgttgacccggcagcgagctttggagttcatcgagggagaagtcagcgcccagctccgaggttggagcagccccgccgggcaacttgaatttctgcaaacgaacacagcaccgggagctctgcagacctgtgtcggcgcggaacccggactgagacatgcgtgagcgttgggtggaccgggcgaggatcccgggccggcgagtgcgggagcggcagggcagggagggtgcgtcggccggggccggtgtgcatccgcgaagactgggtgcatggcctccatgcgaacctgagctattaatatttgttactattttggataaaatcactgtaattgatttatgtaaaggagcaaaagactcttcaactctcagtttaaaaaggaaacgatagttatgataccttttgcatgcagcgggaagaaatgggattgccaggaagcctcttcttgtttggaaaaaactgtataaagtatttacaccttttaaagatgagagcaatgtcatctgaaaattatcagtgcagggaaaaggacttcaaaggatctgttgtgcagattacttaactaatgacaaaattatgtaagaaaggagagcaagatgacagctgtaaacatttccatcaatctccatattgcacagaaataggacccagctttttcttaaggttcttcaattttgcattatcccacagcagtagctctctctctctagctgctaggggacagaggaaattgaaatgtcagagaatcttttctgttggttttttatttgtttgtttttaaagaagagttgctcttaattttttagttagaattaaaagaaagcatgccagagaaacttacgttttaagtaaaaagtggaaacaggtcgggtgccatggctcatgcctgtaatcccagcactttgggaagctgaggcgggtggattgcctgagctcaggagttcgagaccaccaacatggcaacatggtgaaaccccgtctctactaaaaatataaaaattagccaggcatggtggcgtgcgcttgtagtcacagctacttgagaggcggaggtgggagaagtgcttgaagctgggaggcggcggaggttgcagtgagtggagatggcaccaccgcaatccagcctgggcgacagagcgagatcccttctctaaaaaaaaaaaaatatatatatatatatatatatatatatatatatagatagatagatagatagatacataaattaaattaagtggaaacaagtgtttaattaaaatgaaataaaggatgtataatgtttacgtaataactccaatgcagtagtgcccccttaatcggcagtttcactttcttcactttgttaccctcagtcaaccatgatctgaaaataggtgattttggtacaataagatattttgagagagaggggccatgttcacataacttttattacagtatgctattatagttgttctattttattattagttattgctattactcaattatggtggccgggtgcggtggctcacgcctgtaatcccagcactttgggatactgagatgggtggatcaattgaggtcaggagttcgagaccagcctggccaacatggtgaaaccctgtctctagtaaaaatacaaaaattagccaggcgtggtggtgggcacctgtaatcccagctacttgggaggctcccaggaggtggaggttgcagtgagccaagatcacaccactgcactccagcctgggcaacagagtgagaccctgtctcaaacaaacaaacaaac

SEQ ID NO: 1887985 - DNA, 4001 bp, Homo sapiens; identical to SEQ ID NO: 1561359

SEQ ID NO: 1887986 - DNA, 4001 bp, Homo sapiens
gtctcaaaatattaattaattaattaaatttatactattatatgataacagaaagtgatttttttctcccacttcactgccccacttcctattccatcctgggaaaagggaagagagtgtctaacaagtgaatgaagacacaaccctctggctgaatagggattccaactggaagctaacctctgatgccaagatttatagaatgtacatgtctcatagataggaattttaaaattctcaatctcatctgtataatttaaacaagttttaagttattaaactacatacatagaagtcagcatgtcacaacgaatcatatctaatgaactcacccactcatctgaacccaaagttccccgcccctttttttcttttgagacagggtcttgctctgttgaccaggctggagtgcagtggcatgatctcggctcactgcaggctggacctcctgggctcaagtgatcctcctgcctcagcctccagagtagctgggattacaggtgtgtaccatcacatccagttaattttttttttcttttggcagagatgggggtctcactatgttgcccaggctggcctcgaactcctggactcaagcaatccccttgcctcagtctcttaaagtgctgggattacaggcgtgagccactgcgcccagcccctctgtcttcattactgtgcttccctccctaattctgtacatatctctcattctccccttctctctctagctcttgttttcttttctttttccctgggattctgctcttcattttgtacccctctcctctcctgctgtttatccccttcttccctctattacttctcttccacctcttctgctccatcgtcgcaaattctttaacctcttgttgctccttctccccaatctttcgatcatcctcaatctccatatatttctgcctcttctcccatctctgcgcctcctctgctctccctgttaaattatctcttccctgttaaatccccctttccccaatctctagcaccccagatccccaggtgtcctccctgctgtgcttctccctctgttcttgccaccagcaccactctgctctgtctgccctggctccaaacccctcctcctctccctcactctgatgagcctccctctttgctgccccctccctaccttgctcttcttcatctctctgtacatcaagcttttctctacttttctccagttccttttctcctcctgtttttcttatcctttttttttttttttttttttccacttttgctgtctcttggcaaatccttcacccatcctctacgctaccatctgttatggcctttctcattcttcttttctctgtctcaggttttctactgctctctctctcagtctcccgatccctttggccaacacaatcacaggagggctttgaagtaagatgcctgcatcccggaggagcgcattttccagaggctggtgcagggcaggcaagaacacacggtgtcataggacagccccgggcacctccccaacgcgggctcaggagaaacggtgattacggagggaagacctggggagcataagggcccggcacgaggagggaggtggggggcgacggcgccttaagacaagactgggaggcgcccagggcgggaatccgcctcgcggtaaggactttaaaaagtgcgggttgggaggagtcagaaaaaagttttgagcaggaaaactacgcgatgggaagtgtatacgttaccctatagcagaaagattcgggacgggaccggtctatggtgactttaaacccaaaaggaagcgacccccagactctcacggggacttctcaatttgctctgggtaaagaaagacggaggagaacttccaggtctatgaggaccccacgtcccaggtacagaagcgcctgggacccgggaagcgcagacttaacacaacacagagcaaaactcacccccgcggtgggaccgtcactccacgcgacccgcttccgggtttgtgcgaatctgctctctggggacagaagccaggcctgggcgggacccgcggggaggtaggcggggcctgagcgaggtaggggcggggcgcgaggcggagagaccttgcccttcagaacagacagagggcggggcgggggcggggccggggcgggacctgtgcgtctctcagcctggctcccagagcctcaatttttcgggttttggaggcgagaccggccaggaaggctgaggcatgattcaaaagccctggaattgtctggaaggggatgcaaactagaatgtgaaatgcaaagccctgcctgggcggaacatacgatttcatgctgacggcccacagaacagaatagaaatcctctccctttctattttccattcactcaggagggacagtccaccctgtgctcagcttcagagacttccccagggcctccgcctgggatgcgggaccgagtgctcaggccagggaggagtgaggtcaccacctgctgcttaaacacagcaggaatgcgggcgcgggggcggaagtctgaggtcccagctgctcaggaagcagcggcgggaggatgctgagcctgggggtccaagccagcctgggcgacaaagtaacaccgcctcccgcagcgctcccttccttgtctctctctctttttttttttaacttttttttaaataaaatttttgattttgtgagatggggatccaacattgttatttttcatgtggatatccagttagttgtcccagcacatttgtggaagagatctattactttcatttttatatttacattttttcttttctttccttttttgagacagagtatttctctgttgaacaggctggagtgcagcggcgagatctccgccttactgcaaaattcacctcccggattaaggtagttctcttgcctcagcttcccaactagctgggattacagatgcgcgccaccaagcctggctaattgttttgtatttttagtagagactggggtttcatcacgttggccgggctggattcgaactcctgacctcaagtgatccacccgccttggtctcccaaagtgttgggactacaggagttagccaccgcgtctggccaggaaaactcttagaagttgcgtctgcagccgggcgccggtggctcacgcctgtaatcccagcactttaggaggctgaggcgggcggatcacgaggtcaggagtttgatgccagcctggccaatacggtgaaatcctgtctctactaaaaaatacaaaaattagccaggcgtggtggtgcgtgaatgtagtcccagctacttgggaggctgaggcaggagaatcgcttgaacccaggaggcggaggttgcagtaagctgagatcatgccactgcactccagcctgggttacatagtgagactacgtctcaaaaagaaaaaagaaaaaagaagttgcgtctgcataccacaggacacaggttgcatgaccacattcctttcaaggctcagaattatttaaaggtccatacctttaaattgtttaaattggaattatttgatatttcaaacgtttaatttcctactgagttacaggtaccgtctctcttgttgtttgcctttcaaagagagaccccaggtccttcagaaatacatccatgggttattaagctgaaaaaaagtttaggttgtttctaaaaaataccacttcaagccgggagcggtggctcatgcctgtaatcccagtgtcaaaccaccgaggcaggcagaacgcctgagatcaggagttcgagaccagcctgaccaacatggagaaaccccgtctcttgtgaaaatacaggattagccgggcatgctggtgcatgcctgtaatcccggctactctggtggctgaggcaggataatcgtttgaaactgggagacagagattgcggtgagctgagattgcatcattgcactccagcactggcaataagagcaaaactctgtctcaaaaaaaaaaaaaaaaaaaccctcagaagtgaagggggcctgc

SEQ ID NO: 1887987 - DNA, 4001 bp, Homo sapiens
aaaaaaaaacaaaaaaaacaaaaaaggggacattcaaatggccaagaatcaatgctcaactttattagcaataaaggaaatttaaattaaatataacattagacacccaccagattggcaaaaatttaagagttttatgatgtctagcatggatgtggagctaagaaaactcttgtaaactgctggcataagtacagtatctttagagaacagtttggcaatgtttggtaaaactgaagatgtacaaaccctacctattagcactttttttttttttttttgagatggagtctcactctgtcaccaggctggagggcagtggcacaatcttggctcactgcaacctctgcctcccgggttcaagcgattctcctcagcctcccaagtagctgggactacaggcgcgtgccaccacgcccagctaatttttgtgtttttagtagagacggggtttcctcatgttggccaggatgatcttgatctcttgacctcgtgatccgcccgccttggccccccaaagtgctgggattacaggcatgagccactgcatccagccactatcagcaatttaatcactaggtatatattctaaagaaatgcaagcaaatgtgtaccaaaatatgcgcacaaaatgatcatagtcacactgcctgtagtagccaaaaattacaagacaaatgtccatcaagagtagaaggataaggccgggcacagcagctcacgcctgtaattctgtctcaaaaaaaaaaaaaaaaaaagaaagaaagaaaaaaaaaagaaaaagaaaaattaaaaccatctgacaaatcagtaagggaaaatcaggtgtgggaggtggggtttgaagacaccacattttctcaaaatggaaactccagggatcaggtcatctcataggcaagaattttcaagagaaggaaagcaactatgtcctgacaaagaaaaagggatttttcttaaacaagaggacaggacaagctaccttgcaggtgccttgtggatgttcaacagccattctttactcctgttcggaggcctctatccaagcagggcagggctgaggaaggagaaagcagtcaggaaacatcaggttcttctgagagggagttggtttgactatgtcagaagttatctttgctcagcccctactgcccatcacctacagaggaaggtcagagaagtctagggcatcctgcttaatccgggcatcacagacaacggtagggtcaatgccgttctgggcagaacctgtccctgagctcacaggggtctccaatggctgaagtcacaaagacaaagactccccatacctacattggctatacggacacatagtcacacaaactcactcacaccgcagggacataaacgtcacaggcaccccaaacctaaacacaacacacaatcacacactcatacacaccacgggggtagacacggacacaaccacagagtccgtgggcatctctcaaattcccagtgacatacaccttggggtcacaatgacaacaaattcacacgcaccctccatcaacaatatcaccaacgcgcgcgcacacacacacacggaagcagccacaaacctcaaaattaaggcatactacacacagttcggcaaatggtagtaaacacacacacacacaccccaaggggacatacagtcacaaccgcggtccaggaacctcacactcgcaaacacagtgcccaacccggtcacaattaaactctactcacacccgcacaaacataaacaaaaagtcctcctccccgccctcacagttccatacacggtcgcacagacacacgcccccagtcacaaccgtacacactcctcacaatcgctccttagcctgttccccacgcagcccacacaggtcgggagttcctgtcgcgccaggctccgagccgcctcacttacgcctgttcggatagggtcagctccgttctactagaatccacacaagtcgaccctagctatctcacaaagccccaaggccgcttgcccaaatccgcgggaagatcccgcccactcctcaagagacaatctagttatcgcgggagagtgccctgggcctagaggcttctgggaagtgtagtccagaaagcgacaggttgccgaaagctacagcccagccatcccgattcccctggcgcggactctggcaccaacaaaactatctctttgaggtgagctgcccatcggagccttccgggagtctcacctgacaaggagtccctagaccaagctttagtcaggctcctctgagccctttttgcttggccaggcctcctccatagcctgcgaacagcacttcagcaagaatccagctaagccagtttagtaacaatccccccactcttgatacttaacttcctcttagtaatttagcatcctttaactccttcacccagcccgttagctataaatctccagctgctgttgtattggaagttgactattgcaatagtctttaaccaagtccttcttgcctgtttaagtcctctggggcaagctttctttcaccccgcccagcctcagagggcggctcccgggcttccgcccctcctcgggagacatactggaccgcagggtctcctgggaaacgtagtccaagcctcgccggggatagatgggcccaactaaagtgtgctgcgttctctgggtcctgaggcggcagtctggccgcagtgaccagactaactgtgccccggaggctgcttggaattccacttaacgctggaagcacgcagacgctcttgaggcgggcagctgcgtagcgtgtggaggagccgggagagcgcaccccaatgtggcacctgagcgtctgggaccgaaccagcatggggagtcggaaggggacaaatccgcgatcccagtcatgcatgtgagactgggcaaaggaaggctcgagtgtgtgtgagaccgcggtgggcctgcttgtgctggtgggatgaggggtgtctgggtagttgagtgaaagaaaccgcgtgcgggtcagattggtgtgtgtgtgagagaagtgaggtcaagatgtgtgcagctttgggcgtggggaggtcatattgagtgtgtggaggtggggggggcaagatcgtgtatggatctgtgtatgagtgtgtgtaatcacctgaatgtgggtcactgcgtgggtagctgatactatgactgtggaggaatctgaacctccaagtctcattttctctttaaattgtgataacaaggttgtatcttcctggtgcagcagttttaaaggggggaagctccattactgatataataaaatagcattttttatgtaaacatttaacattcagacatttcttctgaactagagtacaaaatcagttatgagtactccaagtagtttaaaaaagaaacccgtcataatagatgcatatggggaagataaatagtgaaaggggaacttccttttcactatactcttgttaaatttttaaaatcaatgtgaggactcatttgaaaacaaatataaaattaaaaaactgacagaaaggggagctaggaggaaatcaataattttttaagctagaaactttgggaggtggtagaggttgccgaaatatgatggcaggaagtgtatgacaacaggaaatgctgatgtaaaatataatcctgaagcttttaacaatggcaggaagggccgggcatggtggttcatgcctgtgatctcagcactttggaaggctgaggcaggaggatcacttgagctcaggagtttgagaccagcctgaacagcatactctctacaaacaaaacaaaacaaaaaaaccaagcatgagtgcggtggctcacgcctgtaatcccagcactttgggagactgaagtgggtggatcacttgagcccaggagttcaagaccagcctggccaatatggtgaaaccccgtctctactaaaaatacaaaattagctgggcgtggtggtgtgcacctgtaatcccagctactttggaggctgacgcaggagaatggcttgaacccg

SEQ ID NO: 1887988 - DNA, 4001 bp, Homo sapiens
aaatctatcaacccagactctcagagggataggccttcatacatgcattaggtacgcatactccagcaaatatttggatttaagaaacgcttggctaggagcagtcgctcacgcctgtaatcctagcactttggagtccgaggcaggtaatgcatcaggtggatcacttgggctcaggagttcaagaccagcctgggcaacatggtgaaacctcatttctacaaaaaatacaaaaattagctgggcatggtggcgagtgcctgtagtcccagctactgaagtgggagaatcccttgagtctgggaggcggaggttgcagtgagccaagatcatactactgcactctagcctgggcaacggtgtgagactctgtctcaatttttaaaaaatgacttcctcttctagaggaattatcaaaaaaaacagtataagccacttaagaataaatgtaaccataagatctaggacataaaaaagtgaatcacaaatcttggggtgggaacagaagaacttgagtaattggagtatcagaatgttatatatagatagaaaatatagaaatagaattgaatattttatacatgtcaattccatcctaattaaggcaaacatttaatgtgactccatttactaagccactggtacaaccttctgatgtgatactgccattgaaaaattttatatgtagtccagctacttgggaggctgaggcaggaggatcccttaaacccaggagttcaaggttagagtgagctgatggcaccattgtactccagcctgggagacagggcaagactgactctctctgtatagaaagatagatagatagatagatagatagatagatagatagatagatagatagatacatacatacatacatagacagatgtatatagagacagaaatatagatatatatactatatatacatacatgtatgtatgtttgtgatgagaatttaagtgatgaaatcaaatatttacccaaagtattgcaattgtgaaaactgtgaggatgaaacgaaaaaaaaaatgctcctaaataaaaatcagaagtgtgggtaacagagattattttcttgtgttggaataaatctgaaagaaaatatttatgaaaacgacatggtaaagttgggaactagagaggaaaaaagctcgactttagtagcaaactcgtaatttcctcgtccagaaatttgtagacaatgatatgaatataggaagggaaatgtttttcattgttatttttaagacggacttggacttgaagaactgaactgcatgtagatccactaggtaaatgtagtttaatcacaactgtaaccagcagtcaattattaagcctcaacccatccactctccagggcccttgggcctccaaagctccagcctcttcaggcccctaaaccacagacatgtacaggcctcctcaaacattgactccaaattaaatctgaaaccgcaaactaaaacctctttcactaaaacattctccagccccaagcttctctatcacattaaattgcaaacccggaatggacaccaagttcattcactgatacacactttcctaccccgtttctcaaccactgattcccacggcattccctcaacgaccataaaccttgacagtcggtcgttaatatcttccagtctcttaattactgaccgccaggcgccctatcaccaaagccaggcttctccattgagtaaacccagaaagaaccccaggacgcggggtcccacacggtctcagaacagggggctccccttcactgacccccacaggcctttcacttggagccacatccagaccccgactcatctgatcctgagtctctccggactccaccgaacgctgggaccaaacactgagcctgcgtccaaaacgacttacatctccctccgcagccgttgctagggacttcgagggccctcggcgtctgaccgcgaaaccagccgttcccagacgacagaattcctccctcggcctcgtattgtgacgtatcatggccacgcccatctcggcgactcccaccagagaacccggaagggctgttaccacggcgttggaagacagtgaattaatttcagggcacctcagtcactgcgcaaactggataaattgtcagaaaattataaaaacttttaacagcctgagcaaaaaaataagatggccgcgcgctgtaccccatattgagccgttaggaagaagcatcgtggctgcagttcatcttaggaggtgtcagtttccattcagtagaaaatacaatctgttgggagtttagggcggaatgtggagtatttctgagggcctcttcaggaccaacaaggtgtgccaaaggcgaagtggctgaaggggaatagggggacagcggtcacagagtggaccaaatttgtggatgttctgaatctccttcaacggatgcagaaaagaatgggcaaggctagtctagccgagaattgtcttgaggccaaatacgggagcgatctctatgaggaccaatgcccacgtgcaactgcatacagtgtgtggttacctgtaataaggaaaaaggaatgaggcctcaaatttaatcaaatatttccctgaaacacttgaagatggaaatggagcatataagagtgttaaataactaaagaggccgggtgccatggctcaaacatgtaatctcagcaatttgggaggctaagtcaggaggatcacttatgcccaggagttggagaccagcctgggaaatatagtgaaacactgcctttacagaaaaaatacaaaaatacaaaaattagcagagtgtggtggcatgcacctgtagtcccggccactctggaggctgaggtgggaggatggctttagcccaggaggtccagacttcagtaagccatgatcaggccactgcactccagcctgggcgacagagcacgaccctgtctcaaacacaacaaaaacaaaaacaaactttaatttttttaaattactaaataatgcagttaccatttggcaaaccgcatgcttaataaatgtcggctaccatttttatgaaggcatggggtgatgtgccttttgaaagaggcaacctggaactgagtatccagttaaatttatttagctgggatgccaacttctgaaaggtgatttcaacacctggtcccaaggacaggcctgggaagcccagtagcgcaccctgatttatgtgttcagggagtaagatgctacgactgctatgataggatgtgcagattcacaaggcaagaagtagagagaatctgaagtccaggttgaagaagagttcatttcttatactcttaactgtagagcatctgtactgaatccatcctgttacaggccactactttatgtttgttcttcagtgtatcctgtgtgtacaagtgtctaccacagtgcagatgctcaaaaactatttgttgtaatcacccgataacccagacttcgggtttccactgtgaggcagccactttatggcaaatttccactttatttttccttgtgagcaggactgtttctaacatggatgtatctttattagatcaagggaaggaactctgagtataggagaggacaagggtcttaaccccaagtgagaaggaatgatgaagagaaatcttatgttccaattcagcataccacagaggagccaggatctttaaaacagtagcagctctccaaggtgacaggtctgtagataaatttaagggttcttatccaagatatccaaaaggatctcacctttacccatcttacatgctgtcctttatttttagagaatgaagttattttgttcttttattgggcttattctgtgaatcctattccttctctcttctgcccctcttatgacagaaatgagtctctattcagatttttttaaagttttttttagaataatactaatccttagaagttcttgccagtagttcctttccttcaatggcaaaagtaattttgataattgtccactgggttattcatgcaccttc

SEQ ID NO: 1887989 - DNA, 4001 bp, Homo sapiens; identical to SEQ ID NO: 1561384

SEQ ID NO: 1887990 - DNA, 4001 bp, Homo sapiens; identical to SEQ ID NO: 1561412

SEQ ID NO: 1887991 - DNA, 4001 bp, Homo sapiens
aggaaggctgttatagaaataactgcaagtatgaaaaaattatcccatgttccagtccagacttagacaaagtagactcccgagtccctctttagaggctggttttcctccttcagtcgattcaaaaccttaataggagtagttctagaaatactaagaattggtttaatactcccttacctcttacctctccttgttaagaacatttaatcaactatagaagcaattgtaaccaggcagactaccactcagctaatagctctgtataaatatcagcctgtgcctaaagaagaaaacctgctctttcatgaagaatccagtaatagtgatgctttctattaaaatcttgataataaaaagcatctaagggaagaaactgaagcagaaatttaaaaaaaaaaatgtattcattcactccaagaatagtaacaggcaaggcaagggttaaaaagaaaagaagttttcctctgcctagcaagctcacttcaagaacagttatgagacgctgtttgagaagttgaagccaaaggaatgagctcctgacacccccacctccagaacaagggtgaaggaaaaaaaaaggacaaacgtgtgtatttagctgttcttgtttttctttcaatgcagctacaaggccaccagctatggaaggacacaagttatgctatgctatagattacgtgacctattatatgattaactgcttctactctgcttctgaaagcaaaaaaaacccactctgtgtttgttgaaatgctcagctttttagatgtaaatctgctgagccgctgtgtaccttaaataaacatcctcctgtctcccccatatcagtctctctagtcctcagtttcccgcaacaccatctctgcgcctcctctgctctccccgttaaattctctcttctctgttataccccctgtccccactctctggcaccccagatccccaggtgtcctccctgctgtggttctccctctgttctctttgccaccagcaccactctgctctgtctgccctggctccaaatccctcctcctctccctcaccctgatgagcctccctctttgctgtccctctccctaccttgctgtccttcatctctctgtacatctagcttttctctacatttctctagttgcttttctcctcctgcttatctttttttttttttttttcacttttgctgtctcttggcaaatccctcacccatcctctactttgccatctgttatgggcctttctcattcttcttttctctgtctcaggttttctactgctgtctgtctcccgatccctttggcccacacaatcacaggagggtttggagtaagacgcctgcatcccggaggagcttattttccaggggctggaactgggcaggcaagaacaccccgtgtcacaggacagaacccgggcacctcccctaacgcaggctcagggcaagctgtgactgcggatgggagacctggggagcagcagggcccggcatgaggagggacgtggggggcgacggcgccttaagacaagggtggggtttgtaggatcccaggacaggcagagaactcggcctccccgggaccggagctgcgacgctgcgctctaggggccgacgagggcgaggctgggaggcgcccagggcgggaattcacctctcgggtgaggactttaaaaagcgcggggcgggaggagtcagaaaaaggtttagagcaggaaaactacgcgatagaaagtgtatatattgccctatagcagaaagatccggaacgggaccagcctcagggagactttaaacccaaaaggaagtgacccccgggctctcacggggacgtctcaatttgctctgggcgaaggaagacgggtgagaatttccaggtctgtagggaccccacgtcccagggacagaagcgccggggacctgggaagagcagacttcatacaagatggagcgaaactcacgcgccgctgagggaccttcactccacgcgatctgcttccgggtttgcgcgcgtctgagcggggaaggacagaagccaggcctgggcggggcctgcgaggaggtgggcggggcctgggccaggtaggggtagaggcggagagaccttgccctttagtaccggcagagggcggggcggggctgggctggggcgggatctgtgcgtctctcagcctccctcccaccgcctctgtttttgggttttggaggcgagatggccaggaaggccgatccatgattcaaaagccctggaattgtctgaaacgcggatgcaaagtagaatgtgaaatgcaaagccctgcttgggcagaacttacaatgtcatgctgacggcccagagaatagaatagaaatcctctccctttctattctccattcactccggagggagagtccaccctgtgctcagctgcagagacttccctaaagccaccgcctgggatgctggacggagtgctcaggccagcgaggagtgaggtcaccacctgccggataaacacagcaaggatgcggacgcgggcgcgggagcctgaggtcccatctactcaggaagcagggcgggaggatcgctgaacctgggggtccaggccagcctgggcgacaaagtaacaccccctcccgcagggctcccttcctcgtttctctctttctctctttatttttcgttgttttttttttacgttttaaaataagaggttgattgtatgagatagggatccaacattgttcttttccatgtggatatccagttagttgtccattccacatttgtggaagagatctgttactttcttttatgtatttacttatttcttttcttttgttttgagacagagtatttctctgtcatccaggctgcagtgcagtggtgggatctcgactcactgcaagcctctgcttcctgggttcaagtgattcccctgcctcagcctgaagggggcctgcccctccacacctgcgggtgtttctcatcaggtggagatgagaaactgagaaaagaaataagacacagagacaaagtatagagaaacagcagtgggcccagacaaccggagctcagtgtgcgagtacccgcaccggcgctggtctctgagttccctcagtatttattgatcactatttttactatctttgtgaggggagtgtggcagggcaacagggtgatggtggcgagaaggtcagcagggaaacgtgagcaaaggaatctgtgtcatgaataagttcaaggaaaggtactgtgcctggatgtgcacgtaggctagatttatgtttctcttcacacaaacatctcagtgtagcaaagagtcacagagcagtattgctgccagcatgtctcacctccaaccacagggcggttttctcctacctcagaatagaatgaatggtcggctttacaccgaggcattccattcccagaaatgagcaggagacagaagccttcctcttatcttgactgcaaagaggcctccctctttcactactcctcctcagcacagacccttcacgggtgtcgggttgggggatataaggtctttcttttcccatgaggccatatctcaggctgtctcagtggggggaaacttggacaatacccaggctttctagggcagaggtccctgcggctttccgcagtgcattgtgtccctggttaacagagaatggagaatggcgataacttttaccgggcatactgcctgcaaacatattgttaacaaggcacaccctgcacagccctaaatccattaaaccttgattcaatacagcacatgtttctgtgagcacagggttggggctaaagttacagattaacagcatcgcaaagcagaacaatttttcttaatacagatcaaaatggagtttcttatgtcttccttttctacatagacacagtaacagtctgatctctctttcttttccccacatttcccccttttctttttgacaaaaccaccatcgtcgtcatcacccattctcaatggtcgctgtctcttcggagctgctgggtaca

SEQ ID NO: 1887992 - DNA, 4001 bp, Homo sapiens
aacaaaggggatcctgttctggggatctggaacacatcctgtccttttctcaccggtcccttcctctcaggatgttgcttttccagcacattctatattcattcttgggaactacaagtgagaagtcagatgcaactgggccaattcaaccccacttgaatgctgtcctgcagtctctccgccaatccagatatcccttttatttttatattttttgagacggagtctcgctctgtctcccaggctggagtgcagtggcgcaatcttggcttactgcacctccacctcccagattcaagcaattcttgtgtctcagcctctcgagtagctgggactacaggcgtgtgccaccatgcctggctaattttttttttttttttttttgtatttttagtagagacttcgtttcaccatgttaaccaggctggtctctaattcccgacctcaggtgatctgccctcctcggcctcccaaagtattgggattacaggcgtgagccaccacgcctggcccagatatcccctttaataaagctagtccatttacatgtgcactgacctccctggatctggaggtagaggctggtctcaggagattgaagtaatacctcgactggcagaatctcagggcaacatcattgaggtacagccagttgcatttcactaggctcaagaggattgctgcctcaagcaggataaccaggcctgcctggagcagtgccgtagtccaggatcccagtgacctaggtgagaagttggtactcagatcaaagaaaagttcttcaggtgaccccactgtctgcagccaatgggcctgcttgtgggccttatgtatttgtgtttcaaaaataacctgagggcttgatgtgggggtccttatctcccatgcaaggtgattcatgcctataatccgagcactttggtaggagcagatgggaagactgcttgaggctagaagctggagaccagcctgggcaacaaaaccagactacatctctattaaaaacaaagcaacaaacagtagaaaattagcacagtggagaggcacaggcctttactcacagctactcggcaggctgagacagggggtcacctgcccaggaccccaggaagtcaaggttgcagtgagctatgattgcgccactgcatttcagcctcggtggcagagaccctgtcttaaaattttaaaaagtattaaaaaactaagttggaccgggcgtggtggctactctggaggctggggcaagagaatcacttgaacccaggaggcggaggttacagtgagctgagtgcctgccactgtactcccgcctgggggacagagggagacgctgtctcaaaacaacaacaacaacaaaaaactacgtcgtttatggctatttttataagttactggctttttttttttaaagaatcggtgacttatcttcacactggccttagtcctccatgcccaacacgatgtccctaggaaagtctctggaattgagcacagggttgaccttcaccgtctagagtgaatggggaagataaatgaaaagtatttatcttctatgggcactggcatgaaatagaacattctaccctggcagggttttgcatttcacattttagcttgcatcatccccttcacagacaattccaaagtgtgttaattcaattcctaaagcttcccttcccttcctcccttcccttccctccttacttttctttcttgtccatttattttcggtttttttctctttctttcttggttttctttctctttttcaacttctctttcttttctctttctctttactctctctcttctctctctttctgcttccagggtaggtgggacttgaaattcattttaatagaaggaattttcgtggatataatctacaaccgattttgctctgcgcaggtaagatccgttttcagaccaaaaccctgaaaacaagcgcagccagtcaagcgaacggaagcgcaggcccggcccaggctttgtcccggcccgccctggtcccagccagtccggcctctaggatgcgcgcgcaatttcgtgcaaacccggaagcggaccgcggggggcgaacgcctagagcgcagtttccggtagacccggaagccgattgcagggagaaactgttttcgcagcagtgcgtgagtttccctttgtctatgttaagtctaggctagccagttcttctctgcttctatacccgggagctgaggggcatgcagaccttgaaatcccggcaccgctccctccaccccgagtaaattcagacatcctttgagagtctgggagtcgctttctgcgtgttaaaatcgcttggaggctggtcgtgtgcccggtctttttgtcatttacccacgtagacacctcctatcgtggggtttacctgcttcaaatcctttagtaacccctacacacgccccgcaccacgtaaaatcctcactctccgttcccctagcctcgcccttctttgcccctagagctcagcgccccaacagggcacgagaggcctcgtcctctgcccagacctggtttctgcagactccacccctctcctgacccactcctgcctttttgctccttaatctggaccctctgttccccaggcctcccttttccagccaccggttctcctgaccccgagtgtggggggtgacttcagtctcctgacatccagtgttctctcgagccagtttccagcccacagaaaatgagctcttccggaagtgggcatcttattccaatcccctccctgtgaatgtgtggagaaaaagagatgggaacgaggcagaggaaatagagaaattttgaaagagaaatgaagaatgagagacccattaacagaaggcaaagtagaaggtgagtgaggggtttgcagaggcacagtgaaagaaggtgccgagaaaatagcaggggagaaaagtaactgtaaaaatatagacaaacctgggtctgtagaaagacgaaattcaacaagatagggaaggcttctcagacagaggggggagaggaggagggatttggagccaggtcagacagagcagcgtggtgctgggacagccagagggggcagctggtcacaaggagaacagggagaaccacagcagggggaggcctgggatctaagggtgccagagagtggggacaggggtgtgtaatatcgaagatggaatttaacagggagaccccaaggggagctgagatgtgggaggaaagaggcagaaatatatggagattagggacaatgaaagattgggcagaaagaggaataagaggtgaaacaagttgtaaaaatggatcagaacaggtgggagagaaggaatagagggaagaatgggacaaagagaagaggagggactcaaaatgaacagaatcctaggggaaaatagagaaaaaaagagctaggaaaaaagatgagaatgagagatatgtacagaatgaggcagggaaacagtagtgaggaaagagggggaccctggttacagatgagtggtgagttgattggaaattatgattgaattgtgacatattaatttttctataatataaaatttgtttagaacacatgaggctaggagctgtggctcacacgtgtaatcccagtactttgggaagctgaggtgagcggatcacttgaggtcaggagttgagaccagcctggccaacatgtgaaacccatctctagtaaaaatacaaaaattagctgggcctgatggcctgcgcctgtaatcccagctactctggaggctgaggcaggagaatcgcttaatcctgggaggcagaggttgcagtgagccgagatcgtgtcactgcactccaggttaggtgacagagcaagactccatctcaaaaaacaaaaaacaaaaaaccacacatgaagatgagaattggaacactatttataaggcactcttctcttttcttgggatggactagggtgtgagtgtataagttaggaaaaaccagtgtgtttttgtgttcacagtgaacacaataaa

SEQ ID NO: 1887993 - DNA, 4001 bp, Homo sapiens; identical to SEQ ID NO: 1561429

SEQ ID NO: 1887994 - DNA, 4001 bp, Homo sapiens
atcctacatgacattcacaaccctgttgagcccatcttataattccatacaaacatagcaaagcaaactcagaaactacttactccagttacacaatctcacacacacaaatcacaactaatcattctaaaaggcttatcagcttcttggaaagttaaatgtaaacttaccaattacccagcaacttttcttctaaatatttgcccaggagaaatggaaacgtgccagctttattcgtaatgtataaaacctgtaaatatgccaaatgttcaacaacagaaaaatgactacacaaattgtggtatatttgcacaatggagtgctgttcagaaaaagaaaaatgaactacacatgaaatctcacacacattagggtaaactaaaggagaaatatggaattccggaactgacagttacagtgacacaaatcagaactatggctgtctctgctttgaaactgactggaaaggacaccagcaaactccggtggtgctggtgttgtaaaccaaaaataaaatcctaagcacacccagaccatcttgaatggacccctcctcttggccagggcattcctaacctgaaaaactagtaaagccatgatggaaaggcgggggtgggcgggtcggacatgcttcattataccctcctccattttggaattactgatagaaaagaccccaagtctgaaaagaaacatttacaatctattctctgtgaagcgtgctacctggagacattcctaagtcttacgtcaataactctttcaacccattgccaatcaaataatctttgaatctacctatgacctggaaggccagccaccttccagctgtcccgcctttccggagggaatcaatgtacattttacatgtatttgattggtgtctcatgtttccctaaaaggtataaaaccacatatatcccgtccaccctgggcacaggttctcaagatctcctgagggctgggccaccggccattggtcactcatatttagctcagaataagtctcttcaaatactttagagtctgagtcttttcgtcaacagtgtaaaacacgccctaaggcagacacacacacactgaaccgccgctacctgccagattccatctggggcctttctcatggtgcaaaacggacaaaaactccaagtcaccctcaggtttacgaccacgggtcacatcctgaggcccccacacttagaagccagagtggagcaaaacctcgcccgactcaggctccgagttctcccctcgaccctccccagcctaaaggctgtacccgcttcaggccttcccagcccggccctccagttccttcttcggcctccctcagcctggggtccgggtttcctcctcggctgagcagccgggtccgcgactcccttcaccctccccggcccgggcttccggttctttccagaggtgaggcaggggccacctagaattccgcggccccccacctcccccaagaccaccctcgccccagcttcctgttccccattctgtcctcccaacctgggttcccgattactgcctcgacttcaccttgccgtcagggaccaccagccgcctcttccgcgcctaggggacgcgcagcggcagcctctgctgatggcaagggtctgcgcacccggaaactccagggtctggggcgtggtgcggcccctgcggccagcgggctccgcttgagcttcagggctctttcgttgttggactacgtttcccacaggcctcagggccgcggatgaacttcgacctttgcttccttttccggtgttgtggttattgagttaagcctggcgagtcgaggtgacccgggccgggctgcgggaggagctcgcggtgaggtggccccgcgctgccgggcgaggtcggtccacgtggagccgggagcctgaggcctctgtacgcgggagctgcggacgatggtggttagtgctattgtttacgacgtcattgtggtgtgtgtgtgtgagagacggagaccctagtgtgtgccgtgggtgctgtttgatcggactcaggacggtgagtaggggcggggtctatcgtgtgaccctggtctacggtgacgtgatcgtgtgacagcactgttgtgaccaactataagtgtgaacggggtagaagtgtttttttgtttttttttgtttgtttgtttgttcgtttttttccgtgagcctgtaggagtttgttttgggtaaagcgtcatttttccgactctgtgatgtctgtgatggaatctcttcgtgaggtcttatacacacacacacacgcatatagatagattacatagatgatatatagaagatagataaatgatagataatagatagatagatagatagatagataagatagataaatgaagtttcctgggaagacgtgaaggggagggcataggtgtagtattcattcctgggataactccccttgcatgagtttggaggccatttatacattaaagaactacagtatttcctgagctgtgttccctagaaactgctaggcattggtcgtacctttttctcggatgtggggaggagtcgacagtattctagtttccctcttcgatctgggtgtgtttgttgtgtgtgatgggcttttctggtggtgaacactgtgttcttatttaaccagtccaggatgtcatgagtcctttctccctcttggttatgtagttctgcaagtgaaggccccctgaagtggaagacagcattggtactaatggccaactcaaggttagtttttttttttgttcatttacctggtcccttggttttctcttcccaattaacaacaggaccgtagagatgggtccccttgtcctccattgcctttccaaatgcccatttccctttcattgaatattcacatatgcattaggtaaatcattcaattctcccatgtgcttctttttttccaaaggatttttatggtatagaaatacaactcctggaggagaagttaaaacttttttttagaatgtaatttgttaaggaggagacgagtgattaagtagaatggcacactagatacctttgatcttatttacagacttgatttgcaaacaaagcaagataggagatggtaggtattaatcagtaagtgacaaagttggctttggagacatttaggagtgggaatatgataggagttttatgcagagaggctatgtcaacaagggcagggagtttttccagaacattcatgaggggatttaagtggtgacaaccaaatcttctttgagatttggcagtgtgacattggtgtagattgtgagaggcagcctgatacagtggtgtctgagtctaaagcagcacagtctaatgcaaatataatataaagccacttaggtaatttaaaaatttccattagacacttttttttttttttttgagacagagtttcactgttattgcccaggctggagcgcaatggtgcgatctcagttcactgcaacctctgcctcccaggttcaagtgagtctcctgcctcagcctcccaagtagctgggattacaggcgcccgccaccatgcccggctaatttttgaatttttagtagagaaggggtttcatcatgttggctgggctggtatcgaactcctgacctcaggtgatccacccacctcatcctcccaaagtgctgggattacaggcgtgagccactgcgcccggctttaaacacattttaaaaagaaaaagaaacagctgaagttaattttggtaatgtattttatttaaaccaatatatccaaaatattatttcaacatgtaatgatatgaatacactgaaatactttacactcatatctttataccaagttttcaaaatctggtatatgttttattgttattgcatgtctcaatttggatgctaaattttcagtgtttagggtgaattatagtcctaccaaaacaataaagttgtgtttaatagaaaaacatttatattgcttttgtatttaaatgtaagttaattaaaattaaaggtaatcctgtg

SEQ ID NO: 1887995 - DNA, 4001 bp, Homo sapiens
ttcctctgagggccagggcagggaaaactacatgaaaaatacttgcagaagtgatggaaatctatcttgatggtgaaaatatcaacagagttaaggaagcattggaagtatggaggaaatgggataagaactggtggttaaaaaaagccttaagctcaaatacttcacatcaaaatacagaaacaataaagtggtaaaaatgtttttttctgcatggttgttatatgacggttgaaatttttttaacaacttttcttttaaaatacataaatataatttaacaacttcatgaacagcttgagtcatcataacaaacagaatgtgtagggaaaatactgcctgtttccctaaaagaaaatgtaagtttcccctttgagaagaaaatctatttttcaaacaaaatgtcttggtgactacatttagcgggctaagaatcaaatctggttgtatttgcacaaaatttcagagaccatgcaaacaccctgaagagaacccttttttgggaaatatagccagctcatccatcttctcccttgcagcatacttcttgttcctcatttacagaaagccaataggtattttccggaattccacagatgaagcctgtgactttaagctgcccaacgtcaaactggaacctgtgatccacaacactctctttcactaatgtcctagtaaatggcctgactttgttaacctggactttcatgcttaagatatcaatcacattcccattccccaaaatttccaaaggcagattaccattactgagtctgaaccactcataagcattttctatgctgcgtcctctcagtctggagctgtaaaggaattcaaagatgactgagtattcacccctacttcaggaagacgacagtccccggataaaggctcttgtcttctccagggaatgtatctctgacccaccacacagtgcttaaaagaagactggtgacagtggagactcagattaattcattcagtgaataaatgaacactaaagtacaggacatggactctgagaagagaggttgctatagtcccacgtgttgctgaatgaaaagacctgagccttgtaccggtgtcagtctttaccacccaagtaagcaaaattagatgtgcccaggacttaaaacctatgatgttgcaggacaaaaacttacctgagacatggctaacgcgcactgcgctggaaccgtgtcctgaatagtgaccaggtcctggaaatgcagagctaaggagaaggaagaaaacttcaaagacgagattctcgaacccactgccacccattttcaaccatgttcctaacaaactccaaaaacgacagatttcactgtcaaaagaaaacagtttagcgtgcagctctggttcctaaaaatgtaactgggcttttttcaatgccccagtggcctactctgggatagaaccattcacacaaagagtaattttaataatgtcctctgtgtacacaaacgccaacacactgatcacgcgagcattcttgtaaggcacccgccacctccaaactcaggcccggacgccagcgctgacctgaacggatccctgggcctctggccattcagccgcccactcctccccggagcgcctctgagacggaccgccccgacgcaacacaaacctcataatggcccagcctccgcgtggcgctgggaaaaatactgcccaagaaaggagaaacggcgacgctgcccacccaggtctccctggagcccgccgacctgaagcagcggccgcaccgcgtatgcgcccgggtggtttctgggagtaggcgaggactcgcagtgcgcatgtgcagcccccacggccccgctcccagtgaccggaatgcagaggcgtacatggctaagagacgagctacctgggacacaaagtacgcgtgcgtattgacgccccgtagggcctcgacgcggagcctggtggagagggttccgctggtgactgagtacgtaggcgtgagttcggccgtgggggcgtggctttgtgcccgttggcggtgttgagaacgctgcgcctgcgcagagaatcaagcggttgccttctgagggctgaagcgtatatcagtaccaggttcagacttcgtgggaggctttaagagggggggaagggcctatgataatacattggcgtggacatgtgcgtcttaagtttgggaaagtgttatgagaggtggttgggaccaccgagcgtctgctttggtgtatctgatggccccattctccgtgaggttaggcccattctccgtgaggttatgtgatttgatatgtgaccctatatgcatctctgtgggtgtttggttgacacttgagctgtagagtgtgtctgctgtgtgactttttcttaattgtttaatctttatgagcttcagttgctcatgtgtgcacggaacaatatttcttagctaatagtgttgcgaggattaagtgctcataaatgtgcctggcacaaaataagcaatgaatggagaaactgtgcttcagtgcattatttagatcatgggcttttaggtcatttgattctactttgtcattgttttgagctatttaccaactcacattgtggatcactgatggcagttcaaattacttcttgtttacagaaaagtaaattggaggaggctcagcttacttccctcctccatctccatttgtgaggaggccagtttttgcctcttttgctgctgcatatcattttaattttaattttttttgttttgttaagaaacagcatctcactctattgccaacactgaagtgcagtggcaccatcatagctcactgcagccacgaccgcttgacatcctggattgaatctatcttcctgcctcagcctcctgattagctgggactacaggtgtgcaccaccatgcccggctaattttttaagtataggtgagatctcactatgttacccaggctggtctcaaactcgtggcctcaagcgatcctcccacattgacctcccaaagtgctgcgattacaggcatgagccactgcagccagccactttaatattcttgatctataaatgtgactttttttcggctcggggaagggttctcttatgagttggttttaatacgtcaccagtttttctcattaatgagttaagtaaaatcttcaatctgtgtattttgcctattagagtgccttgtaattttttcctgatagctgaatatgatgtacttggtaaaatgagccgcatgataggtctttagtaacatggtgataagatttggttgtgagaggggaagtgttctatggtctgcaaaaataatatataaacttaggcacattaaaattttaaagagtttaagcagatagcagttcatgaattgggcattgccagatcacatgcagcttagggcctctctgaagaggcatgagggaagggcttttacaggctgaactcagaaacaaggcaaagaaaatacttgattggttagagtagagccttatttggatcattccagtgggaagtcaatagtaggaggttaattggtggtttctgattggttaaggccagttacactgagttgggtttgggtttgcttaggttaagaattcaggctactggagccacctcggcctaatggcctcccaattaatggtttcaacaagtcttaatggtaaggtttctttttttttttttttttttttgagacagagtctcgctgtgtcacccaggctggagtgcaatggcacaatctcggctcactgcaagctccgcctcctgcctcagcttcccgagtagctgggactacaggcatccgccaccacacccagctaattttttgtatttttagtagagacggggtttcaccatgttagccaggatggtctcgatctctgacctcgtgatccgcccgcctcggcctcccaaaggtttcagtctcttatcctgagcccagggactatgaatttcacaagtccttccgagtaaaaccctttccccttaagtgggacagggtggcaagaggggac

SEQ ID NO: 1887996 - DNA, 4001 bp, Homo sapiens
gtcatcaaaacaagaaattagtttcctctgagggccagggcagggaaaactacatgaaaaatacttgcagaagtgatggaaatctatcttgatggtgaaaatatcaacagagttaaggaagcattggaagtatggaggaaatgggataagaactggtggttaaaaaaagccttaagctcaaatacttcacatcaaaatacagaaacaataaagtggtaaaaatgtttttttctgcatggttgttatatgacggttgaaatttttttaacaacttttcttttaaaatacataaatataatttaacaacttcatgaacagcttgagtcatcataacaaacagaatgtgtagggaaaatactgcctgtttccctaaaagaaaatgtaagtttcccctttgagaagaaaatctatttttcaaacaaaatgtcttggtgactacatttagcgggctaagaatcaaatctggttgtatttgcacaaaatttcagagaccatgcaaacaccctgaagagaacccttttttgggaaatatagccagctcatccatcttctcccttgcagcatacttcttgttcctcatttacagaaagccaataggtattttccggaattccacagatgaagcctgtgactttaagctgcccaacgtcaaactggaacctgtgatccacaacactctctttcactaatgtcctagtaaatggcctgactttgttaacctggactttcatgcttaagatatcaatcacattcccattccccaaaatttccaaaggcagattaccattactgagtctgaaccactcataagcattttctatgctgcgtcctctcagtctggagctgtaaaggaattcaaagatgactgagtattcacccctacttcaggaagacgacagtccccggataaaggctcttgtcttctccagggaatgtatctctgacccaccacacagtgcttaaaagaagactggtgacagtggagactcagattaattcattcagtgaataaatgaacactaaagtacaggacatggactctgagaagagaggttgctatagtcccacgtgttgctgaatgaaaagacctgagccttgtaccggtgtcagtctttaccacccaagtaagcaaaattagatgtgcccaggacttaaaacctatgatgttgcaggacaaaaacttacctgagacatggctaacgcgcactgcgctggaaccgtgtcctgaatagtgaccaggtcctggaaatgcagagctaaggagaaggaagaaaacttcaaagacgagattctcgaacccactgccacccattttcaaccatgttcctaacaaactccaaaaacgacagatttcactgtcaaaagaaaacagtttagcgtgcagctctggttcctaaaaatgtaactgggcttttttcaatgccccagtggcctactctgggatagaaccattcacacaaagagtaattttaataatgtcctctgtgtacacaaacgccaacacactgatcacgcgagcattcttgtaaggcacccgccacctccaaactcaggcccggacgccagcgctgacctgaacggatccctgggcctctggccattcagccgcccactcctccccggagcgcctctgagacggaccgccccgacgcaacacaaacctcataatggcccagcctccgcgtggcgctgggaaaaatactgcccaagaaaggagaaacggcgacgctgcccacccaggtctccctggagcccgccgacctgaagcagcggccgcaccgcgtatgcgcccgggtggtttctgggagtaggcgaggactcgcagtgcgcatgtgcagcccccacggccccgctcccagtgaccggaatgcagaggcgtacatggctaagagacgagctacctgggacacaaagtacgcgtgcgtattgacgccccgtagggcctcgacgcggagcctggtggagagggttccgctggtgactgagtacgtaggcgtgagttcggccgtgggggcgtggctttgtgcccgttggcggtgttgagaacgctgcgcctgcgcagagaatcaagcggttgccttctgagggctgaagcgtatatcagtaccaggttcagacttcgtgggaggctttaagagggggggaagggcctatgataatacattggcgtggacatgtgcgtcttaagtttgggaaagtgttatgagaggtggttgggaccaccgagcgtctgctttggtgtatctgatggccccattctccgtgaggttaggcccattctccgtgaggttatgtgatttgatatgtgaccctatatgcatctctgtgggtgtttggttgacacttgagctgtagagtgtgtctgctgtgtgactttttcttaattgtttaatctttatgagcttcagttgctcatgtgtgcacggaacaatatttcttagctaatagtgttgcgaggattaagtgctcataaatgtgcctggcacaaaataagcaatgaatggagaaactgtgcttcagtgcattatttagatcatgggcttttaggtcatttgattctactttgtcattgttttgagctatttaccaactcacattgtggatcactgatggcagttcaaattacttcttgtttacagaaaagtaaattggaggaggctcagcttacttccctcctccatctccatttgtgaggaggccagtttttgcctcttttgctgctgcatatcattttaattttaattttttttgttttgttaagaaacagcatctcactctattgccaacactgaagtgcagtggcaccatcatagctcactgcagccacgaccgcttgacatcctggattgaatctatcttcctgcctcagcctcctgattagctgggactacaggtgtgcaccaccatgcccggctaattttttaagtataggtgagatctcactatgttacccaggctggtctcaaactcgtggcctcaagcgatcctcccacattgacctcccaaagtgctgcgattacaggcatgagccactgcagccagccactttaatattcttgatctataaatgtgactttttttcggctcggggaagggttctcttatgagttggttttaatacgtcaccagtttttctcattaatgagttaagtaaaatcttcaatctgtgtattttgcctattagagtgccttgtaattttttcctgatagctgaatatgatgtacttggtaaaatgagccgcatgataggtctttagtaacatggtgataagatttggttgtgagaggggaagtgttctatggtctgcaaaaataatatataaacttaggcacattaaaattttaaagagtttaagcagatagcagttcatgaattgggcattgccagatcacatgcagcttagggcctctctgaagaggcatgagggaagggcttttacaggctgaactcagaaacaaggcaaagaaaatacttgattggttagagtagagccttatttggatcattccagtgggaagtcaatagtaggaggttaattggtggtttctgattggttaaggccagttacactgagttgggtttgggtttgcttaggttaagaattcaggctactggagccacctcggcctaatggcctcccaattaatggtttcaacaagtcttaatggtaaggtttctttttttttttttttttttttgagacagagtctcgctgtgtcacccaggctggagtgcaatggcacaatctcggctcactgcaagctccgcctcctgcctcagcttcccgagtagctgggactacaggcatccgccaccacacccagctaattttttgtatttttagtagagacggggtttcaccatgttagccaggatggtctcgatctctgacctcgtgatccgcccgcctcggcctcccaaaggtttcagtctcttatcctgagcccagggactatgaatttcacaagtccttccgagtaaaaccctttccccttaagtg

SEQ ID NO: 1887997 - DNA, 4001 bp, Homo sapiens; identical to SEQ ID NO: 1561444

SEQ ID NO: 1887998 - DNA, 4001 bp, Homo sapiens
tagagagatggggttttgctgtgtagcccaggcttgtcttaaactcctggccttaaacgatcctaccatcttggcctggcagatattttaggccaggagttcgagatcagcctggccaacctggtgaaatcgttctctactaaaaatacaaaaattagctgggcgtggtggcaggcgcctgtaatcccagctactccagaggctgaggcaggagaattgcttgaacctgggaggtggaggttgcggtgagctgagatcacaccactgcactccagcctggtctgatccagtgagatctgtcgcaagcaagcaagcaagcaagaaagaaaaagaaaacccaatggaatcagcaggttctaaaaaataaagaatgaagaaaaaaaggcctacagaaactctgactgaatggaagggatagaccatgccattcattggcagctttatcaatatggaagaatcatggaaaggctctaggaacatgaggagaggcatacaaacaagctttatatttatatctaaaaagtaaagcagaggttcctcttcaaagacgttccttcacatttaattaggaataaatagtaacttctcttagaagcaaaatttattcaaagacctgtgctaacattctcaagtatctgtgagccgtgataaagaaatcaatgtactttatattcttagctcccacagtttagtctacatatttgccctggcatgcttgtactggtccaggcaagcattagggcatagcctgttctttttccttatttgaagatgttttgacccttctcagcattccacaagttacttcctccttcctttgttctcctctacccttgcctcttttaaaaagttataagttgctagccagaacgtgaggtcccattccagccagtggaaactggacacagcagtaggttggaagcatcaggttataaatgaccctatctcctttgtttggtgtactctcgtggcaaaactgctggtgagtataccgtttctgcaggaagtaaaaatggccttgctgagtaaattaaatttatgttcaagtgctaatttctttatggcaccagggaacaagcattttgaacatgtatatttatatattttttatatatttatatatttatatgtatttatacatatatgtttatatatatatatatagagagagagagagagagagagacagggtcttgctactttgcccaggctggtctcaaactcttggacttgtagaaaatgaaataaatacaggttcctcttcaaagggactttcctcccagtctgattgaaataaatagtaatccctcttagaagccaaattttctcaaagacctgtggtaatattgttaaattctgccagccgtaataaagaaatcaatagactctgtttttagctcccacattttagcctagatatttgccctggcatgcctgaactggtccaagcaactattaggtcatggcctattcctttccctatttagaagtgtttttgcctctctcaacagtccacaagttacttcctctcttcctttgttctcctctgccattgcctcttttgggaagttctaagttgctagccaatccagtgaagtacaggaaggtgaggtcccgttccagccaatggaagctggacacagcagaaggatggacacttcaagtttaaaaaaaccctgtctcctttgttaatgtgtgctctggtggcaagactgccagccagtggcacccattctgcagaaagtaaaactagccttgctgagatcctttgtctcagtgttgattttgtgacaccaagcgagcacccattcccagcagactcaagctatttacctaccttagcctcccaaagtgcaggaattacaggcgtgagccactgcgctcgcccgataaaagctttggaggagcatcccccggggatgcgtcccatccctcatccccgcccttccagcccgaccggccacctgaaccaccggctaggccgggtccctcctctaaatcaccccccgagtacgagcccctcccctcgcccacagttccgtctggaggcccggttctaacctcacctttttctctggacctagttctgcatccccctccctgagccaaccccaggccctttctgcacccacccgagaggaaactagaatttctgtgttctacccggtcctacgtggctgaaactggagcccacgagcctcgcccggccagagtgttgaagcggaagtgacgtcagcgcaccaccgccatcttttccggcgctggctcctctccgtcagtgcggtttcgcctttatggtggtggagtctgcccaggctgtggtgagttccacctccttggcggtcccggggatagcagggggcggcaaaggaatgattgcgcgctgtcgcctaggagcctctcagatccgcttcacttcactcgcttctccagggactatcagtcctccctgtgcgtccagttcggagaggctgcgcgctctctcggctcactgcaacctctgcaacctctgcctccagggtcaagcagttctcctgcctcagccttccgagtacctgggattacaggcaagtgccaccacgcccggctactttttctatctttagtagagatggttttgccatgttggccaggctggtcttgaactcctgaccttaggtgatctgtctgcctcggtcccccaaagtgctgggattataggtgtgagccactgcacccggccgacttttgaaaattttagattttgttcttaagtcatcttaggtacgtaatgaagttatcaataacacacgtggctggtgactactgaattgttctgtgcaggtctgcactgtcttctggtcatatggcgggggggtaacaccatatacaggagatcaggctctagggacaagtatcagaccgactactagggttgtttgagtgtaggtttttttcagtattaaatagaagtaatgggccaggcatcgtggcttatgcttattatcccagcactttgggaggccaagtcaggaggattgtttgagcccaggagtttgagactagcctaggcaatctggtgaaaacttgtctctactaaaactacaaaaaattagccggacccagtggtgtgcacctgtagtcccagctagttggggggctgaagtgggagaatcacttaaggccaggagttcaagaccagcctggccaatatggcgaaactgcgtctctactaaaaatgcaaaaattagccaggcatggtagtgcatacctgaaatcccagctactcgggaggctgaggcctgataatcgcttgcacctgggaggcagaggttgcaatgagttgagatcatgccactgcattccagcctgggcaacagagtgagactctgtctcaaaataataataataataatgagtgatgatacgcacctatggtcccagctattcaggaggctgaagtgggaggatcacttgagcccgggaagtctaggctacagagagttgtgttagtgccattggatttcaacctgggcaacagagtgagaccctgtctcgatagatagatagatagatagataggatagatatagatagatagatatagatagatatatagatagatagatatagatagataaatatagatagatatagatagatagaggtaatgatagctactgggaaggatggctatgataattaactgagcatgtatatataaagctactagagctacttctgacatatcagtcctcagtaaatgtcagttactgttattaatacttttgttactgagtgacggtactgagtgggcaatttttggtggccttcacatctgtcacctgcagagacaaagctcaggcataatgtttgatgactgatgtttcatgcttgttgtttgatgattgatatgaacaggaccgcaaataaccctgtacaaagaggaatggagattgcctctatccacctagattcataagctggcctgaggtgatcttggcatcaaggaagggatgcac

SEQ ID NO: 1887999 - DNA, 4001 bp, Homo sapiens
ccatgagctgactggccccctttcgacctgggcctcccagggccctgtcctggtctccaagaccagggccttcggcttctcagcattgctgtccagaaaaggcgggaacaaggacaaagtcaagcccgatgtgaagcagaggtggcaacacctaaaactggcatcccatgggggcagaaaatgtggagagagtgtctcagaggccttctggggtgaatccaagcccaaaagggatatccaggcatgctggcgagggccactgaggatacccccaagaaagcgaagcacaagcaaagcacacctgaaaccataggagggcctgtgccggagtccaagcctcctccagggattcctgccagaggagccaagaggatcctgcaaagtgatccagcacccacaccgggatcacaacccaccaccgggtctacacccagctaacccccagtcccttttgctccgtgaaatccctggcaacgaaaaggtgcagtgctgagaggcagtcccagccaggaacagagcaatgggagacccctcaacaatgagaaaacaccagcagatgagatgaaacatagccttcattagaaggcaaaggccagctacggctggctacctctcattctatgtgaatcatgcagccatctgatgcaatggggagaccaagagtttccttattggggaaagctacgggcacccacggttccaagagcatcacagctacccagtcattaagaaatgtgagtgttgagaaggaaacactcatcacctacgtccccgccaaggtggtcctggacgaactgggaaacatttgctgtgaaggacgttctggaggactgtgagccagaccaaggaaaacctgggccgacgagaatcagggaaggcaagaaaagagggagaacagagtagaggccgcagcccaggcaggatcaatccatcccactcccatgtgcctcggggaaccagggtccaacaggggacctggccagaaaggcgacagtcttcggtccaaaggttctccgaacactcgtgtcttctatcgccagcacagcgccatggtgtggacaggttgtacagtgaagaggaaaaggggatggcgttggaaacagtttctttgacatctgtctgcacctgttctgcaggtgaaggtgcgagacctcctccacacctcagcggattgtatcttcacccccatctgaccttttttctgcacacatcctttaatccagaatgaaatctgaagaggatgaaggagtgcccgcctcaggtcctgaagctgcgactccgccagccaccgaattagaagtgggctcaagggggtactgaggacaggacagctagggtccgtccagccttgggtgtgccgcaggaccatgggcccctggaggaatttgttcttggttgtcgtgtgctggtcttctttctggaagagtgggcggcttgggaggggaggtgatttggacgtttgcgggtcgcagccagccccccacttcaccgaggctttaggaaccaagagcgaaacaaagaacgcttgccccgcaacccaagcccggccaaagagacgggcgcatcagagcgtaggcgaactacagagaaaccgcgcttcactgcacgagccacatttctttcaccgcacaccacacacacactcacacgcacacacagaaagacacacggaaacatccaacagtcgcacagaaacacacacagccaggcagctcctgaggctgcgcggttctgctctctgccaggaaacccctccggaaagagagcgccccggggaacacaggcaggccgtacctcgaaatcccagcggggacacctgtcagggagacgcaccctcacaccgcccatgcatgcccgacgcatctttgggatccttagggatcacgtggtgcttccttgaatctccgcttgaggtttcttcaggcaggttcggccttgcccgactcctaggatcgcaggaccatggcgacgatcccgcggagaggggacgcactgccacagacgcctgggggccaagccgctggggccagtcccccggcaacggtggcggttactgtgacgcgagtcccccctcagcgctagcgcctggtgatcgcgcctggtacgtgcactttcgcgttcccggtttgtgggccgcattgtcagggctctcaggctgcagcccaataggaaaacagtggaggccgtgcaggcggcggttcggggaaggagactgcatgcgacaagcagcgcaggaccctgactgtcgtgacctcagtgcctccttgagccgacctcgtgtttgggtccgggtgtaggaggaggtgcttcagaccgtgaggtgggcactcgggattgctcttctgatttgattctggactggaatcaaattggaattgacccggaattgggtcccacggggctggggaaccaatctggtgaggtgtggaggggtcgctggtgcacagaaacataccggataccctcggggtgggtgtcagcagaacattcctcggctccatgagctgactgcctccctttgatctgggcctcccagggctcttcctgcgtctccaagctcaggggctcctgcttctcagcactgctgtctggaaaaggcgggaacgaggactaaggcaagcccagtgtggggcagagatggcaacacctggaactagcttttcatgggggcagataatgtggagagtgtcccaattacatctccctttattctatcccatactactaaaccccaccagctatttgcctacaaactgtgtatcagtcaggacatcaggacaccaagataaaggactagagtttggtaatcaactactggctcctccagcagctcagaatgtggcctgtatgcatcacttcacttaattcattcaagaaatgctgactgagttcctgctgtgtgttggacactttcttagaagtgggacacactgcagtgtgtgggacaaaggctgggccgctcattgcttatgttctagttgaagagagagtcaatcaacaacattctactttcagacattgataaatgctgtcatgaaaagacaaggaacatgaaaaggtaagaaaagggatggagagagatgggatgaggggtgcctgggcagacaatgcaatgatctggcaaaagagtaggacaatcatgagactgcatgtgttccagtttctgctgctgtaaaacagcatccacaggttacatctttactattctgttacatacatactattatttaaataaaaaatagtactagttaactgtgaaaattgcaattaatagggcagattaaacaaatcctttaaatttaaacaaatgttttatggttttttatcctctgatacattgtttcaactttaaaaaaccctctttatttgatatttaaactctatattaatgtatattcttaagatacataaatttaagatttttttcgagacagggtctcattctgtcacacagtctggagtgctgtggtgcaattatggttcactgcagactccacctctccaggctcagataatcctcctgcctcagactcctgagtatctgggaccacaggtgtgcatcaccacacccagctaatttcttgtatttttttgttgggatggggttttgcgatgttgcccaggctggtctcaaactcctgggctcaagtgatctgcctgccttggtgtctcaaagtgttgggatcacaggcgtgagccaccacatccagcctaatttaagatttttaaaaagcagaatgtaaatatggtcatgcattgtgtaattctgtggatactttctgagtaatgcatggttaggtgacttcatcattatgtgaacattatagagtgtacatacacaaacctagatgatgtagcctgatggtacagcctatcacttcgaggctacaaatccaaattgcctggatactgtaaacaattatactcaatggtatttgtgtatctaaacatgtctaaacatagaaagggtacagtaaaaatatggtataaaagataagaaa

SEQ ID NO: 1888000 - DNA, 4001 bp, Homo sapiens; identical to SEQ ID NO: 1561435

SEQ ID NO: 1888001 - DNA, 4001 bp, Homo sapiens; identical to SEQ ID NO: 1561478

SEQ ID NO: 1888002 - DNA, 4001 bp, Homo sapiens
tgtggggctggaccctacaaactctgcatgtgctttggcacaggaatgtgtactgggaagtggctgacaaaagacctatggattccatggaatggagaggctagctcagagcattctcatactcttaaaaggaagaaactggaagccaccctctaagacgaccctgaatgatccctgcctcctagtacttatactcttgtgtagcctccacctacttagactcacagctgattttgtgaccaagagtataatggtgtatgacttcagaggcttggttcagagtcagaagtggccatttcatcatcctctaaatttctctttggcagattaatgaatgtgagaaagtaaaaatggtatagaagaaagttagcctgagagatggctggctttgtacctgtttggtctttttccttcctttcctccataagcaaatactgacgcatgtacatatagacacactcaacacagtgggatgttaaagggaaactagagccactcgccccttcccaagatcagagaacataggaaagatgatgactttttgcatctaccctctcctcttgaactcgcaacactgtcttgaaccacaaataaggtcaagtaggataaatctacaactgtctcctcaactgtccgctcacaagtgtgaaattcaaccatccttgctgaagttgtcttttaatatcagtaatcagcaataaccaacctctgagctttgcttatattattaaatcattttatttgaccctcaggacaaagctgcaagcccagcattacattcttccttttatggacaaaaaaaaaaaaacaaaacaaaaccgagataggcacgaagaaactaataaatggctgaaatgctatttgaatccacatctgtctaattctaaaagtgtgctttccaccacatcaccgcacctacaaggaaaatgcagcctctaccctctcctgaagaatgtgtaaagaggcaatatggtgtgttttggaaaaagcatctttgcagaaagaaagcattagcttcagtcatattagcatccttatccagcagcagtagcattattttacatatcagttactcctccccaacaactcaatgaattagatgccacaatcatcctcactttcaaatgtggagaccgaggcacatctctaagactggagttcaggcattctggctccagtcttagagatggttaagggttcacactcttaaccatttattacaccatagagctcaccaggtttgagggaaacaggatcaaatcaaaagagtcactcaggactccagtcctcactcaaggacaaactgttccacctcggacagggagagtttccgcattctgagacccagcataacaggtcctgaccggcatctggcactcggactcccaatcatactggatcacactggctcgggatgtgtaaagtccagggcttctcacatttgatgacaccaaagccgcctaaaaacaagagagaattaacaactacctacggcggtctgatatttgcccaagagatgccgccccataaaactcctttacatctttataacgtttttattttgcgttctccttcataacccacatttaactcaccatagatgtaatgtttaaaattagttaccagataaactcttacgcttccaaactttaaggttccttcgaaaccttctggtaaaactgttgttccacggaaatgggaacgtaacggatgaggcaatcttccacagccgcacacagttgtgtatccaccgctaaacggtcccagtcatacattcaacgacccacgcggagtcagaagctaccaccacacactgtcaaaatcacgcacacacagtgacggccccttgcccactcggtcactcgcccacaatctctcgctagagaatcacacgcagatagcacacccagcaccacagaccccaggaagcaacccagggactcgaacacacgaacagcactcctccgcgcactgcgcaggcacgcctgcgtccggctcaccctgaaacatcgcgagatccggcttcaaggccgggctgctgcctttacgcctaaagactatgtttcccggaagacactgcggcgccggccctatcatggcgcagcatcggtgtgctttgtgcgtctgcgccatcttccggctgcgcacggcgaatccaccggtaccgtggtggaagcgcgccctgggctgccgggggcgcggccgcggtggcacttggacccgaggaggcggcaggtgagaggttccggagctttccaggcgctctggggtccagcaggagctggtgcccgggccggttgggtctcaggcctgagaagaacgcagacgtctcgcctcatcgtcgctctgtggctttaccggcgtgagactacatttcccgccggccctcgcggcgtgcgctttctggcgccccctttctgcttccagcctcatagcccaggtgcatggaccccttaggtgggtgcgcaggggtctccgaccccctgaaattgcggatgttttgcattcactgttatgcgtgcctttttttttttttaatctgagaggaaatcttgtttcatgaggttctcagagagttacaagaccccagaagacttagaaccgctagtttagaaaaacttatacttgggaacattttatatgttcaaattctatgtccagcaatggggaaacacttgagtggatcacaggccatcctttgtaaataggatatcgtgcagttaatacaaataatgcttataaaagtggtcataataaggaaaagctgcctattacatcatattaagcaacattcataattatttcacttacacgttacttagaaccaaatgtttgtaatgcagtaggcaccttatatactcctttacagagtacttcttgtttaacagtgagctcaagaactggttaaatgacaacactgcgaatacttgggtgttttttcttccaatttttttgttttgttttgtttttagcctgtgtgttagtgagtttgacttctttttgctgaatgttctcaaaggattcagtagttaatatctttgcttgtcagtttttgatagtcatttttgatagtcacttggcatcccattatatggctgtgccaaaaatgattcaacctcttggctacttgtggacttgcctacttacgtactaattttcagttctcctatttagcaaatattattggacatgcagctttgtgcactgctgtgtctctatggaaggacacatttatgtgctgataatggagcactgggcgtgctgtgtgtaatttgtctcttactgttccttccaactctatcccatttgttgatgcaaggcatgctccatgaagtggcatgcacaaagcctcagtttgggctgtagagctttttgtatatttggcggttgggaaaagagccaggtagactttcaaaggtgttatatttgctgcaggagagagttaaatggcctagtcctggaaaggctttattctaggctggggctatgcaaatgatgcaggccttctatgctccctggcttgagggaagccctccttgtccttgaggtaacatgtgggtctcagtcactagaacagccctcagcatccctgtcttagacttgcatttgcagcaaaacagaaccactggatgtttaggggaaatgggagggaaaggaccactggttcccctttgccttgcagcagctaaagctggtttcctggggttgggtgaggatccctttgcctccccctccttctcattttcttggtgggcagagggcaagcaggtggggacttgtaacttggcattctaggaactgtgaggcaagcctagcctctcatgtttgctctttcctcccccagctctaccgtcgcaggactctgcccttccccaagagaggaaccagaaggaggacctatcagcccttgaaattctaaaagtcatgtcccttgtgagtttttaaatcccataaatatttgctttccttatcttgaaactttccacctgggttccatccag

SEQ ID NO: 1888003 - DNA, 4001 bp, Homo sapiens; identical to SEQ ID NO: 1561491

SEQ ID NO: 1888004 - DNA, 4001 bp, Homo sapiens; identical to SEQ ID NO: 1561511

SEQ ID NO: 1888005 - DNA, 4001 bp, Homo sapiens; identical to SEQ ID NO: 1561511

SEQ ID NO: 1888006 - DNA, 4001 bp, Homo sapiens
tacttttaacctatttatgctttcatatttaaagtgggtgtttagtgggcaacatacagttgggccttccttttttatccagttaacaatctctgtctttttactggggtatttagatcatttacgttcaatgtattgatgtttttaggtttaaattactaacttactatttgttgtttattctatgtcttctttgttctccttttcttctttttctgctttcccttagagtagctgagtgtgtttatattacatattgtctcctttgttggcttattaactgtaaatccttgtcatttgattccttgagattttatagcatacatcattgtgagggattgcatatttatgtcctctccaaatttacatgttgaagtcctaatccctaagggatggcattaggaagtgtgacctttggaaggtaattacatcttgaaagtggaaccctcatgatgagattatgtgtcttatgagacaacacagaagagagtttgttttctctttctctgctctttgccatgtgaagacagaatgagatgaccatgcataaaccaggaaatggactctcactggacactagacctgccaacaccttgattgtgttttagagtccagttctagagactcctcagcctctggaacgtgagaaatgaatgtttgttaaggcagtcagtcagtctatggtgtattttttctagtagcctgaactgactgaaagaaaatcatgaacttatcattctaacttcaaggacattatatcacttactgtataataaaataatcttacagtagtatatctctatttcctgtgaccagatcagtgtcagtgaagagattgtcttctagatgctactggaatacatatttgaggtatgggtaatcttgattttacatgataaattcattctagcattccaaactccatttatctttgggtactttataatatatgaggaaatttctggcatttaaacttcatttagtgtaggcaaattttgagtccaagtttcagtcaaccagccaagtcaacagttagcaccactcaatttagctcacacactgaaattgccagtagaatgtaatctccatgaatgagagtctttgtgcctgaatttccaactgttgtattcccagcacgcacaacagtgtttgacacattaggcattttataaacattcgctggataaatgagtgaatgatcaatccctttaaaggttctctgaggctggttataaaattatagggagcaggtttggtgctagaattcatcagttaattgatcagctgagtttcagtattgaacagaatcatctccccttcagagttttgatttcaagttgctcccaccttcctggatgtaaaggcttgttctgcctttggcttttccagggtgagagagccctgttttcgtgttggttccccactttgtcaactgctgatcaactgtgttctccattctccacaccaattataaccaaagctttaacacgcggttgttttatccattctatgactgactccttcctctgaggctacatctgatgtagatgtaaagatacttcttaggcagttctcaaaggctgctttctccagccagatgcatcctcaggagtaataacccctccgattgttgctcaggtccctccctcttgaaattcctgtaagactgccgcgccacatggtttctttccattcttcttaggatcaaagtgcctaaatgtctgtgaccatctctacccatcctgtagacagatcagggcaggcttgagcctttgagaaactaagcagtttatgtagcgcccctggctaatgttgcaaagccaagatctagcagttcacgtggactggaaaaagggtgaaatgggtcgttttcaattgcttttcatcgtcagaacctacctgtcttaaggcgcgaaaagagggactccgcctgctctacggcagtagggttgaaaatggctgctcccagcaagcgtcccctgggcgcagacatattgcatcataaagggacggctggtgccgtattccgtgtctccggaaagacgcagtatggccctcgccggccgccatccccgaaacttgcgagtgtcgcgtctgcagtgtgtggggttcgcggggcggcgggtagaggcgagtgtttagagacttcgggtccctgactcgcctccagcagtggagacaggtcatcggtctggtctgcgtgggcttctgggaatgtttcaggggcagggagagcgcgcttttttttttctgttgttcgctagcgcgtgaggtccgtgttgcggggagctctcggggagtcctcgctcggagttcgtttcgcagtcgtgttggagttcccagagtctgggagcccatggtctccgcattggaaccagtgcttgggaggtcttcgttgcacagtagcgctagggcgtcgtggtggggaagcgaatcgtgtcagtgttggagactgctctgggcagttcgtgttcattgcttatcacatgcgtacttaaaaaggggtctgctggtccccttgcttccctgctgctgtatattctgtagaaaatgggttttcaggttcattgcgacccaagtaataacatccccatcattttaaatactcctccagaaaataactctggtttagtgtatttcatgtttaatgttgggatcaggtgtctaggtattggtataattttattcgtctttaataacatcttgtcaacttcgtattcccatattacatgctctttgagagttttttaaattgctgcagtttcatcaagtggttgctttaatttgggtagaattgatgtagatctagatacaacactttcaggaacatgtgatggatttctattaacccaatatttttatttgtttgactatctgtagtgtttttccatacgtatcttggacatttctggttatgcttatttctacatagttaatactttttgttgtaaatcgtgactttttttttgcataagacccctccccctttccttttttgttcctaattttacttagttgacaagaacagaagttaaaaatatatatgtttattctgtcacttcattgtactcatgtcattacatataacttataaattgacgtcttttttctagttgagcatttttgtcatctgcaaataattttagccaggtggcaagtgtatggactgtggagtaagaagtacctgcctctgcctctgacttgggtacgttaatctctgagtcagtttccttatttgtggaaaaaagctgtcatagtttctttttcatggaatcattatgaagattaagtgagcaaatgttctttaagtatgttcaaagtgtagtactaggtacgtagtatggtctgaataaataattactgtgatttatcaagtttttatttctctttcctaagggcttttgaccattacaattattttcatttatttttttctctttaaaattttctttgatttgtgttgctctatttcccaatttcatgtattcctgagggaataaaccatacttgtcaataatggtttgttcttttaatatgagactggattttatttgctaaaattttatttaatatttttgcatcaaaaaatgaaaagatatcttggattagcttcggaataatccataatccattgctggagagggactgaatggtggtatagataaaacaaaattagatgtgagttcgtcattcttgaagtcacatgatgaatatgtggaatttgagtatactgttcttttgcttgaaatttttcatagtagaaagttaaaaaatttttttgcctatacatttataagagaaattggtctcttaagtttttttcaagtgattatacttgaaaatcaccaggttaaaaaaatagaataatgtagcatcccagaagccctcatcttctctctcctctccaaaggtaattattatcttaaaaacatcatagatgtgcttggttgtcatctttatataaatgaaatcctaaggtacacattcttttgtggctggct

SEQ ID NO: 1888007 - DNA, 4001 bp, Homo sapiens; identical to SEQ ID NO: 1561518

SEQ ID NO: 1888008 - DNA, 4001 bp, Homo sapiens
ggctctgggacaaactgtcttagaaaactcatgggtgtcttgggagatagttgctttattcggagaatgggcacaacagagcctgatcaggagccaagacatccgacccacacactctggtttctctgaactaggacagtctgaggcataaagctttttcccagattttcgcactaacatgcccctaaaacagcagaaaggatgacatactttcttgggaggtggtttaaagaaaacaaagaaactgccaagtgacagatttatcctaagatttcttggatctcttgaccacaccccttattctagtattaccaggtatttagaacaatctccagtctagaaagaaacttgctccaaggaacaactcagagaacggcttacaggattaaagaaaaccttaaatggaaaaattcacttttgaccagggacaacaatcagtaagtgctagctgctagtcacagaggtaatggtaaaagtcctaatagtagtatctgttagcttttatttttattattgctactacctaatcacagaaatgggaaaccaaaactagttcctcacacattctccctactacctagtccccaaaacttgctcagagtcacctgggaagaaagaaatcacaggccctgggttcccctcacacatatacccacctatgcaactacaaaaactgggtctcaacacacaggcgggtacacacacacagagtcaaaaacactggctttccttggccggtcgcggtggctcacgcctgtaatcccagcactttgggaggccgaggcgggcggatcacgaggtcaagagcccacatggtgaaaccccgaatctactaaaaatacaaaaaacttagccgggcgtggtggcgggcgcctgtagtcccagctactagggaggatgaggcagaagaatggcttgaacctggaggcggaggttgcagtgagccgagatcgcgccactgcactccagcctgggcgacagagcgagactccgtcccaaatcaatcaatcaatcaatcaatcactggcttcccacacacacacaacactcatccacaaaaactggctacggctcgaaaccttagtcggatagtattttaggctttatgggccacaagatctctgctgcaagtactgaaccctgccattgtgcaaaagcagtcatagaatagacgtaaatatacacaagtatacatattcaaaatgtgtggttccccacagagacgtacacaccgcaaaaactgggctctagagtcaacagtaaatagttcaggctttgtggggccacacagtacctgttcccacctactcaactctgcccttccgcagaagtggatgcagaagctaaacaaatgtccagaacatacacacatattcaaaatcagtgccccccgccacgtacaaaaccacaaaaatcgcctcagagacacacgtataagaaaacacaaaggttcgtcctcacacatgttcagggtaacacaatgtgggtctcacctacacaaacgcgcgatcaaaacccgggacccgcacgcccagatgaccgggacgaggccatacttcacatcttctctcacagactcacaattacgcaacggtcacctcaaacgactttatggcggacactcccggaccttccgctgtccgcccctcctcgtcccttctccccgccggggtgagcctcatccacccagtctcaaccccgacgcagtcagtctcactgccagcccgccggctacgcaggcgcaacaccgcatggaacagcccccagggcgtgcaggggccgttgggaaatgtagtccgagcgccacgcaaaggactgtgggcctcttcgcaaaacgtgcaggtgagtccccactgttggccaaaagaaacatccctccgctgctctcccgggtcagttcatctccgacccggacagagcagaaccagcgcagcccaagccttcttcacctcacgttctgggtgggactttccacagcctcgctgcaccccggtggattctggaggtcgcaggatgactgcgtagtgcgcacgcgcgggtgggcggtgtccgcctccgcgggtgaggccggctccaaacctcgtgaatgtgggggcgaaggacgctggctggctggaggcaataagccctcacacgggaacgtgtggttgtgggagcggggaaggcggcgaattggggaggttgggtttggttaaagagctcgaggaagggcctcagtgtccacacgtgatctcctgagaggatgaaaagcagggccaggcgccagtcccctaggagaccggtgtgcgtgccagcctcgggggtgtgcgcaggcgcgggacctcgcgcgtccgcctgcaccaatcgtgcgaacgcgcttgtgcgtgtggcgctgaggggtcggggcctcaggccggggctggtggtactgtccccgagaggcgggtgagcgcacgccgcgtggccttgtttgggggcggggccacgcgcccgcatgcgtggtgcgtgtgtgaaggggggtgcagcgcgcggtcccggggtcccggaggggagtgcgcaggcgctgagtccctgctcggctgtctcggtggtcgccgccggggtctgagcccgggaagaccgaggtaagggggctggcgagagtgtgggtgtgtctgagggcgtgggcggcgcgcccgccactgcgtggacgttcctgccaaggcgcgcgtgggtttgcgcatccacgatggcgtgggcgtctgcgcgggtgcttgcgtgggcggtgggctcgcgcctgcgtgggttctcggcccgccacggcgtggggtttgcgcccttcgctgctgtggttctcggggcttgtgcgcccaagtgtgaagttggcgccgcgtgtgaggcgagccgtgtgtgcctgtgtgtgagggagctatgtcgggaccgcggatgtgtatcgctgcgtgacccacgcgaaggaaacaatggagccattgggaagccgggagtgggtgtgtgacgctgactgtgaagatttgtgtttctggagtgtgtgcgtgtgtcagtgtcaggctgatgtgggcgtttattgtagccttgggttactgtgtgacttgcctgggcgtctgtctgccacttagcgtcagtggctttgcggttatgagtgtgtgactgtgcctttctggtgtatatctcactgtaaccatggaaatggaggcccacaggggaagaattcttagcagctctaagatgtgatgggctgccctggaaatctgtggaactgtttaattgtgcatgactttcctccttggtaaaatagcatattaatagcacctgcctgggtgttattgggaagattaaatgggatgacgtagctgaaacaccctgcacagagcttgtcacatactaatcaccgtgtttaggtgttggttatggtgctggtggtcgtttttctttgaccctatacagaggcagaggtagtggtgaatactggaggactttgcatctctgagcttcggactgggctatctttgtccacataccagggcatctgaccatctccagttgagcagtggtgcgctgcccccgccaaccacctgcgtcgtcagttttctgcatgtgtacatttgagtggaggacagagccctccactgacgctaagtatggttgtgtccccttcctaccaaggtagcttggaaaaataagagcatggactgtggcgccccgctgtctggtgttgactcctggtttcaccactggctggctgtgtgactgagagagcttacttaagtccaccactcctcggttcacttgtaaaacagtagtaataacagaaccaacctcaggtttatggtgagcataagtagaacttggcacaaggaagtgccacatcaatgatcatcgttttattattagcataataaccgcaggcgtcccacacctggagaataaaatccataggtagaaatgcaaaaggatgagccccagagtaagggttgcaggtccagaggtaaaataacttggacgtctagatcagggcttaggtt

SEQ ID NO: 1888009 - DNA, 4001 bp, Homo sapiens
aggaggcggagcttgcagtgagcagagatcacgccactgcactccagcctgggcgacagagcaagacactgtctcaaaaaaaaaaaaaaaagattccagatactctggagctgtcataggatcaggtatttaatttatgcctgtaattcccatgggttcctggggcagggggggaagtggtggggagtcctgaggtgagagtgagggaaggtctgaccaaatccaagaccaggactagattctggacctgggctctgggacaaactgtcttagaaaactcatgggtgtcttgggagatagttgctttattcggagaatgggcacaacagagcctgatcaggagccaagacatccgacccacacactctggtttctctgaactaggacagtctgaggcataaagctttttcccagattttcgcactaacatgcccctaaaacagcagaaaggatgacatactttcttgggaggtggtttaaagaaaacaaagaaactgccaagtgacagatttatcctaagatttcttggatctcttgaccacaccccttattctagtattaccaggtatttagaacaatctccagtctagaaagaaacttgctccaaggaacaactcagagaacggcttacaggattaaagaaaaccttaaatggaaaaattcacttttgaccagggacaacaatcagtaagtgctagctgctagtcacagaggtaatggtaaaagtcctaatagtagtatctgttagcttttatttttattattgctactacctaatcacagaaatgggaaaccaaaactagttcctcacacattctccctactacctagtccccaaaacttgctcagagtcacctgggaagaaagaaatcacaggccctgggttcccctcacacatatacccacctatgcaactacaaaaactgggtctcaacacacaggcgggtacacacacacagagtcaaaaacactggctttccttggccggtcgcggtggctcacgcctgtaatcccagcactttgggaggccgaggcgggcggatcacgaggtcaagagcccacatggtgaaaccccgaatctactaaaaatacaaaaaacttagccgggcgtggtggcgggcgcctgtagtcccagctactagggaggatgaggcagaagaatggcttgaacctggaggcggaggttgcagtgagccgagatcgcgccactgcactccagcctgggcgacagagcgagactccgtcccaaatcaatcaatcaatcaatcaatcactggcttcccacacacacacaacactcatccacaaaaactggctacggctcgaaaccttagtcggatagtattttaggctttatgggccacaagatctctgctgcaagtactgaaccctgccattgtgcaaaagcagtcatagaatagacgtaaatatacacaagtatacatattcaaaatgtgtggttccccacagagacgtacacaccgcaaaaactgggctctagagtcaacagtaaatagttcaggctttgtggggccacacagtacctgttcccacctactcaactctgcccttccgcagaagtggatgcagaagctaaacaaatgtccagaacatacacacatattcaaaatcagtgccccccgccacgtacaaaaccacaaaaatcgcctcagagacacacgtataagaaaacacaaaggttcgtcctcacacatgttcagggtaacacaatgtgggtctcacctacacaaacgcgcgatcaaaacccgggacccgcacgcccagatgaccgggacgaggccatacttcacatcttctctcacagactcacaattacgcaacggtcacctcaaacgactttatggcggacactcccggaccttccgctgtccgcccctcctcgtcccttctccccgccggggtgagcctcatccacccagtctcaaccccgacgcagtcagtctcactgccagcccgccggctacgcaggcgcaacaccgcatggaacagcccccagggcgtgcaggggccgttgggaaatgtagtccgagcgccacgcaaaggactgtgggcctcttcgcaaaacgtgcaggtgagtccccactgttggccaaaagaaacatccctccgctgctctcccgggtcagttcatctccgacccggacagagcagaaccagcgcagcccaagccttcttcacctcacgttctgggtgggactttccacagcctcgctgcaccccggtggattctggaggtcgcaggatgactgcgtagtgcgcacgcgcgggtgggcggtgtccgcctccgcgggtgaggccggctccaaacctcgtgaatgtgggggcgaaggacgctggctggctggaggcaataagccctcacacgggaacgtgtggttgtgggagcggggaaggcggcgaattggggaggttgggtttggttaaagagctcgaggaagggcctcagtgtccacacgtgatctcctgagaggatgaaaagcagggccaggcgccagtcccctaggagaccggtgtgcgtgccagcctcgggggtgtgcgcaggcgcgggacctcgcgcgtccgcctgcaccaatcgtgcgaacgcgcttgtgcgtgtggcgctgaggggtcggggcctcaggccggggctggtggtactgtccccgagaggcgggtgagcgcacgccgcgtggccttgtttgggggcggggccacgcgcccgcatgcgtggtgcgtgtgtgaaggggggtgcagcgcgcggtcccggggtcccggaggggagtgcgcaggcgctgagtccctgctcggctgtctcggtggtcgccgccggggtctgagcccgggaagaccgaggtaagggggctggcgagagtgtgggtgtgtctgagggcgtgggcggcgcgcccgccactgcgtggacgttcctgccaaggcgcgcgtgggtttgcgcatccacgatggcgtgggcgtctgcgcgggtgcttgcgtgggcggtgggctcgcgcctgcgtgggttctcggcccgccacggcgtggggtttgcgcccttcgctgctgtggttctcggggcttgtgcgcccaagtgtgaagttggcgccgcgtgtgaggcgagccgtgtgtgcctgtgtgtgagggagctatgtcgggaccgcggatgtgtatcgctgcgtgacccacgcgaaggaaacaatggagccattgggaagccgggagtgggtgtgtgacgctgactgtgaagatttgtgtttctggagtgtgtgcgtgtgtcagtgtcaggctgatgtgggcgtttattgtagccttgggttactgtgtgacttgcctgggcgtctgtctgccacttagcgtcagtggctttgcggttatgagtgtgtgactgtgcctttctggtgtatatctcactgtaaccatggaaatggaggcccacaggggaagaattcttagcagctctaagatgtgatgggctgccctggaaatctgtggaactgtttaattgtgcatgactttcctccttggtaaaatagcatattaatagcacctgcctgggtgttattgggaagattaaatgggatgacgtagctgaaacaccctgcacagagcttgtcacatactaatcaccgtgtttaggtgttggttatggtgctggtggtcgtttttctttgaccctatacagaggcagaggtagtggtgaatactggaggactttgcatctctgagcttcggactgggctatctttgtccacataccagggcatctgaccatctccagttgagcagtggtgcgctgcccccgccaaccacctgcgtcgtcagttttctgcatgtgtacatttgagtggaggacagagccctccactgacgctaagtatggttgtgtccccttcctaccaaggtagcttggaaaaataagagcatggactgtggcgccccgctgtctggtgttgactcctggtttcaccactggctggctgtgtgactgagagagcttacttaagtccacc

SEQ ID NO: 1888010 - DNA, 4001 bp, Homo sapiens
gcactccagcctgggtgatagagccagacactgtttcaaaatattatttaattaattaaattaaaagtcacatgtaataacagaaagtgcttttgtctccccacttcactgccccacttcctatgccaccctgggaaaagggaagagagtgactcacaactgaataagtcactgccctctggctgaatagggattccaagtggaagctgacctctgatgccaagatttatagaatgtacatgactcatagataggaattttaaaattctcaatctcatctgtataatttaaacaagtttttagttattagattatatacacagaagtcaacatgtcacactaatcatatccaatgaactcacccactcatctgaacccaaagtccccaccccttttattcttttgagacagggtctcactctgttgaccaggttggagtgcagtggcatatctcggctcactgcagcctggatctcctgggctcaagtgatcctcctgcctcagcctccagagtagttgggattacaagtgcgcaccatccccttctttggtctatttcttctcttccacctcttctgctccatcctcacaacttacttaacctcttgttgcttcttcttcccagtctttcgatcgtcctcaatctccatacattaccacctcttctcccacctctgcgcctcctctgctctccctgttaaactctctcttccctgttaaaccccctgtccccactctctggcacccccgacctccaggtgtcctccctgctgtggttctccctcttgccaccagcaccactctgctctgtctgccctggctccaaatccctcctcctctccctcactctgatgagccaggtccccctctttgctgcccctctccctaccttgctgtccttcatctctctgtacatctagcttctctccacatttctccagttttctcctcctgctatcttaactttttcttttcactcttgctgtctcttggcaaatccctcacccatcctccaccttgccatctgttatgggcctttctcattgttctattctctgtctcgagttttctactgcccttgctcggtctcctgattcctttggcccacacaatcacaggagagttttgagtaagacgcctgcatcccagaggagtgcattttccaggggctggggctgggcaggcaagaacaccccttgtcacaggacaagccctgggcacctccccaacgcggactcagaggaagcggcgactgctgaggggagacctggcgagcagcagggcccggcacgaggagggagttagggggcgacggctccttaagacaagggtggggtctgcaggatcccaggaccaggcagaggatgcggcctcctcgggacgggggaggcggcgctgcgctccagggaccgacgagggtgagggtgggaggcgcccagggtgggaatccacctctcgggtgaggactttaaaaagcacggggtggagggagtcagaaaatagttacaaacaggaaaactacgagatacgaagtgtatacgttgccctatagcagaaagaccggggacgggtctagcctcagggcgactttaaacccaaaaggaagcgacttctggactctcaccgggacgtcaaattttgctctggggattagccgggcctggtggcgcatgcctgtaatcccagctactcaggaggctgaggcaggagaatcgcttgaacccaggaggcggaggttgcagtgagccaagaccgagccactgcactccagcctggcgacagagcgagactccgtctcaaaaaaaaaaaaaaaaaaaaaaaaaaatttgctctgggcgaaggaagaatggtagaaatttccaggtatgtggggaccccacgtcccctgggacagaagtcccagggacctgcggagcgcagacataacacaacacagagcaaaactcaccgctgcggtgactttcactccacgcgatccgcttcccggtttacgctaaactgggcgctcgggacagaagccaggtctcggcgggacatggcagggggtgggcggggcctgggcgaggtgggggcggggcgcgaggcggagagaccttcccctatagaaccggcagggggcggggcgcgaggcggagagaccttcccctatagaaccggcagggggcggggcgcgaggcggagagaccttcccctatagaaccggcagagggcggggcgggatctgtgagtctctcagcctcggcgtgtttttgggttttggagacgagacctgccaggaaagctgaggcatgattcaaaagccctggaactgtctggaaggggaatgcaaaccagaatgtgaaatgcaaagccctgcctgggcggaacgtattatttcatgctgacgaccacagaacagaatagaaatcctctccctttctattctccactcactcaagagggagagtccaccctgtgtcagcttcagagacttccctagagccaccgcctgggatgcgggatggagtgctcaggccagggaggagtgaggtcaccacctgctggttaaacacagcagagatgcgggcgcacaagggggcgtgggagggcgcggggtgggatcctgagttcccagctactcaggaagcagcggcgggaggatcgctgagcctggggctccaggccagcctgggcgataaagtaacaccccctcccgcaggactcccttcctcgtcactctctctctgttttttgttttgttttgtttttaaactttcgtaaataaaattttttatggtgtgagacagggatccaacattatttttttccatgtggatatccagttacttgtcccagcacatttgtggaagagctctattactttcttttttcacttacttttttcttttctttttcttttttatttatttatttattttttttgagacagagtatttgtctgtcgcccaggctgcagtgcagtggcgagatctcagctcactgcacactctgcctcctgggttgaagcgattctcctgcctcaacctccagaatagctggcattacaggcgtgcgcccccatgcccggctaagttttgtattttttggtagagacgaggtttaacagtgttggccaggctggtctcgaactcctgactttaagttatctgcctgcctcagcctcccaaagtactgagtttacaggcgtgagttaccgtgcctgtcccaagaaataccctttttctttctttcttttttgagacggagtctcgtattgtcaccccagctgctgtgcagtggcgcgttcttggcttgctgcaacttacgcctcccgggttcaagcgattctcctgcctcagcctcccgagtagctaggaatacaggcgcctgccaccatgcctggctaattttttgtctactaaaaagtagagaccaggtttcactatgttggccaggctgttcttgaactcctgacctcgtaatctgccccactcggcctcccaaagtgctgggattacaggcgtgagccaccgcgcctggccaagaaatactctttacttcactttttaaatgttgagaaaatataattgaaaacaaaaaaaatcttcccctaaatgagatatcatctccaccacgataataaaagactttgccacatacatcactttcatattgtttctctccctctcccaaatggattatcggatgtttccttaagagtgagctacaattaaaggctttgccactctcactacattggaaagatttttcggccgggcgcggtggctcacgcctgtaatcccaacactttgggaggccgaggcgggtggatcactaggtcaggagatcgagaccattctggctaacatggtgaaaccccgtctctactaaaaatacaaaaaaattagccaagcgtggcggcgggcgcctgtaatcccagctactcgggaggctgaggcaggagaatggcgtgaacccgggaggcggagcttgcagagagccgagattgcgccactgcactc

SEQ ID NO: 1888011 - DNA, 4001 bp, Homo sapiens; identical to SEQ ID NO: 1561536

SEQ ID NO: 1888012 - DNA, 4001 bp, Homo sapiens
ttagtatgtatttttacttcaagccagagttaggctggaggtaaggagaactgggggatacacgggagaccctgcttggaacacacgtaaaaaatgcggggaaaatcagtcctctgtggagtgtgaaaatagttaagtgccaggcaattagtctgaggtggaaatctaggccctggattcttgctttgaaaaaaaatctaactcaaatgcattttttttttttttgtaaattactacattagaggaaacaaaattcaggcttaaccgactataaactgtcaattaagctccaattacacaaccaggaaatttgtacgttcaaggtggaaaataagaaactgaggcagggagcactgactcatgcctgtaatcctaccacttagggaggctgaggccggtggatcacctgaggtcaaaaggtcgagaccagcctggccaacatactgaaactctgtctctactaaaaatacaaaaattagccgggcatggtggtgggcgcctgtaattccagctacttgggaggctgaggcaggagaatcacttgaacccgggaggtggaggttgcagatcgtgccactgcactccagcttgggcgtcagtgcaggactccgtctcaaaaaaacaaaacaaacaaacaaacaaaaaaaactaagaagaagaaaagaggagagaaacaaacaaacaaagacaggaagacagaaagaatataactgtacctaaccaattattgaatttgggatttttgcatcatgcaccttatcaaagtccttcaagcccctcttataaaccaaaaactacaacccataggggtgctctaaaatttttgaaccactctttgattaaattatttaatatttttgcagagactgccttttttttttttttttctagacagagtcttcttactctgtcgcccaggctggagtgcagtggcgcgatcttggctcactgcaacctcctcccaggttcaagcgattgtcccgcctcagcctcccgagtggctgggattacaagcatgcgccactatgcccggctttttttttttgagacagagtcaagctctgtcacccaagctggacagcaaatggcgtcagctcgcctcactgcaacctccgcctcccgggttcaagcgatttttctgcgtcagcctcctgagtagctgggattacaggaccgcgccaccacgcccggctaattttttgtatttctagtagaaacgggggtttcaccatgttggtcaggctggtctcgaactcctgacctcgtaatccgcccacctcggcctcccaaagtgctagcattataggcgcaggccactgtgccagactaatttttatatttttagtagagatggggtttcgccatgttggccaggctggtctcgaactcctggcctcgggtgatccgcccgcctcggcctctcgaagtgctgggattacaggcgtgaaccaaagcgcccggcctgccataaatttttaatagggggaaagatgaactggaaacgcagcggactaaagcccttcccattcatgaacccgctccccgagtcaggattctcccctgactaccctcccttggtccctgcacaatctgggagagacgctgcgctgcgggagcagagctgcccagagagggctccaggtcagggcacagtcactgggcggggaagagacaagacgcccgggggccggctgtcagcgaagccgccatcttatggctgaaggggactgaggcccagctgggcaaggagaactcagggcgcagtttgtggagatgactgcggggaggcccgagtccgccacagccacttcccacaggtttcaaccagcccctccctctctctccggatgtcggagccgccactctcaccatttctaggcttccaggggaggccctggcgtcttagctgtggatctcccaatgcttgcaggtcagagggccacagaggctgggcctctaagagcaggggacacaaagcagggaagacgagaccaagcgctccagctgcagcgagagacaaaggccccgccaaatcccggaagccgccctgtccgctccagttgcgtgcctgattggacggtccccagctcagggtccctgattggaaaacgtctaaggcccagccccttcaggccttaagtgacagaagacctgaccaaacgctggactgaatgaagaaagagtgacagcctaagctgcagcgttttcaggcagggcttcctccctgagcttagcccaccccggagggtatttgcatttgacctcgtgtatgaggtttcatgtatttataaataacatactatacggctattcacaaatgaaaaatatataataacaataattttaaaatttcagtttttatgatcttcctggcttctggcatttgagcaagcagcctgagacttttttaaaaaggcaatcctctgaaataaaatataagccacatgtgaattttgaattttctagtagccaactttaaaaagaaacaagaaaaaggtggagttgattgtaacaatttaacttacccaatatatccaaaatattatcagtttaatatgtgagcaataattatatatgtatatacatgtatatgtatgtatatatgtatatatgtgtgtatatatgtatatatgtatgtgtgtatatatgtatatatatgtgtgtgtgtatatatatatacatatatatatatatatatatatatatatatatatatatcactaaatctttgaaactcactctgtattttaccattccagcacatcgcagtttagaccagcgacattccaggcacccaggagccacacgtggccaatagctgccatattgaagtgcagctgcgatgtcagctgagtgaagggcctggacatcagaggtgggggaaagcctcttcctaccaacatctcttcagttcccagggtggaacagatagtggccataaaagagcagaaggcagcaagaataaaataaccacacatagaccactgctggccacctgttgaccaccttccttccagattaaacagtgaacaacaagtgatggggtgacaggagaagtaaactctatgtcttcatatctgtccagtcttttttgagacagactttcactcttattgcccaggctggagtgcagtgaagtgcaatggcaggatcgcggctcaccacaacctccacctcccaggtccaagcaattctcctacctcagcctcccaagtagctgggattacaggcacgtgccaccacacccagctaatcttttgtatttttattagagacagggtttctccatgttggtcaggctggtcttgaactcccgacttccggtgatctgccggctcccacctcccaaagtgctggaattacagacgtgacccaccacgcccggccttttttttttttttttgagacagacttgctctgtcacccaggctggagtgcagtggcacgatcttggctcactgcaacttccacctcttgggttcaagcaattccctgcctcagtctcctgagtagctgacattacaggcgcccaccaccacgccgagctaatttttgtatttttagtagagacagaatttctccatcttggccaggctggtcttgaactaccgacctcatgatccacccgcctcagcctcccaaagtgctgggattacaggcatgagcccagccttgtccacagtcttgacctccaatgtttatatatgaagaaaacagattaaaggcaaacttattttgctatttgaccttggccctaatggtcaggctgtggttatctgttttattttgtggtgtgggggggtctgtgtaagtacaaatcacatgcataaatgtctacgtgtatttctgcattactcagcattatcttacaagacatccaactttctttttatttatttattttgagacagagtctcactctgttacccaggctggagtgcagcagcgcaatgcgaccttggctcactgcaacctccacctcccgggttcaagctattctc

SEQ ID NO: 1888013 - DNA, 4001 bp, Homo sapiens
ctgaggcatgagaacctcgtgaacccggaggcggaggttgtggtgagccgagaatgtgcctttgcaacaagagtgaaactccgtctcaaaaaaaaaagaaaagaaaaaagcaccatttaatgccttgccaaaaaataattaattaaaatacggtataaaaaagtacactacaaaataagtggccaggcccggtggctcacgcctgtaattccagcactttggcaagctgatgcgggcggatcacctgaggtcaggagttcgagaccagcctggccagcatggtgaaacccccgtctttacaaaaacacaaaaattagccaggtatgatggcgcgcacctgtaatcccagctactaaggaggctgaagtgggagaattgtttaaaaccgggaggcggaggttgaggtgagccgagatcgcgccattgcactccagcctgggagacagagcgagactccatctcaaaaacaaaacaaaacaaacaaaaaaacacaaatacgtgataatgtgaattagggaggaaaagctggcatttgggaaccccagaagaaattggaaatttagtatcttactgcaagcaagaatgaggttggagtaatgagggatgggggttagacttaagaccctgattgggacccaggtgaaaaatgcagcagaaaatcagttccctgtggagtgtgaaaataattaagtggcaggcaattagactgaggtttctctagtccctgggttcctacttcaatttaaaaaatctaactcaggcgcattatttttaattactaaattcagagaaacaaaattgaggcttcacctactataaactgccaattgagctccgattacataaccaggaaattttcacctttaatgtacaaattaaaaaaccacgtaactgtacctaaccaattactaaatttggttttcttcatcatgcattttacaaaagactttctttcaagcctctcccatagaccacaaactaaaaaccacagcttggtgctctacaattctagaaccactttttgattaaattatttaataagttaattttttttttgagacaagagtctcgctctgtcgcccaggctggagtgcagtggcacgatctcggctcactgcaagctctgcctcctgggttcacgccattctcctgcctcagcctcctgagtagctgggactacaggcgcccgccaccacgcccggctcattttttgtatttttagtagagacggggtttcaccgtgttagccaggatggtcttgatctcctgacctctgatccgcccacctcggccttccaaagtgctgggattacaggcgtgagccaccgcgcccagcctagaaccactctttgattaaattcttttaatatttttgcagtgactcccattaacttttaataggagataataggaactgggaaccccacggaacaaacctcttcccattcatgaacccgcaccccaagtcaggattctcccctgacgaccctcccacggtccctgcacaatccggtagagaagcggcgctgcgggtgcagagattccccagagagggctccaggcaagggcacagtcactatgcagggaagagacaggacgcccgggggccgggctgtcggcgcaaccgccatcttatggctgaaggcgactgaggccgagctgggcaaggagaactcggggcgcagattgtagagctgactgcggggaggcctgagtctcgccacagccacttcccaccggttccaaccagcccttcccctctctcgggatgttggaccccgcactctcaccatttctaggcttccagggtgtcccggcgtcttagctgtggattcccaatacctgcaggtcacaggaccagaggctgggcctctaggagcagaggacacagagcagtgaagacgagacccggagttccagcggcagccaaagacaaagaagcggacaaatcccgccacatcccggaagccgtcctctccgctcaagctgcgtgcctgattggacagttcccagcccagcgtcgctgattggataacgtttaaaaccccaccctctcaggccctgactgacagaagatgtaattagatgctgggctgaatgaagaaagagtgaccgcctaggctgcagccttttcaggcagggcttcctccttgagctgagataggcccaccccaaagggtatttgcattcaaccttgcgtataaggtcatatgcatttgtaaatactatatcatatggctatacataaatgaaaaggatataataacaaatgttttaaaatttcagggtttttttactttcctggcttacggtcctttgagcaggcagcctgagattttaaaaaggaggtaatcctctgaaataaaatgtgagccacgtgaattttgaattttctggtagccaaactagaaaattaaaaagaaacaaggggccaggcatggtggctcacgcctgtaatcctaggactttaggagtacaaggcgggcagatcaagaggtcaggagtttgagaccagcctggctaacatggtgaaaccacgtctctactaaaaatacaaaaattagccgggcgtggtggtggacatctgtaatcccagctacgcaggaggctgaggcaggagaattgcttgaacccgggaggcggaggaggttgcagtgagcagagatcgcgccactgcactccagcctgggcggacagagcgagactccgttttggggggtgaaaaatataaagaaacaagaggccacgcgcagtggctcacgcctgtaatcccagcactttgggaggccgaggctggtggatcacgagatcaagtgattgagaccctcctggcaatatggctaaaccctgtctctactgaaaaaaatataaaaattagccaggcgtggtggcgcatgcctgtaatcccagctactggggaggctgaggcaggagaatcgcttgaacccgggaggcagaggttgcagtgagccgagattgcgccactgcactccagcctagtgacagactgcaacaacagcaacaacaacaacaacaataacaaggaacaggttgaattgattgtaacaatgtaattaacctaatatatacaaaatatcattttaatgtgtgaggaatatgtaattattaatgaagtatataaatatttgcaactaaatttttgaaaataactctgtgttttacctttctagcatatcgcggttcagaccaagcacattccaggcacccaggagccacacatggcagctctgatgtcaatggtgtgaagggccagaggggaaggaagggcctctccctactaacatctatcttcagttctgaggttggaacagatagtggccatagaaagagctgagggcagcagaaataaaataaccacaggtaaaccactgcttaccacctgttgcccacctttcttttagagattaggctgtgaacataggatgatggagcttaggagaaaaaaactctgtgtcttcagttctgcccacattcttggactccagtgtttagatacagagaaaatagattaaaggcaaacttattttgctatttggccttgaccctaattgcgaggctgtggttatctgttttctcctgtggtgtggggactgtgcgaatataaacaccaatcacatgcatacatgtctcccagtatttctgcattacccaacattctctttcaagacatccaactttaaattaggggaagaaatcagtacctagagggtgcccactgttagaaggcaacaagtaatcaacctgtcactgaatcctggcatcctatctgcactggtgcatgtattagttagctattgcagcataacaaatcatccaaaacttactagtttataattaagatgatcagccatttaggctgggtgagtggggccgttcttctggtatcagctgagctctttcagactggtatcatcagctgcttgttgactagccagctgtacttctgggggtgatcttctgcttctggggctcaacagggg

SEQ ID NO: 1888014 - DNA, 4001 bp, Homo sapiens; identical to SEQ ID NO: 1561543

SEQ ID NO: 1888015 - DNA, 4001 bp, Homo sapiens
tcgaaacaagcccggccaacatggtgaaaccccatctctactaaaaatacaaaaatcagctggcaatggtagcgcgcacctgtaaccacagctactcaggaggctgaggcagaagaattgcttgaacccaggaagcagaggcagctgtgggccgagatcgagccactgtactccagcctgggcaacaagagcgaaatcctgtctcaaaacaaaaccaaaaacaaacaaaaccaaaaacaaaactggtgggtatatgacatttgtgttgtcaaaaccccactgctatcctgctcactgatgtgctcaatgacagtttctcatcaacactgtattgtgtcattccccactgcactgtgtaccccacatacattttgatttgcttcaccctgttggggtgggttttcattgtcctgtggaatcatatttctctgttaaaaaaaaaaaaacaccattaaaatacttcatctatttgaaggaaaggatgaatatattgtacaataaagaacaaataggccggacacgctggctcccgcctgtaatcccagcactttgggaagccgaggcgggtggatcacttggggtcaggagtttgagaccagcctggccaacctggtgaaaccctgtctctactaaaaatacaaaaattaaccgggcatagtggtggacgcctttaatcccagctactctgggaggctgaagcaagagaatcgcttgaacccggaaggcggaggttgcggcgaccgagatcacaccattgcactccagcctgggtgacagagtgagactccatctttaaaaaaaaaaaaaagtacaaatagttgaaaatactgtgaattggagaagaggagttaatgtttggaaatgtgggaagggaactgaaaatgtaagatgctaccgcaagcctttaaagagttaggctggggtcatagcggggagggtgtgagaccctgtatcccacagatttggaaaatggagggagaaaccagtccatgtggacagcgtgaaaaaatttaaacaagtaaacagactgaagtgtgtgtagtgcactaaggtcctacctaagggcactgaaatccaactcaactgcaatatttccaaatgtttctggtaacaaaccacaaaccatgactgcgtgattctcattcatgaattcccatttgcacaaactcttgaatttttatcagtgcctctttttttttttttttttttagacggagttttactcttgttgcccaggctggagtgcaacggcgggatctcggctcaccgcaacctccgcctccagggttcaagcgattctcctgcctcagtctcccgagtagctgggattacaagcacgcgccaccacgccaggctaattttgtatttttagtagagacggggtttctccatgttaggttggtctcgaactcctgacctcaggtgagccaccgcgcccggccattttaacttttaagaggagaaaagacgactggggactccacagaccaccgcttttctgacgcaagaaccctacacccgagacgggattccccccatgatcctcctcatggcccagcacaatctgaggagacccgcggctgaagacgcggagctgcccaaagagggctccgggtccggggccgcggtcgctgcgaagggacgagacaggatgccccgggtcccggctgccggcccagccccacagaccccggagtcgccgcggggaggcccgggtcccgccacagccggttccagcaggttctaagaagcccttcgcccccgtctcaggacgcctggccccacacactcaccatgtctgagcttccaactgtcttccccaaggctcttgtgactagagaggaacacagcgcaactgacagagcgacaggagctctggcggagaaacctggagcctctcagagccgagcgttccaagagccagaaagagggttccaacggtcgttagcacagcaacaagagaccgcgggcttgcagccgtctccttccccgaaaaaagttggcagggccccgccccggcgctcctgattggaccgtgctccccgcctcgccttcagagccctgagtgacagcagaagcccgggataacggggccctgcagagccagactggttctattcacttcctctttaaggcccacctccctccctgtgccctgatccttggatatctgcatttccgccaaactttcttgaacttcatatatatatatgattgattggttgattgattaactaattgagacggagtttcgctcttgtcgcccaggctgaaggtgcaatggcgcgatctcggcccactgcaacctctgtctcccgggttcaagcgattttcctgcctcagcctcctgagtagctgggattacaggcacctgccaccacgcccagctaatttttgttatttttagtagagacagggtttcaccatgttagtcaggctggtctcgaactcctgacctcaggtgatccgcccgcctcggcctcccaaagtgctgggattacgtgagccgccgcgcctggcctctttcctgaactttagaaagggcactgacctctccttcactcaatgggctttctctgctccttcctcctgcatcaggtcacaagtgtatgcaggaaattccagactcagtgtctgctggggcgatctgtttgcctcagagcaggaggggaaccgagaccaggccaggcacgactagaccaggaaagagagacagatgtcctccagggggacaggagtaggggatgaggcatggacaaagcttcctcacacatctaccatctctcctcacagtatgggaacactccctccttccagaacttcattttcaacagcaggagactatcccttggagtcagtttaagcttctaacctaaataaactgtcaacttcgtaaaccctttcaccaggtgatgttccaaacaattctcgcacactgaccttcacagattttcttcatatatacaaattaccgcctgaacccagtgaccctatgcatgccaaaaccaaaaacactgccctccaaatggccccaggctcctgaggtccaacctcagacatgacagaacacctccccctctgcatgccccctgtccgccaccccaaatgcatctgcacttgggtctcctgtgttccagggctctgcagcttctcagaatccactcctggagctgctcagaaacacccaagggagctcattttccttccctttgcaggctccaggctggtcttgggctctgctgccccctgcaggttattcacctacttctctcccccactgatcacgtccaccagaccaacatctacaatctcactgtgtgaataagacactagcagaatccctgctttccttctgtatgtacatataaactgggagagaaaaaactaagataatttaactgcattaaaagacttccaaatcgcagtggcggcggtggctgaggcactagcagtcagggacactagagataccagtggtggagtggggctgggctgggaatgggttggggaaggggctgcagggacagatagctgcctggactcagcagcagtgcagctgtacagcctaaggcacctggcaagcagagctgggggcttctgggaaatgactgtggggaagaaaaaggagtcaggcttgatggagcctggagctgtgggagctgatgcagacttatgacagctgctactatcataagtaagcccgattgagatgtgagaacttggattccttggcaatttatgaagaggaagactgatgacaaagaagtcattgatgaagaggaggatgaggatcattgacatgcttgtcccactatgcaaacaaaaggggaaagcgcagcaacttctgcaacatggggtgaaaggatgcaggggactctcattgtcaggtaatatactgctgcagaacaatcagaggttgcaaaacctttcaataaatacctggaaggccagttgccatggctcacatctgtaatcccagaagtttgggaggccaaggggag

SEQ ID NO: 1888016 - DNA, 4001 bp, Homo sapiens
gtgctgaggccagacatcatggaacagagacaagtgggctacccttgtgccatatctgaaatcctgactgtgagcatgagaatccacataacataatgattgtttgagccactaaattttggtgtaatttctgacatagtaatagtgcctatgacagccaccttaacacattaagtaacaatagcgagtagtaaatcatcactgggaactgttacttggaaatgtcttggaaagcagtgacaaccatgaaggctatttgtagatgctgtcagatgacataaaaactgctgtggtctcactgccaacaataccccatacccgaggggtctacagcctatattcaagatggaaggaaacactacattttggttagaggaatgtgaaaatttacacgagcccttctcatgggcccctaaacttggctgatggaactgtgggtaataaactcagaaggagtcaaaggcatcaaggttgctcatgaaagagctgaggttaccaactcaagtgtagacaagaaaagagagaggaaaaaaatggtagctcggcagggaggtcagagggatagccaggcttagtttccagacatccaggaaaaggacacccatctgagtaatggattgagagtcagtattaagatacggagaaatatcaaggagaaacattagtggctaacgctggacatttccacagctctcacataaccagaaaaacttagcttaattttagtaacaatgtcagaagcacaagcgtgctgagaattaagaacaaggcctttgaagaatgtggggactgttttataaagcactgaatcttcacacctcatgaagacagagacctggagcctacaggtgtctcattcacactatgaaataaatcctacaaaagtaagagatccactaactttttaaaggatttaggaagatatatatatgaaatcagccaggtgcggtggatcacacctgtaatcccagcactctgggaggccgaggcgggcagatcaccccaggtcgggagttcgagaccagcttgaccaacataaagaaaccccatctctactaaaaatacaaaattagctggacgtggtggcacatgcctataatcccagctactcgtgaggctgaggcaggagaatcgcttcaacccgggaggcggaggttgcagtgagcagagattgcaccattgcactccagcctgggcaacgagagcgaaattccgtctcaaaaaaaaataataataaaaaataaaagttgtttctttcacaaaagttactctacatacgtgctccaaaaataagatttcaaagacactggggaaaatactactactaagatatcaaaaccaggaacttacttcctttaaaacaattccaaactaactcgctgcgcctttcacagaaatttcccacaagaaatatgattttataaagcctgagaagttgctgctgttaggaaaaccaccaaaactaaaaattggtttaattagcaacaacaacaaaatgccattttaactggctgtccttatcagagacagtccactaaataatgcaactggcaaaacgtgagattttttaaagggtggggtgctttattataaacataatataaaccaggaatgtattttatttaataaacctcaacctgccggtcactccctcccttcgaggcgttctgcaacagaacacctggctagaaataaaagggcgttttaccccagtgggatgaaaaagccccgttttttacctttaatcgcgagacaatacgggtcagaggtcaggaaattatgtcagcaccaatgcgggcgcccacgagtgcggtggaccgatgtggaagggccgggacgcagcccgagtcccagttcccgccgtagcgatggccgatttcccagccgcggacgctgaaagcgaggactccacgccgatgacccttcggcgtaccatgtccggcgggcgcttggccaaacagcccaagactgcggaatcacactcgccactgtgtacctggacgccatctgcagacccagcgcctgcggggattccggaaacgggagagcgggcttccggaaacggtgaccaatgggaaacgtgatcagatgttactaggcgaacagtccgtttccaggcaacacagaaggaagagacgctctcagtcaccctaaaatagacggagctttcagccaatggatatgcaggtttgctccagattagccaataagaagtgtttggggccggccgagcgcggcggctcacgcctgtaatcccagcactttgggaggccgaggcgggcggatcacgaggtcagaagatcgagaccatcctggctaacacggtgaaaccccgtctctactaaaaatacgaaaaattaaccagacgtggtggcgggcgcctatagtcccagctactcgggaagctgaggccgcagaatggcgtgaacccgggaggcggagcttgcagtgagcggatatcacgccactgcactcctgcctgggcgacagagcgaaactcggtttcaaaaaacaaaagaagtgcttgtggccgaccttcctacaagcacagcagaaactttcctgcgcatttctgcgctggaacgcctacccgccgcgccaaaccaaaactttgcaatcacgtttggtgctgtttcctgcactttcttggagattagcaccaggcgctggagaccctcccacctcgcccacgcccaccgcccggtgaacaccgagacccaaccttgtgcaccgccagtcttgtgatcaacaaacaggctagtaaagtataaaaataaaataaaggaaatgtagtcgggcgtggtggcgtgcgcctgtaatcccagctactccggaggttgatgcaggagaatcgcttgaacctgggaggtagaggttgcggtgagccgagatcgcgccactgcattccagcttggacagcaagagcgaaactccgtctgaacatagtaaaataaaataaaggaaatggggccgggcgcggtggctcacgcctgtagttccagcactttgggaggccgaggcgggccgattacttgaggtcaggagttagagaacagtccggccgccaacatgatgaaacccccgtctgtactaaaaatacaaaaattagccaggcgtgctggcgggcgcctgtaatcccacctagtcgggaggcggaggcacaagaatcgcgtgaaccggagagttggagagttggagagttggagagttggagagttggagagttggaggttgcagtgagccggaggttgcagtgagccggagaggcggaggttgcagtgagccgagatcccgcccctgcgctccagcctgggcgacagagtgagactccgtcttaaaataaaataaaataggccgggcgcggtggctcacgcctgtaatcgcagcactttgggcggccgaggcggctggattgcctgagctcaggagttcgagactatcctgggcaacgtggtgaaaccccgtctctactaaaaatacaaaaattggccgggcgcggtggctcacgcctgtaatcccagcactttgggaggccgagtcgggtggatcatctgaggtcaggagttcaagacgagccagaccaacatggagaaaccccgtctctactaaaaatacaaaattagccggggtggtggcgcatgcctgtaatccagctactcgggaggctgaggcagaagaatcgcttgaacccgggagacggaggttgcggtgagccaagatcgcgcgcgccattgcactccagcctgggcaacaagagtgaaactccgtctcaaaagaaaaaaaaaaagaaaaaaacaaaaacaaaaattagcggggcatggcggcgcatgcctgtaatcctacctatttgggaggctgaggcaggagaatcacttgaacccgggaggcggaggttgcagtaagggaaactccgtctttaaataaataagtaaaaaggaaatggatagaggaaacattaatgcatgaaatcaaacaaatgctttcgctgaagggctccatct

SEQ ID NO: 1888017 - DNA, 4001 bp, Homo sapiens
cgttgagtcttccgtgctgaggccagacatcatggaacagagacaagtgggctacccttgtgccatatctgaaatcctgactgtgagcatgagaatccacataacataatgattgtttgagccactaaattttggtgtaatttctgacatagtaatagtgcctatgacagccaccttaacacattaagtaacaatagcgagtagtaaatcatcactgggaactgttacttggaaatgtcttggaaagcagtgacaaccatgaaggctatttgtagatgctgtcagatgacataaaaactgctgtggtctcactgccaacaataccccatacccgaggggtctacagcctatattcaagatggaaggaaacactacattttggttagaggaatgtgaaaatttacacgagcccttctcatgggcccctaaacttggctgatggaactgtgggtaataaactcagaaggagtcaaaggcatcaaggttgctcatgaaagagctgaggttaccaactcaagtgtagacaagaaaagagagaggaaaaaaatggtagctcggcagggaggtcagagggatagccaggcttagtttccagacatccaggaaaaggacacccatctgagtaatggattgagagtcagtattaagatacggagaaatatcaaggagaaacattagtggctaacgctggacatttccacagctctcacataaccagaaaaacttagcttaattttagtaacaatgtcagaagcacaagcgtgctgagaattaagaacaaggcctttgaagaatgtggggactgttttataaagcactgaatcttcacacctcatgaagacagagacctggagcctacaggtgtctcattcacactatgaaataaatcctacaaaagtaagagatccactaactttttaaaggatttaggaagatatatatatgaaatcagccaggtgcggtggatcacacctgtaatcccagcactctgggaggccgaggcgggcagatcaccccaggtcgggagttcgagaccagcttgaccaacataaagaaaccccatctctactaaaaatacaaaattagctggacgtggtggcacatgcctataatcccagctactcgtgaggctgaggcaggagaatcgcttcaacccgggaggcggaggttgcagtgagcagagattgcaccattgcactccagcctgggcaacgagagcgaaattccgtctcaaaaaaaaataataataaaaaataaaagttgtttctttcacaaaagttactctacatacgtgctccaaaaataagatttcaaagacactggggaaaatactactactaagatatcaaaaccaggaacttacttcctttaaaacaattccaaactaactcgctgcgcctttcacagaaatttcccacaagaaatatgattttataaagcctgagaagttgctgctgttaggaaaaccaccaaaactaaaaattggtttaattagcaacaacaacaaaatgccattttaactggctgtccttatcagagacagtccactaaataatgcaactggcaaaacgtgagattttttaaagggtggggtgctttattataaacataatataaaccaggaatgtattttatttaataaacctcaacctgccggtcactccctcccttcgaggcgttctgcaacagaacacctggctagaaataaaagggcgttttaccccagtgggatgaaaaagccccgttttttacctttaatcgcgagacaatacgggtcagaggtcaggaaattatgtcagcaccaatgcgggcgcccacgagtgcggtggaccgatgtggaagggccgggacgcagcccgagtcccagttcccgccgtagcgatggccgatttcccagccgcggacgctgaaagcgaggactccacgccgatgacccttcggcgtaccatgtccggcgggcgcttggccaaacagcccaagactgcggaatcacactcgccactgtgtacctggacgccatctgcagacccagcgcctgcggggattccggaaacgggagagcgggcttccggaaacggtgaccaatgggaaacgtgatcagatgttactaggcgaacagtccgtttccaggcaacacagaaggaagagacgctctcagtcaccctaaaatagacggagctttcagccaatggatatgcaggtttgctccagattagccaataagaagtgtttggggccggccgagcgcggcggctcacgcctgtaatcccagcactttgggaggccgaggcgggcggatcacgaggtcagaagatcgagaccatcctggctaacacggtgaaaccccgtctctactaaaaatacgaaaaattaaccagacgtggtggcgggcgcctatagtcccagctactcgggaagctgaggccgcagaatggcgtgaacccgggaggcggagcttgcagtgagcggatatcacgccactgcactcctgcctgggcgacagagcgaaactcggtttcaaaaaacaaaagaagtgcttgtggccgaccttcctacaagcacagcagaaactttcctgcgcatttctgcgctggaacgcctacccgccgcgccaaaccaaaactttgcaatcacgtttggtgctgtttcctgcactttcttggagattagcaccaggcgctggagaccctcccacctcgcccacgcccaccgcccggtgaacaccgagacccaaccttgtgcaccgccagtcttgtgatcaacaaacaggctagtaaagtataaaaataaaataaaggaaatgtagtcgggcgtggtggcgtgcgcctgtaatcccagctactccggaggttgatgcaggagaatcgcttgaacctgggaggtagaggttgcggtgagccgagatcgcgccactgcattccagcttggacagcaagagcgaaactccgtctgaacatagtaaaataaaataaaggaaatggggccgggcgcggtggctcacgcctgtagttccagcactttgggaggccgaggcgggccgattacttgaggtcaggagttagagaacagtccggccgccaacatgatgaaacccccgtctgtactaaaaatacaaaaattagccaggcgtgctggcgggcgcctgtaatcccacctagtcgggaggcggaggcacaagaatcgcgtgaaccggagagttggagagttggagagttggagagttggagagttggagagttggaggttgcagtgagccggaggttgcagtgagccggagaggcggaggttgcagtgagccgagatcccgcccctgcgctccagcctgggcgacagagtgagactccgtcttaaaataaaataaaataggccgggcgcggtggctcacgcctgtaatcgcagcactttgggcggccgaggcggctggattgcctgagctcaggagttcgagactatcctgggcaacgtggtgaaaccccgtctctactaaaaatacaaaaattggccgggcgcggtggctcacgcctgtaatcccagcactttgggaggccgagtcgggtggatcatctgaggtcaggagttcaagacgagccagaccaacatggagaaaccccgtctctactaaaaatacaaaattagccggggtggtggcgcatgcctgtaatccagctactcgggaggctgaggcagaagaatcgcttgaacccgggagacggaggttgcggtgagccaagatcgcgcgcgccattgcactccagcctgggcaacaagagtgaaactccgtctcaaaagaaaaaaaaaaagaaaaaaacaaaaacaaaaattagcggggcatggcggcgcatgcctgtaatcctacctatttgggaggctgaggcaggagaatcacttgaacccgggaggcggaggttgcagtaagggaaactccgtctttaaataaataagtaaaaaggaaatggatagaggaaacattaatgcatgaaatcaaacaaatgctttcgctg

SEQ ID NO: 1888018 - DNA, 4001 bp, Homo sapiens
aggcagaggttgcggtgagctgaaattgcaccaatgcactccagcctaggcaacaagagcgaaactccgtctcaaaaaaaaaaaaaaagaagaaatgtcaattgtagcattttaacacagcattgaagttatctactgatgcatagcaaattaccctaaactcagaagcttaaaacaacaaacatgtagtatcttacacactttctgagggtgaggaatataggagctgctatagctgagtgcttgtgactgtgtctctcacgcagttgcagtcaaactattggcaggggctgctgtcatctcaaggtttgactggggctgggagatgtgcttccaagggtgatacacttggttataggaaggccccagctactcccaggctattgggtggagggcttagttccttgctacctgggcctctccataggctgtctcggtatcctcatgacatggcaactaacttctctcaaagtgggggcagcagcctttaagacagaactcaaggtgccatttattatatttaatctcagcagtgacatctatcactgctactgcattctattagtctcacagtccaaccctggtacaatgtgggagggaactacataagagtgtgaatagtaggaggtaggaatcattgggaaacattttgaggtcagttattgtatcagttgctaggatgaccagttggaattaggatttttttaaaaagccattttcataagacaaggcaatcttttctagagatgttccaatacctgtgatatgcggagcactgcgctaggtggtattcaaggcaggcctgtagtgaatgctgttggacccagccaccacccctgagcaatcatatgcagaccgctggcttcttaactgcagacacctacagactcagcctaagactttcccacgaggcaggctcgaagtgctggagctttaacacctctggagtggccctaaaacaattaggaagagagatggtgtagacatatgtaagcttcatcggcctggtggttgtgaaaacttggaagtggtttctacacaatcccccagaggtcccaagctgactgagccctcattgatccagagctaatctgctcacctatgcactgtatattcgttcccatcgctcccgtctcacttctccatcccccacctaccaaataaactgcttgcactcattctttcctcaggtcggcttctcgggcaagcctccttaggtaaaaaccttgctttcaacatttcctttccattatgcgctaagaactctgatctcttcccgctgcggcagccccgccctttccttgcggctccgccctttccgtgaagtcacgcccgtccttaggctgtctctgtctccctaagagcgagtctcttcgctgctctctaactcctagagctggctcagaaagagtttcacattgccataggggagctcctaggagaggctgcacccattgcacgtaagaagcggtaaaaatgtacgcggccatcttaccaggctgccggagacaaagaaagctcagctttgatgtctgggcgccaccatgttggccacaggaggttttggcatctgagatgctgagttaagagcagagacgacatctctgtttagggatccagggacacttccttctccttgtcctaaaatagccttatcttttggtctagcaaagggcttaatcatccgttttacggcacagttttaaacatggccgccccaggtaggagtcaagtgggcgtcgccatcatacctccaattacagctttgagaaacccagaatcctgttcactggaaggttgccgggtggcggctgacagcctcaaagtcgcaattgagtctgcgcaccggccattcaggatgggacgaccttataccgcggtgaggcggcgtggcaggacgaccaatttcagattcagggcgcggatgcagcataaatgggaaggcacggtttgagaaacggtcaaacctgggactagtggaggatagtgagctgccgactacggtggccgactgggtcagctatgggtgcccgtgagggtcaatgacaagggaactgaagggttaagagattcggcgtctgagcctcgcggggcctcagtggtggcggacagaggtttgcgggagtcagtggcacggtctctgaagaagatggattgggagtgtgtgggaatcaataaatgcgagttctgtgaaatgtcttgattttcagggtgcatggggtcagtaatagtggtcttcatgggtctggggtcagttgggatttttcagacactggtttagagatctttaaggttaatgatcggagcccgagaggatcagtgatcggaggttctaagttctgtgggcagtaatagtttgggtactggaattggtgattgtggaaactttggggttcaaatgagggaggtcagtggtgatgaatgtttggagaaatgttttgggccatcggtgattgagacttacttcatatcatcggtggaggatcggagagtattaacgattggacttttgtagatcagggaatggagaatagagtcaagtgtgcttatcttaaaggtacgcctcaatgaggctcagtgattcggactgtcacttgtgggtgggagtgggactgtgagaatcaacaattgatcctcagtcgttgggatatcattggcaatcagtgtggattcatgattgggggctgtgtaatttcactggcaatcagatcggatcggtgttctttgtagttactgacctgtagtctctcctggtcagatttgaacataggggaatatcagtgactatgaaaacctctgagggttggagattggaggccagtgattgggggcactatgcgtgtctgattaggagacttataggggttggtgttgagggtcctgaaatgtggagattggggatgggaaaatcacagatttgaggctgcaagcctgcatagcgggaacacatttcactcaggtgacactccctagctgaatagcagccagttcctctccaccaaggcccatctgaaaactcttttttgaacccacaccctttttattgttctctacaataatgaaaataatttgaaaggatcgcgtgctaaacttatctaaagtaacatgttactaaagacgtggcttctattcttgttagggatctaatgcatattttttcctaatgtttcctttaaggctctttctggcaaaggtaatgacatacgcatctgtgccagcatcccaagagtgaggctggtttctggaaatccattctgactctgtgacagcggggatggatgtgaccttgcccgtggttagaaaacaaatttactgagtaagtatctaaaatgataatgtaggctgtgtgcagtggttcatgcctgtaatcccagcactttgggaggctgaggtgggtggatcatttgaagtcaggaattactagcctggtcaacatggtgaaaccctgcctctactaaaaacacaaaaattagccgggcgtggtggcgggcgcctgaggtcccagctactctggaggctgaggcaggagaatcgtttgaacccaagaggtggagattgcagtgaaacgagattgtaccactgcactccagcccgggtgacagaatgagactctgtctcaagataaataaataaatataaataaacaaaataaaataaaatgataatgtaaaagatttggctgaaagagcaaacagagtgtttagaaaatacttttatctaggctcaacttaaattatcaaaggaagagaaactagatttggaatttattgtattctgagaaactttttgccttgtcctatatattttaggcatagccatttttaacctccactaatcaattccttataaagtcctggcagaaaaaattcaagacagataaagccacaaccgccacaaaacaaaatgtaagctacttttagaaactgttcctcactgaaattaaaattgaactaatagttattaaaatggctgagatgggattgcaaataaaatggaaataa

SEQ ID NO: 1888019 - DNA, 4001 bp, Homo sapiens
cacacctaatgaagtaggccctatcattttattgattccttcccaaagatcataatgaaaggcctgtaagaaaagcataaaatcaacagatctcaaacatcagacggaaaccagtaatagtagtgtagcctttccaagaaacttcacataaatgaatattttatacactgaagataatgtgtcatttccacatgtccttttttcctttgatatacatcatgttatgaatttaacatattttggcctggaattattctgcagtttgtaatatttccagttaactttggaaatttagagactttgtgattcctggtatgagttctatggtgtgtagactcttatgggagttcatttaaaaaactaccaccttcatcacatcactgttgcttaaaggtctttccatgtttagtacatttttaatagattctgtatgaattttctcatgaccccaaagacaaggacatttgataaaaagccttaccactttcattacatttgtgaggttgctctccagtataaatcctgtgttgtgccagttttgaccactgggtaaaagacttagcatgggctgggcgcaggagctcaagcctgtaatcccagcactttgggaggctgaggcaggcagatcacgaggtcaggagttcgagaccagcctggccgatatggtgaaaccccgtatctactaaaaaatacaaaaaattaaccgggtgtggtggcacgcgcctgtagtcccagctacttgggaggctgaggcagaattgctggaatccaggaggcggaggttgtggtgagccaagatcgggccaatgcactccaacctgggcgacagtgcaagactccatctcaaaaaaaaaaaaaaaaaagctttagcatgcatgttactttgatttctctaaaagatgtatactctgtttttttgttttgttttgttttttgagacggagtcttcctctgtcgcccaggctggcgtgcagtggcatgatctcagctcactgcaacctccatctcccaggttcaagcaattctcgtgcctcagcctcctgagtagctgggattacaggcacctaccaccacgcccagctaatttttgtatttttaatagagacagcgtttcgccatgttggccagggtggtttcaaactcctgacctcaggtgatccacccacctcagcctcccgaaagtgctgggattacaggtgtgagccaccgcgcccggcaaaagatgtatactctgatgtccagtgcactgtgaaacctgaaaagagcctctgccacataccttatatttacatggtttctcttcaatatgaactctctgatgtcttgtagtacttgaactcatggtaaagtttttcccatgctcattggatttctaaggtttctccccagtacgaattattctgttccccaacttttgatcctcagataaaatccttgtcacagacattgcatttgtgtgcctttgccccaagatatattagatactcttatctaatgagtagcaagcactactttaaaacactgctacattcattgcatttacaagtatgatctatttggtgagtcctgagtttagggccattcttaaaagccttgctacattcagtacatttggaaagttctctccagtatgaactatctgatgattaatgaagcgtgagccttgagtaaaggctttgccacattcatgacatctgtaggatttctctccagtatgaattctctgatgatttacaaggtgtgaattttgactgaggaccttgccacacacatttgtaaggcttctcttcagtacaaatcctatgataacttttgaaatgtgaattttgactgaagactttgccatatatgtcatattcatatggtttctctccagtatggataatctgatgtatagtgaggtgagaggcctgggtaaaggtttttccacactcatcatacttgtgaggtttctctccagcatagattttttggtgaatcctgatgtccgcccattgtctaaaggccttgctgcatttggtacatttgtatggcttctctccagtttgaatactctcatgatgtctaaggtgggaccacttcacataagcctttccacactcattacatttgtaaggtttctctccagtatgaattacctgatggttagttaggcttgaatgcccaataaaggttttaccacactcattacacttgtaaggtttctctccagtgtgagttctctgatggtccaccagacttgaattttgaataaatgccttactacattcattacttttgttttgtttctctccagaatgaatcctgtgatgttttacaattttgaactctgaaaaaaaagccttgtcccactcattacatttataaggtctctctccattatggatgacctgatgtttagttaggtttgagcgcacgctaaaggctttgccacactaattacaacttgtaagttttctctccagtgtgaattctctgatgattttcaaggtatgaattttgactgaaacttttgccacatatatcacatttatatggtttctgtccagtatggattctctgatgtctagtaaggtggaacatcctattgaaggtcttgccacactcattacatctgtaaggtttctctccagtatgaattctatgatgacttgctaggtttccaatttgcctgaaacctttgccacatatatcacatttatatgttttctgtccagtatggattctctgatgtgtagtaaggttggtcatcttattaaaggtcttgccacactcattacatctgtaagatttctctctagtgtgaattctctgatgattttcaaggtatgaattttgactgaaatctttgccacatgtatcacatttatacggtttctgtccagtatggattctctgatgtcttgtaaggtgggacctgtaattaaaggtcttgccacaatcactacatttgtaaggtttctctccagtatgaattctatgatgacttgctaggtttgcaatttgcctgaaacctttgccacatatatcacatttatatggtttctgtccagtatggattctctgatgtctagtaaggtggaacatcctgttaaaggtcttgccacactcgttacatctgtaaggtttctctccagtatgaattctatgatgacttgctaggtttccaatttgcctgaaacctttgccacatctatcacatttatatggtttctgtccagtatggattctctgatgtgtagtaaggttgaacgtctgattgaaggtcttgccacactcattacatctgtaaggtttctctccagtatgaattctatgatgacttgctaggtttgcaattcgcctgaaacctttgccacatatgtcacatttatgtggtttctgtccagtatggattctctgatgtgtagtaaggttggacctctgattaaaggccttgccacaatcactacatttgtaaggtttttccctaatgtatgctttctggtcttgtgtgagtaatgaaggatgcataaaatcattcctgtatatattagaaatgctggtgttgacacaaggaagatttgtttgaagtaatgaaactgaggacccacgggtgacagacttctcaatttgattacattcataaattttcctttcaatttgaaatccctgcagttcagccagatgcaaccaaaagcttagttcaagctgattttcaactggcttatttcctgcattccttccatcaccttgatctcttcttccagtgatgtttttaattttaattgcaggtatttctctgtaatttctctcatcattgtgacactgacactcaaagtcatgaatattttgctgcatttctctgaagtaaaaatcttggatgtcatggatttcatgtctttccaacatcactgcttggaatacttttcctgtgctattgttctcttttggtggtaattccttgatcatatgtgtaggagagacatctacaagatatttaaaaaacaggttttctatta

SEQ ID NO: 1888020 - DNA, 4001 bp, Homo sapiens
ctgaaaaacatggagaaacctcctctctactaccacacaaaattagccgggtgtgatggcgcaggcctgtaatcccagttactcgagagcctgtggtaggagaatcccttgaacccgaggtagaggttgcggcgagccgagatcgagccattgcactgcaccctgggcaacaagagctaaactccatctcaaaatttaaaaaaaacaaaaaacaaaataaaaacacctcctttttgcagccttaatattagccttagcttggaattactaggttcaagcttcagtttccatgtcagtgttattcacctggtttttgaaactaagtgtttgaaaaatccagtgaaattactcaaacatagtgtttacataaacggagattttaagatactttttaaaattttattaaacaggagtctcgctctctcatgcaggctaatgtgcaatgacgcgatctcagcttactgcaacttccgcctcccggtttacataaaggaaggaaattttaagatccttacttttttttttttgcgatggagtctcgctctgtcgcgcatattggaatgcgacggcgcgatctcggctcacggcaacctccggctcccgggttcaagcaattctcgtgcctcagcctcccaaggagctgggattacaggcatttgccaccacgcctaattttcgtatttttagtagagacggtgtttcgccatgttagccaggctggtctagaactcctgaccacgtgattcgcccgccttgctctttgaaagtgttgggattacgggcgtgagccaccgcgcccgaccaggaagtggttttttaaccctaaggcagttttgtttttgtgttcttcccctattgcctggggtcagaccagatcatctaaactgatcccgactggcttagaccccaactttttccaaataggataaacggagatttgcagggaaagaagagggaagaaggcgtagtattgatttacaatttttacaatttatgacctggaagttgagtctttcaagaggaacttagttgtcctaacaaccctttacctcaagggatccgcccgcctcagcctcccaaaatgtgggattacaggcgtaagccaccgcgcctggccccataaatttttaatacgagaaaagagaaactgtgaaccccacggaccaaagctcttcccattcgggaacccgcaccccgagtcaagattctcccctaaagaccctctcgtggttcctgcacaatctgggagatacccggagctgtgggtgcagagctgcccagagagggctccaggccggggcacactcgctgccaagggaagagtcaggacgcccgggaccggcttatagagcacccgccatcttttttttttttttgagacggagtctcgctctgtctcccaggctggagtgcagtggcgcgatctcggctcactgcaagctccgcctcccgggatcacgcaattctgcctcagcctccctagtagctgggactacaggcgcccgccatcatgcctagctaatttttttgcatttttagtagagacggggtttcaccgtgttagccaggatggtctcgatctcctgacctcgtgatccgcccgcctcggcctcccaacgttctgggactacaggcatgagccaccgcgcccggcggagcagcttccatcttatggatggtggggactaacgccaagctgggcaaggagaactcagggcacagattgtggagctgactgcggggagccctgagtcccgccactgccacttcccatcaaccagtccctcccctctctggggatgttggaccggtactcttaccatttctagacttctagggggtcctggctcttggctgtggatctcccaatacctgcaggtcaaagggcctcagaggctgggcctctatgagcagagaacacagagcagtgaacaagagatctggagctccagcggcagcaagagacaaaggccgcgccataccagaaagccgtcctcttcgctccagctgcctgcctgattggagggtttccagaccagcctccctgattggattatgcttaaggctctgccccctcagtacctgagtgacagaagatgtaatcagattctgggctgagtgaaggagtaacagcctaagatgcagcctttccagacagggcttcctccctgagctgagccaggctcaccccagagaagggaacaattctgtatcttttttactctctctgtttttgaatgtattcaaaaggtgagcaggagtatttttctgtcatatgaataatacataatatttttgttcaagagaaaatcaacttttactttggtaatagtgtattatcaatactaaagctaattttaataaaaccttataaataaatcaaatttgccacttttaacctctcgagatttacacatatattttgtaatctcttgtaatttttttaactttttatattttatttttatctacattctattttttcaatttgaaacaacctttaagtaatttcaaattgttgtaggagatagaaagaaatcatttaaggccaggcacagtggctcatgcctgtaatcccagcactttgggaggccaaggtgggcagatcactttaggtcaggagttcaagaccagcctggccaacatggtgaaacctaatttctactaaaaatacaaaaaattagctgggcatgctggtgcacacctgtagttgtagctattccggaggctgaggcaggagaatcacttgaatccaggaggcggaggttgtgtaatggcccaaggggtacaccttgccctttggtttagacagagctgatttatcaagacgggccttttgcctagacagagcctattaattaagacaggagaatttgtggaggaaaagttaaatattaaatttgaactcaattgaatgtggacacagacaatggtcactaagtcccagaataggttgtgtgagccccttgaggcatttatccagtgctgtattggagaaatctgtaattcaatctattcccatacatttattattgaaaaacaataggcaatcacaaaaacaaattggcctttttgtgttccttgggcctagtcttgaaaggctgtcataactgggccttatgccaaacaacttgctacaaaaagagctagggtcccagtgtagcaggacaagccacagacaaaacctctcagacatcgagttgtagaaggaagggctttattcagctaggagcatcagcaagctgctgttttaaaatccaagctctctgaatgcacaatttctgtcctttttaaaggctcacaacactaaagatttcacatgaaagggtcgtgattgatttgagcaatcaagggttacatgacaggggctgcatgcaccggtggtcagagagaaacagaacagggcagggagtttcacaatgttcttctatacaatgtctggaatctacgaataaaatcagtttttaagttatgagttgattttttattattaggtttaggccaggcaggcccagggctgcctgtctttaacttcacttccttgtttttttcttaaaacaggtactgagtataaaacaataaaacaatatgagtgggtctctctcttccctcatttcctctctttgagactctcacttttttattagtgggagttctcactcttatttttgctacttatgtctttttgtgcaatagattgatagtgatttatacagtatgcttgtgctgaagtattttggtgaactaaggtagcgacgaagttttttatcatttggagaaatacaggtatcagacaagggagcagtaagcaggttcctgttactattattactcttattataagagttttaaatcttcctatttctggaattaatttctaaacatggctcttggattgagtctgtgccacacttgcacgggtacatgtgctagttttgttatatctttaactatatcttcaactacttgcccctgatcatctgtgtgtagacaacaattag

SEQ ID NO: 1888021 - DNA, 4001 bp, Homo sapiens
aggcagaagaattacttgaacctgggaggcggaggttgcggcaaaccgagatcgcgtcattgcactccagcctgggcaacaacagtgaaactccgtctcaaaaaaaaaaaaaaaaacctgaagctgaaatgagtaaaccaattttttcaaggtgataaacccagggaggggcagtgctgacctgaaacactcaagtgtctgactcaagtgtcaggtcacatcatcctatcacttgggacatccccccacctccaagctgctccctgaagtgctcagtgaccaccctcccagaagacactcaactgtgtgcttttcaggtccttgcaacaactcattgggggtggttttcttctttcactagactgagagaatccagaggacagaaatcatttcttctttttttttttttttttttgagacggagtcttgccctgtcgcccaggctggagtgcagtggcgcaatctcagctcactgcaacctccacctcccgggttctagcaattctgcctcagcctcacgagtagctgagattacaagggtgcaccaccacgcccagctaatttttggatttttagtagagtcggggtttcaccatgttggccaggctggtcttgaactcctgacctcaggtgatccacccaccttggcctcccaaagtgctaggattacaggacagaaataatttggtttcctccataccagaatttgattggctgactagccatgtgtccccaaggaatggaaacgggttggagaagaaaaggcgtgtcccaagggattagttttttacaataatgatataggagactggtcccaccccatagcatccagctgctccctggggaggcctcaccgccacacctcaggctctttgggaggaacgacctaggggctgatattcactagactttcccaagagacttggcagctgtaggcatcttgggccagccccaggtagtcctgaaacccaggatcaggaaaaggcagagggtgggctgaggtcgcatcactgtaaagtttccaaaggggaatctcaacccaagacattctcagaaggtgtctgtgcctagggcagataaaaagagacacaaagattgtttacagcggagtgtcaggtggtttttctctgaaacgttcacaaacacaaaacaaatatttttaaaacggccatatactgccctctaaaaaaatgacgattaaaatactgcctgtgtttgaaacatagcctggaggacgaagaagtgatactgttgtgaactaaaggaaatccgtgttataaaatgcggaaagggatcaggaaatcccaaatttgctgccagccttaggagaaggtagcctagggaccacagtcgcggatttgagaccctgcttcgcgtatatttgggaaactcagataaaatacaaaagcccctggtgagaaagagggaactggggaccccacagcctacagctcctctcacacgaaccccatactcgaggcaggatttcccccatgaccctctagtggcccccgtacaatctggggagacacggaggcagcgggcgtgactggggcagcgggcgcggagctgaccagagagggcgctgggcctggggccacagtcagttgcacagggactggaccggacggctaggggtctcggctgccgtcgcagccccaccctgcggcctgagaggaaccagggccgaggtgcgccagggggacttgggtctcagaacccagagtcaactacgaagaggcccgggtcccgccacggtctattcctgccggttccaaccagtcccatcctagtctcgggaccctcagccccgcacactcaccaattcctggcttccaggtgtcccagtcctccctacggctcctgctgccagtacgggtcccagtgtgacagaggatgctacagacacgtctgtgggtgtctgtcagctacagagtaggagccgcatttagaggggtgaagatgccgcgcacccacctccctgcagtgcgcctgatccacagttctcacgaccccaccccatggccctgattggatacggctccaggtcccgccccctggagaccgagtaacagaagaggcgatctcactgtgctgagtggagcgcgatgaacaggttccagacacagcccttggcaggcgggcttcctcccagtgcagtgacccgactctcctggggagaaatgtgcacttaagcagaatttcctgactgattgtactaatggcccttcctgcttctttttcctggaccagcaatcacaagtgtgtgctaggaatcccagactcactgtccagtggcgccatctcctggccttggagcaggaggggggctctgtcctccaggaatcaggaatttggcatgaggctgctggcgacatagtcaagcctttctcccatctgatgtctcaatctgcttattttcaagaaaataaaaacacatcgataacaggataaaactgttaaattcacggaaaagctggacttatatgacagcaatattctataaaggaatcaatagagagaaaaagcaaaaacatgagctagctcagagaagcagtctttcagacgcagttcagcaggaaaaccccaatttagaggttaaacatattcccaaccatgggtgccagactgttgaaatgggtccccagaggccgggtgcggtggctcacacctgtaatcccagcattttgggaggccaatgcggatggatcacctgaggtcaggagttcgagacaaaccttgccaatacggtgaaaccccgtctctactaaaaatacaaaaattagccaggcatgatggtgggcgcctgtaatcccagctactcaggaggctgaggcaggagaatcgcttgaacccggggtggggcggcggggggagcggacagaggttgcagtgagccaagattgtgccacttcactccagcctgggcgaaagagcaaaactctgtctcaaaaaagaaaaaagataagaaaaagaaatgggtccccagagtgtccctgcctcattaccaagtcatggtgatgaggcaagatacataaggattcagctctgggagttcaacttgccctcttgtcccctctgcagagtgtggctatgctccctcctttaagtgttaataaaagtttccaatcaaaagccaagaaactagacactgattttgaaaacataaggaattcctcgtattttatgaaaaacaaagctattagtcatacagaacacgaatagtacaatggcagacataatgccttcgttatcggtaattaaatggaataaacttgccaaacaaaagacagaggcagggagaatgaatctttaaaatatgatcaaattgtatcctgtctacagcacattcattgtagatctcaatacccaagtcagttgaaagagaatgaaagaaaaagatattccatgcaaatagtaatgtaaagagagcaggggtggctatacaattgtcacacaaaatagactaagtcaaaaactgttaaaagacacaaagaagagcactataaaaggctcaaatcatacagaatatataacagttataaatataattgcactaaataacagaggcccaaaatatatgaagcaaacattttaaaaatttaaaaggaaggtcaggtgtggtggctcacccctgtaatcccagcactttgggaggccgaggtgggtggatcacctgaggtcgggagtttgagaccaaccagaccaacgtggagaaaccccgtctctactaaaaatacaaaataaattagccgggcgtggtggtgcatgcctgtaatcccagctactcgggaggctgaggcaggagaatcacttgaacccgggaggcagaggttgccatgagccgagatcacgccattgcactctagcctgggcagcaagaacgaaactccatctcaaaaacaaaaacaaaaacaggacaggcacagcggctcatgcctgtaatcccagcactttgggaggctgaggcgggtggatcatgaggtcaggagttcgagacc

SEQ ID NO: 1888022 - DNA, 4001 bp, Homo sapiens; identical to SEQ ID NO: 1561582

SEQ ID NO: 1888023 - DNA, 4001 bp, Homo sapiens; identical to SEQ ID NO: 1561587

SEQ ID NO: 1888024 - DNA, 4001 bp, Homo sapiens; identical to SEQ ID NO: 1561599

SEQ ID NO: 1888025 - DNA, 4001 bp, Homo sapiens
agatgttttcccttgtatttgtattatcactatatggaatctaagtatatctaagaaaaactaaacttaaacttactttgcttatttcatattagtttttatctgtcttctgcagtgtgtaattagattctttagttttctgaatcaaatgctttgccccaacccctttttccacgacttttttcagctgttttcccttgaaatactgacttggcttttaaagatacattttatcacaattgcagaaatgtgttgtataaaagtttgttaaacagggctaactgaagtcttagatgttgaacagctatgtgtaaccacaatttatactacttgcagcgaactcagattattttcggatgttaagtatggcttgaaactatgttaacttgaaatgtaaagaaacagcaaaagacaggtgtatttacctaaagatcacatattaaggaaacaggcttggttaattcctcactattgacatctattacttgtcaatacatttaaccaaccaatgatactttaaatcataatgttactttgaacaacctactttaaaaggttggttcaaaaatgttgaggagataatgtattggttgggattgacctaaatttacaaagcaaccatgtgctgtcttatgctacccagattgtgggagcaccaaaagctatgtccctaggactacaaagtgtgttgtttaaggatcttgcagagagccaatgcccctattggcaacatcacttctcatccttaagtttcaccagttgggtggcctcaaggcactaggattcccatttttttttttattcaggtcagagaagagtccatcactgtgactgggaagaatgtcaagtcacagggtaacggcggaccttaataaaatctcggcccctctgcaccgaataccccaccaggaagggctaaggcatccatggggttgtgtctcatctcaagtcgctgtgtgaagcacgaggccctcacacctcatttaaggcaggaggcgtcaggggcgaccggccaggtgtcccggcgccttcccgccgcttctcagccgtggaagcgcgggcatctgagcacgtggagccgccccaggccgccccgcacacccctcccgccagatgtagtccaggcccagctgggcccgcgcagggatccccagcacggccacctgactgagtgctgggcgtgctgcggcccgctgcttctgcctccgccgccggcgctgcggccagaggaaggcgcccgccgagcacacgggccccgggagcgcactgcggccattatccgcggcgcctcctagtgggtcaatggcaaatccgcctggttctcgcgagagctcccccctcagtggggattatataatttccctcaagcgggggtgggggtgctgagagcaccctccctcaggaaaagttaggtgcaagcaggggtgggagtaagaggaaccccccctggggaaaagggggttaggggtgctgtccccactgcccccccctatttagctggacaatgagtcctcttatgctaatgaggcacttacgtcacttccgctctttctcggccgccattttggctagggcaggttcggggactcggtccgaggcgcttgtattgtctgctgaggggagacgcgggatcagccccctcccccgcccgttgccgccgccgcctccgccggcccggtctcccctccgccgcccgccgggatccatgagctgaactcccgcccccccccccccggccgccgccatcttgtgccccctccccctcccgcaggcagcgctaagggggattttggcgtcttctcagacacagctccctctctcggtccccgctgctgaggagcgagaggagcgcggccgccgccgcccgcgccggtgaagccgcctctcccacaccctccgtctcctccctccgcccctcctttgtctgcaccgctcgacgacgccgccgccgcccgccgctctgctgcgcccgccgcgccccccggcagcacccgcggccgcggcgcgagccggagtccgccgagccggagcgcgacgaggccccgggcgcgccctccccgctgccgccaccgccgtgccgccgccatccgcccgccgccgccgccgctgtccggcccccgagcacgccggccccgcgcgcgcctcgaggccgagtcaaggtaagcccggcgccgccgcgcgcggacccgcggccctgccctgcctggcttcccgaccccggcccgcgcggccgccagtgcagcctggccccgggcgcgggcgcattgttgttcgcatcgccgccctccagccgcacacacgctcctttgcacaccccggcgccgacgggtcccccgtcccggcacggaccgctacccgactctgctccggaggtccaggcgcctcctcctgcagcccgacccccttctccgccctgtgagcccaccgaggccagcactctgcctggccgcccggagcttttgcagctaagggcatctcccccagccagaaccgagcttctcccatcctggaactaatcccgtccgccccccacccccaaaaggagcccccccacgcacacccccatgccttgaaccagccttctgccaggtctgcccacccttacctgggggaggggggacggggttggggggggcggggagcatgcatggcatggagtgagtctttgcctcccctgtgcaatccttcttccccaacctgccagctttcctcttatcctgaccacagttcaccaccatcccttttccccaatctcagctgcctggtcagcacctctttcgaacattctgagccccaactttgcagtaaggtggtagaaaatggaaatccagagagctgcaaaaagatttttttttaatgtaatgaatggggagtagttttgtgaacacactcgtattcacctcttctttcctctgggaggcctgcctgccttcccctcccccccaaccttgatccctgtctgctggaaaaggcgcgattgcttctcttcctcttctgcccaagaccaagactctaggtctgatatcctttttagccacacacacacaccccccacacacgaagtcttcttaatcttcttgaatttaccagttactctggacacttcttgccataaccccatttcacagacaaaggcttaggagggaaaaagaaccaaactgtttctgtgtttgtcatgttaatgatgtccatccccacacacccagttcccatccctgatgcttcttgtgcctgtatcttgaaccttcagaatgaaaaaaaaaaaaatctcttggatagcttgatacagtttctttagaaatctgcattgttgcttctggtttatggccatggagaaaataccagcccccacccaaaatgcaccgcagccaagtcggctaaaggcgatgagtgttggagtcagtagggggcgcattctctgcactgggtaaggctgcagaggggggaagggcccccgagctagaacaggatgtgcttcacagcgccttctacagaccatgggaaaatgggcccagcaagacacactcgcactcttagttggtgagctgacagcaacatggcgaaggattaagtgagtcaagagcagtgattttacttcttttaaagagcccaccctgcattttagaagttttctccttttactttttcaaaactgttggcccccagtccatatttgttcttgacgaatcaccttggcacatccttggttcggattcccttcctctggagttcttccacctcaagttttgaatgtgtcaccatatctttcctaagtctggtggtaaaggagaaggtttgaaacaaagtaacaggtttgggggcatagctggttaactcccttcttcataggccaaatctttccaattctttgagagttaaaaatcattcttgagagatgttggattaagtgtgtagatgggtgtcatgatttgcaaagccttgttggtaaacatcaagcccatgttgggttcttcattgtcgaactcaagtgttgattgtaa

SEQ ID NO: 1888026 - DNA, 4001 bp, Homo sapiens
ggcccatgccacagtctcaataattatcagcaaatcctctcatttataaataagccagtacaactattaatacacaagcatcatactttgtggaaaagttcgtatctctaacagcagtacaataagttctgaaaatactgaattatgaccctatgtaggacatcaatgtaacacccattctccccacaaaatgccactaatgcgtgaacccccatcagccgcctgggactttgaaatacccacatccggaaagcccagagactgaagtctcaaatgattatggccagaatagcatgtagttttaacttttttttttttttttttgagatggagtttcactcttgtcacacaggctggagtgcaatggcatgatctcagctcactgcaacctccgcctcccaggttcaagtgattctcctgcctcagcctctggagtagctaggattactgacgcccgccaccacgcccagctaatttttgtatttttagtagagccggggtttcaccatgttggccaggctgctcttaaactcctgacctcaggtgacccacccgtctggctctcccaaagagctgggattacaggtgtgtgccacggcacccggccttagcatgtagtttttaaactacccataattgtaaattttgtacattgaaagacccataattgccacaaataatcacaattatgcaagtataaataatcaccctgcacaactctcctcttgcccacaaagttatccctttcatgagaatttaatatgtgacaatggccattgtctgccagggaaagctcataccgatttcagtttcagcaaggccacctcgagtctcatagaaaccagaaaaaaaaaatgtcattttcaggaagcaaattgatcgttttcctcacatttccatttgcgttaagatcatggtgtggccttgctctggactttttcctattccctgttgcctctggagaggaggaaagctaaggatggctggtgggcccacatcgggggtccctgggtggattgaagggctcttgtggctcctggaagcctcgcccaagtttctggtaagaaatcaaaaggtgaggtggtgtcccctgttcccctgtgggatgatcagcccacaaaagtgggacaaatgagtctataaaatgcttcagaggggcaggtggactgctcactcgtgagtcccgggaaacaggcctggcccagttctccaaacctttccccagggagaccgcatctctgtcttctctcttcttctctcttctctcttgttctctcttctctctcttctctcttctctctccccctccctcctccttcctggttctcttttttctgttgatttcactccctcctttcttttccctttctctttcctcccctttctctctctttctctgcctgtttcccctttcctcactttcatttctctttctgtctctttctttctctccctctctcaggtctctcttctctgtctctcttcatcctcagttttcccctctctcccctcttactttctttccctttttcctttttctttccatcttcttcctctccctctctgggttcgtggcaacacaaggaaacccgcacatccccagcccgcagcctcgccccctcggtcccactgcagttacccggtgatccatgcaggtgggaacaatccagttaacttttcccatccgagtgattctctttctcttcttcattcataaatgccataactctcccggtcctcctttccaaggctcgtgcacttgatttcaaggcttgcctgccacccagggtgccaccagagtcccagtgcctgggttgggggctggagcgcaccctttgggatcccccagcctgtcctccgcctcacggctgcctcgcttctgagctgccaccctcagctgactcactcagatgagatttgggagggaggggggcaggaggaggagttgcgagaaggaggaaaacccgcctggtcgggtccacactttgcctagatgcgtttgggtgtggtggggagcgggtgacggcctcatttacagacagaggccggggctggcttctaggcgaccgggttggccactttcactgcgcttctgggtttgctgggatccaagttgacgcgacttttccaggagtagctggaagacctgaatagaaacttcaggggtcccaggactggcggggcttagaggaactccccgccccgcttgcccttccagggaacggcctggctaggggtgcgctttgacgcaaggagcgcatcgctctgccttggccgggaccagagcttgggggaggcctccttgcccactgcgaagactttggggaaggcgacggccaggggacggacatctgggggagggctgggggtctgaatggcaggagctgcaccagggggctgtgcgcgctgcgcgggtgtgcgcgcctcgccgggggctgtctccacctcttctggcaagttggacctatgagtgcgcagctccgcttacaactatcaacagccgggaaggctgagcgcgtgtgagcgccgaggggggcgcaggaccctcgcaacttcttcgcaggactccagcctggccgccggcgcccgcagccgtccgagagccctgcgcccgcgcctccccttgcgcaccgtggcagcgcccggcgggcggtcctgccagccccgacgggatgcccgcagccatgctcccctacgcttgcgtcctggtgcttttgggaggtaggtgccaccctcccccacccggcaaactggctgagctcggaagggagggagctcgccgtctaatgtcccctaagggcccttggggactacggccctgggtcggcccacgcggctgctatgctgcgccctgcgcgcctttctccagtctcacctggccggcacctgcgcgcctccaggagcttcctggggcctgcgggagggagtcgcgtcacctcgcaatatgagagccgctgcactctctgcgccagtcggggcctggcctgtaggtacccagagctgccctttgtgccgggcccagtgggaccggggcctccaagaagatgcaggaggatcccaggcccactgagacccccatggtgcgggacaagcccggctattcagaccaaggttactggggttgtttttgcccacggaatcctgacctgtgcggggtcggggcttcttcctgcagcaggactcggggagaagctagggagcgcgcagtgaccccaggctcgagttgtgcccagcaggcctgacaaaggggaccaaggggcttcaggaacccctggtagagtagtcaatgccttctccaggactaaggggttccctggtggctcttcgtgggggtggggagtagggtagacaaaactgtacaaaggccagctgactggagtgtgccatcacaggggcccagtcaccactgacaaaaatgacagtaaccacagttgaagtgtgcccagctgggggctcatccccaagcaccctcacattatgaatggctgagaattctggccctggagttagaccacctggctgggaagcccagatcaacatcatatcaacccgtctggctttgggtaagcatggccatcggctctctcagccttgactttctttcctgtcaaatgggctcacaaaatcccctcctccgtctgggatgattgtgaagattacgagagcacgtgcaggaggatcactccacttgctgcctggcactgagctcatgttcagggaatggcagccgagaaccccggggtgaagaggggctgcgcggtcccacagagcacgctctgctccatgtataggcaaggagcaaagtctaagtcacctcgaggagctcttcaatcacagtcttttcttcccagcccccaaatttctaaacaagctgttttgagaagaactggcaggggtctgaaggagggtcaggggagggtgcctccgcagtttgaagagttgcagattcacctgtcgaaagggacattcatccaggggccgcttcccctgccagtctggga

SEQ ID NO: 1888027 - DNA, 4001 bp, Homo sapiens
tgggggggaggagcgaggcctgctcttccctccccgtctgtccgcagagcgcctcatgccaggaaacaggacaaaatgcacgccccaaatggcccgcagagcagtgggactgatggcagcaaagacggcgctggcacttacttaccgaggaaaaggccagcagcagcaagataagagcagagggagaagtgacagttagtggctgaccgggccgcagtgggccaagttgtttccatatccctcgggctgtcaggctgggcagctctcctcccgtctcagaggacagcggccactgccaagctgggctgagggctgcacggggcacaccctgctctcacgcccagggccgtggaatatggagactggcttcgactgtgcccgcgtatctggcaggctccctaccttggacgccaactgagagaccccactggagacatcatcaaaaatctttccctccttcacctgcacggatgaagacagcggcattaatgggggcgggagagatgaaagcttaaagcttcaggagtgcaggaatcccccgggtgagggcatccgaaatatcaggggcatgtggatacccatcaggctgagccccagaaagttctacagtggccccaaagggattccagcatcaagaaaccatgtcactgtgaggcctggtgtctgcaaacgtggcccctgccggccactgctgacaaatagcaacgtgacctaaggacagcccacgctgccccaggtgggtcttccccacttgtcccagtcaggccccgaaggaggcagggagctggcggggctcttgaccccctaggatggcaggcatcattcccataccagagcctcctctgggcacagctccgcggccagctgtgggggtgaggcagaggaacggaggtgggctgggggtgctgggctctggggccagctgtaggggtgaggcagaggaacggaggtgggctgggggtgctgggctgggggcactgcaagggaggccctaggccaggggaagggaccagctggggggtccaagaggagcccaggccccgaggaggacgcctgtgctggagaggtggggtgtgaggcttggcctcgctgagtcccagctgctggacaaacaatccccctaacacccctgacacacccacgtcccctggagtgaagggctccaggcacaaccacccggagctgcccgttaccttctcctgcgcaggcttgaggacgttctcgttcaggctgtggcccagctcggacgcctgtaggaagggaagtcacgtgagccccacgacagctccaccacgggacacgggtcggcagtggcagcacaggccagcaaagggcagcacgagcttcaccagcaggagggaaggcagcaggatacaagcgcagggagcaggaaacggggctttgcacacaacacccgaagggcagtaggccgccacctctagaaggcggagaccgcggcccccaccaattcttgcaggaaggtccccctccagggtcctccctcacgcgccaccatgcggccctgccgggccgggctggtgggaacaggccctgtggagcctgtgcctgaggccaacgccggctgcagccaccccatgctgacctgcaacgcctctccttcctccccaggcaggcaccgagtcccccctggagggaagagggcacggaggctggggccataggaagaagctgctgagaaaggagctcagcctctcctgatcctgggtcagtggagtcgaggccacacggccacctggggatgtggtgtgaggcctcctcttcccccaaaggcagggagcagcacggatcaaaggccggaaagggaagaactcgtcacagagcaaagatcctcccctttgcactgcgttcaagggagcgcaggtggccaggaaaccctgctcagcagctctgcgcccagtgcccccgccctccctccagcacctccccggcagcaggcctgcgttgggggtctgtgtgttttggagatgggggtctcatttttttgcccggggggagcgcagtggtactgcgcaggggtgacaggcacacacagccaagcctgatgcagatcctggatcttaaaggagagccacggaccgaggccagggagagggtctgagcgtgcgcacatgtgaggtgacacaagacagtggcagcacgcaggagggacagaggaagccaagcacattctcggcggagatgcgggcggcatgcacgagcagacacgggctttaccggctccggctgctgcttgtgaccccaaaactttacccgacagcaagaagacaggtgaggagagagcaaggtgaggggcggcattagtaaccagcagcgccttcgaacccaccatggggtgccgcaacactaaggcagcaccgggcaggctctcagcaacacaaccctggagcagccgctccctgccctggaactgaccaccaccttcagaaactgcgcgagcgactgcacctcaggaccctgggaggcccacgaaaaagccagatgggcgtccctgcagctgggggtgggcacgtggggagactccctcagagaggaaggggtgatatgggccacgggggtgacggatgggcacctcgtgagaaaggacaccctcgcccagggggcaaaggcgcgtcctagagccatgcacagctccacgcctgcagtcctgagctttcatggtgagcctcacatgggtactgcctcctgggtgtgattctgaacccgaggacagccagatcacagccctgaccaccaagtgggaaccgcggggcccctacccacatcctaaagaataaaaaacatgcaaaggcctgaggccacactgccccgactgggggaagccctggccagagcaaagagacgctccgttgcctcgaagtgcagacgcgtccagtgtgccgcaggcacagcaccaaccacagcggcccttctggctgagcggccaccgccagcgtgggccatctgccaagccgggcagtcctgctcccaacaaggtggccggctgcagtggccacacaccggtaccagctaccagtgaacaggaaacgagtttggccctgcaggccctgagtgggtccatgaggcagccacccgggcatgaggaggggaacagcatggcaggaacacccccttctacgctgggacccctcagctctgagcatgtggcctgagaagagggaaccaggcagcttcaggtgctgcacgtgacgtcagactcaggatagtttcagatgcaccagggtgcagaagcttctcctctgttaccttctgactcgcttgggatccaaactttgtagcctaaaatgaaaaacaaagacaaggcttgacagacttaacatgggctgccaggcatccttcctcagggcccacagactcaggtccaggactgtctctcaatggcccccgggctgccagcggctctgggcgggccctataactctgagatgcccagaagagctgcagcagagactggattagcacaaatgctggcctctccctagagggaggccagctcggtgtgctattggggtgagggcacacgtgagcagcgtgcaaggccagggaacagcagggccaaccccatcctccagacttcaggacagggccggggcctgctggagcagaagacgggctggggaagccacaccagcgctatcttcaatggacagtgccaccgccccagccccatctaccctgctgtggggacggctccatgcccagcacagtccaggcaccttggtcactttaaagctcggggggaggagaaaaggcccggtcgtgacactctggctggaaggtacctgggcctccccaggccgcagccctcccgtgcagacgagaaaacggcggccctggcgggaaccagaagctgacgctcggcaaagtcacggggccgtgggagctggagcgtggacacctggcctgctgccccttccagggccctcccaggccttcctctcccagggaagacacggggccagagtgaccacaggggcatgtga

SEQ ID NO: 1888028 - DNA, 4001 bp, Homo sapiens; identical to SEQ ID NO: 1561632

SEQ ID NO: 1888029 - DNA, 4001 bp, Homo sapiens
cagatgcaggcagctgcccatccgtgtgggatttcccccagagccgtgtcagaagctctgcagtgccccccagatttttctggggggaccccccagagttcttgatgtttcaccagagttcttggtgtgttctgtgagctggaatccagctcgcggctcagttccactgggtttctggatggatcatgcctgggttgaatggaacagtagagcctccagttttccagaaattctggggctcaaaccctgatatcttaagcaaagagggacaagagtcaggtccaaaaggaaatgtgagatgtgctttcttcccagctgttgctttctgcccacctgagtcctcttgatttttgcctgatgtggggaaaggaggtggctccgaagaggtgatggggacagtaaatgggggcactcaaccggaagcccatgcagcctggcagtttccagtgaggggtcaatttgaggtaatttgacagccccctggttccatagccaggcctgtgaaggtggggggtatggaggtgcccaggggctgatgagggtttcccttcaactaggatgtgcagctgggtgcccatggcctgggagtgtgggtgcccagtgggacatagagtgggctgggtgggctaaggccccagtgaactgtgagtcagagccatttctggagctacctgaataatctgaaaaagtatttaccatttctcttttaataatgtaaactattggaagtgaaaccagaaaaccttactggccataaggatgcagaggataccagcacatttgtccagcgtgcatctgaggcctgctttgtgctaagctgtgtgcctggtggagaggccgctccagggctgaataaaatagggctggttcttgctgacaaaaagcttaaaacctggcaggaaaagaggagaacccaaaaaactatacaaacaaactgaaactccagcccagatggcgcaggggagaggacttgggcttggagcgtgtccgacgtggatgcaccattagggcatcagtggacgcttccctgggatgctcaagaacaggcaggtgtgagggaggtgaaaaggcagggaacagtgttgcaggcagcggaaacagcatgtgtgaggggctgtggtgggctggagactggcacagatgaggagggctgggtgggaggaggctgtggagacaggggccggaccatccagggccttacaggttggatgacctggagttgacaataatgcctcctctctctccccagtttctcggtttggactgtcagttccatagtcttctttatcacagaacacattagagagctttggctttttatcctaagagctgataaagggtttgaggcagggaagttaattgctcagcccctgcaagctgctggggcagggggagtgcggggtgagaagagtggaaggggaacccccgggttctctgggtggtagctctccctccaccatcaaaccatcaccgtgcaggggtgacactttgctggaacaaggctctggggtggttccattcactacctgcatatctctgagcctcagtctcccacctgtgagaggggacaacagtgctcgcctctcaggtaccatacggttcagagggctcgctccgcaccttgttctaagatggttccatcttgagttggggtcagctcactgcagctgtgatcttactttagagccaaggcagcttgaatcccatggtggaagattcacactgacattgaggtttgctccaaccagctgcgaaccttgagtctctggctttgcgctggcatcttgagcatatctttccatttaactcattctcagaacaatcctcatggctacctccattttacaaacaaaagaacctgatggacagagactgacttgctcagggttacttcactgaaatttaactccaattttcctcaactcagagcctggagccctacagcctacatccctgagcacccactgtgggacccgaggaccactctggggatttcatcacaaagaggattccgggcctctcaccccctgattgtctctgctggtggctgtgtctctaatgagggagagccttccatttgtcgctgtatttctcttccctcttgacccccagcctctgtgatccacaccttgacacaagtttgaacggctcgttactgcgctccattgccggagcagacatttctttgcagcaggacttttcagagcctttaaagagctaaggtgcattatgacatctctaaggagcaatgtgtcatgtggtgcttcccaacctcatttcaccacagagcattttggatttttgatcctctcattttcctctcttagctatcctattaataagttgcagtttttgagaccttgataaactccaaaccctttgtcttgtggatggagaaactgagggctagaacataagggccactgactcgccttctgactgtgacaacgctggcctccgggtgctggacgggcatcttcctgactttcccatgagtggctgggttggtgctgtctgcagtcagctggccctgcccagagggagacagacagccgtggggtgggtgagagggccgtgggtggccacccgagctctgtctggggcaggaggatattgtgcctctttgtgtatttttccaccttactccccaaagctttaattttagccttcctggatatgcaccgtcttcaagaaagtgtatttttaaaaagccttggacctccctgacttcctcttcccgtctgggggatgccagggactgttctatgatttggcaggaaagcagggcattccctgaagctgaggtgggggagcctggggcccgggctgagtcctccccagcctgcagctcagaaggggcaccccttggacccgggagctggctgccagggtggggccggcttccttctgggctcctttgatctccttcccgggcttccctgcaggctggggttgctgctgggctgactccaggtgcacggcgggttgcagtttcccggcctgactcaccgcagccgcaagcctgtgctccctccatgacatcatgctagcctgggaatgctctggccatgctcgctggctcgctctcttgctccttttcttctgaggaatatccttgcggcccagcaaccgttcacaacatgcaggccttcagaatgtccggcctgcagttttccaaagagcagcagagtgaggcgagggcgagggtcagactaggggtcggggagcgagtcagctgggtctgcgagtggcagagcccgtcatctccactcctgcttagaactcctcccggcttcccagcgctcagcaagacctgacctcccgcggccagaggccctgcaggggacatcgtgcacctgtgccctctcctcactactttctcatcatgacttccgcattcggttctctctgccgggaacgcttttccctgcccttttagctgtgttagttctgctcatcctctgacccccttcgggagatgtttctataaaacgtcctccccgcacaccctcacacctcacatctagtccttttcttttgtcttgctcacccagaggcctcttccctccttcacgccacttaattagggtttgaatgaccctcttgtgtgctacgcacgcccagcctctggacccggagctccatctctggctgccgctgtgtctctggctcctagcagagcacctgtggagaggaggcgtttcagtgtggatctcaggagagaaactgtattcattcctccagctgctgagcccagtgaccgccaacttagtggcttaagacaacacacatttattctcttagagtttgggaggtctgaagtctgaaatgggttttactaggcccaaatcagggggtccatagggctgcatcttttctggagagcctgggggaggatctgtttccttgttgtttctggcttctaggagacagagccccctttcttggctcaaggttcccagccgcagtcacaccaccctgacccctgctttcgctgtcac

SEQ ID NO: 1888030 - DNA, 4001 bp, Homo sapiens
ttgaggggcaaaaatcccaaagaggaagttccccagggaaggagccttgaaatctcagctttttaagctgcaccctagcagtgtgggactctcagccatgtggcagaaaatagcaggtgaaagttaaaaagctgaacagagacatcagcacatccactgtgtgatgctggggaaggaagcgctagtttgaggtggggcccctttgatgggaggaaccttggtacacatcttaagctctcagtgaagacataaagcactgtgctctaggagaaagggccacaccctagaaatagtctccctctaaaagtaagaacaagaccaaaatagttctacttaataaaacacaaagctaagcctaggcagggtcatgatccatttctgctctatctttctgccatcttcgtttctggaaaaaagataatgtcatttcaccaccatgttcagcatccaataaaaatttacaaggcatgcatgcttaaaaaatgaccaagggactaaaggccaagaaattaaaatatatgatataataaacccacaggcaagtcaaatattcaaatattgagcagacaacagggcaagaaaccaacagaggataaggaggcccgagaccttcagcatcttggggcagtacccgtgggataccaggtaagtacagtcagcttcagggtcactctgagaggttctctatggagctaaaggagataggggggaagcaaaggagtcatttggactcattcttacccacccaacacccattttttttttttgagatggagtcttgctctgtcacccaggctggagtcagtggcacgatctcggttcactgcaacctctgcctcctgggttcaagcgattctcctgcctcaacctcccgagtagctgggactacaggtgtgctccatcatgcccagctactttttgtgtttttagtagagacaggtttcaccatattggccaggctgatctcaaactcctgacctcgtgatcctcccacctccgcctcccaaagtgctgggattacaggcataagccaccgcacctggcccaatacccattttacagatggcacactgaggctcggatcagggttaagttttcctaaggccagctgtagttagtggctagcacctggctctcccgtcttttagttttttatactttaatctgcatctcactcaaaaaggttactaggagaattcaggaagcattttgaaaattgtttagcctagtgccactaaatagaagttaattttggatttgcaattaaagttcctttttatccctccctggttctgacagtgagtacccttggaagactcacagacagtctgaaggaggggagggtggccagggagcatctttcctgctgggtgttggaggagtcccccaattccttacaacatcccaatcttatgagacagttattgacatgcttcctttacagagcaggaaacggaagcttggagagccgagggcacatgcccattcttccctctttatttacagaatccttttatttttgagggaagaaatgtgcttaacaaagaaattatctttcccaaccttctttgcaaccaggcatgatcaatgagatataaatggaaattgtaggtcggggcttcttaaaaacttctctagagtggctgacccagctgcaaattgcatgcttttgttttcctctcctgctttttcctgattacatataagatatgacgactggagcccagcagttatcttactagcaggaagatgaaagccacatcctaggggtagccaaggaaggagatggcaggctctgccagcctaactctgggcttctcatcatgattgaagccacgatttttcatgttctgtgctagaaccaaacacaattggtaataactggtaacatgtatcaaaagctttagtctggttcagcatctgatgaagaggcaggttggagagtgccattgccttgtgcttacctggatttctctggtgtgctgtcaagacactctggcctctgtaggttgattcccgatgactttgtaggggggcagactgtataaatggcaagtgatcccattgctgggggagacgtggcactgggtgatggacagctaggaagctgatggaaagcccttgattttaccacgtctatccaatacctccaaagcaaacattcctgcttggaaggcccgggggaatgtcaacaacatatttgaatctgtacatcatgaatgccatcaaatggagaggtgcagagagtgtggagagcaccgagaggggctgcaagtgggaagatggtgtgcaggagtcacattcacatccctgctccactctgagatgcttttctcatctgtacaataagcgagatgggcctggtgactccgaggaaggaagccactcggtcttctgtgagtggggaggcagagggtgtcctagcttcagtttactggtttgtggtcccagacccttgaattctagcatggcgctgcccatttcttgctgtttgatgctggacagctcccaagccctttcatggtctccgtctctccatctataataatagtagctcacattgacaggcaattttcacaaatgcatccttatcatctaagaactaatttgcctgattttacagatgaggaaactaagactcaagagaagacaaatcttgcccaaggtcctagagctagtgtataatagaatcaggatttgaatctagttctacattctatgaaagcttgtaaccttcacactacatcacaatttcctccttttaaagcagagctgtggtttccttgtagggtaggggcaactgttctctatctcactgaagatgtttgttccttgaagacttcagaacagatgtgctcaaccatttgaaaagttgggaccccactaaagccttaattgcaaagatgtcttaaaacacgtgcatggtttgaatgcatgtgtccctccaaaattcatatgttggaacttaaaccccaaagtagtggtattaagaggtggggcctgttgggcccaattaagtcataagagttctgtactcatgaataggacagtgtccttataaagatggcctcagatagctgcctggcccttccacttctcttctgccatatgaggacacagcagttgtccctgtttgcccttccatcctttctctcttgtgattgcagtgagaaggtgtcatcttggaagcagagagaaagcctttaccagacaccaagtctgctggcactttgatcttggacttccagcctccagaagtgtgagacgtaaatttctattatttataaattactcagtctaagatattttgttattgcagcaggaacaggctgtactttcttgatggtgagaacaagtctagcccttttcccctctcagttcctccagcccctgcagcaggtgtagcaggaacatattccttgcatgctgaggttggagaggcactgcttaggtcacctctgaattgctcagcacaggcttggctcagctagatactcaacaatcttcctattttttttttgaaaatgcatttttttttcttgcatgcactaacacagaaataagagtcatgtctaacaaataaacttctgtcaaattttggcatcccttttcagttttttctcagttccacttttttgcatcattgtgattccagctaagcaaattcttagatctgtattcccacccagctggaaactacagctatttttccatttttaaaaatgctcagaaagcagtctgtcgagttggtgtaacaattaactcccctaatttgagaactttggcttttccagtgttatgaaatttattctattcccattcacagagcaaatatttacaataaaggtttccatctgctggcaaagatgtagtgaaatatgtacacgctatcattgtaatgtaaacagaaagatccagtttggtaaatatttcgtgatgtgttcctggggtcacaaaatgttccaaggcatagagttaacaatttggatcctgaaatgtta

SEQ ID NO: 1888031 - DNA, 4001 bp, Homo sapiens
gagatgggacgaccagccagcgtcacacagcctgtgaggacagtctgccagttcaggcctctggtctctgcgtccaggccctgcaaggacagatccccgtcaggccccgtcccaggccctcgtctgttacataattcgggcgtgaaatcccggaagggggagctcctgagcccgtccagcacccgggattggggtctccccatcacacacccttggtggcagggcctggctgggggcggcaagcaggttgaccttgcctctgtccaaggcgactggcatttgtcatgacttggggttggcttgagagtctccggaaacccaggtggctctgtcaccacctgatcctggccccaattctaggcaaaagggcagagccgatgggactgtggagggggccacccactcctggtggcctgggtgggctcagcccactggaggctcagagcagcgaaggaggccgtaccattctgcccgccccccccacccccggccctgcagcctgggagatgcccgggtctccccagggcaccctaggagccggctggcatggcatggaggctgctgcccggctactgaggaggcgcctctgtactggctgggctaaaaatagcggggggatctcgggcagggacagccggtgggaggcctgtcagggaggggccgggaggggcaggacagcagcctgagcccgggacccgccgtcaatggcgtgggtgctcccaccctgttcccggtggccgggccagccgcggcccagctgacaggctattttttcccctgcttgactaaatatggtcagggagcgcagcccgagggggccacttggccagggccgcgtgtttgggatgcttggccgggtatataagaactgcaaaggtgaggccggctcctgacccgaggggggcccccacgcccgctctggcctctcaggtcaggccctcccctcccctcccctcccctcccccgcccctgtgtctccgcgagccggctgtgtgcctgcgagagcgtgcacacccgcgggaccttcccttttgttccaccctgacctctaccttctctaccttgtgctgaccccgctggggtgcaggggttcccttcggaggaggccggggctcaaggtgtgcagctcggccgcctctccctaactctgcaccagcgccttctctctctctctctctctctctctctctctctctctctctcaagatctccctcctgctaagtctgcgctgctgcaggagggctgggggaagggcaggggtgtggagagggggtgcctggtgtcttctttctctctctgcccccaccaagtgcggacgcatcgagcttcggcccccacccctgcattcgcgattggctcccggaggaggtggctggtgctgccgccgctgcagcatctcctagggagccgcgaccctgcgcccgccgccgctgccgctgtcaccagcccggccccaggggtgccctgggctccgcggtgagtcctgctcagcccatcaccaccgctgggccgccgggacggcccctgcaaacttgccgggcaccgcggtggggggtgtgcctgccagcgaggtgggtgctgcgggtgccggcgccgtgcggctccggcgggggtgccgtggagttttctcttggctcgcggcatcatccacatttggaaaactgcagagccagcagccggcagggcctggagggcgcgtccagctgggaggcaggaactttgacttgcgggcattttgcaagaaagcagcggccccccacgcgggcagtggatggcatgggggcttcggggctgggctgggggcgcgattcacctgccgctccgcaacaaagccccggcagccgggcgtggggctaaacttaccttgaacttgcagtatcccccactgaggtgctggtggggggcagggattcccgagctgagcggcggcgaggctgcccccggccgggactcggcacttctgcagctctcccagccacgtcagggtcaggaggcgtttacaggggcagggcggcgaggtggggggcggggggcacatgtgggcggagactaggggggcttcggggagagcagccctggtggtcggcgtctgtgcaggtccctgctggggagcttgacttcccgcgtggcctcccgcggcgctgatgccgggggccgggcggtattcaccgctgaagagccccggaggaggccccgggcacaggagccagctcggctcacggtggggtctgcttggaggcggctgggtgctctttttctatgcagacgggaaactttttgaaaagtgactacaattcatttgtgagtgggcagaagtcctgtggactctggctgggtctggggtgactctcctgccctttgggactcccagctttccccttgacccccagaccccgtccagatgaatgcctcacaggtcgtgggggcttgagccaggctgcgggagtgtcccaggctctgagagctcatgtgccagggagctggggacgttgaggaggccttttccctggactccggggacggttattgcggaggtcttgggagggcacagatgagcggcggaacccaggtgcccccgaagttgaagctcaggctgcggtgtcgggtgccctttttgtatccttggctacgtgaaaatgataaatcacagcagctacgtggaaatgggacatcagcttctgcttctgtctgccatttgctccttcctttgtagaggggatgcctccagagccttaagcacaacccccaccccccgcccccacccacccccacgtgaaactccaacccagccatgcccagctgcagacccactgccacacagccacagcatgctcagtggcctctgcacactgcaggctctgcggagacattgccctgccctgggtggtaagagagaaccaactcgctccgggctgtcccctcgcatggacgggctgcctggaggagcaacagagtcatgttggacctctcttcctgatgaggacaacgggaggtcctttcatgtcccggggctgctgtcccaccccacgccagggtcagtggcaggacaggggccagggcccagctggaccccaccgcttagcaagcctcctgtgtctgtgcccggcctgcacccccaactggcgcctccctggcccccgtcccccccaggcacctgcaaagccttctttccacctctcaccaccgcacgtgccaggctcgccctgggccactgcgaggcctcgaaaccctgcaggcctcctcctcctcctcctcctcctctccccgctcccagcaggttcggggcggcttcccttcctgctggtgagggcctaaccttgaggtcccattggtctccttctggctctttctccacatttttcagagtctggcttcacggctggtcatagaagttggcagggaaggaggcagcctctgcttcccactcagagacatttttaaacgcaatgaaaaacatatcgatacaattaagtattccaaagtgcttagtttgccactcgctaagtttacttaaaccctctttaacaggctcattaggagctggtgagcaccgggaaattcattaacaggaaggcggccccctgcatttgactgtaaattggtattgatcaggggctggtggaggctgggcggctggccacaaagagccaggtgtgggaccagcctcccgggggtgccacggcagtggcgctgggcaggtgacggtggctgctgacccccggtgcccatgtaagctgctggctctgcgcagctgccgcttcaggtgggccgcactgcgcggcggttcagggtggtgacgctgcgaggcggggacgggggagagggtgaagaagagcgagagaaggagggagagaaccgggggagcgacgctccctcgcccactgggtgtctgctgtggccaggctgaggcacctagggagttgcccccctagtggacggcctctcaggagatcctgaccaccctctgggaacctggactcctccaagcatcgtctttctc

SEQ ID NO: 1888032 - DNA, 4001 bp, Homo sapiens; identical to SEQ ID NO: 1561674

SEQ ID NO: 1888033 - DNA, 4001 bp, Homo sapiens; identical to SEQ ID NO: 1561678

SEQ ID NO: 1888034 - DNA, 4001 bp, Homo sapiens; identical to SEQ ID NO: 1561681

SEQ ID NO: 1888035 - DNA, 4001 bp, Homo sapiens
tgggccaaaggtgcaaagataagtatggctgttctctctccttctaacagtgaggtgctgggggtgggggtgggggaatatggagaagggaccctcaccacccacaccttcctgcctccccaacaagtgctgccctcctctgcccagcattctccccactttgccctcagctagtgggtgcttagcctccagatagcatgccccacctaggccctgccctgggcctgtgatccagaggtcccaagaagcagaggccaggctggatccagggggtcagccaaggtgagggtgggagcacacaggattatctcccagggacagggctgctgcctcgtagctcaggatggatagaatgtggggggatatccagctacattttccctccacaaaagaccagaatgggagagggatggggtgctgccccgactttcttcaactccccggagcagaaaaatgccctacctccactttccagtgccaagattcaagaagaaaggcaagcggagacttccctttctcagtccctgcttactaatggaaacacgggtccagaacctaaatccagtccctcctccttcataccaccgggagggaggtgcagcccaagcccccgaggccccaagggtccaggtgtaggaccctttatcctctccggcagccatccctgtgggtgtggcacccccgccacaccccattcttgtcatctcagggggaggggggaaatgtaatcggacatcccccccatccaatccatcctgagctgcgaggcggcggctctgtccctcggagataatcctgtgcactccccaccttcactcacctcggctgacgcaggagtctccggagcccgcactcccagacatcactgccctccttcctgagggtgctgaggctcggaggctcagagatgctactggtccaaggtcatgcagcgaggcagcggcaatgaacagggtcgtggggaggagggggcgctgaccccattacgcccccgccctcactaccgcactcatgcccccggacaatcgcttcgcggaaaacaccccagctgcaccagctaacggtcactgcgccccgggaacctgacatcactctagttcaggtgctggggagtcctccaggcccggccccgacagcggagccccccaccccagccctgccatcacggccgctggggtcccaggcactgactgctcaggacagggccgggaccgggaggggacctcggcgaacgggaaggaaccgggaggcagggagcagaggggtggcctcaccttgcggggtgcaccccggggccggggagggcagggacgaccactgcagcggcggcggctgcaggagctcaacgccgagcacgaggaagggagccccgcgccgcggccgccctcccgtcggcacgcccccgcctccgcccattggttgatctgggagggtggggcgagggacgctccggaccaatgagcgggctccaaagaacggccaactggcgagggccgcctacgtcacgtgccagggtcgccgaggcagcgccctgctagtccgcgcctgccgggcgagctctcgcgaggaagacgggcaggcggcccaactaggccaggggccagaaccgaccactcgaagagggagaaggagggcctcggataggccccgcccccgctccttcttccgcctgggggatagcgcctctagccttgaaccttgcttaggacgcacctcccttgggcccttcgctctcgggagggctgtcgggcgcgtctcggggctgggtggagctcccgaaggtggcctttctccctgggcttccacgccggcttcggccatcgatacgggccgtgttggtctcgttcaggagctgaggaaccctccatcactcctgtttcgaccccagggtttggacctcttccccttccaccccatcccctgtctcgaaagaagcaacccccgtgcgggcccgagacgcgtcccgggtgcctggcccggcctggagaagcatcagaacaaagaaggcacgcgggctgggggctgggagagcctgtgacgcgcccccggggaccgcagcctctgctcccggtctccatggaggcggtcgccatggcagcgagatgcgcctcgctcagcaccgcggggtgggatgtgggcgcctgcaatgagccgaggagcgagaggcgtggccctccggtctgcgggggttcttgccggtgctctccgcccgccggttcgcgaacaccccacctatacttcgcccgtggggacggattccccaaagtgccctcagtaagccgtccggagcacgcagcgccttgcttccaacggaactagagagacggcctgggcggccgaaggccagcctcccttcagcagggccggggtcgctgccttaaaggagccctcaagtctgccaccctgtggcccataacctgtctgctgatctccagtctgcacactgttggcaaattaatctttctgagctcttgttttcatcgcgtccctctcctgctccaaagccctctgggactgcctccagtagcgcttcacaaacttcagcagcactttgggtgactcatgtgccctcgcgtttgagagacagcgcttacattgagagcttttcacattctgatctcagcccatccactcctgcccactctacccactcccaccacactacctttagaccttgtcttgaaagtctaaagttggcagacggtgggcccaaagtggcccgtaggtgtattttgtttagctcacatggggctttttaaaagaagtccttccccctcctgcctcctccgcctctttctggaatcaggaatctggtttcgtggcttttgaaatatcagaagatctgacaacatgggctcactttccagcctggcattacaagcccctttaagagcacataaatttaccatagtccccgctaatccctgtttctcacggttagttaccttctgggtctgtgcagacatttgtgatcccctccccctcattatcccaccttccaacctggaaggccctccccgctctcttctcatagccaaaattcaagccctcttcaaccaagataagttttgcctatttatttatttatttatttttgagacagagtctcactctgtcgcccaggcttgagttcagtggtgccatctcggctgactacagcctccaccccctcccccgccgggttcaagccattctcctgcctcagcctcccaagtagctgggattctaggtgcgcgccaccacacccagggctaatttttgtatttttagtggagacagggtttcaccatgttggtcaggtgggtctcaaactcctagcctcaagtgatctgcctgcctcagcctcccaaagtgctgggattacaggcatgagccaccgcgcctggcccaagcctgcctttttcaaaagtctttctagccaacttctcaaaaccatctctggtgtgggctctctcaaacacaaactggctgctaactgcacagcccggggttatttccgaattgtcaactcctttcagcaaacatttactgaatgtatctgatgagtaagttattgtgctaggctctgtggagtggaaggcactcacagtttagtgtaggagggacaccacacacaaagaactgtggtctcctgtccttgccaaatgttcctcacactcccaggcatcgggcagtctggcccactgggaggagctgaaatacagagctgcccatgcctagggatactacatgctctcagggaaggccaaagatggttctggaaagcctccaggagaaaattagactctttgtgtcaggaggaagtcagggcaggagttacctggctgccccatcactgcccaatgtgtctgtgttaccacacgagtagtgcccaggctctggggcttcctgtgcggagggccttaccaaagatagatggctctgcaagggaaaccacaggcccctaccaggccccctggagacagaggcaggacaagaagaatcaggaacaactccaggtt

SEQ ID NO: 1888036 - DNA, 4001 bp, Homo sapiens
ccacagagttatctatgattctctctccttttttgcccattatattaggttggtacaaaagtaattacagtttttgcgttgttgaaatttgctgtttgatatgggaatacattctttaaaaaatgtggttatgttatacatcattttaatgaggatttctcacttcattttttttgataatgacattacttgctttttattttatgtttattttagactatggaaattatgtttaagacaaaaagcaaatttgagcgattttcttattcaagttcaaaatgggtcgtaaggcagaggagacaactcacaacaccaacaacacatttggcccaggaactgctaacaaatgtatagtgcagtggtggttcaaaaaattttgcaaagaagagagccttgaggatgaggagcatagtggccagccatcagaagttaacaaggaccaattgagagcaacaatcaaagctgatccttttacaactacatgagaagctgccgaagaactcaacatcacccattccgtggtcattcggcatttgaagcaaattggaaaggtgaaaaagcttgataagtgggtgcctcatgagctaagcgaaaataaaaaataaaaaaaagtcattttgaagtgtcatcttctctcactctatgcaacaacaatgaaccatttctttttttttttttttttttttgagagagagtctcgctctgttgcccaggctggagtgcagtggcatgctctcggctcactgcaaactctgcttctttggttcaagaaattctcctgcctcagcctcccgattagctgggattacaggtgcccaccaccacgcccggctaattttcatatttttagtagagacagggtttcaccatgttggccaggctggtctcgaactcctgacctcaggtgatccacccgccttggcctcccaaagtgctgggattacaggcgtgagccaccgcacctggcctcattagccatttcttagtaggaattgtaacatgtgatgaaaagtggattttataggacgacccgcaacaaccagctcagtggttggatctagaagaagctccaaagcacttcccaaagccaaactcacactaaaaaaaggtcatggccactatttgatggtctgctgccagtctgacccactacagctttctgaatcctggtgaaaccactacatctgagaagttatgctcagcaaattaatgagatgcaacgaaaactgcaaggcctgcagctggcattgatcaacaggaagggctcagttcttcacaacaatgcccgactgcacattgcacaacaaatgcttcaaaagttgaacgaattgggctacaaagttttgcctcatccaccatattcacctgaccttttgccaaccaactaccagttcttcaagcatctcagcaactttttgcagggaaaacgcgtccacaaccagcaaaatgcagaaaatgctttccaagtgttcatcaaatcccaaagcacagatttttatgctataggaataaacaaacgtatttatcattggcaaaaatatgttgattgtaatggttcctattttgattaataaagatgtgtttgagtctggttatagtgatttaaaattcacagtccaaaaccacgattacttttgcaccaacttggccttaactcagaactgtcaactattgtctccttacttctctctgtgtgtctcttttttttcatatatgccatgacacctacaggccaggctcttttaagctcttgtttggatgatttacaattgatattacttctagacactcccctgccagtccattctataatcagctgtcaattaaataggaccttattgcatcactttcctgctcaagtaactttctaagatacttattagccagcatttaagactcttgacattatgttctcagcttaccttcctaataatcctaataatattccccccactcccaacttctgcaggcagattcacgtactcactgtctcccaagcacaccaaggccatttcagcctcagcacatttggtctcaccacttcccccactgattgttccttttcttcctctacaacttcctcaaatgtctctaactctcattgcctcttctttttaataacttttgaaaatgtgcttatttatattgttcttttgggtctgaatcatatactcttcctgtcatcccttatattatcatcatcataaatattagtattataataaatgggttttttttgcttacatagcaatatgttaacatacccttttctttcctgacataaaataagctcttaagagtagatatgttgtattacttcctttagcacctcacagaatttaggacaacataatactacagagacagagagaaagagagagagggagaaggggagggagagagagggaggatggggagagagagacagagggaaagagaaagggagacaagagagagaagaagaaagagaaggggagaggaaaagtggaagaagaggcagagagaaaaagaagggagtgggagaggaggaggaagggagcgagtcagggagagagggagaaagggaggaaagaggagagagagagaagggggaaagactggagatggcggtggagaaaaaagaggggagagaggaagggaggggggagaggaaaagagaggagagagagaaagaggggtgtgtgtgtgtgtatatatatacacacatagatatatacacatgtgtacatacatatatttaaggagtatatatacacattataagtgtacgtattatgtatacatatatgagtgcctgtgtgtgcacataaatccacatttaatgaatgagcaaatgaaaaagtctgcttcattctcacaggtttgccttgacttcttagcatgtgtctttaatttttctggtaaacattcaggatatcacataggaaaatcacatatcatgccagaaaccacttaacaatgtgggctcaaaaccgccatgccaaggcaattacttccttcaaaatgtcatctttggtctcttcctttttattcttgctactttattcacagaactaccactctctcctcatttaaaaaaatgtaatcttaaaatccaagccctgtggtctgaagcctattttataagaaatctctttcttttggcaatcagatattgagaaacagtacaaaaatgaatgagagactatatcagtattcaactatacatatatggtaaaaaagaaaaactgaagctctgtgttcactcaattcaaacagaagcttttactttaacatactgtgcagcttaaagaaagagatgacatcaaaacatatgaaatcatgttagggtcatgcttgggcatcaattaatgccttctgtcacaatgttgacatacttctaaacttttcattcttaagtcctttggagaaaaaacactactgtcaattctcaagcatttatatttaaaaaaaaaacaaaatttgaataaccccaagtaataaataagcaacaattatttaaatttgatattcaaatatgttctaacattttaatatgtgtgtgccaagcttttcaggaattctatgtcaaatagaaccctgacaccagatcatgaagacctagacaagtttagaggttgtccaaaatctttcttgtcttttctctctttttttttttttttttgagacagagtcttgctctgtcacccaggctggagtgtagtggtgcgtgatctcactgcaacctctgcctcctgggttcaagtgatcctcctgcctcagccttccatgtagctgggactacaggcacgtgccaccacgcccagctaatttttgtatttttattagagagagggtttcgccctgttggccaggctggtctcgaactcctgacctcaggtgatccacctgccttgaccttccaagtgctgggattatggatgtgagccactgcacctggcccaaaatctttcatacttgccatttcttaccctttttccactttcctctcccagcctgac

SEQ ID NO: 1888037 - DNA, 4001 bp, Homo sapiens; identical to SEQ ID NO: 1561694

SEQ ID NO: 1888038 - DNA, 4001 bp, Homo sapiens
gcagcgcggggcaagagaagacccgggcgtgtccaagcctcgagcaggcggcaggtgtggtgggcggggctaggggcggggctccgtggaccagggtccagccccaagcggggcgcgatcctgcccggtcgcgccgacccccggggtcctcatattgtctgtggcttaagaggggagtcgtcacaggcgtcaagtcttctttctaaagccggggacctggggaggaggtgggagtttacgggaggaagggccacggagatgggtcgcttctcctggagctagagctgcgggctggggtctccagggttcggcccggggagccgaccctggtcggccgtcggggctctgctcggccctcctgaaacctccgcctcctccagcagggggcgggccggggccgcgtctcggggggaaggcgatcaggtcgccccctcctccgattcccccgccttccaggacagcctccagcccagaggggcggtccgggggcggggtcgcaccgccccctctcgctcccaatcccggggcggccgggcgggggtgggcagggggcgtgaggccgcccctgcgtcccgggggccccccgaaaacgcgctccgggtgcccggtccctccgctgcgccctgccgccgtcctcccgggggtctcgggcggccgcggccgtgtccttcgcgtcccggcggcgcggcgggaggggccggcgtgacgcagcggttgctacgggccgcccttataaataaccgggctcaggagaaactttagcgagtcagagccgcgcacgggactgggaaggggacccacccgagggtccagccaccagccccctcactaatagcggccaccccggcagcggcggcagcagcagcagcgacgcagcggcgacagctcagagcagggaggccgcgccacctgcgggccggccggagcgggcagccccaggccccctccccgggcacccgcgttcatgcaacgcctggtggcctgggacccagcatgtctccccctgccgccgccgccgcctgcctttaaatccatggaagtggccaacttctactacgaggcggactgcttggctgctgcgtacggcggcaaggcggcccccgcggcgccccccgcggccagacccgggccgcgcccccccgccggcgagctgggcagcatcggcgaccacgagcgcgccatcgacttcagcccgtacctggagccgctgggcgcgccgcaggccccggcgcccgccacggccacggacaccttcgaggcggctccgcccgcgcccgcccccgcgcccgcctcctccgggcagcaccacgacttcctctccgacctcttctccgacgactacgggggcaagaactgcaagaagccggccgagtacggctacgtgagcctggggcgcctgggggccgccaagggcgcgctgcaccccggctgcttcgcgcccctgcacccaccgcccccgccgccgccgccgcccgccgagctcaaggcggagccgggcttcgagcccgcggactgcaagcggaaggaggaggccggggcgccgggcggcggcgcaggcatggcggcgggcttcccgtacgcgctgcgcgcttacctcggctaccaggcggtgccgagcggcagcagcgggagcctctccacgtcctcctcgtccagcccgcccggcacgccgagccccgctgacgccaaggcgcccccgaccgcctgctacgcgggggccgcgccggcgccctcgcaggtcaagagcaaggccaagaagaccgtggacaagcacagcgacgagtacaagatccggcgcgagcgcaacaacatcgccgtgcgcaagagccgcgacaaggccaagatgcgcaacctggagacgcagcacaaggtcctggagctcacggccgagaacgagcggctgcagaagaaggtggagcagctgtcgcgcgagctcagcaccctgcggaacttgttcaagcagctgcccgagcccctgctcgcctcctccggccactgctagcgcggcccccgcgcgcgtccccctgccggccggggctgagactccggggagcgcccgcgcccgcgccctcgcccccgcccccggcggcgccggcaaaactttggcactggggcacttggcagcgcggggagcccgtcggtaattttaatattttattatatatatatatctatatttttgtccaaaccaaccgcacatgcagatggggctcccgcccgtggtgttatttaaagaagaaacgtctatgtgtacagatgaatgataaactctctgcttctccctctgcccctctccaggcgccggcgggcgggccggtttcgaagttgatgcaatcggtttaaacatggctgaacgcgtgtgtacacgggactgacgcaacccacgtgtaactgtcagccgggccctgagtaatcgcttaaagatgttcctacgggcttgttgctgttgatgttttgttttgttttgttttttggtctttttttgtattataaaaaataatctatttctatgagaaaagaggcgtctgtatattttgggaatcttttccgtttcaagcattaagaacacttttaataaacttttttttgagaatggttacaaagccttttgggggcagtaattggcttttgttttttatttttttactttattttggatttgtaggattttgtttttgcgtttctggtgtgtagggggttgtgtgtggggggctgctgttatttttggaggttttggtggttgggtgggggtgttgcagctggtttttctgcctcctctgctactccccctcccacacacacagggtctgcttgagatggggttccagccccgggggaaaggggagaagagtaatgggtcaggcattcaggctgactcagagcccctaggcgccgggacgggtggctgggaaccctgcttgagaagagattccggagcctctggctggtcccgagtgtcaggcttgggtttggaagggctgggaggtctgtgacccctgccctgtgtttggggactaggtaggcaggcctgtgactgtaggaggagggggttcaggtcttggtcctgctgagcccgagtcagggcagatgcttttggtcagtgtagtggggtgggttgtttaaaacacagtttgtgtatacatgtgtattttaaagaggggagcctgggtgtgtgggcgagtctgtgtttgtgtgtccctggccagcaggaggggagaggccaggccaggtggagagaggtgggggaggggttcccacactttgattacctttcctgaggatgggaggctcatcacttgctctctttgcccagacttggacactgagcccacctcacctgcctgctcaaggtggctgagcccaggcacaaacgtggggctgctagccctgattccctgggacaggctcctcttccctgcccactgatccctttgccccttccggcttctcaccgcaccccctactcccatccagccctggatggcattcctgagagttgaggatgtagatggatgtgagtggatacatgtacagcgtcccacagtgcctggcacgcaagaagtgttatataagcgcttgctcttgttattattttttgctgggaagctgctggcatttggcaccccagtctccagtgcagcgccagtgtggccagtacttgccaggggccggcatctggtaaacactggacctgccccatcccatttagacctcacaataacctttgggaaggtggggattgttatgacgcctgtttttagaggtggggagcagctttgggctgtccgatccctatgggcaagacactggttgggggttgccctgccctgaggaattcaggggcagcaggcatcgtagcctggtttgccaaggacctggggcggtctgggatctcaggagcagttgctgataccgtggttcgcgaatgggaaatgctttgcccctccttttccttttgggggcctggttgtgctttccctgtgggagcctgggatgtgggg

SEQ ID NO: 1888039 - DNA, 4001 bp, Homo sapiens; identical to SEQ ID NO: 1561715

SEQ ID NO: 1888040 - DNA, 4001 bp, Homo sapiens
aattatacattacaatccataagcaaagtaatcacatttaatcgagcatatataaaaatgtattccctgtttcattaaaaatctgtccaataatatatactaagcacatcttcattgttttgtataaacacgccaaacatttcactttcttcataaattaccataacgttatttgaaccacctgtaacagttcttcccaactttttatactctttgaaaatgtctgcacactttccactaaatccagaaatcctccattcttatcaaaactgccaaatttcaaaaacaagtacaaccagtcttgtattgtagttctataatttaaaaaacaagatttccctatgtgtccagacttgagggatttttctcgactgcaaatgctctgagatgcattaacaatatacactagttaacaaggtcccagacaattcttgttgctaagactgcattttgcaaaaattacaccatttcaaaccattcaagcaagaagctctaaaatactgcagtcacaagcctagcctctcccttcaacaaaccttcagttgccatcacacttttttccagtgggttatactgactctattattgaataatataaaacggtccctaccaacttcttcaatttatattaggttatctctgagaatcctggagccaaggagggttttagggcccagaaatctcttaaagtctgcaattctcagcatgacaccacgcagatgagtaaatgtttagcacttaatactgagtaaccctcacaagagcccctcagatttgtcactataaagcacacgttggaggcacacaaaaagcccgtacgtttacaacctagcagctaagcctgctgcactggcgtccaaccccgtcactaacctgtagatcctcaaagtccctcccaccacccaattcacgtggctgcaaactaatgcagccaagcttcagagaaactcaattaactctccatcaaaagcacccaccctccgcagcccactggatctcgtcctcctgaaatgccacaggatcctctcccgagggagccgtaaatgtgctgctcacagcagccccttccctactgggggaccaaaggcctggcatcttactacaattctcagagcctcaggaggcgtactcaccccaccccctcacctcctagcttcagacgccggcttctcaaaactgctacaccctcgagtaaagcccctccccagcaatggacctcggaggcatttcactgcaaacccctccaccttcaggccacgaaggcggccggttgtgacacttcctttctgaactcacaggagtgtaccgactacagcttcctccccacaggtgtgacctgggtccccttttgctggtaggccacaaaggcctcctttccatttcgggttgaaggagtgtcctcactacgattatctccccacctccaggcacagagatgtagttataacctctgcttcactgggggagacaagaaatcctccgtactcgggatgtaggcgtgtttttactgcagtccccgttagctcgcaggccgctgagccagccagctctggcctgccccctctcagaccacgggggagtcctcgctatggcctcgtccccacttcggtacgcaggctcatcctcttgcgtcctccttgcatcctctcagatctcagaggcctaagtggcatcccactccccctgcagccctgcctcgaccctttgtgtggggcgctagttgccgcgggctcgaaggcctccgaaggccccgccccgggccaccaaggggcaccacgagccccgcacagccccacccgttcaggggctgcgggagtcttaccggggaaagctgcgcggcaccagaacccagaccccgaattaccccccgcgcgagtgcctccgccccgcggccgacagccccagcccgaacggcttcccggagcccaacgcagccaccacctccttcgccgcttcacaaaatggccgtcggcccgctcagcggctccgcgttccagaagggggaggaacggcgtggttgacgtcaaggggccgcgcaagcgcgctgacggtctcgggcgatctcccggaagttactgggttttgtgctaagagggggatattcagtccctgcttgcgactgttggcgcacaggaccgaccttgggctagtggccctggcgggtgggctgggtatgagtgtctagcttggcccttcactgcaagactgtgcaaattgcttcacgtcttccagtttccgcggaaggagcgaattgtgcttacctctaagttttttgaggattaaatggaccacaacgtggtggctagttattatatcctgacaaaacagccaaaacctgattcttttttcccatttaagagtttatacaggccgggggccgggcgcggtggctcacgcctgtaatcccagcactttgggaggccgaggcgggcggatcacgaggtcgggagatcgagaccatcctggctaacacggtgaaaccccgtctcttctaaaaaatacaaaaaattagccgggcgtggtggcgggcacctgtagtcccagctactcgggaggctgaggcaggagaatagcgtgaacctgggaggcggagcttgcagtgagccgagattgcgccactgcactccggcctgggcgaaagagcaagactccatctcaaaaaaaaaaaaaaaaaaaaaaaaagtttatacaggccgagcgcggtggctcacgcctataatcccagcactttgggagtccgagaagggcggatcatgaggtcaggagttcgagaccggtctggccaacaaggcaaaacccagcctctactaaaaatacaaaaactagctgggtgtggtggcggtgcttgtggtcccagctacttgggaggctgaggcaggagaatcgcttgaacccgggaggtggaggttgcagtgagcccagatggcgccattgcactccaccctggatgacaaaagcgaaacttcgtctcagaaaaaaaaacaaaaaaagagttttaatctagggcagggcgcagtggctcacgcctgtaatcccagcattttgggaagccgaggcgggcggattacctgaggtcaggggttcaagaccagcatggccaacatggcgaaacctcgtctctactaaaaatacaaacattagctgggcgtgctggctggcgcctgtggtcccagctaccagggtggctgaggcaggagaatcgcctgaatccgggaggtggcggttacagtgagccaagataacgccatagcactccagcctaggcgacagagcaagattccgtctcaaaaaaaaaaaaaaaattaaatccatcgtgacccctccacggcttcactatagtattattttattatagaaaaagctattctctggctgggcgtggtggcttacgcctgtaatcccagcactttgggaagccgaggtgggaggatcacgaggtcaggggatggagaccatcaggagagcgagactacatctcaaaaaaaaaaaaaaagaaagctgttctcaagccgctttgggcctagccccccgaacttcatgcccctgctaattaaaagctggatgtggtggcttaagtctgtagtcctagctactcgggagttagaggcaggaggatcccttgagcccaggagtccgaggctgcagtgagctatgattgcatcactgcactttagctcaggtaacaagagcaagaccctatcacttaaaaaaaagaaaaaaaaggttgaaattatcacaattccaacaacctttcgggatttctatggcagactggactggtgctagcccagtatgccaaaaacagcaagttggaaaaccaggccacactgttaaactaaacctatgctttataggtttttataggtttgctctgtgtaggtaaaacatagtccattaaaaacaaaacctactaaatgcaatgtagcatccagggttggatcctggaacagaaaaaagacaggaaaactggtgaaagctgaataaaatctgaagtttaggcc

SEQ ID NO: 1888041 - DNA, 4001 bp, Homo sapiens; identical to SEQ ID NO: 1561728

SEQ ID NO: 1888042 - DNA, 4001 bp, Homo sapiens
gttggccaggatggtctcgatctcctgacctcatgatccgcctgcctcagccttccaaagtgctgggattacaggcatgagccaccgtgcccggcctcaccaatgtctttcactcatgtatctttctccatggacttcacttatttatatatggcatttcattcaacatgcaacaaacatttattaagcagctactgtgtgcctagtgctgggggtacagctgtgaataccatcaatatggggctagatgtggtggctcacacctgtaatcccggggctttttttttttttgagatggagtttcgctcttgttgcccaggctggagtgcaatggcaagatctcagctcaccgcaacctctgcctcccgggttcaaacgactctcctgcctcagcctcccaagtagctgggattgcagacgtgcgccaccacacccggctaattttgtatttttagtagagacggggtttctccatgttggtcaggtctcaaactcccaatctcaggtgatctgcctgcctcggtctcccaaatcactgggattaccggcgtgagccaccatgcccagccctatcccagtgctttaggaggcggaggtgggaggatcacttgaggccaggagtttgcctgggcaacatagtgagagctcatctctacaaaaaaattcaaaattagccaggtgtggtggcaggtgcctgtagtcctagctactcaggaggctgaggtgggaggattgctttagcctaggaggtcgaggttgcaatgagctatgattgtgccattgcactgcagcctgggtgacagagcaagaccctgcctcttaaaagaaaaaaaaaaaaaaaaaaaaagccctggccaggcgtggtggctcatgcctgtaatcccagcactttgggaggccaaggctggcggatcacaaggtcaggagttcaagatcagcctggccaatatggtgaaaccccgtgtctactaaaaatacaaaaatcagcggggcatggtggcgggcacctgtagtcccagtaacttggggggctgagtcaggaaaattgcttgaacctgggaggcagaggttgcagtgagctgtgacagcaccactgcactccagccctccagcctgggcgacagagcaagactctgtctttaaaaaaaaaaaaaaaaaagaaaagcccttgctgtatagaatcccttaggttatggatggggaggagggcaggggtttaggaggggagaagcggaaggaggaacaaaataaagaagagacaattagttggagagtgataaataccataatgatatcatggaactaggcttaccagatcaaacactgggcacccagttcaatgtgaatttcagataagcaatgcatgatttttaagtataaatatgtcctacacagtatttatactagaaaattataaatttttttctaaaatttacattgacctgggcagcctgcattttatttgctaaacctggcaaccctaatttgtgtgctgggtggtggtgagtgggcaatttcagataggcctcttttgtggaggtgacatttgagctggaacctaaatgtaaagaaggagccaatcattcaggaatctagaacatcccagcacagggaacagcaagtataaatgctctaaagtggaaataagcttggagcttagaggaacaggaagaaggtggggtggcggagctgagtgagggtgaggagaggagggaagcggaaggtgatgagggcaggcaggctggcaggggccagatcccatatggtttgtgggctgtaataagagtaccaaaacttacataccaggccaggcgcggtggctcacgcctggaatcccagcattttgggaggccaaggtgtgcggatcacttgaggccaggagttcgagacctgtctggccgtgtctccctctaaaatagaagctccaagaggggcaggaagttctcttccgtcttagaccctatgtgcacgaccttggatcgatcaacattgaacacctcctacgtgccaagccctgacatcaaaatgggtcagaagccagcagccgctcgctgaatctgtgttcctctttggaaaacgagaaccgtgaagcctgctggcatggtcagagccaaagagcattgtcacttgtgagatcagcgcagaaacagagcggggccccgattggcccttcgaacttgggtggggccagagcattcctggccccgccccctgcagcgggccgctcgctcatgcgctctggcctcaggctcgctgtcgcgccattttgccggggtttgaatgtgaggcggagcggcggcaggagcgggtagtgccagctacggtccgcggctggggttccctcctccgtttctgtatccccacgaggtgaggcgcggggcgtgcacggcctaccagagtggctcttggggcccagctgaggaagggatgaggcgctcccggtactaacgagcgctagggagtgagaaccgcgcctctgggcgagagcggaatgtgggcccggggttcgggtggtgcgctcaggcaaggtcttcggcttccctagggagcgcttgccgcgcctcgcggcatcctaggtctctggcccaggtgcggcgaccccagggcctgtgagggctgagggcaactgaggcgcggcctaacgcgagcctgcggattgcccgccctttcctctccatcacggcgctgattggctgcgccgccgcctctccgctcgggaaggccgctccttattggtcgcgctcgcatgtccattctctgcgacggtggctgctagccgcgcgagctgagtgtgcggcggcgaggcctgcccgggcggggactgcgggcgcgtggagctgcggctgcctcgcgtcgtcccttgccctaactctagtgaagcccccgaactcacccttctctaacctctgtacttgtatccctgactgtaaaacgggcatcgtgatctcactttgctgaattgtttgtgagaattctagtcggtacacccgggacatagaaatcccctgtaacgcgggttgggggagggttccctcgttttgggagaaacgctgtgctgtggtggttcggagcatagactttggaattagatcgcctgggttcattccagacgtagcctctcgttaggggtgtaacttgaggctggtcacctcatctcactgagcctccatttccttagctgcaaaatggggttaataacagaatctacctcggaaagtggctttgaggatgcgctgagttatttaccgtggtttacaaaggttccctgggagctgacggttgtttattcatctctcccacccatctttctccttagccagtgtggctttctgtttcttccatattccagggttattccgatttaaaattatttgcacatgccttttgtttgctggggaagtaccaacatttttgcaaggcaggccgcctctcccaagtttccctcaccttaggcctcccctaaccaacctcttcttttgttttctttttctttttcttttctcttttcttttttttttttttttttttttttttttgagagagagagtctcgctctgcctcccaggctggagtgcagtggcgcgatctcgactcactgcaacctccgcctcccggattcaagcgattctcctgcctcagcctcccgaatagctgagactacaggtctgagactacacgccaccacacccggctaatttttgtatttttattagagacggggtttcaccatgttgatcaggctgtctaatcaacctgtctaggacctttctcccatggctctccatcaacatcacctggttttagttacttcatagcatttactaacacttacttattgcttacttgttatctttctcaactgctagaatgtaagctgtttgagagcaaggaccttgtctgtcttgcttacttctctctccctggtgggtgccatcccacctgtgcttgccacatggtagatgcacaagtattattcttccttggaggcacagaaggggacc

SEQ ID NO: 1888043 - DNA, 4001 bp, Homo sapiens
tgtaatttaaaatctttctcattactctatttccttcaaagtaaaaagtgctgtgggtaattatcttgttgatctgtttattatcaaaattaagtatagaatgtcagctgtcttggggcagaggccttagctgtctcgttcaccacagtagtctcaggcctagaacagcacctggttcataacaggtactcagtatctgttgaatgaatgaatgaacataaaaactaagtaatatataatttttttttttttgagatggggtctcactctgtcaccacccaggctggagtacagtggctcgatcacagctcattgcagcctcaacctcccaggctcaagcaaccctcccacatcagtctcctgagaagctgggaccacaggagtgcaccaccaccacattcagctaatttttgtattgttttgtttttttggttttttttgagatggactttcactcttgttgcctaggctgtagtgcagtggcgcgatctcggctcactgcaacctccgcctcctgggttcaagcaattctcctgcctcagcctcccaagtagctgggattacaggcatgtgccaccgcacccagctaattttgtatttttagtagagacggtgtttctccatgttggtcaggctggtctcgaactcccgacctcaggtgatctgcctccctcagcctcccaaagtgctgggattacaggcatgagccaccgcgcctggcctgttttttatagagtcggggtttcaccacgttgcccaggcttgtctcctgagctcaggtgatctggccgcctccgcctcccaaagtgctgggattacagatgtgagccaccatgtctggtttcatctggtttttgaactaaaaagtatacactgatgccttattattcatattatacattaacatattgacatagaaacaaaactaaaacaatttaatacaacctggagatcagcaaaaagctattgtttaggatacagctgacttagattagggtgctgatattagagacagttaaaaaggaacaagtatttcagcaaacaaaaattcaaacatctccgagttcaaatgcagaaaagctgggttatgttggtttttgcaatcagtcaccttccttcttccaaatctattttcaacatagccatctttccactttaaaaaaatagttttattgttcttaaaatggctgccaggaaaatgagaatttcattttcaattataatcagagcttggtatcacatataaaagaaatcatgagattctcaagcctctcaagcccaattcaccaagtcagcagtgaatatatttttttttttttgaaaaggagtcacactttgtcgcccaagctggagtacagtggcacggtgtgggctcactgcagcctccgcctcccaggttcaagcgattctcctgcctcagtctcccaggtagttgggattacaggggcccaccaccatagccagctaatttttgtattttcaatggaaatggggtttcaccatgttggccaggctggtctcgaagtcctgacctcaggtgatctgcccgccttggcctcccagagtgctgggattacagcgagtatttttcactcccttctccacatattcggtatctaatttcattgcgaaataaaaagtgcccctccaaacaactcaaaagctcatccctaagtttctagatattcgttccaacaaactcctgggggaaccaccctcatggatttggggaagggctttttactcacttgctgccatgtcagcttcagcctttcatactgctccttgccatctgctgagcaatccgaacaagtaaacctaaaaaaattatcacccttaaggtaactgagctgttccctcagctgacctaggagaaaaacaaaaagtcacatcatgggtttatctagagcagcggtaacctaaaggtttaatccgtttatcacccagattttcctttcccatgttgtcttcttttcttcagccaacccacaattgcaaaatggggaaaaggaagggaattagaaagatttctattcttctaacaccaagtatacgcccactaagatctgtaggatccagtaacttttaggagaaaggtactggaaaagcaggtattgttgctggatttcccaattgtcacattcctgactcccagaggcaggtctcttcacacattctttcaaaaaatatgagctccctctgcataccaggcactgggctaggaactgggaatacaaagtccaagacagataatggtgcctgatctcacaggtttgcacttccctgagggctgcatagaaaacaggtgatcacaacaacacagtggttctccatgctcacagtgcattggaatcacccaagttgttcttggttttctaaatatgcttgattctagcccagataaaatgcatcaatttctgaagcagagcctaggagttacatttcttagtccctcaggtgatgctgatgctctgtgacacataaggaatggaatgtgctgtgtaccacagggcagtgtgagggtaaataaaaggaggcccaacctatattagggggaggcttaggattagaaattggccaggtgaaaaggggtctctttgtgtatagggagaatggaggctgtggagatgcatattccagaagaaaaaaactgtgcaaagccctaaggataagaattgtttgtgaagaataagttcaccctaactgcaaagttgtgtgggaatcaaagaaactacagttagcagggtcctgaccacaaagggtagcttaaaatttgtcctcaacaggacaaagggaaagccactgagaattcaggcagaacctgaaatcaataacagagaccgctcagaagcaaaaaccagctaactagtaaattctgcatttcctgtgaaaatgttactattaatttgttaacagtgactaaatttgaagttgaacccattttaagaaaaacatttccacatgccagaaaatgaccctcttcacagttatatatgtatttctctgacttggttacaaattatattacacaaaggcattcctcaagtacctatatctttactagtctcttgcctaatgggaaaatcctgtttcggtataaaccatatgatggctggcaagccatactcctcaggtgccaggaagctggccattgaaaatctcaagatcagggccgagcacagtagcacatgcctgtaatcccagcactttgggaggccgaggcggatggatcacctgaggttgggagtttgagaccagcctgaccaacatggagaagaaacctcatctctactaaaaatacaaaattggccgggcatggtggcgcatgcctgtaatcccagctactcgggaggccgaggcaggagaatcacttgaacctgggagacggaggttgcagtgagccaagatcatgccattgcactccagcctgggcaataagaggaaaactccgtctcaaaaaaaaaaaataaaataaaaaaaaaaattagccaggtgtgctggcaaacactataatcccagctacttgggaggctgaggcaggagaatcgcttgaacccaggagccgagatcatgccattgcactctagcctgggcaacaaaagcaaaactccatctcaaaaaaaaaaaagaaagaaaagaaaatctcaagattgaggcaatcagggagtgtgtatgaggtatctcttgccagcagaaaaaaaggaaaatggaaaaaaagactggtcctagaaaaagggcaaaaaacaccttcaatctgctaattctaacctcttttcagtatacaatagcaggagttctccacgtaagttaaatattaacaaagtaatttttataaacttgaacatgaattcaacactgggactggaatttggccctaaatctctgtgaccttgttagaaaaatatggctaattctttaagtaacacaggatttccaattttctcaattttattgagttaccaccaaaagtgttaatttaacaatgtgatagaggttgacag

SEQ ID NO: 1888044 - DNA, 4001 bp, Homo sapiens
cggggagtgaaagggcaaggagcaagcaccccacccacctgctcctggctcttcagaaccttcagcaccctaaagctgaacttgttatactaaagctggccttgttatactccttcatggcgaaccagagtgcctgctgcacatagacgtagttttgagggatatcttggaatgtcctcaccacctttgttgagccccaggcttggaatcttctggatgcaagggccacagtggccactaacagcagcagggcctggcagagccggaccatggctcctcagccaagggtcacaggccaaataccatctatcctttcaggactggggcaagatgtggcacactggcccctgctgcctctgaagatacacagatactggcaccccagctcctcttggcactgctgattaaaaggaaggaacttctgttaacacagcggtgatattgtagtagaattagaaatagacatttggtcttcaccccaggtttctagcaggaagcacctaaaacccttacaattgcctgagtggttgagatgtcacagcagcatcttggttatttctaacatgccctttttaacgacagctgaatgtatgctaatgaggtgaatcctggtgggatcccagatagcctcaggatagaggctggttgcagtgtgattagaagattggaactttcagccccaccctccacctccagggaggaaagaggggccaaagattgagttaatcaatgaccagttaatcaaccatgcctgtgaaatggagcctccattgaaacctcagaaggatagggttgagagagttccataggcacttcctgtgtcttatgtaatcattgccgtcccccatggggctgttttgtgagtaactcctttatacaggaggaaaatgagactcatggagaggtcaagagagcacttaagcatacttgatggaagcatccactttttaactcagggtctgcccttccccctaccttgtaacctatctcaatctaagagatacacatatgtaggtaaccgcttggaatgtacacttgcttttgaggatatccaattctactatagaatataaatgagcatgtagtttgtaagacaggcaaaccagttaagatgtgtatagagagtgggcaaatagagatgtaggcagaaatcataagttgtgttaatgaaagatatgtggaggtagcgtatatctaagttgaacacagaacgtgttggcaaaacaaagagacacctgatatccatcaggcactaaatatacacgagatacacacagccagaagattcatgaggtcttaatctggccaccctctggtgacatcattctggcaccctacatgctctcccctagaaatgcaaatcaagtcctcagctgtgcaggaggctcatcagctggctggcgcagccctgcctgcatctgtccgtaaaccagtgtgtgtgactgacaagcaccttccatctctaggactcttgcccaaacgtccaccatggtcccccaaccctaccattagtggggagctgatgcggctgagagagatggggggtgtgaacatggaggacctagcaccaggcagatggtctcctcactgtcaccccatttctctgtgttttaagcacattgacctgttccaccctcttctcgctccttattttacactgacctgacactggtgggcttccagcagctcactctgagaaggaagcctttctgctctatggtctctggatcaccttccagggtgggtttggaggccactcttgctagcacaccacagctacaccatgggcccacctcagatccaagttcttcgccacgttcctggctgctggccctcgagccgactgtcccggcccacgggtggtattgcccttctttgtgaggacttgagctgactgccggctgccccttggctgttctctgtccccaacaaactcacttcatcctcctgtgcctggtcagtgtctgctggggtctgcactccagggcacttctgccctctggcttcactccccagccaggtagtcacactcatggcccctttgtgaggtcagcccaggccctctgatgctgctcaagtgaagggcgcttctgacactggccctcagaaggccatgggctcaccaagggctgccagttcgcagaagtccctcacctttgttccacacctgctgactttctaaactgctgtcctctggactgtgctaggtacacatgacagcaccttggcagccatgtctttcagagccccgttatgcaatgccatggccctagaagcagaaggaaccatcaaagaaccaggctaaaggactttgggaccaacaggcattcaggaatgcacctggccaggagctaaggggccaccagctgacaagagttgccaccagacacgccaggtagaagatgtcagctggcaatggccatgccagcctaagctacctctgtggagtgaacaatgtagcccagaagagccagcacagatccctcccacctatcagccctgtcttcccccatcttgatgcatgtcccaggtaagcattcctgattctgctcacttgggacacagttctctaccctgtttgtgatctcaggacctgacacctgtctgctcaagccaggttccatggaggagcagaacttcatcctgctctgcatttagggcctgcctcggagacagtaggggagctcccaagaactcacaagtttggaaattaatatttctctttgcaagataaaatacagatcagcccaaagtacatcagacctgaggtccaattccaaacagaaagtcggccctgataatccctgggttaaaggcccaagtgtttgaaactgaattgcacgctcgactagggagccctttctaagctggtacaacacacagaggccaacagtaaagaataataaatctggctatacattttgtatagtgtgcacatgtgcacaaacacacacaccggacacacacaccacaaagaccaaagaggaaagggaacacacaataagtcatttagaacatatttggtaaagggctaaattcccttttatggaaacagctctttaaaagccaacagaaaaagacaatttcctcaatcgtcctggctcaaaatgagccaagaattcaagcagacaatctactcaaaaggaatccatttcctctcttggccacacatcagttgtctgaaaacagttggcctgtggcgatgcctcactccaactgccacactgatccacacatcttgtgtccaaagcagaacacaagtgtccatgggaggttgcacaacacagagccaagagatgcctgtgtcctccactgagcattccacaggggaaggggcctggtaaaaggaaaaggatggaggcagtgtttgttgagcgctgtggtgggtgtgaacccacaagcccgcaggggaaccagaactctcatgggctccttcagggctggggtggggcctcttagaggtcccagggcctgtgcacgggcccccatggcatagggacaggaggcagccctcctctcctcttggcatagttcctccccccgtcaatgttcacatcaccaaacacattctgtctaaggtggggtcatcaggaccacaggcactggttgctctgggaactactgcctcatagcattttattttgctcatgactcaagataatcaggattttaggaaagacccagctaggaaggtcccaggaggtgcaggccgggagtggctgggaccaccatcatctacaccatgactgggctccctgataatgaggagggggttttataatggatttattcagaggtaattcacacactgtaggattcacccatttaagcatacaagtcaatgactttagtatattcatagaattttatatccaaaccacaatcaattttacaacatttttgttaccctaaaaagaaacctcaaactttttagcctttatatgccaatttctccatcccctttcagccctagggaggagccactaacgtgctttctccac

SEQ ID NO: 1888045 - DNA, 4001 bp, Homo sapiens; identical to SEQ ID NO: 1561746

SEQ ID NO: 1888046 - DNA, 4001 bp, Homo sapiens; identical to SEQ ID NO: 1561764

SEQ ID NO: 1888047 - DNA, 4001 bp, Homo sapiens
cccccgcctggcgagccgccccgtccgggaggtgaggggcgcctctgcccagccgcccctactgggaagtgaggagcccctctgcctggccagccaccccatccgggagggaggtgggggaatcagccccccacccggccagccgccccgtccgggagggaggtgggggggtcagccccacgtccgggagggaggtgggggggggggtcagccgccctgtccgggagggaggtgggggggtcagccccccgcctggccagccgccctgtccgggagggaggtgggggggtcagccccacgtccgggagggaggtgggggggggtcagccccccgcccggccagccgccccatccgggagggaggtggggtcagccccccgcccggccagccgccccgtccgggaagtgaggggcgcctctgcccagccgcccctactgggaagtgaggagcccctctgccgggccagccaccccgtccgggagggaggtggggggctcagccccccgcccggccagccgccccgtccgggaggtgaggggcgtctctgcccggccgcccctactaggaagtgaggcgccccgctgcccggccagccgctccgtcagggagggaggtgggggggtcagccccctgcccggccagccgccccgtcccggaggtgaggggcgcctctgcccagccgcccctactgggaaatgaggagcccctctgcccggccaccaccccgtctgggaggtgtacccaacagctcattgagaaccggccgggatgacaatggcggttttgtggaatagaaaggggggaaaggtggggaaaagattgagaaatcggatggttgccgtgtctgtgtagaaagaaatagacatgggagacttttcattttgttctgtactaagataaattctgctgccttgggatcctgttgatcggtgaccttacccccaaccctgtgctctctgaaacatgtgctgtgtccactcagggttaaatggattaagggcggtgcaagatgtgctttgttaaacagatgcttgaaggcagcatgctcgttaagaatcatcaccactccctaatctcaagtacccagggacacaaacactgcggaaggccgcagggtcctctgcctaggaaaaccagagacctttgttcacttgtttatctgccgaccttccctccactattgtcctatgaccctgccaaatccccctctgcgagaaacacccaagaatgatcaataaaaaaaataaaaattaaaaaaaaagaaaggttcaaaaacatttacaaagggcataaaagtggtgggtttcaaaaaatattaatatctaatcatatatttcattatgttaaaaattcttacttacctttttctttcccagagagagtttaggaattttctcaggtgtgttttctgtaggtgatttcaaacagaattccaaggctcagcttttagaatgctacagaggaaaataatagggaaaatctcctttgattttggctgtagaaaatgaatacatttccacgaggaaatattgtagataattggtgagttacataaatttataaaacattagttcctctttctgcagggtaaattcctgagagtgaatatctctggtctgtatcctgttatcttgatttctgagtttcatactaaatttcatgagatgaaacttggtacctcctacaagtttttccctatgactaattgtttactacattatttttaatagaaataatacaataataaatttattatctgaaagaaaataaataaataaagtacacttgccataacaaactgagtggcttaaagtaataaaaattattttctctcacagttctggaggtcagaagtccaaaatcaaagtgttggcagtgttgcttcctctttagggcacagagggaaaatctgttccatgcttctctcctagtccatggtgattgctaaatgatcattggcttgtagtggcgtaactccaatctctgcctctgtggtcatacagcattctccctgtgtgtctctgtccaaatttctctttttttttttttcttttttttttttttgagacagggtctcactgtgttgcccaggctgtagtgcagtggtgagatgtcagctcactgcaacctccacctcccgagttcaaacaattctcctgtctcagcctcccaagtagctgggattacaggcacctaccaccacacccagctaatttttgtatttttagtagagatagggtttcacgctgttggccaggctggtctcagactcctgacctcaaatgatccaccagcctcggcctcccaaagtgcagggattacaggcatgagccactgcgcccagctgaaatttcttttttcttataaggacaccagccactggattagagctcacccttatccaacatgacttcatcttaacttcattacatctgcaaatatcctatttccagataagtcacattcacaggcacttggtgttaggactagaacatatattttgggaaagacacaattcaacccacgacaaattttttttaaattcttattatgagtgaaactgaacatcttttcatatgtttaacgcccttttttacctttttttgtggactgtctattcgtatttttgtctatattcaaataatttttagtaatatcttcctcctctttgtatttttttgttccctgtttctagaattcttattttccagatattgggctctctgcactgattctctaattttatgtattttctctcctgatttccatccatttggcttttttcctctagtttctcaaaaattttaatcaaatttgtcttccagcttttctattaatctttcttttccattttctgctattatattttttatttctaagagttcttatttattccctaacttttcctttttgtagtatcctattcttgtttcatggttgtagtagcatctctaatttctcgcgaggcttttaataatgttttcctgtctgcataatctatttcctataacttgtttgttggttggttggatggttgatctgttttacattagatgtttgcctctcatcaatgatcatatgactaatgattcttaattatgtacttatatataaaagtgtttcactgcaaagcttattagaaactcaatgaatgattttgttctgtttggttttggtatctaattttcataatagatactttaatggcaacatttgtggttcctttgtttgtttgtttgttttgttttgttttgctttgctttttaagacagtgtcgctctgtcacccaggctggagtgcagtggtgctcactgcaacctccttctcctgggttcaagtgattctcctgcctcagcctcttgagtagctgaaattataggtgtctgccattatgcccagctaatttttgtatatttagtagagacagggttttgccatggtggccagactggtctcaaactcctcacctcaagtaatctgctggcctcggcctcccaaaatgctggaattataggcatgagccactgcacctggctgatatttgttaatttttaagagtgagagactaaaatgctgattaagcacacgaacggggcttaccaattgtgacattgacagtgaggtgatttgactgggccatttagtggagaaatgccagtgtcagtttttttaggatcttttctgcttctctgctaatctcctgctgggaattctgagagctaagtggagaatgaagcctgggggctaaatagtttctcagcaaccaatatacatgcttcagctaatcctcccattttctgcttactaagtttatcttcagtgatgcttggaatccccaggttcagagagcctctgttttacccttgctacaaaagccgttaagtctttttttttttcaggattggggtagtatagtatgataggtatagagtgatggctgcctgcatgaaaaggagaaggaatagagtatctaaggattgattcttaaacactatttcaa

SEQ ID NO: 1888048 - DNA, 4001 bp, Homo sapiens; identical to SEQ ID NO: 1561767

SEQ ID NO: 1888049 - DNA, 4001 bp, Homo sapiens; identical to SEQ ID NO: 1561775

SEQ ID NO: 1888050 - DNA, 4001 bp, Homo sapiens
aaaagaaagtaggggagagaaaaatgacaataacttatcacttggaaaaagttttcccactaaagttctcaccaactatgtccaaagtccctccttgttgggacactgtaagctgtcaataaatataccttggtcatgcccctacattagcgcgcaccaacttaccccattttaagagcctgcggtagagaggtctcagagttgctataatgggccagctcctggtgaggggtatttagttgtttgcaattttcccgaatgaacagttctgcaaagaacaatcttctataagcatttatctttgttgtacagctacttcaaaagacagattcctagaagtggaattactgtcttagagaatctacacattttaaattctgatacttactagttcagaaacttgacacggtaattctcaaactctaattgcacttaggctttatctgtgaagcttgcttacgtgcaaaatctgaccggctaccagcctccctccaccactaccccgtcctccaggagagaggaggggctccaggtctttgttatgcagctctcaggtggaggaggaggcagcactcccccgcttccattttcccaaccacatctagcaccagacttgggaaacactcgtctaaggggctgctgcaggcacaatttacggtgcggtctcttcctctagcccaggcccccagtggcttccccagaaagggcagaatgtggctcttacgcatacaggagaaaaacgcctagtgcggagttcaagctcagcagccactaccagagccccctctccaggctcacctggtcgcacccatttccccctggggctcccctcttctgaaggtccctgtcccatacatttcctagaggccaaggcccattggttttacatttcttacctaaggcaacccagacgtggctttttctttcacagggccgtggggggagcaccacttccccggccaaaaaaattgtttctgacccacactctgggccttattttccctgtctgtgaaatggagagcaacaggcagtgccactgacatttcacccgctgccgtgaggaggtttttaacatttgcaggaagtctggcttctatggggtgtccaggtgaaaccttaacaatctttaatcagcattctgattggcttaaggcttgtttggaaaaaattaagagttttgttcctagagttctccattgctaaagggtaattaagtccaaaagctgttttcaaagcgatttccaagctcaagggccctagatatctggacctagccgtgtccgggtacagggctggggggcgtggggggatgccctaagaggctggttaacagaaatatcacagtatgtggtacccacagcagagagcagggaagaatgtactgactggggtgggggaggccaaggaaaaccttctggagtagggtgtaactggcagaagaggaaaaagaaaccagacaggaactccgggagctcctggactgatcgtttaaggccgggcacaaggggtaagggatcaggcttcactatcgaccgacctgggctgaatgataccggttgactgtgtgacaaaagcaaatcaagaacctctctgcggctcatgagtaagccagagacttacataggacaacacataccctatcacccgaggatgagacgggatgacacacacgaagtgccccgcacagcgtcgttgtaaagcgttggctgttttcacctctggccgccccctgtgagcccgatcatgtgctttttgggcttaggtcggaggcggcctcccagattctacaggccattgaggtcgtaacaagcgtctccatcagagcctagtccttaactagctgcgggtaagtgcccggactaagtggcctcagtttcccctcgaagcaacgggaccaatcgcaccgccggcaggacatcttgtgcggggcgcgaagtgacaaaagtcaggatttgcagaagttcccactcggtaacgacccccaccccggcaaggagcacagtaggcgctccggaaacgccctccacgaggagggccgggccacttcctgcccccgagcgggctctccccggcggaggctcccaccgccgctatgggtaggccatgcagcattcctgagggcggggtgggcgcaggaagaaggtgcccgcggccccgccccctccgggcgcgctgggcggggcgaagcccctcggcgccgacggcccgccccgcggggggtgggcgcagctcgtcgcgctccgcacaaagtttgttttctccctccgggcgggtgggggagggcgcagagggcgcggggggaggagaggggatctgacgtcaggccgcgaggtgctttccagccgcgagctgtcaggccgagtgtcaggccgggcaggtacgcggcgcgcgcccccggcgccccccgctccccgccgggacgccccgcgccgagccggaggccgcgtggacccgaaagccgctgggaaaagtcagtgcagggagcagcagagggccagatgggggtgggggcgcgcggacaacttggaaagtttctttttctcggccggacggggagggggcgtcgtcctggcgcgtgcggtagggggtgtgtgagctcgggggtgtttgtgagtcccgacggcccccggggggtgtttgtgagtcccgacggcgctgcgctccgggggccggtgggggactgttccagcccccgggaggaagcccgcttggggccctggtggggggcccagcttcataggatcccaccccaggagagggccgatcctgcaccggacctgagtgagcgcgcggggggacggatttgtttggtttcaaaagtgcacgttgctaaccgccagcagggcccccccgccgccgagccggacagggggcggccgagagtgacagctgggggtgggggccgcgggaagggcccggagcgggggggccctggggagcccgcgcgagttcccctttcctttggaacaaaggaaagtctgtctccgaggcatctgtcactcccaggctggccaaggaagcggggcgcgtggggccggcgccccggagaaagtttgttcgcgccgggaccctcgggcaggccgaaggtgatccaagcctcccgcgggagaagcgcgtagtctccggggcagggggcggccaacatggagtctgggcgcagggctgggggggggggggcggcgcggaggtgggagcccagccccctcccctcccttcccctcccctccccctccgggcccagttcggagcacaaagccgagcgcgcacgctccgccgtccccgcgccccgaagagtcggccagccccgaactgccggagtaggggtgggaaccaaactttttcctgccccgggacagacacgtgagttttctttcttccagagcccccgtcccaccgggatggcgggcccgcgcgggagctggtgcgcggagtcggcccggggtgtggggactgtggggtgcaagcgccccgagcgccggacgattcctcgccgacccaggagccatgtgctccgactcggtctgggccgcgggggaggttgcgcgctttgtctgaactgctgggaatgcgggcgtgagtgcgcggcccgggggagtgtcgggaccagctaggggagttgtcagaaagttcgtgcgggagtggctgcaggtggcgtcgtgggagtctgtaggagggtgtacgggatgttgtgtcgaggggttgctgccacaggtcactgagggtagaactgattgttagtgtgatgacgcctggagttttccctgtcggagagatcgggggtggccgggtcggttggagttcgtgggtgggcgggtacagaagttgggctagttgtgtgggtcacagttgttcgtgctaggcctggggtctgtaagctgtgcgtgtgcgtgctgtatgcgtcggtgaaaaccctagggtttgtaaggcttgagcgatgggtccgggccagttatcctagcgctgttggttaattgcctggcgtgagtgtgtctgggtgcggt

SEQ ID NO: 1888051 - DNA, 4001 bp, Homo sapiens; identical to SEQ ID NO: 1561796

SEQ ID NO: 1888052 - DNA, 4001 bp, Homo sapiens; identical to SEQ ID NO: 1561800

SEQ ID NO: 1888053 - DNA, 4001 bp, Homo sapiens; identical to SEQ ID NO: 1561804

SEQ ID NO: 1888054 - DNA, 4001 bp, Homo sapiens; identical to SEQ ID NO: 1561805

SEQ ID NO: 1888055 - DNA, 4001 bp, Homo sapiens
acctgcgaacaaggaggaggcctgtgcctcagtccaagccacattttgaaatgcctgccagaggagcaaggagttctctgcaacattcaccccaccccgaagcctccaccgcccaggtagccctgacgcaacctcccctgcacccagccgcaaccccatccccaggcccagccctgttcctttggtttcatgacattcgttacagaaaaaagattcagggagtcagtccacctacgagcagaggagaggatatccctcatttgtgagacaggacgtgcagaggtaatgggacaccatctgtcctagaagacaaggccagtcatgatcgcctagcactcattctagacaatccacccacccatgaggtgaaacaaggagactaaggaagcttctctgtctgagacacgtgtggaagccaagtgttccaggctcatcagacctgcccaatccagcagaaacaggtttggagagagaaggagtcatgacaaggatctacaggaagtgtctccctgatggactgggaagcgatcttcgtagaagttattcagccagaccaagaggcaactagtcccctcagaaacaggggagaccgggcaagagggaggacagagcagaggccagagcccaggcaggttacagaaccttgccactgccacgggcataaggggaggggtgcgaaacgcgtgacttgtccagagaggccagcattccagggacagggattgttgccgtctcccattcccggcttcctcttcagaattgtatggtggtgtggcttcattgctcagagaagagccgtgcaggggtacaaccatcttcttggaggtgggtcttctcctctcctgccggacaatgagctgctgtggggttttgtcctgggctggagtgtggtcctcttgatcctagaaaagaagccgctcaggatgcggatgagactttgattgctctgggaccgacgcgtctcctcaagtgatcaaggccttcacaaacccaaagtggaaccgccgtgaaaacgatggacaaccggccacaggacccaggcagagatgcagaaagaggctcaccaaagactggccaacatgcaaaaaattgcattttggcgaacagagcacattcgtccaaagacacacacgcacacgggcatacgcacacaaacacacacacacagaccgacagagagagggaaagaaacacacagagggtgagagacagagagagaagagagaatgggagacacacacacacacacagtcctacagcggtggcacagaaatacacactcccaggcaaaccctgaggctaatagtggaaaatatgtatctaagaatacatttggaacagaaatgtgaaaaaccaaaagtaagagatattatgaaggatcaaatataaaatgacccagtgctaaagaggcaacaaagaaaattgtagaagaaaatgacaagaggaattgtgccttaatgagtttgtactactatatagaaaatacactaggctgggtaatttctgaagaacagaaatgtatttctcacagttccataggctagaagtccaagatcaaggtgccagcaggattggtgtctggtgagggtctggtctctgcatccaagatggtatcttgtgcactgtgtcttcaggaggagatgcactgtgtcctcacatggcagaaggtggaagggcaaaacaggggaagcccactccatccagtccttgtgtaaggatcctaaactcattcgtgaacactctcccttcatgactgaatcactaccttaaagccctacttcctaatcttatgacattggtgattaattttagggggacacattcagagcataacaccctatattcaatttcttaaaaattattttgttgttttgcttttctgtttttcaaatggcttaaagtgcacaaaactggattactcataatccttggctcatagcataccttggctcctatttcatccttgtctgtgcctgggcctctgtgtaaatgtatttgaataatatggtaatcacttgtgaacttacaacacaaccaaagaaccagggttctgaccctaacatctgctcctcctctgtcctttttcctgattttcacccttcagcccgagggtaactactaccctgaatttatgtttaggattctcttcctttaaaaaaaaaacattgtttatttcatacatatgattaccttaaatgatatattatttagtttttaagggtataatttatttacccattatcctattaatttacccattctcctattaatgaaaatctggcttgtttccatatattcgctattatgaatggaattacatgagcgtttttttttttttactacctctggtacatatgggcaagagtttctccagggcctatggtagaggaattactttgccataacatatgagaatgctcaaacttataagataatccaaattgctttccaaagtggttgttctaatttaaactctcacctcctgtattagtttgagatgatcttgttgatccacagtctctccatatttggtgatatggtttggctgtgaccacacccaaatctcagcttgaattctatctcccagaattcccacatgttatgggagggacccagggtgaggtaattgaatcacggaggccagtctttcctgtgctattctcatgatagtgaataagtctcatgagatatgatgggtttatcaggagtttctgctttggcttcctcctcattttctcttgctgctgccatgtaagaaggccttttacctcctgccatgattctgaggcccccctcaccatttgggactgtaaatccaattacagttctttttctttacacctctttttcttctcagacttgagtatgtctttatcagcagggtgaaagcagactaatacagtaaattgataccagtggagtgaggtgctccttaaaaaagtacccaaaaatgtgcaagcaactttgaaacttggtaacaggcagaggttggaacagtttggagggctcagtagaacactggaaaatgtgggaaactttggaacctcctagagacttgctgaatgactttgacaaaaatgctgatagtgttttgaacaataaggtccaggctgaggtggtctcagatggagatgaggaacttgttgtgaactggagcaaaggtaactctcgttatgttttagcaaagagaatggcagcattttgcctctgtcctagagatttgtggaactttgaacttgagagtgataatttagggtatctgctggaagaaatttctaagcaataaagcattcaagaggtgactcgggtgatgttaaaggccttcggttttataaaggaagcagagcatacagttttggaaaatttgcagcctgacaatgtgatagagaagaaaatcccattttctgaggataaattcaaggtgtctgcagaaatttgcataagtaacaagaagctgaatgttaatcccaaaaacaatggggaaaatgtctacaggacatgtcataggtcatcacagcagcccctcccatcacaagcccggggcctaggaggataaaatggatttctgggctgggccaggttcactgtgctgtgtgtagcctagggccttgtttctctgcgtttcagcccctccagccatggctgaaaggggccaacatagaactcaggccatggccttgagagtgcaaacaccaagccttggcagcttccacgttgtgttcagcctgcacatgcatagaagtcaagaattgaggtttggaaacctccacctagatttcagaggatgtttgaaaacatctggatatccaagcagaagtttgctgcaggggtggtgctctgatggagaacctctgctagggctctgcagaagagaaatgtggggtcagagcctctctacagagtccttactggggaacttcctagtggagctgtgaggagagggccactctcctccagaccccagaatggtagattcactgacagcttgcaccatgagcctg

SEQ ID NO: 1888056 - DNA, 4001 bp, Homo sapiens
acagaatgatcccataggtctcaagacctagtgtcagctgcaaattcactgatccctcagccctctgcctccctcctcctttgaaagagcagtggcctgccccgcttctaaaagccctggggctccggaaagccaaccgccctttacaggacacctacaaacaggaacaagggcgaatccgaggtggagacaatgtgaccatgcatggcactggcgtatcccacagaagatggtgtgaatgtgtgtcaccggaggcatacggggcgacgcgaaacaaacggtgttctccatgcatgtgccgggggaagaggggaacgagtggcctttccctcaatgccaaggaaaattgaagaacacctgggaaccggggggtgggggggggcctgtgcctgacccaagccacgttttcaaatgcctaccagaggagcaaagaggtttctgcaaaattcgccccacctccaaccctacaccgccctggtatccctgacacaacttaggctgcccccagccccaaccccagcccctgccccagcccagtccctttggttccctgacattcgtttcggccagaagatcaagggagtcagttcacccaggagcagaggagaggatgtccctcaaaaatgagacaggaagtgcagaggaaatgcgacaccacctgtcctggaagacaaggccagtcactgtcgcctagcgctccttctaggcaatccacccacccatgagggaaaacgtggagaagaaggaagcttccctgcctgagacacatatggaagccaagagctccagggtcatgagacctgcggaatccaggagaaacacgtttggagagagaaacattcaggacacggatctccaggaaatgtcaccctgacggactgggaagtcatctttgttgaagacatttggccagagcgagatgcatccaggtccctgagaaacaggggaggcagagcaagagggaagacagagcagaggccggagcccaggcagggtaaagcaccgtgccaccgccacggtcataaggggaggggttccaaagggatggcttgtccagagaggccagcgttccagtgacagggactgttgccatctcccattcccggcttcctcttgcagaccgtatggtggtgtggcttcatttctcagaaaagagccgtgaaaagataccagcatcttctctgacgtgggtccgctgctctcctgcaggacaaagagcccctgtggggctcttgtcttcagctgcagtgtgttcatcttgatcctaggaaactggccgctcaggatgggaatgagatttcatttgctccgtgaccaacgcatctcctcaagtgggccaggccttcacatacccaaagcggatccgcggcggcgaaaaagattgacaaccggactcatgacccaggcagagacgcagaaagagggtcaccaaagacaggccgccctgcgagaaaccgctttgtggcgcacagggcacattcggcaaagacacacacgcacacgggcaaacacacacaaaacactgagagagggaaagaaacacacagacactgagagatagagaagagagaatgggagacacacacatagacacacacactcacacacacacacacacacagacacagagacacacacagagtcctagagcagaggcattgaaacacacacccccaggcaacacctgaggcttcggggttgtgctctcgacgagaacgatcctcgggtgagagaccaccccatgggcacgcaggcctacatgtcctcgagatcacggcggcactacttttggagagactcaccccaaccaacaccgtccgggcaggcctgaggctgggatgccgtgctgctttccccggactctgcctaaggtttcgccatcctggtcagccctttgcgaatcctggcatctggggacgttcccgtcgaccacgtggagaggtcaggccggagactcagagccccgacactcaagcactgccatggagggctcctactttgccatgcctcgaggactgctttctaagacaaccgtgggaaccactgtgacgggagaagccgctcccgcctcgcgcatgcgcattggctggcccgactcgaactctgctcctggcagtcaggctgggtcccctttaaagaacgccaccgcagcgcggcggcagcgaggctccagctgcaggcgcggcggcggctggatccggcctccagtttggggcagcgtgggagaggggaccgcgggtgtcttgtcctgtcccagggccaaacccccaggagtcctgtcctcaggaactccttgagctgacttccaccgagggagggagggggagcttcaggacgcctgctgtgttctcaggacaccccttcagatcccattttggcccccaccgagtgagataggatgggctcgccacatctgctgaggcaggcagggcctcgctgcagcaaagaatgatcccataggtctcgaggcctagtgtcagctgcaaattcactgatccttcaaccctctgcctccctcctcctttgaaagagcagtggcctacccctcttctaaaagccctggggctccggaaagccgaccgcgctttacagggctcgtgcaaacaggaacagtggcgaatgccaggtgcagaccatgtgaccacgcgtggcactggcgtatcccacagcagatggtgtgaatgtgtgtcaccggaggcatacggggcgacggcgaaacaaatggtggtgtccaggcatgtgccggcggaagtggggaacgagtgacctttccatcaatgccaaggaaaatctaagaacacctgggacccggggggtgggggcgcctgtgcctgacccaagccacgttttcaaatgcctagcagaggagcaaagaggtttctgcaaaattcgccccacccccaaacctccaccgccctggtagccctgaagcaacttcggctgcacccagccccagccccagccacagccccacccatgagaggaaacctggagaagaaggaagcttccctgcctgagacatgtatggacacccagagctccagggtcattagacctgcggaatccagctgaaacacgtttggagagagaaacaatcataacatggatctccaggtagtgtctccctgacggactgggaagtcatctttgttgaagaaatttggccagagcgagagccatctaggcctctgagaaacaggggaggcacagcgagtgtgacaacagagtagaggctgtagcccaggcagggtacagcaccgtgccaccgcaatgggcataaggggcggggttccaaaagggtggcttgtccagagaggccagcgttccaatgacagcgattgttgccatctcccattcccagcttcctcttgcagactgtattgtggtgtggcttcatttctcagacaaaagccgtgaaaagatacaagcatcttctctcacctgggtcagctgctgtcctgtgggaaaaagagctcctgtgaggctcttgtcctcggttgctgtgttttcatcttgatgctagaaaagaggccactcaggattgggatgagatttcaattgctccgggaccgtcgcatctcctcacgtgggccaggtcttcacacacccaaagcggttccgcgacagtgaaaacaatttacaaccagcctcataacccaggcagagacccagaaagaggctcaccaaagacaggccgccatgcgagaaaccgctttgtggcgcacagggcacatttgtccaaagacacacaagcagacgggcacacacacacaaaccaatagagagagggaaagaaacacacagagactgagagacagagagagaagagatcatgggagacacacacacagacacacaccgacacacacacacacacacacacacacacacacagagtcctagagcagaagcattgaaacacacaaccccaggcaacccatgaggctgcgtggttctgctctcaaagaaagcgaccctcggttgacagagcagcccagggg

SEQ ID NO: 1888057 - DNA, 4001 bp, Homo sapiens
cctgcgaacaaggaggaggcctgtgcctcagtccaagccacattttgaaatgcctgccagaggagcaaggagttctctgcaacattcaccccaccccgaagcctccaccgcccaggtagccctgacgcaacctcccctgcacccagccgcaaccccatccccaggcccagccctgttcctttggtttcatgacattcgttacagaaaaaagattcagggagtcagtccacctacgagcagaggagaggatatccctcatttgtgagacaggacgtgcagaggtaatgggacaccatctgtcctagaagacaaggccagtcatgatcgcctagcactcattctagacaatccacccacccatgaggtgaaacaaggagactaaggaagcttctctgtctgagacacgtgtggaagccaagtgttccaggctcatcagacctgcccaatccagcagaaacaggtttggagagagaaggagtcatgacaaggatctacaggaagtgtctccctgatggactgggaagcgatcttcgtagaagttattcagccagaccaagaggcaactagtcccctcagaaacaggggagaccgggcaagagggaggacagagcagaggccagagcccaggcaggttacagaaccttgccactgccacgggcataaggggaggggtgcgaaacgcgtgacttgtccagagaggccagcattccagggacagggattgttgccgtctcccattcccggcttcctcttcagaattgtatggtggtgtggcttcattgctcagagaagagccgtgcaggggtacaaccatcttcttggaggtgggtcttctcctctcctgccggacaatgagctgctgtggggttttgtcctgggctggagtgtggtcctcttgatcctagaaaagaagccgctcaggatgcggatgagactttgattgctctgggaccgacgcgtctcctcaagtgatcaaggccttcacaaacccaaagtggaaccgccgtgaaaacgatggacaaccggccacaggacccaggcagagatgcagaaagaggctcaccaaagactggccaacatgcaaaaaattgcattttggcgaacagagcacattcgtccaaagacacacacgcacacgggcatacgcacacaaacacacacacacagaccgacagagagagggaaagaaacacacagagggtgagagacagagagagaagagagaatgggagacacacacacacacacagtcctacagcggtggcacagaaatacacactcccaggcaaaccctgaggctaatagtggaaaatatgtatctaagaatacatttggaacagaaatgtgaaaaaccaaaagtaagagatattatgaaggatcaaatataaaatgacccagtgctaaagaggcaacaaagaaaattgtagaagaaaatgacaagaggaattgtgccttaatgagtttgtactactatatagaaaatacactaggctgggtaatttctgaagaacagaaatgtatttctcacagttccataggctagaagtccaagatcaaggtgccagcaggattggtgtctggtgagggtctggtctctgcatccaagatggtatcttgtgcactgtgtcttcaggaggagatgcactgtgtcctcacatggcagaaggtggaagggcaaaacaggggaagcccactccatccagtccttgtgtaaggatcctaaactcattcgtgaacactctcccttcatgactgaatcactaccttaaagccctacttcctaatcttatgacattggtgattaattttagggggacacattcagagcataacaccctatattcaatttcttaaaaattattttgttgttttgcttttctgtttttcaaatggcttaaagtgcacaaaactggattactcataatccttggctcatagcataccttggctcctatttcatccttgtctgtgcctgggcctctgtgtaaatgtatttgaataatatggtaatcacttgtgaacttacaacacaaccaaagaaccagggttctgaccctaacatctgctcctcctctgtcctttttcctgattttcacccttcagcccgagggtaactactaccctgaatttatgtttaggattctcttcctttaaaaaaaaaacattgtttatttcatacatatgattaccttaaatgatatattatttagtttttaagggtataatttatttacccattatcctattaatttacccattctcctattaatgaaaatctggcttgtttccatatattcgctattatgaatggaattacatgagcgtttttttttttttactacctctggtacatatgggcaagagtttctccagggcctatggtagaggaattactttgccataacatatgagaatgctcaaacttataagataatccaaattgctttccaaagtggttgttctaatttaaactctcacctcctgtattagtttgagatgatcttgttgatccacagtctctccatatttggtgatatggtttggctgtgaccacacccaaatctcagcttgaattctatctcccagaattcccacatgttatgggagggacccagggtgaggtaattgaatcacggaggccagtcttccctgtgctattctcatgatagtgaataagtctcatgagatatgatgggtttatcaggagtttctgctttggcttcctcctcattttctcttgcttctgccatataagaagtgcctttcacctcctgccatgattctgaggcccccctcaccatttgggactgtaaatccaattacagttctttttctttacacctctttttcttctcagacttgagtatgtctttatcagcagggtgaaagcagactaatacagtaaattgataccagtggagtgaggtgctccttaaaaaagtacccaaaaatgtgcaagcaactttgaaacttggtaacaggcagaggttggaacagtttggagggctcagtagaacactggaaaatgtgggaaactttggaacctcctagagacttgctgaatgactttgacaaaaatgctgatagtgttttgaacaataaggtccaggctgaggtggtctcagatggagatgaggaacttgttgtgaactggagcaaaggtaactctcgttatgttttagcaaagagaatggcagcattttgcctctgtcctagagatttgtggaactttgaacttgagagtgataatttagggtatctgctggaagaaatttctaagcaataaagcattcaagaggtgactcgggtgatgttaaaggccttcggttttataaaggaagcagagcatacagttttggaaaatttgcagcctgacaatgtgatagagaagaaaatcccattttctgaggataaattcaaggtgtctgcagaaatttgcataagtaacaagaagctgaatgttaatcccaaaaacaatggggaaaatgtctacaggacatgtcataggtcatcacagcagcccctcccatcacaagcccggggcctaggaggataaaatggatttctgggctgggccaggttcactgtgctgtgtgtagcctagggccttgtttctctgcgtttcagcccctccagccatggctgaaaggggccaacatagaactcaggccatggccttgagagtgcaaacaccaagccttggcagcttccacgttgtgttcagcctgcacatgcatagaagtcaagaattgaggtttggaaacctccacctagatttcagaggatgtttgaaaacatctggatatccaagcagaagtttgctgcaggggtggtgctctgatggagaacctctgctagggctctgcagaagagaaatgtggggtcagagcctctctacagagtccttactggggaacttcctagtggagctgtgaggagagggccactctcctccagaccccagaatggtagattcactgacagcttgcaccatgagcctg

SEQ ID NO: 1888058 - DNA, 4001 bp, Homo sapiens; identical to SEQ ID NO: 1561827

SEQ ID NO: 1888059 - DNA, 4001 bp, Homo sapiens
ctccttgtccccttccccagagcccgagaagtgggagaccctgactctggggttacccccaactcaggcccccttcggcctggcgagcaggccccagaggacaggaggttgtccccaagccaggccgacagccagctggatctcctgtcccgagccctgggtactgggggtgcccctgagttgggttccctcagacctggtgatcgggccctggaggacaggaggctgtccctaaaccaaagccgtggccaatcagacctcctgatgcagtaccccaaggcccagggttccagagtgccccttgaaaccaactcctcagccagacctgccagacgggcaccagatgagcggcggcagaccctggggcacagccagctggacctcatcacaaagttcggcccattccgtggtgaggggcctgggcccaatggtctcccgatatcaagccctgctcgcacggctggagctgggtctggggatgagaaacggctaaccctgggccacagcaagctggacctcatcaccaagtatcatcagttgcacggggccaggcagggaactgagcctgggggtcccaagggtggccatctcaatggtggtaacagtgacctggtcagggatgagaaacggctgaccctgggtcacagcaaactggacctcatcactaagtacaacaagtccaagttcaagcagctccgaagccgctttgagtcctagccaaaggactggcatcgggggtgcactggcaagggcaggcccctcctctgtccaccgagactctggacttgctcaggtcccagactggggaagggaggtgtctagaaacccaggtcagacacactctctgggctcaagattcttgtgtacacacacacacacacacacacacacacacaccctaactagtatcttcttgaatctaggctgtgtttccagccctgtgctgggcctgtagagctgacaggtgggtcacactcagacctggggacagaggtgaaatgcacaagctgctggagaaggggtcagagccatatcaagttaaaggttaaccagttacagagggtgttagaaaacaaagggcagagagtcctggagaaggtggagtagtcagaaaactttcttagaggagatggaggtggcctttgagccaggccctgaaggatggggaggttttggacagagggaggagagagttagaaaaatttttggtagagagaatcaggtgaaagagatgccctaaagaggactgagtgggtctgaggtgaatgagtgaggaagagcagagtatgtggatacccggaaacacacacacacacacatcatcattatcatcatcatcattgtcgtcgtcatcatcttgctgagtcatcatcatcatcatcatcattgtcgtcgtcatcatcttgctgagtgtctcttgaagtacaggctgtgacaggttgtgggccattttcctgaactcaccacttacccgggatagtaaacatgatacacatcaataaaggcagactttattgtgaatcacagcgcctggtgtatcctgaactttgaggagttatgggagggacacgttgggggaatgggaagggcaccattcaggccaattatggggaaacccctggaggagggtgaatgccgaaggaggaattgggggagtccaggggctccaagttaccactgtgacattttgagagaacccggggcttttgcagattctacaaaatgtgggccaagttcatcctgtccaagtgtgcagcagggcccttggcccccatcactatcctggggacagaagttggctgctgagtgagtgatagaggccgtgcgagaggcacatcgtggaagccaaccagcacccacatccttgcccaccctggacccctttccagccttttcctgagcccctgcttcctcagtcctcccctctctccagcacctgcagcctggctgcctttccgtctctggctgcgctctttctccagcctcggtctggccgcacttctgcctcctggaactctctccatgggtagcctcttctagtccacccgtcttcagcccctcatctcattcgtcagcactccactcccctgctgggctccagacatggacttctgtccctcaaggcacagctggactcatccctttccccaaacctgcccttcctccggcttcatttccatcaatacctccatcatcaacccttccgcgagacactcctggcccctcctctccctcatgcctcacaaccgaccagccggaggtctaggtcgatgacagctcctaaaaagctcctgaatgaataatgaatgaatgaacgcgagcaggctaggcgtggggccaggcggggtcgcgcccagaccgctcgcgaccatagagtccgccggaggccggaggtagaggggctggatgcgtggcggggagcgccgggctctcccggaagtctccctggacggaagtggaaacggaaacctttttagggagtccaaggtacagtcgccgcgtgcggagcttgttactggttacttggtaagctggtgtgaggggaacctgggagggtcagctccggtcctgggtcgggaggggtgggggccagaggattcagggccggaggttctggtgggggcccagtgggcgggacccgaggacggaggggccgggaggccgagaggggcggggtcgcggcggggcctgagggacggaggccgggatacttgggaaaggatccgccggccttgaactcccgcctccgccgcccctaggcctcatggcggtccgagcttcgttcgagaacaactgtgagatcggctgctttgccaagctcaccaacacctactgtctggtagcgatcggaggctcagagaacttctacaggtgcggcgggagccccggggcttacggtggcggggaggcgtgcgcaggagtcaagagctccggcagtgggagggtgccggcccctctgccccgccaccaccgagtccatgtccctacagtgtgttcgagggcgagctctccgataccatccccgtggtgcacgcgtctatcgccggctgccgcatcatcgggcgcatgtgtgtgggtaaggcaggtggaggacgccgagggagggagtggtctccaagcaccattaattacacccccggagggaacccggagtgacctagggattcccagggtatcatctgttatctctgggcactatagaatctctcaggccaagcgtcaggagatcggggcaaccctctagcaaaggctgctggataatagtaataacaaataatgtaaagtgctttcactcctgttctcattccttcgtcacaaagacactagaaggtaggagttactggcctaacttgactgatgaggaagttgagacttgacctaagtgactcagtaagttccacacctagttcctagtgttggagaaggatttttctcttttttttttttttttgaggccagatttttgctctttcgcccaggctggagtgcagtggcaagatcacagctgtctgcatcctcaacttcttaggctcaagtgatcctcccacctcagcctaccaggtagctagggccacaggcacgtgccaccacacctggctaatttttacatttttggtagagacgcggcctccctgtgttgcccagcctggccttgatctcctgggctcaagtgatcttcttaccttggtctcttaaagtgttgggattataggcgagagccactatacccagccgaggatttgtatctcatctctccctgccactgactgggcaaggtgctttctctttctaagcatccatttctgtctctgtaaagattagctaagatatgcggtcttcctgctcagttacgttggaatcttaaattccctttaccacatctctaccctaccttcctacctgtcagcactgttaattctggtcgttggtcctttcctttttattattattattatttttttttgagatggagttttcgctcttgttgcccaggctggagt

SEQ ID NO: 1888060 - DNA, 4001 bp, Homo sapiens
atcccagcactttgggaggccgagggtagatcacaaggttaggagttcgagaccaacctggccaagatggtgaaacccagtttctcctgaaaataaaaaaattagctgggtgtggtggcgggcgcctgtagtcccagctacttgggaggctgaggcaggagaatcacttaaacctgggaggtggaggttgcactgagccgagattgagccactgcattccagcctgggtgacagagcaagattccgtctcaaaacaacaacaaaaaaagaaaacagctaccaaatgctaaagaacgtgtacaagttcccagacgggaaatggcagatctgagatttgaagttaggtccatgtctactaggctatgagcccttccatgaaacaccaggaaaatccagccaggttcatctttgtctcccaaaagaattgattgctgaaaggaatcctggctggaggccttgttaccactcctctctgggtcttaggttttcccctgtgagaaatggaaccctttatctagaggtacttaagggtggcagcctgggggccagaggggctcaccggggacacttgaagattctcatccactagggcttcccgtagcaccaaatgcccagcattctgtagctgctgcagggagatcaccagggtccctagaggcctaggggagtggcatagagcaaaagagtgacccaagagaatggctctaagtcacccccagcccaacctgcatccctgtctccccaggcctactcacctaaggctgaatacacggctgcagttgaccacctgcacagacagacactccccagccagtggagccccatagtggggccatcggaacagctggggacaggaggaagcttgtgacacccatgctgtgctgaccctaaactccaatccaaagcccattcttggctgggcacagtggctcacgcctgtaatcccagcaccttgggaggccaaggcaggcagatcacttgagatcaggagttcaagaccagcctgaccaacatggtaaaaccccttctctactaaaaatacaaaaattagccaggtgtggtggtacatgtctgtaatcccagctactcaggaggctgaggcaggagactcgcttgaacttgggaggtgaagtttccagtgagctgagattgtgccattgcactccagcctgagtgacagagtgaggccctgtctcaaaaaaaaaagaaaaaaaaagaaaaaaaaaaaccctattcctaaccctcagacaggagccaatcctccagacttagagctaactttaggactaacatccccaaacctggaagggatccctgcacatgggtttgaatctgagtgagggctgatctgggactaactagtgatcaagaatgaattcccccagtcttgcaactaatttgttccaatctgggtctgatctctcaggcctcagactgaccccacctcccaagactatacttccccaaacccaggaatgagcccctgaaccccaggttggacttggatgggagacagatcaggaaccaactgtactgacctcaccgatatctgcttctggaccacagtgaatttttcttgttttctgggtaaagcctgctcagaactgaaactagtcatatatcagcccctccccccacacacacaaaaataatttgcttcccccactcttggcccagtgtcaagtccctcctggattcacccttaaagaaaggtagacaatgggaaggaaagaggcagagggttggagataccagtgtgggtagagaaaagaaatgggctgtagagatgggaaggcattgggtcaagggcccccagtttcaaatatccttagggcgcccctgcaagcctcacctcgaaaggtgagcttcacttgtcggtcgtgggtgccggtcagccctgttagtcgttgcacgcgttaccgtcagagccatggtcccagtggcactggcacttcctctgcccgtctgcccttctgcccaccagcccgcccacctgaatcgcctctgactcactggactcacccagcaggtttagcaatccctaccctttagtcaaacacacagggagcaggcctgggggtcatgggtggggagggaggagaggaccgagggataggggtaaggtcctggaggtcaattcagccctccctgcctccaccagctgcaagctggcaggactgcctcagcctccatcctgcatcctcagggagtgagagctgtgatagggtgggagggaggcaaggggagtgaacaggaccccagtctgctccctgccagccgatgaggcctcaaggacatggacctcatgccttttcgtttcttttttctttgtttttttgttttttgttttttggttttttttgagatggggtcttgctctgtcatccaggctggagtgcaatggcacgatctcagctcactgcaacctctgcctcctgggttcaagcagttctcctgtctcagcctcccgggtagctggaattacaggtgtccaccaccacagctggctaattgtttgtatttttagtacggacagggtttcgccatgttggccaggctggtctcaaactcctgatctcaggtgatctgcccacctcagccccccaaagtgctgggattatgggcatgagtcattgtgcccggcctctcctcttttctatctctctctcgctctcttttatttttattttttttactttcttccttctttctttcttttcttttttttttttttttttttcctgagatgaagtctcactctgtcgcccaggctggagtgcagtggtgtgatcttggttcactgcaacctctgcctcccggattcaagcaatagtcctgcctcagcctcccacacagctgagattataggtgcccgccaccatgcccggctaatttttttttttttttagatggagtctccttctgtcgcccaggcaagagtgcaatggtgtgatcttggctcatggccacctctgcatcccgggttcaagcgattctcctgcctcagcctcccaagtagctgggattacaggcatatgccaccacgcctggctactttttgtatttttttagttgagacggggtttcaccatattggccaggctagtctcaaactcctgaccttgtgatccgcctgccttggccttccaaagtcctgggattacaggcatgactcattgcgccctggctaatttttgcatttttaagtagagacggggtgtcaccatgttggccaggctggtctcaaattcctgaccttcagtgatctgcccatctcagcctcccaaagtgctgggattacaggagtgagccaccacgcccagccccttcctttctttctttttcctttttttaaggcagggtctcactcagttacctaggctgaagttcagtggtgcaatcaaggctcactgcagcctcaatctcccaggctcagcctcccaagtagctggaactacaggcatgtgccagtgggcctggctaatttttgtattttttgtagtgatggggttttgccatgttgctcaaactggtctcaaattgctggcctcaagtggtcctcccacctcggactctcaaagtgctgggattacagacgtgagccactacacctggcctcatgttgtttcttgttcatcttcctgttctcagtgcccagatcagggtttggcacatggtagacccttaaaacactgaacaaatggatgaactaataaatgaatcccttagccctcagaagtagtgctgtaggcattcaacacatttattgaattaaaaagtgattaaatgtgtgttcctagcttgcaacatagtaagcattcagctggaagccaggtgtccttaacttggggtcctaggatcctagtgggaccatagaatggctccatggaggctgcaaatctttgaaattttctgcaaaatattgggcatgtgtacacttttgtggactaagagctcatcacttaggttaataaccctaaaacagatgtacaatacttttg

SEQ ID NO: 1888061 - DNA, 4001 bp, Homo sapiens; identical to SEQ ID NO: 1561834

SEQ ID NO: 1888062 - DNA, 4001 bp, Homo sapiens
ggaaccagggttatgggggacggggatggtaccgctgtatttaaaaatcaatgtcttatatatcgtataaataaacattaattttttcacatcttttaaaaatcgggatataatcctcacaccataatagtcacccctttacagtgtagtgctcagtgggctgcagtatattcacagagctgtgcaaccatcaccaccatctgattcctgaatattcttatctccccagcactgcaaacaacctgacgctccccctccctccacaactggccacacctttgctctctaacctttggggcttggaagctaccccctcacccgcccatgagcctggactacagatctggggtggctccccgcagtgcagaaaacctgacccttggtcttctgttaacccctcctgatccccgggactgtgggacacacaaccaaaattaggaaggcaagaatcctcagtaattcataaaatctcgagtggggcaggaattcaggttgccatgggaaacccatctcaggctcctcaggcggtgggtggcagtcagggagcctgccctgccactgagtaaagaccaagtggcagccctggcccggccacctgccctgatctcccgctgttctgcccccatgggctttccgaccggctgacactctggctcactgtatccacgtcctgctcctctcgggcctggctgggacccttccctgcctccagcgcaagcttcttccggaagcgcaggctttacggggttcagccccatccagaccccaggacctgccctgggcagctgggtcctgcctccaccgtgcacaaggcctcaggctgtcccaacccgaggctccctaggcccctcccgcgcaggcaggaggccggtccaggcagttggagcagacctggccttcaggtctcagccttccagcagaggagctccctgtgggaggtgggcgagcccggctcactccctcctcctgagtcctcggcccgcccgcccgtggaggggacctctgagctctggacccgggtccaggacttctccaagccaaggaatctctgagactctcagagaaaacgcctcgcggatgcgggtcgctcagaccccacacggggaaggttgatggggatctcacgccggagggcgcacggcgggagcaggtgctgggcaggtcatcctgcaggagggggcggacgccggtcatccctgccgcgtccagggcgggctcccctcagctgcaggtctgtcctggggccgcggcgccgcccctcgctacccgagaggccgcgccatcgcccctttaagaacggtccccctctccggccggcgcgaagcccccaggggccgcaggcgggggtgggaggggagacgcagcgcagctgttacccggggctggggctgggccgggggttgcggggaggaggggggaacgggatgcggagggggcggggtccaggctgcggcgcgtggggagcgggcggagcgggggcgggggccgagcgcggggcacccgggggcctcctgtataggcgggcaccatgggctcctgctccggccgctgcgcgctcgtcgtcctctgcgcttttcagctggtgagtggcgacccctccgcgagcctcctggagcccccggtgcccgacccacggcggctgtggggtcccgaagcgtccctccgccccggggcccgttcgctgggtcccgcgccagctccgaggggggatgcctcggaccccgggctgctacggccgaaggtggcgtcgcctgcggggcgtggggagtcgcggcgccgggtcccgtccccggtgtgcgtgcgcggggggcggccgcgggtccggagcggcggggacaggtgcggggcagcggctggatgggctggccggacggaagccttcgggcggggccgcctggaccccatcgcctggggaggcgtgtgtggccccgggtgcgcccccgggtgcgcgcctgtctctgtctgtgcgagcgtttcccgcagccggccccgggcgccgagtgagcggccaagttccgattctgagattcgggtggggcgatgacggaggctgtgcctgcgagtttgcgagtgtagggggcggggggtgagaacgtcctgcccacccgcgagcaaaccggccccgcccgcccccgccgccccccattccgcccggcgtggagctacgcggaggcgagaaggggctggagccgatgcccggggcgcagcgcgggcgtcttcggtgtcgggattggtcggggctccctcggccaagtttccattctgccccggagtccgaagctccctgggacgcctggggggcggattctttcccggagcccggtgccctcgggggagggggctaaacaaaggcctcgcctgtccaggctggggaagctgctttgcttcgatgctaattggccctgggtctcccgtcttaaaaaggaaacgatgctttgtgggctgcggagcgcagctggaccgcgcgcccccctcctcctcttgaagctagaagggccagaaggggctgtttcagagttttgagcagcgaaaccctcggagtccgtggctgtgcagcttgggtgtcctgtgctcggcttaggggcacaggcttgcgggcggacctagggacggcggaggcatcgtgtccttcctgcaggaaggaaggagcttccggcgctttcctgggaggctcgctggggccgcggagataacctgaggtcctgcaacaggctgggggcccaaggaccatcccaggccttggaacagttggtatctttcagtgagtggctcctcaatggcaggagtcccttaggagactggtggggaggggctggaagcaggaatggggagagcaagggtgggcactcgaagactccagtgcccgtcggatgacctcatgaaggacaggcaccagcctggacggtaccccagtttggagcatggccagtggcagctggtgatgcatgagcgtcaggaagtgaggctgctttgggggacactagtgacattggtttccatctgttgaaggtggtgtgaggatgtgctggggttgatggtgctggggtttgggcaggagaaatgggtgcttcagtctcaggtgcagggtgaggcacgactgtgctggtcggatgtgacctcagggtgcagaggggcgggtggggtcatgttcccgtttcacctctgcggtggacagtagacagatgggcgcacatgcaggcccttggaaatttggttgcagccaagagggaaagagtcatcctggcttgagggccgcagggcttcactagcagacctggggactctccagggactgggcagagccgtgtcctctcagggccagcctctgggtcactgctgaaccgcagcagggagctgtcaaaggccttttgtcctggccgggttggcaatctggcagcccactgtgcctcctctgccttggggaagaagagtccttgaccacagctctagtcactgcatgggggtagggggcccgggaggaagggcggggttgttggatagcccctttttttttttgacaagtgtgagaattttgtgttaccaagctacaggacaaagggcccaggcatctcttctgagcgcctttctccccaaagaacagtgtgaactttgctggctctgagccgggctgtgctgcgtccaattcccaggctctgccctgctgcattgaggagaccctgggagccaaaggcccaggaaggggtttggggctgggtcctggcagggccaccagggtcacctgcttccatggtggcatgagcctccctgctcatgcatgtcgccacatgtcatggagccctgagcctctgggagccttggcttcgagatgaaaaagacgcccccagcccctctgtgctgcagggtctccattctggagccagacctgaggctgctcctcaggccgagaccccttagccgagatgtgcagcttgtcccagccgccagcccagacctcacagaactgtgcccggcgtaggcaaagtgggccagggcaagaactg

SEQ ID NO: 1888063 - DNA, 4001 bp, Homo sapiens
tctttcagcagaactttactaaagtccctggatggaagcctggcagcacagtggcagccattagctgacattcttctccaagtccatggattggaagcacctgctgaaaacctgcagcgtctcaaataacctctaagttgtccccgagccacatcttgtttctgaagttgtgcttttgtgtgccatggcacggtcagtgatccccttcaaattactcgccatggagaaaaagtgaagcagagatgatgttagcataaaactccaaactcatctccacaggagcaggaatgattcagcaggccctatggtgggaaaatgaggcattgtgtagtttgagtaagataagatttctagctttccctgtgaaattttgtctactgcttctagatgtgtaaagtgcgtagacattctttacctgtgatcgtactgaacccacaggaatcaactgccaccacttacaacaatattgtctgggggtttggtaactgttcactgggatggacagaaacagattcttcatgacccagttcttgctttaaataaatcccactcagcagtgagggtctggaatgttttcagttacgttccacgtgatatgttggccagtgataaactgcgtaaatgacagtgatcccataaggtcataccatatttctactgtactttttaatgtttagatacacgaatacttaccactatgttccagttgctgcagtattcagtacagtatcatgctgtacaggtttgtagcctgggagcaataggctctaccacatagcctatgtgtgtagcagactaaccatgtaggtttgtgcaagtcactctatgatgtctgcacaatgacaaaactgcctagcaatgcatttctcagagcttattcccatcgttaaatgatacttaattgtatattaaggcatccatattgaagcaagaattccttgctctgcagggcagtggagaagtggcccactgcgttttgaggcatactgtatttatttatttatttttgagacagagttttgctctttcacccaggctggagggcagtagcacgatctcagctcactgaaacctccgccttctggtttcaagggattcgcctgcctcagccacctgagtagctaggattacaggtgcccaccaccacatgcggccaatttttgtatttttattagagacggggtttcaccatattagccaggctggtctcaaactcctgaccttgtgatctgcccaccttggcctcccaaagtgctgggattacaggcttgagccaccacggccagcaatggactgtctcctaggacaccggcacccaagggaatccgaggtgggtgacctggcccaagtacccagggcttcttgtctaatcagctattgaagggaagactgaggaggggaccagttttcctctgggatgcttgttttaaggcaaggaatgtgtctgctgatgtaaatatttcctttaactacccagttgggccctcatccaagagtctcttgggctctcatttgcctcctactcttagagaaggggagggctaggcagtggacagcttggtccccaaatttgtgagtggctggatgtattctactcgtttacttccttttctctatctctaggaaacaaatgaattccagacttcaacttccatgtggtacaagttctcaaccaaactgaccaccaatactatcgaaaagacagcagcccccaagcaatttggcccaaagcccacgaacctcctaccctcctcccatccctctattttccctattattcagaaagaaatcactgttattcattgcacagaccaggtaacagttaaacagatggccgtatacataaagacagtttcacagtccataaggcagaggacgggaaggtgtgtcttctgcagagtctcttacagttgcaagtagagatccaccctacctgctggttgtcatggaagagcctgctgatcacgcctcactatccattctccatttttcctgtcgtattacagcttgtagcagcccctggccatctggaaggaagactacacttcccagcctcccttgcactcaggcgtgtccagggatataaaagcacaggaatgcaacagcattcaaggcctccccgaagacacagctgatgagcgcctttgtgatttttctaccatgttccttctccccttaatcctactgcctggaaaataaaagggctgccataggccataaatttgaggtcatgctcagcagagaaacaggatagggaaggtgggtagctggcacagtggagggtcatggctgtctcagacttctggacgttcatgtgagagtggaacacacttatgccttgtttgagcctctgataaatctgcctgtcctttgtaactgaaccaatcctgactgattcagttcccgcctcctatttggggaagccaggcttctatgtcctgcgggagagctgcagtccatctggtggctaaagccccgggttctagagttagactgctgtgctcaggctccagtgttgcagcacggcaggtggttgctaatagaaggacagacaggctttggtgccagaagacctctccaaaccagttccttccattcccttctcccaggaacttatttgtaagatcatggttttctgagaaagaaggatgcatctcaccttgctggctgttgtgagacattgagcaggtaagcagtgcctggcacaagggccagcatacaaagacactcactggcttgggctgcatttgagaaacagatccttgtgtatcttcacttgggattgtgcattgcacatactggtctctgtgtctgactctctttgtagttgtctgtgagtctcagccagtcctctcaatacctgtgatggccccaccagacaagactaactgacaggcaggcagatgatgggagagtctggagtttttcactgacagtgagatccacagctgattgcagattgctagacgagtgtggacagaggaaagtgaaggtctgtcatctgagtgacagtgtttttccccaagtgtttgccatgaacactaatagtttacctgagtgatatggcagctttaccttatttaaagggaaggtagtgtgtacttcaccatttcaggtctatgcattgtgccaaattgtgttggtttaaactcattatgatatttaaaagttctaaaagaaagttggtttttgaattagcgatgtgtgagattagcaaattatgtaaaaattgaatgagtggtcgtttataaggaacgaatcttctaaaaatatttgatagggccatctacatgcacctaatagctacagtaccacacacctgcctgctgttattattctctgtgtgagtttatttttattattatttttttagatggagtctcactctgtccctaggctggagtgcagtggcgcgatctcagctcactgcaacctctgcctcccaggttcaagcgattctcctgcctcagcttcttgagtagctgggactacaagtgcatgccaccacgcccagctaatttttgtatttttagtagagacggggtttcaacatattggccaggatggccttgatctcttgacctcatgatccacctgcctcagcctcccaaaatgctgggattacaggtgtgagccactgcgcctggccatgtaagtacttttatcctggttagcagcacattgtacaatagtaccaatgtgtgaaaagcctactttaccgcaaactaaacaacacgtctctatgcttgtcctatcctcctcgtaaagaagctgttctgttgttgatgaagtcattctgcttggctatctctggatgatatatcagaatatactgcccctgacctctgagtaggtgagatgatgtttaatgctgctcattgtgaaatatcagtggagaaagaaaggcagaccactctaaaatgcagagagatggctctaggaagcctcaatgtctcagagactggaagtctgacagcagatgcatcatttttttctgacca

SEQ ID NO: 1888064 - DNA, 4001 bp, Homo sapiens
attgctggtggaaatgtaaaatggtgcagcatctacaggaaacagtttggcgttcctcaaaaagttaaagagttaccatatgacccagcaattttactcctaagtatgtatacccaagggaaatgaaaacatacacccacaaaaatacttacataagaatattcacactagtattagtcacaatagtcaaaaaggggaaacaatctaaatgttcatcaactgatgaatggatgaacaaaatattacatccatacaatggactactacgcagccataaaaaggaacaagtgctacaaaactgatggacctcaagaatgttataagtgaaagaagccagatacaaaaggccacatgttgcatgatttcttaggaaatattcagaataggcaatttcacatagatagcagactagtggttgccaaggactaggagagggggaagatgggatgtgactgctttaatggttaggaagagatttccttctgagatgatgaaaatgctgagcaactagacagtggtgaacctcttgaatatataataaaaaccactgactgtacaaaagggtgaattttataattatgaattacatcgcaataaaaaaataaaaacccaagagcaatttgaagaaagttaatgtgcaaagtgcctacaacaatttcttggcgcattgaaagtgctatataagcattaattatgattattacgataatcttaagacactcttgtctgcattttcatcataaagttttcagaagataactcaccactcctcacaggcatttcacatagtaaaaatctcacattcattcaggatatacctgccacttattctggcatcttcatgaggccagactcctcgagagggttctcaagggcagtggcttcagctcactccttgatactttctttccatctcgcctaacaatatcaaaacccctgtttatcacggaggccaggaggaaatgctcaatatttgtatgtacagtcaacctcaggcaaatctgccagttaaaaaagaagcggggatatgaatgcacaggtatttttctcctaaagagctaataaattaccactacgacctcctcctcacatttggcttaatttatttactgcatgtatgttctctcatttaatcctcacagtattctaaaggtataaaaaatggtctaaaagtttaaatgtgtaaacggaggttcaaagatacttgatctcttaatgagtaaatggaagttcagacatattaaccaatttgccacaaattacaaaattagtaaatgacagagtgcaggttccaacccatatccctatcaaagcccatatacacctcaaccactgtgtgattcatcccggtttcactctacatattagcttagaaaaaaattaatcaataatttttccaggaagagacaatggagaaaagaataatccctaataaaggaagttattataatgaactacaagatcagactaacgcagacccaccaggcagaggcctggagagatgcctcaggggacccaaactcgtgggtacggggccacgggtcacccgcccgtctatcctgtttccagggtcgtcagcacgggaggctgcccctctctgcacaggcgccaggaaccgcggtccggcctccgtccagcccagacagggtcagagcgaagcctgggaggccacaaagccggctctctgcaccacggcttccaccggattcgcgggggtggagtgcatccgaaaagaactgaggaggctcccaccagagctgcaggacccagctcttcacctcggttcccttgagcacgagcttgctagacttcacataagagtactaggccatggctccgggagacttctgcgcggacaggctgaagccggctcaggacgagtatgtgacctggagcagcaccagggcagggaggaacagaagtggaggcgaagtaaacactccctgacagcctacgtctgtccagaacccgcctccgtcttcacccaaacggtgaatgcccgagatttccacttccaggtttctgccgggagggggggggggggcggggcgtgagggaggagctacggcggctgcagagggccgaaaggtgtccgcatgcatctgctccctggcgccctctcgaggagcccctgaggattcgtgcctcccagaggtggggaaagcccgcccgaggcgcaggtgctgacggtggcggggctgccgggcgcgctgtggaacctcctctcgctagagatgcgggctggcgacggtccccgcgggggcgggaagcggctcaggctgccctccccggcctgcggcggcgcatcttgaagcgcgggccactcccgcgcaggtcactcagggctgtgcctcgcgcgactgtgtgtgcaggaaacaaacaggaaataccctaaaatggaatgaagagacatgttgaggcccgcggatgtcgcgagtgctgtgggaatgtgggcggaggtggagagttatggtggcgcgtgttacaggctcaggggtcaggaagaagcctaatcctggaggcggcatctgaggagggtcttgaacgctgggcaggcttttgcccgatagagatggaggaagctagtcctgtctgatggaggaaacagggcagaggcgtggagggagatgcgcagtgctggtgtgaggagccgcgagcaggccaggcctgtaaagcagagtgatgggaaccaggatagagaaggcaaatcggggtcctgcggtcgctgaagaatttgaatgaaatcattaaacaggtgagagggatccatcgcaagagcatgggatgaaacgaggagtagtccacggtgatccctctgcagcggtgggtattattaatcgcacatgtgacaccaaaacggtgggtattattgatagcgtatgtgacaccaaaaccaccccactcaagctgtggctctttccctaaagtagaaaacagagaccagttgggttccaagcatccacaaagatcttattaaattcgtgatccctggtggcaccatggagtcaggattggctcatttcaaacctgactcagaaataaaaccatctcaatgtgcggagatgagcgtccttacccgctatcataacgtattttctggtgttttcacagtgctgcgcttcctaatccccattctagggcaatccacatgccatgatgcccagaggcattaacaaaggagacacacaggggctcctcacgttggctttccatggttttgatgaaaatctcagtttcctcatctcatacaatgtggttcgtaatagtatcatttagggttgaagaattaaatggtacaaattatatagagtgcttattataacctacatggaaaatgcctaggatatgttagctatgctcatcaccaacatcgttatatgatggtaataatcagatagtcaggaaggccgacaccaagaaaatggatacatgctctgagggaatgaatgtggagagatcagaaggtcaagaacaaagccgtacaacatgtctgcagtaaagggatagagaaaagaaaggctataaaagaaggaattaaacagttagagtaaaattataaaatcaaagctaaggagaatttccagaaagggtaatatcatttaatatcatagaagtttaggagcacaagatggaaaaaaggcctctgggtaactgacattgaggcagtctttagggaagctccatttccgatagagaagtagacacaaagtcagcttgaagcagggactaggtgaagaagctgttggctggtcgcatggggaaataaataagggatggcatatgccatatttctggatttctttcttgcccagcctctatatatgcatagagtttggcgaaaacttacaaaaaataaaaatgaaaccaatttcgtttgttgactgaaatacaatgcttcgtgttagaatcaagataaattcatgcctctcccttctattgtcaccgtcagttttgaaattaaacatcagcttttcttcttcattaaaatcattttcaactcc

SEQ ID NO: 1888065 - DNA, 4001 bp, Homo sapiens
acaatctaatatttttctgattatatagaaatgcacgactgtcaccagacatccaaaaggcatcaaatgtctaacatgaaatataaaatttgtctatagccttagcggtctgcaaaattcagggctcaccattctgagtatagagctcaagtttctttcctatgacttcttcaggttctgtcatttattaacacagtgcatctaaaattgtcactgctggtcatctggaagaatctgagaagaagcaggtccttgttctcattcccagagctgcatctgtgctgaatagggtcagggtgctctcagcttcacctcatctgatccactgacaggctcagttatctcctgcccagggaaggaatgggtttctctatccagggctgaatccccaggaccaggcagtgtggctgggacaagccagctctcagcagggaagacataagctgcctgggtggccatggaatacaaggtctgcacctgggcacacagaggcccccggagcctagtgagcagtgtcagctgctcacaggtcattggagaatggattttctgtgtccacacctgggttaggtcttgataaacagcctccgacatagctcgcacagaggtcaccaagctttttcgaagtgatggtgtttggtctcctagggcccgagacttatgccgcttgctgcgctagtgcaagccctggaacttcccctatggtgggcatcacaggtctcctggatttcactgttgtgcacagcagtggaggatcttgattttttattcaacgtcaagctgcactcctcttctggacagttccctgtaaagaaagcatgtgagagactcaccagagcagtccccacagaccctcatttccagaaccccctgtgcacccaggtgaaccccatttgtctctcccactccttcctgaccatctcagcactggaatgaagtgaagctgaaccccttgtgagtccccagatattctcagagtgctaggatctcaaaaatttacttgtcaataagtaactccctttctgctcaagcctcatataaaagtttcctgattatttgctttttggggcaaaccaaaaacaaaaaaaccaccaccaccagcaacaacaacaaacaccaagattctacctgctctgtattggcagctatccttggaactgatttttcttttcctgcagttttcccgatatgagctggactctggttctgtgaacacaatgagagtttgagagagtgcctcaaactgaacaccctgaaattcctagtccatcctggacacacaggagctgaggttaccaccaaaccccagctctcttctgttctccagtgtccaggatctgtacggccctggctgcgaaggagcttccagtttccttgccaagggagcttgtgttgctgccctgtcccttctcaccttgaaagagtcaaatcttacctgatccagcagtcctgttcccggccttgagcttggtttcctcagaattctccttgtttggattgggctcccatcctgctgcaaaagaaagtttagatgactcacctctccctaggcagagtcccatagtctatctctgatgcatttttgcgaatcagtctttcatgtgaagctcttctgccagtgtcacgagtgaacacatttctcaaagtcccctgagggcactaagccatttcacatccccaaatctcaaaataaaaccctgttaaagacacatagctcagtatccctgattctaaccctccttccagcctccataggagcagcccaaggccttaccttgcctttgtgtgtgcttctcactggaatgggagaaggtggtcttgctttcttttgaatggtttcttctcatctgagcccttttctgaaaaggagatctgttggaaagggggctggtcagtggagcactggatggaggagcactagagatcggggtcttcatttccctttcccatgttgaagctcaagtgaaaggtgcgctctctcacacgtccaaaggcagagtgtgggttattctgctagacctgccttttataggtcccttggctgggcgtggcttactcttattggctgaagagttttctcattcctgccgcttcttagatcctcaatcagaagtttcttgctgtagttctactggggacctagacacagttaatgggagacattttcaggatcttgtcataatgtcaagaaaacaaagaactgggagcacagggaccggaagatcagggaatcatttcatccgatttctgtcccagttcctacctggaagtatttatgatcctgttcacctttcaagatgcacaattaaacatgcctatattgacatatgttatatattttgcacagaaagaaaatttattgtacatagtgttaacattgcatgcatagatataatttcttaaatgcttggaaacaacaaatgtcaaattatggttgattgtattagaaccacacatatatgaagaaataaaaatgcagagaaaaaaataaataccaaatgaaatggcccttcctaccttaaaaatggggaagataattagatcaaatgcaataaaattgaattgattaggttgagctagtgctaacctaatcagcccctgattcctgaggtagcaaaaagtctaggtggaaaaactttccccctttctcacccttcctcagtcatcctgggagcaccattgtgttctgtggaatttattcagcctccctagtaaaaatggacttggtctcaaacaggtaacccaaccgatcacaagaaaaacagcctagattctgaacattcagctcctgtcttcacaccgcagacaccacctgaatcccgtcaaagcccacattatttctcaacatccaccatattccggggcagcctctcaaaattgccgcagtgagacaggacaaggtgtggtggagctccaggttcagaatagctgcctcatcccttcctactgcggcggagtctgtctctgctggtcagaaccctccagctagcctagtctatgtccaagcaagtgtcccctaaaaggaccttcttctctcccccactgctgaggaaagcatgcaggaatgagaatttctatgttagggagtactcagcctccagtcccaaatgacttgattgactgatgaactgattccttgaggaggagaaagacacggggaagagactgtgttgggtgagtctgtgttttcccagctgtgctgcctgtgcaaatagtggaaccaaaaaagaattagtggtagacagacactgcctagtgaaattgtctgaatgtaaatggaacttatcataatatgatattgttatatattatattatattataaaatttatttgacgtctaaataaattttgatatattatgatataatatataaaatttggtcaagtaattttataagaaaattgagttaaattttttaacaatattaacatataaactcaatagaaagctaggaaaattgtctactcttgtgtaaatgacttctttttggataactctgtaaaaggtgtgaagaggggtctgctacttacttgatagtaagtacttgataagacatcgacttccacatctttgctgtttttaaccagtgccctttcaagacatgagaatattttactctaagaaagtattttcatagatatcatattaggaatttcgtccattttagttaataaattattatgacatttagtgattattaataatttatgtcactgttaaagtatactcctacagacaacatattacatatgtgttttgatttgtcctttaatctcaggtaaattttttaaatttttatttattaaattctatatattttagataaaagagaccttgtaactgccatatgatgtactttcttagaaagagaaattctcaggcaaaactcaggcctggttgggcacggtggctcatgcctgtaatcccagcactttgcgaggccaaggcgggtggatcaccttaggtcaggagttcaaggctagcctagccaacataagg

SEQ ID NO: 1888066 - DNA, 4001 bp, Homo sapiens; identical to SEQ ID NO: 1561841

SEQ ID NO: 1888067 - DNA, 4001 bp, Homo sapiens
ggctcgggcagcagcccggctgagccgaggggggagagggggcgtctccgcgccagtgacgacccctcgcacgacgccaacgctccaccccccggaccgcgtcgcccggcgcccccgaggcctcctccccctcccgcgggcgccgccgaggggctggggtgggcggaaggggagggagcgcgcgcccggacttaggaaaattttcgaaagagcgagagacacagagagccagagagcaggagtgtggaaaaagcgaggcgagcacgaaccaaaggacagagcaaccgaaaaggaaaatgtgtccacacacacacacgaacacgaataaaaacccacactacacagcgatggtggtgtctggtggcggtggcggggtggggggtctgactagatgagccgctcctcgcgcccccggcgccgggcgccatggcccgagccgaaggcgcctctggccccggagcgcccgcggcctctgcgcttggcgcggccgcccaagtaggagaagaaggcgcagcccaggaacactcggaagcagcaggtcgccccgaacacgaagccgcagccgcggccctgctccgtgcgcttctgcagcaggaagttgagcacccacgaggggctgcgcaccgagaagaccaggaacaccacgaggggcaggtgggcgctcagcgcgccagccttgagcggcccgggccgccacacgatgcccccaacgcgcggcgccgcgtagtaggcgtcgtcctcgtcgctcgagtccgtgtcccagtcagcccaggccctactcgtgcccccggcggcggcgccctcctcggcgcccccgacggcgccctcctcggcgccctcgtcgtcgtcggcggcggccgcggcggcggcggcctcggggcatcgggcctcctcctgggcttctggcaccttcttcttcttcttcttcagcatcttctccatcttcttcctctccttctccttcttcttctcctcctttcgcctctgctccagcagcttcttctcgagcttcttgcgctccttgtctgttaggaacttttcggggagcgcctcccgcgccgggttcttggggttcttcgcgagcttctcggggtccccgctcttccgcggcgcgagcggctctctcggctcggccaacgccgcagccgccgccgcagcttcggcagccacctcggcagccgccgcggccgtcttcttctcgctctccgccgcccgggctttgagcttcatggccatcttcagcatggtggcccggccacctcggggagctcggctcgcgcctggcccgggctccctgcttgcccccggcctcgggctgcccggcccccgtgcgccccgtgtcggggggcttggctgcggttcccgccgcgctgccccggggccgcggagcgcggctgcccgggcttcgggctgctgggctggctgcctaagagttagcgccaaaaaggatgagcaaacgaaaaagggacaagaacaaaccaaaaagcacccaacaacagcgagaaaccaaaaagcaccaagaaatgtcaactcaaaaagaaaagtgcaaaggcgcggatggcaggagtctgtttaccctcaggcgctccttggtttggctcttgggcacgccaatggagaagagaaaagagagagaattggggggtgcccggaggcgccccggggcaaggcagcggcgcccgggcgcccctgccttgtcccggacccggcggctcttgcctgcgccgggcgactcgcacttccgcgggaggccccggcgctccccgacttacatgtgagtgaggtgcactcacacgcaaggcagcgcctgccggccgcccgccgccgccccgcgccgggacaggggctcgctccagccgccgcgccgcagcccggagccagagagcaggggagcgccgcgccggccagccacctgacgcagcccgctccgcggtgccgacgcgactgagtgtccccgccggggagcagagcttctaaccggccccgatgacgccccagcctcttcagaggaccgacccatagcagcggcccctataaaccgaaggggaagcgcgaaaaatcggcccaccggggacgcacccaaatgggccgccgcgcaccctgggggtgcaggccggtgccgggaccgcgcgggcgtgggccgggggcgcgggggccgcgatggcggggggcgcgggcgcgcccaaggcggtgggcgctcaaccccgcctcccagacctgcctcccaattttcggtgagtggtgtagccctgggcggcgtgcaaagtgtgcgacggcggcgcttacccctgctgtgcgcctccttacctccagccacccaccccgccctcccagcggcgcgcgcccgccgaggtaggtgtcagagagccgaattcgaattatttgcgacgcccggacggagtttcgtatcttcggacgagaaaagtgcgatgggagtgcaaagcctcccctgctcgaagcagcaggcgcgccggtgtcacgggagccgaggagcggtggccgtggctgtggagtcggtgctcgaggcgtcctcccaggtgggagaggtggcggccttgcctgggcgccctgggggctctggaacagagggaaaagtagtttacggaacgtgaacttgtttgagggttctttcaaaactctcaagtgtcccgccgcacactaggatatagcagtgcacgggattaggagcagggttactaaattttcaagcagttgaccccagcccgcctttcctgggaccttggttaggtcatctgctgccaccatggtgtctgctgggatacggtttattcattcaataaatgtttggtgcctgccagttccgcggctcaccatgtgcccaggtgagccgaggcggccaggtaatcaggctaagacgtgagcagtgtcttggatgggacacaggcctacgtcccggaaagcccagatatgcaaagtccacaaactgtcttccaactttttctttgacttcttaacagagcccatgaaacttaagatgtttgatggagaaggagaaaaaagaaaagtctacctataaatggaaacacatttaacagtccccaggggtatggggcggctgataccaccagaggccttgagcaaacttgtatcattttaagttagctttgaaaataaaaagacactgttagccattcaaccggatgactgaaattccccccttttccccagtttgctccacttcgagtaagaaaaggtgtgacagatgaagatgccacatattatttttcttggccccttcaggtacactgctgcccccattgtacaaggcctcttttttatgaatctgaaaagacaacagagggcgattcaaagtcaccaaacaacacttggaattaagaacaggaagcgcagcctagacaccgtcctgccctgggctgctgcagacccctgactttcttgaacttggctgaaaagttggggccaggtttttgtcacactcctgatcatggatggcctctcttccacacaaaaatacaccttattttgaaaatgctcaaaggaactatcctaggttgatgcttttcacctaaccaaagatgcataaaaatattgtgcagatacacctgaatgtgctcataggagaactcagcagtaaggcctcagaatcgatgattcctaggctgcctgtactagtgatagtgaggctcactaccatccaccacctaaattagaaccgcttgatgacacagcacaggttctatatctttagatggtaaattaaaaattcctggctgaatttgattgattgtcatttttaaaaattgttaaagacttgtaagagggaagaataggccagacatttttgttatgctccatttgttcaaaagcatcttccttcctgcttctactgtggcaaagcacagatacattgtctttaagaggtacaaggtaaatagtaacaaatacaacctagatacttatgccaggagctacaaagttatacaatgaatataatgaagagcctccttatttggaaatct

SEQ ID NO: 1888068 - DNA, 4001 bp, Homo sapiens
ctggtagccagtcactacagagaaataacaggagtggaaaaaagggggaatatcagggttaaatactgggatttattcttcctagtcttaatttatctttaaattaaggcaattcctatttaaatctaagggtcctttctcagcttatagtggtgattttcaactgggggagattttgccccccagaggacatttagcaaagtctggagacatttttggttgttaaaactaaggggatgctactggcatctagtgggtagaggctagggatgctgctcaacatcctacaatgcacagggcagtcaccacaacaaagaattgcctggccccaaataccaccagtgcagaggctaaaacaccaagtctagatgagatgtgctgagtggttctgaaaccccttcctctggtgtgctcccatctctcccttctgagtcctccctactcactcctggactgtctccctttttcctgtccagtgcgccaattgttcaagattctattaccaaatgtatttctcccctaaagagttttctctgactccataaattcatctttgtaagtacgattgccaatttgaatgtgtgatctttatctttttctgaacttcagacctttcctcccagaaaatgggctgcaaaaatctccatcccaactgcccaaagttccttaatctgccatgtctaaaaccaaatcagcactgccaccttgccagcccctcccactgacttccctgtcccactcccagtgttccatccatctgggtgccacactttggctcctccatcttttgtgtctttctagcataagagctgctccaggaggatcctttgggacccctcttgagtgccgtccttcagccttcctgcttccttcaccgtgctaggtctctcctttaaacatctcctttgtgcataacccctttcctttgttctcgatcaggatcatcctccatgctgcttctgcttttcctaaaagtaggctcaaatcctcacttgcagaacaaaaaactttcaacatcctttccgtttcctgccaaaatagcctcaaaagtgcttgccctcatactccatggcatcctcagagagattctatctaatttctcctaacttttctccccctgctccccaagagccagccaaggtggccagttgtgtttacccagccacgccccatgtttcctaccattaaatcctttgttcgtggtgggcaaaccgtctcccatcccccactaccaccttctattcatagccaaggcgtctatccttccttggaggcccatataaaaagtcattttctccagcaagactttcaaggtccccccaggtggagttcttttcttccatttgtatgctgctctactctccaggatgaggaactggtatttgtctaacttgttaaatttgttttagtcacctccatgcatgtgctcccctggcaaagctcatgatatcagaaagaatgaacaaaggggtcccacagacccatgagggtgtcgaacagagaccctgaacccgttcctcgacaaatggtactttgggggtgagcgcgaggcctgacgaaagcaaacaacccctttggagcacccatggcagcctccctggggctccaaccccaatgtctactgaccttccacttgtgcaggctcagcatccctggggcctcaactccttatccatcctgggctgctcctcgcagtaagccctctccttggggtcctggccctctacctcccagccctggaaatcttcttgctcctcaccttgcccggcagtggcaccccgttggctgggttagcctgccgccatcaacacacccaagggttggcccctgggaccccacctctcccccgaggctcggcaacctgtggcatgaggaagagtgaccccacggcgctagcggtcctcgtggtcttccaggcctagccgccatacacccgccccccaccggcttccaaccaccccagcagcacctcttcgggcgttccaacgcggcgccccctattggacctcccacccatatccggtttccggtctgacgccccctgctcattcgccaggcagccttgattggcatgacccctgcccaatggctgacccggcgctggggtcggaggggagtgagttggtgttgggacccagttgggccattcagtggatgctcaagtggttaagccgtcttgcgtgggtgtagttggccaaagtttgaatcaaagttcagtgttgacatctggaagtgtgtagacccatagagctaaagcgatatatctttgggggatcccaaacgtttcccagggtccaactgtgttcgcctccttccgtgctgcgtggccacatggatggtggatgcaggggtgcaaggatgcacggtgcctgtggtaccctggctctaagagggatgcattagactaaacgggatcgcaacttgcggtggttcgcccgcctgcagctcttatacagcagcccgtgccgtgcgccctgcttgctgcagcccgccctgtgtaactcatccagcctcccctcccccagggttctgcaggtcagatgaccccctgcctcctgcccagttgctctgtgcctagacgtggctcgccaatctgtctcactggtgagaccgacctgatgcgcacctgccgagttttatgtgacccccttacagcagcttttctcccgggttccaatccctctgcagaccccagaccagagcatagcatgtgcacacatcaaggccaccaggtggtgtgggcatttacctttggctagctctgagctcaccgcagcatggtagcgggagcgcagctgcgcgggcaaccgccgggtttgtggccggttggcgggctcagtgccgcctcagtgggctctagcagtagaaaagtaaagcgactaccctaagatacccagagcgagaggagaggggctagaagggtgctggaggcaggctgtagtggggctaaaggagctgactgaccagcgctgcggccggtgcccgaagcagcgagcagcgcacctcagctccggttgccgcgcggcatggtatttatctgtgggttcagtgcgcacagcgttgtccagtctcgaaaccaccctaaaccggcattaaaccccaaccaaaatcccctttaacccttccctagaacagcaggacctgcgaaactctgaggccgctttgtgaggtcctcctctgcgcagcacgccccccacccctctcttggtgccgccgcagctactccctagggggctttgctcttggtggtacgcacccgagaccttcttattcccctgcgtcaccatccacataaacaagagagcaccctgcttgcgccgctgtgggccactgcggagacccctagagtgtgatgggggtgggggctgttaaagtgctttaccggagccaacctcagcaagtgacaaacaaaagcagcaaaaagtacacccaaggcatttaaaaaacaaattgcgtgcttgcatactcggcatcccctctccctcgcctctctctgcttctttggtgggctcacgaccacctgtcgcatccctacgcgtgcctgcgccccttcccaggcaccaaaagccttgcgctccggactaggggcttgagatccggggctgcctggaggctgggggctatgactcagagtttcaggggtatcctggggtgatgaaatccttcttcagtcccccctcccccgaggagtcggttgggttggggagggagggtttcagctcctgtactccagcgttccgaggcccacgtcttgcgtcacgtgtcccgcaacgcaggagcgctttctctggccagcggagaagcgaggagaaagactccaaatcagtcagggagaggagtggaaggagccaaaacgtccctgcgaggcctgcgctcaccagcccccttacccaaagtcccgggcccctggcgccaggagcaggctcctggagccggagccagctcggcactggaaccggcgtcctctggtggcagagagagagcgctactggcgattttcg

SEQ ID NO: 1888069 - DNA, 4001 bp, Homo sapiens
ttcctcctccccaatgctagaaacaggcccctccgcaccttgccctggctgcagaacgcagcttaattacatggtctgcgggttggggccctgagcgaggctggggctggttcttggccaagacgcctccccagccggctcagcctccatcagaagcggcagctctgattggccaccgtgcaccgcgtggagcgccgttcctcgcagcgagttcatgaggcatttcactgggggcccgggcacccgccttgacatcaattacgccaaaattaagtggcagcgtccactgcgtggggcccgagctgtggggcctcttccgtctcccggagcccaaccgcgggcccctgcgccccggcaggcaggatctcaccgcaggggcggcggtggggaggggaggtcaggcccgcttccccggagcggcccgcagctcccggcccaggttcccaggctgcagcgtgaggggcgcgcagcggggccgggtgggctggggccggcgcggaaagccctcgccctgaaagcccaggccggccccagcccacggcgctcgcgcccaccgtgccgcgcgggccaccgcccacccgggggctggttagaaacgcggactctgccccttcgcgccgcctccggggctcacgggcgcccgagtcggaagccccgccctggggaggccggtctcctcgcgagggcctgggccgctctgggcgctcggcccgcgtgtcgggggctccccggggcgccctgggctcctgctgctgtttcttcctggccggccttgaggtgcggagcccccgggctctgctgagggcctcccggccccgtggcctcggtgacctcggttcaggcgtccgtgaccgtctcgcctggtggctccgcgccgctgacctcggcacgccgcgggccttcctcctcttgcggaccggagggagagccgggcgcagagaccgaggcacagtcgcgcggcgcggcgttccgcgtgaccctgcggttaaaacccgcgcgctgcagcatcgcggaaaacgggattcgcctcatttgaaacttgaggaaaatctctaaacactttcattttgatagaaaccatttccgccgctgacgtgcgtctacgcccatcatttcagctgacacgttgctgtaacgtctcctccgtttcatgctctttcgaaccctgtcagctgcgggtaagactgtagaaaagagaggggagaacagggcccagccggtggcgccggcgtcttagcagccgattgcgcagctcccgggcgcggcggagagtccgggctcgtggggagcgccggctccagagcccgcggagcagcagcccagactcccaagacggagggcaccgggcgggcgcacacactaacccacgcaggggacactcaggctctaactcacgtgcacacacgctcacatgtacacacgcacacacgcacccggacgtacacacacagctgtcgcctaccacacacattcatactccattcacactgcaggatgtgcaaatgtgtgtgacagagagaggagggagagagagggggagagagagggagagagagggagagagagggagggggagagagggagagggagagggggagagggagggagagggaggggggagagagggagagggagagagagagggagagggagagagagggagagagagggagagagagggagagagggagagagagagggagagagagagagggagagagagagagagagagagaatgtgcctctcaggaatggtcaaatatcctcctgacacacctggttggcccaatgcagggacagagagggggatgacctgatggctttgccttccacccacccagcgcctgcccatcagtacagcagggctgccctgcccgcctgcgacccacctttcccgacagcctgtgtgctttctccccgagtctccaggacagcccactagtggcatggcggttccctgggtgggaggagcggaacccttcaggccccctcaacactcccccaaaacctccctgggggcccccactggcttcagcgccctgcaaaaggctgactaggatccatgtgcacactccgtgtgccactgctgccagggcccccagccccaggctgcctccctccctctctgtcaggagctgggttggcctgggagggttgtggtgccgctgactgctcccgggcaggggccatctcatctctgttctcaccgtgcaggcagcagcaggaagggaggcaaaaggagggagtggggagaaggagggggcgctgaccacatgaagagacgcttcttccctggtgctccatctccctccccgtcccccagtggacaccctggaccaagctgagcccacaagggtgcccaccctgcatgcttgtccccatcagctccgtgtggccccctcaggcagtttccacagtgagctcaggtgcagcaggggtcccgagcacagaaatgaccaggagaccctggccctgcccctggggccctagaaacagctcctgctcttgaattccccacccctgtgtgctcaatttctctgggcctctgggtgcttttgaggttcctggcatttaccaaggagaaagatgcaggaggggaggctgcagggctgtggggatggtgaagtccaacccagccacccccagcaggatggtgtgtggggccggacacctaccaagatctcttcccagcttttctgtgggaaggagccggccagggccagaaccctggctgagacatgaagctaaaagtgcctgaggacttggtcccaggtctctgtcctcctccccaaatgcctccggagccttcatctcttcaggcacctcactcacttccacccaaccccgcctgccctgggcggaccctcccccagctctgccctcccccacaccccaaacccaccctccccattctgttaaaacaaagcccctcttagcagggtatgtcacgtggcgctgccgaattattccattaatttattattcatgatgaaaaattattctaataacatttccatactattaatattccaaagacgagccgttgagagccccttcctgcggcctcctcttggcgagagccaactctatttttaacaaagtgtattgaaatttaaatctaatcacccacaatatgctacgtttcacaaatacgctctcaaagagtctgtgagaggagccaggcccggtggtcccggaggaggcaggcgggtgggcccctgccgtgggcgttggaggtgccattctcggctgcccccagccctgcagatggaatctctgtgccacagcccctttcctcactgggggagccgggccaggcgacccctccttgctgcttctctccctccctccttcctttttttccttgtcccacccctcagtccatccagagactctcagagtttggctctaggcagggggtatacgggggtctctaacgggagctgacgtctgaggtcaggcgtcctcaggagagggtggagccgctccctggctgagacaaccttttctgaccactccctcctccctttggctgccttctctatgtggaggggtctttggccccacccccaatgcacactgcagcccaaggtgggctggagtccagctgcccagggagggtcctcatgggcaccttgggggacatcttgtcttgttccctcttccgaggtcgtgccacatgcctgctgcacacagacacctccgtccattgctcagtcatacgtgtacacacaggcagcctcaatcatccatccggcagggggggacctccttctgtctgggctggacatggaagaatgtctgtgggaacgggagggtatgaacgtcacaggagacaaacaaggtctgcagaaaatactgagggagctgccttgataggaggtgaaggggcagggggaggtgaagggccagatgtctcccaggagggaagggaggaagaaggaccaggtgccttcctgaggggaaagaccaggcacctccttgggatgggagacttctac

SEQ ID NO: 1888070 - DNA, 4001 bp, Homo sapiens
aatggaataattcggcagcgccacgtgacataccctgctaagaggggctttgttttaacagaatggggagggtgggtttggggtgtgggggagggcagagctgggggagggtccgcccagggcaggcggggttgggtggaagtgagtgaggtgcctgaagagatgaaggctccggaggcatttggggaggaggacagagacctgggaccaagtcctcaggcacttttagcttcatgtctcagccagggttctggccctggccggctccttcccacagaaaagctgggaagagatcttggtaggtgtccggccccacacaccatcctgctgggggtggctgggttggacttcaccatccccacagccctgcagcctcccctcctgcatctttctccttggtaaatgccaggaacctcaaaagcacccagaggcccagagaaattgagcacacaggggtggggaattcaagagcaggagctgtttctagggccccaggggcagggccagggtctcctggtcatttctgtgctcgggacccctgctgcacctgagctcactgtggaaactgcctgagggggccacacggagctgatggggacaagcatgcagggtgggcacccttgtgggctcagcttggtccagggtgtccactgggggacggggagggagatggagcaccagggaagaagcgtctcttcatgtggtcagcgccccctccttctccccactccctccttttgcctcccttcctgctgctgcctgcacggtgagaacagagatgagatggcccctgcccgggagcagtcagcggcaccacaaccctcccaggccaacccagctcctgacagagagggagggaggcagcctggggctgggggccctggcagcagtggcacacggagtgtgcacatggatcctagtcagccttttgcagggcgctgaagccagtgggggcccccagggaggttttgggggagtgttgagggggcctgaagggttccgctcctcccacccagggaaccgccatgccactagtgggctgtcctggagactcggggagaaagcacacaggctgtcgggaaaggtgggtcgcaggcgggcagggcagccctgctgtactgatgggcaggcgctgggtgggtggaaggcaaagccatcaggtcatccccctctctgtccctgcattgggccaaccaggtgtgtcaggaggatatttgaccattcctgagaggcacattctctctctctctctctctctccctctctctctctccctctctctctccctctctccctctctctccctctctctccctctctctccctctccctctctctctccctctccctctctcccccctccctctccctccctctccccctctccctctccctctctccccctccctctctctccctctctctccctctctctccccctctctctccctcctctctctgtcacacacatttgcacatcctgcagtgtgaatggagtatgaatgtgtgtggtaggcgacagctgtgtgtgtacgtccgggtgcgtgtgtgcgtgtgtacatgtgagcgtgtgtgcacgtgagttagagcctgagtgtcccctgcgtgggttagtgtgtgcgcccgcccggtgccctccgtcttgggagtctgggctgctgctccgcgggctctggagccggcgctccccacgagcccggactctccgccgcgcccgggagctgcgcaatcggctgctaagacgccggcgccaccggctgggccctgttctcccctctcttttctacagtcttacccgcagctgacagggttcgaaagagcatgaaacggaggagacgttacagcaacgtgtcagctgaaatgatgggcgtagacgcacgtcagcggcggaaatggtttctatcaaaatgaaagtgtttagagattttcctcaagtttcaaatgaggcgaatcccgttttccgcgatgctgcagcgcgcgggttttaaccgcagggtcacgcggaacgccgcgccgcgcgactgtgcctcggtctctgcgcccggctctccctccggtccgcaagaggaggaaggcccgcggcgtgccgaggtcagcggcgcggagccaccaggcgagacggtcacggacgcctgaaccgaggtcaccgaggccacggggccgggaggccctcagcagagcccgggggctccgcacctcaaggccggccaggaagaaacagcagcaggagcccagggcgccccggggagcccccgacacgcgggccgagcgcccagagcggcccaggccctcgcgaggagaccggcctccccagggcggggcttccgactcgggcgcccgtgagccccggaggcggcgcgaaggggcagagtccgcgtttctaaccagcccccgggtgggcggtggcccgcgcggcacggtgggcgcgagcgccgtgggctggggccggcctgggctttcagggcgagggctttccgcgccggccccagcccacccggccccgctgcgcgcccctcacgctgcagcctgggaacctgggccgggagctgcgggccgctccggggaagcgggcctgacctcccctccccaccgccgcccctgcggtgagatcctgcctgccggggcgcaggggcccgcggttgggctccgggagacggaagaggccccacagctcgggccccacgcagtggacgctgccacttaattttggcgtaattgatgtcaaggcgggtgcccgggcccccagtgaaatgcctcatgaactcgctgcgaggaacggcgctccacgcggtgcacggtggccaatcagagctgccgcttctgatggaggctgagccggctggggaggcgtcttggccaagaaccagccccagcctcgctcagggccccaacccgcagaccatgtaattaagctgcgttctgcagccagggcaaggtgcggaggggcctgtttctagcattggggaggaggaagtggggaggagggagcggggaggaaggagtggggaggagggagcggggaggaaggaggagtggggaggagggagcggggaggagggagcggggaggaaggagtggggaggagggagcggggaggaaggaggagtggggaggagggagcggggaggaaggaggaaggagcggggagcagaggagcagagcgggagggaggatcgtcgtgcagggggcctttgtggatgaggctgggatgtccctgcccctccgttccctccagagtctcagctctgaacatcttcccgcacctctgaggagccaggcctggaaaccctctaaaatagatttttctgcctcaagacagaagatgggcgttccaggcagagaagagctgcccagtcacgtgctctgctccacctggtcagagacccttgacctttagaagactggacctgagggcgtggctggtggacctgagggcgtggatggtggacctggccacccagctgtagctttttgggttcctgtggtcccatttcttgggtcaatctcacacctggcagctcccaggaagacacccccaggcccctcacactcctgggggcagctggaattggcttcagggcgggaccaggggccccatgggtgtttggaatccctgatctgggtcaggcaccggcagcaggattccagcctggcctggactctggtgtgtcccgtttgaagaaaccccgccctgtgaaagttcaagtttagcatccaatgacccatttaagaggtttgctgagccacgtcacaggagggtctgggtgcaaacggaggtggcaacacacagagcgagccttgagcacccaggttacccccaggacctccagtctggcttgggggctcctgctgtcctgtggagcagccccctgggatcagggacggggctgagctggagagtgtgcaggattgattaatgatgtctgccacggtcaggccaactgctgtgtttctggggcccacaagctaaaaatggttggaaaaaaatcaaaacattaata

SEQ ID NO: 1888071 - DNA, 4001 bp, Homo sapiens
agcctcacctggtttggggtggattattaggaaactgctctagaacccaagttctaccctgctttattagattctgtttctgtgcctcagtctcccatgactgcgacaagagagagggttccaaggggaaaaccagccctgctgagaccccagtgtgcactgactgtatttcacgtgactagcattatgctagtgcaactgacccttgaacaacacagggattaggggcaccaacccatcatggtcgaaaatctgtataacttttcagtcccgcaaaacaactaatagtctgctgttgaccagaagccttacctgataacataaacagtcaaaacatcttgtatgttatacgtactacactgtctaccatagagtaagctagagaaaatgtaattaagaaaatcctaagagccaggcatggtggctcatgcctgtaatcccagcattttgggaggccaagatgggcagatcaggaggtcaggagatcgagaccatcctggctaacatggtgaaacccccgtttctactaaaaatacaaaaaattagccgggcatgatggcaggcgcctgtagtctcagctactcgggaggctgaggcaggagaatggcctgaacccgggaggcagagcttgcagtaagccgagagaggcaggcggatcacaaagtcaggagttcgagaccagcctggccaatatggtgaaaccccgactctactaaaaatacaaaaattagcctggcatggtggcaggcgactgtagtcccagctactcaggaggctgaggtgggagaatcacttgaacccaagaggcggaggttgcagtgagccaagattgcaccaccgcactccagcctgggggacagagtgagactccgtctcaaaaaaaaaaaaattattcagtgaaagtggatcatcataaataaagatcttcatcctggtctctgtgttgaggaagaggagggggttggtcttggtgtctcaggggtggcagaggtagaaaaaaagtccacgtttaagtgcacctgcacaattgaaacccgtgttcaagtttcaaatgtatcttaagatttacttaatcgttgtaacaacactttgaggtacctacatcattcttacgatggggaaactgaggcagagaccgtaagggcgggcccagggggcatgtgaacccagagtgtctggcttccaagactcgtattcaccgtggtgccgtttgacatgatcaggataatggatccctggttccttttgggggcagcattggagaagggggtttggcaccgtcagtctgacagcagggctggctcctgcagtgtgaatgaagcggtcttgtgctcgactgtgaaggggggttaggacctgcttcccagggcgggtccagctttctgagggaaagccttcagagcctccatcaggccggcaccaggtaccagttaagcactgggcagggaacagaagtggtcaaacgccgcttgccgcgacttgaaactgctgaataaatggataatgtcaagcgctatggcttagggcagtagtacctccggttcctacgatcgtgtctggggtccctgaggagcaaggcaagagtcggccattcaggaggtcagagttcagctgttcttgcacaagcagggaagctgagtcaccccaaacacgggcaagactagcggtggtatcaaatggctatcaggggcggggcctcaggggcctgcccctgcctccccgccctgcgtttggattccctccagcattccgggccagggcgcgggaggcggaggccgaggagaggacgggaggaggctgcatcctgccctggtgcgtcaggaagggccgagcgagcgggaaggaaagcaccaccccccacccccgccgcggccacacctgggttctccaggcgggcaggggggcccccgggccggcgcctggctccagcaagtctgggccgcctccccgcgccgccccgcgggggccgccagatgggctgcccgcccgccagctcagcgacgcaggcaggaaacgccggccgggctgccaggaacgcgcgcaggggagggggcgggcccggccgggccacgcccgccggaggggaaggaggggccaagcaccgcccggcggggactggtgagctccaagagcctgcgatcccggtccctgcctttactagatgggtttccttgggtaggtcgttttacttctctgtgcctcactttccctacctgtaaagcggggctgcctgtctccgctctttttcccttttctcttttatttgtgcagcagggtttcactctgtcgcccaggctgaagtgcagtggcgcgatcacggcccactgcaacctcgacctcctgggctcaagcgatcctcccacctcaggtgggaatataggtgtgtcccaccacgcctggcttttttttttttcccctagttgaaacggcggttctcactcttgctcaggctggtctcgaactcaggctcaagcaatcttcccacctcggcctcccaaagtgctgggattagaggcgtgagccaccgcgccgtgcctcagctattttcgtgtgaccgtgtgatctcaggacactttctttcccttctcttccttggttttcttacctgaaaaatggggtgaacaattgaacctccctcaaccatgggctaagcctttgttttcctctccaccgtagccccaacacttggcccattgcctgaaacatgaaggcactcagtatttgttgtaagagtgactataaaggtttgggacaatcctgagggcctggctacagcaggcacttcataaatggacacaaattatcaaattacctagagtctaatgtttaccaacctgcggcttcaggcaagtgacttcccatctctgagcttcactttcctcgtctacataatggctgtgaggattaagtaaaataaataaatacatggaaatcacacatagtgtgttctcaatagatatttatggaagagtctccaaaatattaaaaaaagggagatactattttgagtaaatttgagggcaaggaatatacaaaggagttaggtggcttggaagaagatttttgctatatatgtaaactaagctgtgtgtgggtgggtattttgcttgttggtttttgagacaggctctcactgtagtccaggctggagtgcagtgtggcagtcatagctcactgtaaccttgaactcctgcactcaagccatcctcccacttcagcctcctgagtagttaggactacaggtgcgtgctaccacaccctgctcactttgcattttttttttattttatttatttatttttttgagacatagtctcgctgtgtcgcccatgctggagtgcagtggcgcaatctcggctcactgcaagctccacctcccgggttcatgccattctcctgcctcagcctcccaagtagctgggactacaggcgcccaccaccaccctggctaatttttttttgtatttttagtagagacggggtttcaccgtgttaaccaggatggtctccatctcctgacctcatgatccgcccgtctaggcctcccaaacatgctgggattagaggcgtgaaccaccacgcccggcctcattttgtatttttaaaactttggcccgggcgcgctgtggctcacctctgtaatccagcactttgggaggccacggcaggcagatcacgaggtcaggagttagagaccagcctgaccaacatggtgaaaccctgtctgtattaaaaagaaatatggtcaggtgcagtggctcacgcctgtaatcccaacacttcgggaggccaaggcggactgatcatttgaggtcaggagtttgagagcagcctggccaacatggtgaaatcccgtttctactaaaaatgaaataaaattagctgggtgtggtggcacgcgcctgtagtcccagctactcgggaggcagaggcaggagaattgcttgaacccaggaggtggaggttgcagtgagccgagatggtgccattgcactccagcc

SEQ ID NO: 1888072 - DNA, 4001 bp, Homo sapiens
aaaatggcaaattttatgttatatatgtattttaccatacacacgcacaaaagattccagagccactatcctaattttttcaccttgttgtccatgtccttaagccaagggtcatgggtgttcctgggatctgcaagaatgcaaagagctgagaagacaggggcgcattgggcacctgcagatcctgtaggtaaaaatagcaggagcctaggcaacacaaatacttgttgcctgcaggcaggcagcaaaagaacaaaaacaggccataaactagcagatagtatagcataatgattacaatattgggctctgaagccaaagtgaatctgaacacccaagttcagattctagctctgccatttattagctatgtgaagaaactgcaaccaaaaggagataaatgacttgtccaacagggtccaaagtattttctcatttatattgtttaaaaatctttacatgggttttgtttcattctatatccccagtagactgtaagctccccaaggaagctatgtttgtaatatcctcacttgaaatgtaacttaacttctttgtgcttcagttgcctcacctgtgggatgcagagaataagggctcctacttcataaggttgtcaagcatattaatgaatttatacctataaatgtttaggagaaagcttagtgcttatgatagtctcaacaagcaatagattgagagaggcttctgaagaggtggtcaggctatttcataaaatgttttgagcaagaaaaacagtcctaaaacatccaggattgttctagatttggactagagtgaagaaaaagcaaatcaattgttctttgataatttgatttgtatttattggacttctactttcatgtgtgtccaaacaggctcaagctctgcagtgataagactgacagtgaatacttcaatgatgtctttaagaaaaacaataataaaacaggggaaaaaagaaagaacaaaaccatctagaaagtgtcaacattttactgtctgcagggttcgtcacaacagtgccaaatgacaaacttaccacatttagttggatgaattttgccctgcagaaggatatcaccttttttttttataggcaaacagtttatttattcatcctccttctcttcctccccatcttcttcatcttcttcttccatcttttcccaggcaactttagcaggaccttttgtgccgtccaactttcctttcgacttatagtcagcaacatccttctcatacttcttcagctttgccaccttagtgacataaggctgcttttcactgtcatttaagttattccacatctcacccagcttttttgccacgtctccaatagagatgccagggtttgtggatttgatcttggggcagaattctgaacagaacaggaagaatccagacagtggccttttgggggcattaggatcgttcttgcctcccttagctggtccataatccttcatttctctatcacagtgcactttatccgcctttgccatttaatcgaatttagactctctctctctttttttttttctgagatggagttttgctcttattgcccaggctggagtgcagtggcacgatctcagctcaccgcaacctctgcctcctgggttcaagccattctcctgcctcagcctccccagtagctgggattacaggcgcccaccaacacgcccggctagttttttgtatttttagtagagacgaggtttcaccatgttggccaggctggtctcaaactccttacctcaggtgatccacccaactcaccctcccaaagtgctgagattacaggcgtaagccgccgtgcccagcctagacttctctttcccagacattgtcttccacctctcagagcactttttggaaaattctgcaaaattgacagggacctctggatttttcttatgctcttctctgcacgtctgcacaaagaaggcaaaagcagacatcttgccccttagtttcctggggtcacttctagccatcctgactgtattgttcactagtcttgaaggatatcacttttaagtggacaccattcacatgacattataatttgcaaatttattatgataatttaccagtagatggcagtaaaatgccttgttatttcagaatctgttcgttgtaacaattttcagatatatggaaataaaatgccttgaggagggggtcacttgtgctttgcataaagacatgctatggcgaggcgcagtggctcatgcctgtaatcccagcactttcggaggtggaggtaggtggattgtgtcagcccaggaattagggaccagccagggcaacatggcaaaaccccgtctctacaaaaaaatacagaaattagccaatcgtggtggtgcatcatgcctgtagtcccagctccatgggaagctgagatgggaggatcacttgagcctgggaagcagaggttgcagtgagctgagactgcaccactgcactccagcctggatgacagagtgagactctatctcaaaaaaaaaaaaaaaaaagcggtggtggggtgggggcttactatgggcaagccatggcttgctcttcaggaaaaaaatcattgaaaaaatagaagaaatagactaataattacacaattttaaaaagtggaagaatatcaagtgaccatacatacacaaaaaggtgggggtgggggagaaaaaaaaaactgttttcaaaaatattctgaaattttaaagctttttattagagtataatataaagacataaaagtacagaaatcgtaagtgtaaagcctgttgaatttccacaaagccaacacacatgtctaacaaacacccaaatcaagaaatagaacattcagccccacagaagccccttccagtcattacccacagcccccaaggttaaacagtattttaacttctaactccatagattagtctcaccaggagttaaacttacagattcatctacattgttgcatgtagttgtagcatgttcattttcattgctgggtagcatttcattatttattttttatttttttgagacagagtcttgctctgtcacccaggttggagtgcagtggtgggatcacaggtcactgcagccttgacctcccaggctcaagtaatccttctgcctcagcctccctagtagctaggaccacaggtgcatgccactacaccatgctaatttttgtattttttgtagagacggggtttcaccatgttgcccaggttggtctcaaactcctgggctcaagtgatcctcccacctctgccacccagagtgctgggattacagatgtgagccaccacacctggccagcattttattgtttgaatacaccataatttatccattctactgttaatgagcatgtgggtttccacttaggagctattttattttattttatttattttttttagagatggactcttgctctgtcacccaggctggggtgcagtagtgcgatctcggctcactgcaaccttcgcatccctggttcaagcaattctctggcctcagcctcccgagtagctaggactacaggtgcacgccaccatgcccggttaatttcttttgtattttttagtagagacagggtttcactgtgttgcccaggctggtctcgaactcctgagctcaggcaatctgcctgcctcggcctcccaaagtgctaggattacaggcgtgagccatcacgcctggccagagctttttttgttttgttttgagacagagtttcgctcttgttgcccaggctggaatgcaatggcgtgatctcggctcactgcaacctctacctcctgggttcaaacgattctcctacctcagcctcctgagtagctgggatcacaggtgcccaccaccatgcccggctaattttttatatttttagtagagacagggtttctccatggtggtcaggctggtctcaaactcccgacctcaagtgatccgcccacctcggcctcccaaagtgctgggattacaggcgtgagcca

SEQ ID NO: 1888073 - DNA, 4001 bp, Homo sapiens
gatgatcaatgtgtatattttgcttcatttcattttcatgacaaccctggaagttaagtattataattcccaatttacaggtgaagaaactgaggctcagagaggtggagagagtcagggcagggctctacatctttttttgtgatagggactgggcatctgtctttaattttaaaaaatctttttaaaaaatagacacagggtctcactatgttgcccaggctggtctcaaactcttgggctcaagtaatcctcccatctcagcctcccaaagtgctgatgcctccagagacaggacgtggctgagatggattataacgtagtctccggtttgcagtgcctggctgctggtcatatcctcacagggcccatgggacacagagccaggtgcattcccctgacttgggtcttccaatggctctcaggcacctctctgcttccagccagccctgggaggagggggagaacggcatggcaaggcgtttgcagagccgtcttgttcaccaatgtctttcaagacattgcccgggtccacagagagcccaccattcattcccatgctggctggagcccctgaatacccgaggtgaccttctgtccttggacaagtcacttccccctctgatctccatctccccatctgtgcaatgaggggatggggctgaatcagtggttttccaaccctcaaataaaatattaagactacatgtaaaagggagtcgctggttgaagctgggcctgtggatgcatacccttggctcctgggagcctcggaacccagcttgaaaaaccccagcccacatcctcctaaagattctcctggctctgacactgcagagttctagaaccccaagctcaaagctgccgcttcccatccctgtttggaaagctctcccccagctgcctttatctctctttggtaacagagcaaatttgctcaggacccagcacagggggaacaagcagactgttgactcttgagcaaagcctcttctttggagagcagccgaggtggccgtgggctatgcgttgggaggccagcggcctcttgcataaccctggaggcctcctgcccacccaggccttttcagggttaggggtgaggaaaaccgcaaactcatgcccagttaattttttaaggcaaaatcaacaggctcagcaatgattagcagctgggtaagttggtcttaatcaggctaaggacagggagggaggaaggaggcccagggatggggcccagttatcagttaaccacatgaatgttgcttccttccaaacccactggccttcagccccaagctccctcatcttcctctcggaaatactcctgtgacaagccagtggccacccatcatcgggtgaacaagccagtggccacccatcatcgggtgaacaaacacaatgccactcatggtctgtgatgaagtagaaagtgctcgttgttaagacaaagctcacccaccaccgctgcgtggacttgagcaagtccctttcaccctctgaggctccgtgaggggccccaggtctgggccccaagtctatggttcagtctgtggccagctgccactcccctgacggcctcagtgtttccgtccactaaatgggtgggttagccaaggcatcttttccagtcttgaagctttgtgggtgcctgatttgattaagccacagtggcctttgccgagtgcagagggtggtatgagtggcattttaggagctcaaggaagagaaagggaggggacctacctggtatctgccgttggtatcagcaagtgtcagatcccagctccaggaagagggctgtcctctcagatgggaggcaggggtccagtggggtggctgtggctgcagggacagcctagcagagcctcttggtggcccagaccccctgtccctggaccttggaagccgctaaaggaagcagcaagaccaggccagctggtggctgcctggactggagtttggtcagtggttggggacctatattgtgagatagttaggactttgtccacaaactggaatttgaaatttcaaaggggcaaaactgaagggccctaccccagagtagagatggctcttggcttctttcctccacgacttttgttctttgtcttgataagtcccagttttctctgcacctctcccggagtggtgggtggggaagaaaagataggagataatggtgtggtgagcgccaaggggaagtgaagatgccaagcagccctggggtggccaggcgtgtggaggatgcccctgcccctgcctataccccgggataaggtgctttacttctcaggtccttgagttcccctgcaagactgaggcagtgaaaccaccagctccagtgccttagaattccgaagtcctttcagggattccaggagtcatgatgcaggcaatgcgtagaggggtgaagccctcaagctctggaggcagactcgggttcaaacaacagcccctcccttacgagctgtgtggctttgggcaagtcacttcacctctctgagcctcaatttcatcatctttaaaatggggatgacaatagcccctatctcaacaggcagataatatgagaaggctagaaggtttttagcaccagggctagcacaaaatttctctgtaaacattagaccttattataatgtaaaagagaaacaatgtggttcgtagtggcagctcccttaccaccgtccacagcagaggcacaagctccctacacatgcctccccaactgcaggttgcccagggcaatcccttcccgtctcaactgggtctctctgtgggctctgaggtcctctgctatcccctggaatctgctgcctcttgagctggggcccgacagcaagtgagcagaggtaaagaacagctgctaaattgatggcattgaggctagtgcttgttcatggctgggtgtgtggtacctggagctgtcctgagcaggggtcctgattccaactgattatgtggccagtgtgtcatgcaatcaatgaccaatgacagtgattgctactattgtactgtatgcctacacgtggtcatttaatgcttgaaccatccctacaaagaaggtatcaacccaatttttctgatgcttaaactaaggctgagaaaagtagaagttgaggtcacagagtttggtacattggcactgcctggattttaacctagatctatctgacccacaaggtctgtggtttattcccctaaagagaggtcaggggaagagaggctaagaagcttatctactctctcatttaatcttcacgacaaacgacaagttagaccccttgtacagaaggagtaaccaaggcttcgaaataaaaacttgccttgtgcagacagctggccctgggcttggaatataaatagtcactggtatacaggcaccagagaccaatacccacaggctaacacccactcagtccacagaaagaagcttaatattttttataagcatagaaataaaaaccaaaccaatactgtgacatttgctctgtgacttcctgtatttattatgtgctcatatgaaagcacctaagcattgtcaggataatgttcttcctcactggagggcgttatgaagttgctttcttttttccactagttaaaaaaaaaatcccttggaggaagggaatgaaactttttataattgatacataataattgtacatatatatggagcacatgtattttgatacatgcataccatgcaaagtatttaggatatccatcacctcaaacatttatcatttctttgtgttgggtacatttcagatcttctcttctggctattttgaaatataaagtaaatgattgttaactataatcgctctactgtgctataagaactagatcttattccttctatctcacttatttttgtacccatgaaccaacgtctcttcatcccctgaagaaaacattctttttttttttttagacagagtcttgctctgtcacccaggtgcagtggaacaatctcggctcactgcagcttccac

SEQ ID NO: 1888074 - DNA, 4001 bp, Homo sapiens
atttctgtaggaatatcatacttcaattttaataaaagagtaaagaatgcagcaggcagggtacatggtgtagaagagatggctgattttcactgggaaagattacccacagccctggagttcactctctgggctccctgatgtgcgtactatcccacagattgttctccaaattagaatgaatgcaggctggtttcagtattatgggggtgctcctctgcctcaggtcccagtgccattgttacaacatcaaagaccaactgctggctgagatgcggtccatatgaaaagagtgaccagcaaatttactgcttgacttcattccccttaaaaggaactggctccatggtcctccttcaaagctcaattgtagacatatatcttctttataggacatcgtttacaataaagaggagcaataacttaaaatttaaaaaaaagaatacttttgagagcactgtgaggtggacattccatttaataaacatcactgtggttacattgcccaaacattcccagaagtccagccatgggcctgagagacttctactggacatggtgacttttggggactaatttgaattatatttttatgctctagccctctccctaggctctgaaagttcttgagaaggtcattaatgagaggcaatctacttcaaaccagagggccacctcactaaaatcaggcaaaatggcaaaattcatagcccattactcattaacttatttggagctgcccttcagtagggtaaacatttttttaagggttggggccaaattaaactcctggatcgattatacatagttccccaatacccacatggacatcactccacataattccagtgtgaaaatctcacagacttattagcatttccagatactagaactcaactagaaaacaacaaagttgtttttatgcctatcagaaaatgaagaatgttattaactttccaagaaggaaaaaagtaaaattatttataatatacaggatgtttttggcttcacatggagtctgacccaggtggtggagaaagtcacatctacgatcaaaatgaccagcctcctgaaaactgaccaatccagaataatcctttcaggttcactcatgatagcagttgatcagcccatagaggatacaacgttctaaagagtgggcaagtcatccacttctgtttaacccattactcctgaaaaggttcagctctccatactttgctggaaaaaggctaacaactcagtgcatccttccctctctgctcccctcactggtacattcaggaagacacgaaccaggtgagacaactgagagctccttactgagagtgtgaagtgtgatggtggcacaacatgcaattccgaagacatcatgaaatgagataaatctggggaatccacatcaactagaaaaaaactggaaacatttgaagaggcattgggatcacaaagagagtgaatctaaacattgaacagcaggtattaaatagaaataatgaaaggcaagttctcaggaaaaaatctgtggcagactaggtattcgaagttctgttccaggttctccccagggactcattgccctgaaactctgtctggtgtggttctctcatgccccacaatggttctttcacttcttattcaccaaggccaggattaatgctaaggtctggacgaacccaataatgggcatgaatggccttggccttaagttttcagggatccatctgcagggtcctccctgagatctgagaagggttttacttacttctttcatcttaaggtgaatgctagtgggggaattattgtggtgtgccccaagaacgttctgtgtcttggtcctgacaatctacatgaagtaccttttgtgccaccaggatacgtgggcacatgacaggtactcacatacacaagggtcactgcacatggctgcaggaatgcccaggttggaccggggcttcatctgtgctccaacccacctgcactccatggtgaggcactctgtttagaaggcaggttgcagacactcaccaaattctagaatgttgttgtaggcaagaaagccaagccccaatgtctcatttcattgacaaagaatctaaaacctggagaaattaaaagatttggctaagaccataccattcatttatcctacagccagtaccagactccaaagcaagtcatctttcatgaagccacacaatcccccatttctgaacatctgtaaaagtttttatagccccacttagctaaagagaattagagtaagtgtacatctaaagtgctgggatcctgctacatggtggttgctcttaggttgttacaggagcagaaaggtaattaaatggacatgaattgtctcttttatttaatatacaaccaaactgcagtaaggcaaatgaaataatgtacatataagcattgagcactgcccagccacatggcattctacaattccattcattcattcagcactttcatatcgcgtggctgtgatcagcagatattgtgctaggcactggagattcaatagagaacaagcttatgttctagaaagaaaactgacaataattgattcagaataaaggaattattatagattgtgataggtgcttagcaggacataaacagggagcaaaagatagggaataactgggagttcctactaaaagagggtggtcaaggaaggacttgatggaaaagtgacacttgagtcctgagctgggggaataaaaggaccagctctgcaaagaactcaggagagccagtcaggcagacggaatcacaaacaccaaagccttgagataggaaggactttggcatgactaagggatggaaaagagactggagaacagtgtgtaaggaagaaagtggcacatgaacttgcagaaaaaagcaaggattttgcaggtcatgataaagaatatggctgttctaggattggtgaggaagcagccattgaagagcttctaaatgatggctccatctgatcagtggataatgagagggaagaacatagatatgttagaaaatttcacaataattcaggtaagaggtgatgggatgtggaccagggtagagaagagtggatggatgcaaggcacagttctgagacagagccaacaggatatgctgttggattgcatttcagagttaagaagtgaagagtcaaagacagcttccagtttcacaagggtagagttcatgtcagtggatttatatgggacatgtggaatatgagatgcctctgggacatgtaagtgaagataatagcagggaggctgtgaagtggacagggagctgagagtgaggtgtcatgatgaaagtggtaaaaggagaaccaagaggtgtgtcacagaagccaggggagaagaatgccttaaggagagaggacttctatcgaatgctgctgtgagaacaaaaaagatgaggccagagaagtgctcattcaactgggcaacgcagccatgactggtgacctgaatgaggtcaccaactgctctgcagttgcagaggcatcatgggaacagactccagtgtctattgggtaaaggaacaaatggaaggtgaggaaatggagacagaatatacaaataagtcttgcaaaagttttactataaaaaggggagatatatgaacatgtggtcaaaaaagagtttttggttcatgtaagatcagagataccagggcatctgtgaggctgatgagaacgatccaatagaaagggagagattgatgatgcaaaactgagagaggagaaatgaggagtgaattcttcaagaaggcaaggggctatgtgtgagcattggcctttcacagaagcaggaaagcttgttctgtgtaacaattgggaagagaaagaaaatgagctatgcagacaggagtataaatagagtgatggtaataaaagagttaccatctcatgactcctgttccatcagtgaaatatgaagtgagggcaggagcacaagtaggacgtttgaggagagaagatataaaatggt

SEQ ID NO: 1888075 - DNA, 4001 bp, Homo sapiens
atgttggccaggctggtcttgaactcctgacctcagatgttctgcccacctcagcctcccaaagtgctgggattacaggcgtgaggcactgcactcgggttccagctccttctttaagtgagggcaatattctcagccagaggtttggggtctcatgcccactgtcctgcatgggctctgttcagggtggactgcctgactggtctggcctcaggatcccaaaccttttttcggcaaaaggctctggttcctgagaaggccactcagtcctggcaccaaagtgacatcagtccctccctacactacaggcaaatgtaggtgtccctagtgattacaccccactggtctgcctcagacatatccagtgggtgtcatcctgatcccccacacatgacccccactccatggctatggctgattgaacaggggcaaactcttgattcaagcaaagccagtcggagctgatatctggtagaagcctcattgttccatcccccagcagggaagaaaggggaaagatatgaacaggaatagggatcagcatccagagagaacaaggacaagtcagcttcttgagagaacttcaggtcctgtgggacacgataacactatattcccacaggagtcatctggtggcttacatgagctccctgtgtgtttctgttacttgctagccacaaagtccctgcaaacagaaactttagatccactgcctcctttactcctcctctctatagcgctgtgaagcaaatgtcctgcatcatccccatttcacacacgcgaaaagaggttagaacatttcaggacggtggtgaggcacggactgctcagtgtggaactccgtcccacgccctctctgggtcctgctagccctggcccagcagcgggatgtggataagtcccagaagagtgtcgggacactgggttggggtctacttcaataggtgaccttcggggcggttgttaagagccccgctactcctccgggtcccgcagtcgctgaccacacaagccctgtgtcgggatctgtcgagaccctcgttccctcgccaaccccggggcgccccgattctgcagccactcccttcttgcgccccagcttttccacacagccgggtcaggacccattcttccgggctgaattctgttctctctccatgcctcctcccacgtgcttccctcctcccggaagccccttctccgccctattcccagccgcctcccagttagcccccaacaccctcccggcacctcctccagcttcttggcgttccccgttacaaacacgatcttcttccccaccaatgaggccgccatggtgatccccggttacccagctgagccaccgaaaactccttggcgtccagtgacagaaaacttccggctggtggcggaagtgaacggctcagtttccggccaggggtcccggggaaagccgacccggaccccaaggcgcgtatcgggcgagtgggctcgcggtggcggcctagcccacagcgtccgatttgctgggggcctcccgagcctggagactgagtgacccacccctcctgcctaagggacgctatcttcaagaaccggaagagaccactcccacccccaccccgcccctgctttcgctcttctctgcaatggggtctccgaaaggagaagactgcagccctgtgaccctggaggtttgcgctctcctatgctgtctcaaaaaactgcctccttctaggcaagggcttccaaaccctcatcctgatctcaccttcagccttacccgccagctatgatccactcgactgtgaacttaaactcggcatagcctaaaacaagcccaaacttctcacccgttttcactcctaggcttgagagctcagtatgtagagttcctcacttcctcatccctccagcctctcaaatctatcaccccttctccgtggccaccgtttcagccagatctttgcattccaaacacaacagaaagtaggaagtgccctctcaaaggtgggtctgctgaacctctgctgatactctctttgcagcaagtcatctgacctccctcctccagagactcagccctctgccccccgcctggacccctgtgtcagtacctcttgaatggccacttctgcccatggacaagaaagggagggagtctgagttcttaccaagctcctcaggccattctgatgctcatcaaagtgtgggaaagcccggtggctcacgcctgtaatcccagcactttgggaggctgaggcgagtggatcacccgaggtcaggagtttgaaaccagcctgaccaacatggagaaaccccatctctaccaaaaagtacaaaattagctgggcatggtggtgcatgcctgtaatcccagttcagagaattcaggattcaggagaatcgcctgaattcgggaggtgggggttgcagtgagcggagatcgtgccatcggactccagcctgggcaacaagagcaaaactgcgtctgaaaaagaaaaaaaatgtgtgggaaccactgctttgggtggtgacctgttttcttttattgaagtagaaacactaaccattatgcagagtccctagaggagtggccatggggatttgggggcagaggagggcttgggggacatcagttaccccgaggagcctgaaaagaagaaaaacagcccaccttacatggatgcctttcttggatcttagccagctcaagccccagctcaggaaaaccttccctgagctccctttcatctgcttgcatagcactgacctctgcactgcaaatagatattcatttgtgtgattctgttttctcttctaaaaatcctaatggtaaaaaccatatctgtttttgctcacctctctttttcttttttttttttttttttgagacggagtcttgctctagtcacctggcctggagtgcaatggcatgatcttggctcactgcaacctctgtctcctgggttgaagcgattctcctgcctcagcctcctgagtagctgggactacaagcaccccccacgacgcccagctaatttctgcatttttagtagagacggggtttcaccatgttggccaggctggtctcgaactcctgacgtcgtgatatgcccacctcggcctccctaagtgctgggattacaggcatcagccactgtgttttgttgttgttgttgttgttgttttgagatggagtcttgctcttgtcgcccaggcttgagtgcagtggcacgatctcggctcacttcaacctccgactcccgggttcaagggattctcctgcctcagcctcctgagtagctgggattacagacatgcaccaccacacccagtgaatttttgtacttttagtagaggtggggtttcaccatattgaccaggctggtctcaaactcctgacctcaggagatccctccacctcagcctcccaaagtgctgagattacaggcttgagccacggtgcccagcctcacctctcattcttaaatcccagctcctggtacatagtaggtgttctgtaatgtaagataactagcttgggcacagtggatcacttgatcccaggagttcaagacaagcctagacaacatggtgaaacccagtctctacaaaaaatacaaaaaattagttgggcttgggggcacacacctgtagtcacagctgtttaggaggctgaggtgggaggatcacctgagcctgggaagtcgaggctgcagtgagccaagagtgccactgtactctagcctgggtgatgtgagtgagaccctgtctcaaaaaaccaacaaacaaaaagatcacaactgacatctataattacaagtccatagataactttctttttcattcttttatttatttattttttttgagatggagtcttgctctgttgcccaggctgaagtacagtggtgtggtcccggctcactgcaacctctgcatattgggttcgagcagttctcccacctcagcctcctgagtagctgggactccaggcatgcaccaccatgcctggt

SEQ ID NO: 1888076 - DNA, 4001 bp, Homo sapiens; identical to SEQ ID NO: 1561875

SEQ ID NO: 1888077 - DNA, 4001 bp, Homo sapiens; identical to SEQ ID NO: 1561876

SEQ ID NO: 1888078 - DNA, 4001 bp, Homo sapiens
gtgaagtggtgtactacttcattataaattcaaaggtctgactttaaatatttacacaagtaaatacaccattgcaccaaggtactgaggcatgcatctgcatatgtggtagttttgttgtttataagcagaaaagaatggcttgcttttatggcagtgcagttcctggcatgattaattttttaaactcatgtttctgtgatgaactctggttttgaaaaagcagtttatggtagagcagttattgtatatattatgcattcagataatatttcactctaaaatgcagagtttttttattttaaacattttcaccaatgatatgtttattgtgtttttagtctgcattttctgcaaactctggtatggctccctgctatttttattaatagaaatgtagatgatcccaaactacagataaccatgaagtcatttggatacttttctcttgcatttacttttggatgcagaagtatctaatggcctctgaatttatttcaattaaaattacaaaggattattgaggagaaaccaggaaatgaccttgttcattcattcttctcttttcagtattctttacaatcatcccttgctgggagtagttgactctccccaaagttaatgcaaatgtattttctcatatactttctttataagaaaacggataattaagtaccagggtttcaaatcccttctcatgcagaagtgcaatatggctagaagcaacttgggctgtttgccattaagattttaaaagaaattgtaattccagcaacctgccattgatccatcaatagttggcagttaaaaaaaatgccttgtgccagaatattagacattaaaaaaagtactttggaaattttttaaaaacttagcaaagccatacacattgttaaggtgttactgttctgtccttgccagtgtactatccccacccagggacctcccatgaaattcatgtttgagagcttcacgcaccttggcactactaatactgttgctttgtccatcattgcagctactttgatctctaagttcttgaccatcatccctttattaaatgtttgtgactttggcataactatttggagatttcacttttggtagagtaaagcaagtatgtagtttaatttaagacagagtctgtctgcctctttataatagttctgttggggtgtcctgtttgtgtgggtgcatgctggttgtgtttgtgtgggctgcattccttctagaatattccaaagaaaatattccagaggctgtcccctgaaggttgaggaaatgtagcagttgggctggggctttgcaaccagccatcagtgtcagctcttttactccttgctctgtttctctaccctctctgagcctctgtattgggaaagcagacatactgcccaataggattgtcttaaagtttaaatgaaatcatttgtgaaagtgccaagcagatactagacactcaattttatctgtgaagtataataatattcatgtgaacattattagtgttcctggtcttctgtgtgggcccccacagtccccagcatttccaaaccagctatgaggagcctcacaaagcaaactcaaagaagaacataagtagagagaatgaggatgcagcatcacagaaagtgccattgtgagacgagcccctggaagagtggacactttcagtctgttctggtggacctgcataccttccttgagttgtggtggccacttgggaccaagacccacacaagcacagtactgctgcaatacctgcaagacagtgcttcccaatagtactgctatgttagtttctgcaagaaattgccacttgagaacacaattgagattcaaatccaggatagttaccttatcaaaaaggaatctcaagaagagtttgatgatacttttccaatttccacttagtcccatgaggacatccacagagaaaaatccgaaacagctgctgaagtactcctgaagatctcattggtcaaggcccagacatctctgtctcggggtgcctatgtgcccttagtaaccctatgtgctcacaatggatgatgttgcagggtacctgattaccaggcagcagacctcccctgatgtgtgtgctgccccacaagtattgatgagctaatgcagcattttccaaaatgtgttatttgcaatgctccacccagaaaatacatcaattaatacatattttgttgcccagccctgtgtgatccttctctctctctgcagtatgcataatgcatagaagcatagtgaagacttggaaaagactttcagcaaaggaattgtttaaaaatgtgagcctagagtttcagataacttatcatttatttgaaaatggaattctttctgttaatagccaacagaattaatgttctgtggaacatactttgtgaaacatacacacatgtatgtggaacacttttaaagcagtgagtccaatgtgggcaccagtttcctcaatatgctaaaattatcttcagcatttttctgtgatttcattttgtggggagctcccttgtgcgtgagattgctttataatgagattttgggctaccttagtgtaactacacccagatgttatgactgacagctgcttgttacagctgttccttgaattgacagtaaggttacaatagtaattttaggcgcccagaagtgctattcttcagtgtgggatccttctgtgcgtctttatttgcttttcagccatttcagaagaagtataagagaagacgtggctgaggtgaaatctgggaagtcacaagaggttgggggtgggaagctgtgaagtcatacctttatcagaatgagggggtcctggggatgtttaacctgagaagggcacagtagctctttaaatatttgaggagctgccatataccaggtagaatatttatcgagcttaattatagagcgtagctcagtaacaaaacaactttctagctcttcatttcagcaaaaccaagttcagtatcttccaggggtgagtgcttgaaccatggcaggaaccatgactttttttttttcttttgaaacagggtcagggtcttgctctgtcacccaggctggagtgcattgttgtgatcacagctttttgcagcctctatctcctgggctcaagtgatcttccttcctcagcctcccaagtagctgggactacaggcatgcaccaccatgcctggctaatttttgtatttgttatagagatggggtttcaccatgttgcccaggctggtctccaactcccgacctcaagcagtctgcccactttggcctcccagagttctgggattataggcatgagccaccttgcctggccctgtggctctttaaaagagcattgtggaaggaattattgcttctgtgacccctgacattccttctaatgccaagggactgtgcttcttcctctatgctaatggaatccagtgtgccagcattctcatctcttcatttccctttctcatttgcttatcaccacaaaacggaggtcttcttggctggggctcctccttaaagagtctgctatcactttgaaggcatctgctttgctaatcgttattatggagcatgcgagttttctgtgtttagatttacatagaaaccctcctgggcacacactgatgccccacccacaaacacagagtcagtattccatagcctgtatgatctgttgttgtgaatataatctaccccttttattagtctagttgttgttcactaaagaatccaggtggaaatcaaagatgaatttttatatctataaatgtatggttttctgtatataataagtagtatataattagatgtattgatacaatatatattagttatatattatatatcatatatcattatagatgattatatataaaatccttaattatattagttaataaaattaatatttttacgtgggctgaatcctgggataccagaaaccacaaaagatggtatccctgccctcactaagcctccctcatctctaacct

SEQ ID NO: 1888079 - DNA, 4001 bp, Homo sapiens
gcaggccacacctgtgctgtgggtccatgagttgcctctctcccccggcacccgggcctcctcgcacaggcgggggagaggttcgtgtttcctccgcctccctgccaggtccctgtggagcctctgcctgggagagccctttcccctttgtttgagaggggctggggaggggctcaccctcccttggagcctccaggcttgtgacagggcctggagacaacttccctcctttgcccccaggtagggggagcctagggctcccctcagaggctatggcgggtgggagcacttggctgcagcaggggctgagccctggcttgcatgagtgtgaaggcggggtgctgcttgggcaccgccccctcctgtgtgcctcgggaccccccctgctcctgggtgcagcctcttgccattgaggccatgggctgtttttagggaccagagaccttttcagagggggcctgtggcctgggtccatggaggagccacccccacggtgtttcactgttgggcgggtgtgtgtgcacccccaggtgcaggcatggaggcccacggtcatgtcgggtgggtgcagatatgaggctgggtagcactgactgctgggggcaggagaggctcaggcctggagtcctgagggcagggtgtcaggggatgggtagggagggagggagggagggagggagggaagcccaggctgatcagaggcctgaggggagtcagcaggcctggcctgtgcggagagaagggcctgggcctggggagatgtccgcagctgagggttagggggaggggctgcagtcagggaaggcttctctgaggaggtgtacaaagcgtcctgtgaagactgagccaggctgtcccccagccccgaggcacagacacatgggctgtccctgggtggaggtcaggctgacacacggggagaaagtaggcagagccaaggtggggctggggcaggggcttggggtttcggaggcctgggaaggagcagctttcctctgccctgggcagggctgccctgacgtgcaccgggccacagcagtgctactgccccagtgcctgggctggtggagtctccgaggcagactcagcttcaagagggcccccagcctgcaaggctgagccccgcttgctccctgcagcccagtccctgggggctcagtgggcccctggctgtgggctggtcagcatgggactgagcagagcctggggaggggtgcccggtgtgaggtgggggcaggggccccatcttaggagctgctgacctgtcagagggactagggggttggacctttggacctgcctggtggcagggaccactgtctggccaccaggcctggctggacgtgagggctgtggggacactggggtgtgttcctgcctccaccctggccagtccctgcctgggccgcaggtaggcctctccctagcttgctccatctgcagccacagagcttgcaggaccatgggggaaccccaaactcctgcggcagggaaggggaggaggcagcgcgttggtcccgagcccaggcggggagcccttccaggagggctggttcccgggggctcatctccatccctggggagccctctcccctgggttcgtctgccccacacaggcaaacccagaggtgccccctgtgcggcgagggtgccacatcccctgctgtggcctcacctgaggggcagaaaatgagccaggcccctgggagcatgggaatccaggcgcccctggctcccctgacgccctctcggcccacaggtcttccacgtggcctacgtcctcatcaagtttgccaactcaccccggccggacctctgggtgctggagcggtccatggacttcggccgcacctaccagccctggcagttctttgcctgtgagtctctgccgccgtggggcctggggggagaggcaggggggtccctgggcaggccctccgtgaccaggcttctgaaggtctccgaatacccagccctgccctcacacccggctgctgcggtcatgactgtcagacgaggacccgaaggctcatggggatttattggctcctgtccctggcgtcgggcacagccaagtccaggggctgtggcgccaggaatctctggtgccatctcttggctgcctctggatggcttcatgcaccggcagctcccgtggtgacaaaaggggcctggcagctcccacctcacctcctgccagcctagccacctgcgtcaagagtactggagtcctagcccggatgctggccgtccctggccccgtgccaccctgaccagtcatgctggtgggagtgggtgctcctccccaatagggcaggcctggtcacgtgtcccccaaaattccctggcctgagaatgggggaggggcgggtcagtgatgggcagtaggcgtctgtccccaaggaagggggtgaggatggtcgtcgaggggggtcactcgcactcaaagcgtgcaagggagagcggtggggggcagtgcagtccaacgggccaggccccttcagccagtgagctgtggtctctgtcacgcggcctcttggcctgtgggagcctcagtggcaaggcccggagacgtcaaggggcccgggcaccgcggggacccaggcttttctggtgatccagcgccctcccctcccgccattccccgcagcctccaagagggactgtctggagcggttcgggccacagacgctggagcgcatcacacgggacgacgcggccatctgcaccaccgagtactcacgcatcgtgcccctggagaacggagaggtgggccggggaggggcagggcggtacgggggctggagaacggagaggtgggtaggggaggggcagtgccgagcggggctggagaagggaaaggtgggcccgggaggggcagtgctgagcaggggctagggccacactggcgtcaccgcatactgcccacagatcgtggtgtccctggtgaacggacgtccgggcgccatgaatttctcctactcgccgctgctacgtgagttcaccaaggccaccaacgtccgcctgcgcttcctgcgtaccaacacgctgctgggccatctcatggggaaggcgctgcgggaccccacggtcacccgccgggtgagctgcccatggcgcaggcgggggagggggactggccgggtggacccgggactcagggtgagtgaggcctggccgcctggtgctcacggggcctgcgggtgcagtattattacagcatcaaggatatcagcatcggaggccgctgtgtctgccacggccacgcggatgcctgcgatgccaaagaccccacggacccgttcaggtgaggccccattcaggtgaggccccgttcaggtgaggccccccccagctccctgcctgtccttgtcacccctgcctaacctgagggtgggtgacctggttccatggcccaccacaaccctgctgtctgtgtgacctgcactgaccaccgccgtgtgtgcctcagtttcctcatctgtgcagtgatgtggaggccagggcatgtgcagcctccccagggtgccctatcttggtttggggggccttgccctactgccagcagaggtggggctctccggacccccaggccagctggccttcccaccatagtggacacctggggccctgtggaggggagtcagcaatggggatgattgatccccgactccaagactgcatcccccggaatggacaggtgcccactacctgccgaggcagccctaattcactttgggggtgcccgcccagctcccccaacctttcaggacacaacagacaacttccctgctgccccagccctgaccttcactccagtcaagcagggaccaaggcccaggacggggatggcagggtgggggcagccaacaccccacatctgctgtgccctgtgtgcctgctttcgggggcagccgagggcactgcagagcatccacctcccgggagcccctcacaggatgggcagcagccctggtgctggcaccggcacattcctgggc

SEQ ID NO: 1888080 - DNA, 4001 bp, Homo sapiens
aattgctaacatgaaaaaatgtaacacatacaaatgttatctcttccactttcaactgatgagaactgacgttttatcaatcttctgtataaaatcatttctgttaagttctgtaaaatttgcatcaattcttctatatataatcatctttgtaaagttcttgagaaatgtttggatgaaatactgaactacaaacataaaagtcaagatgtcaaaatataatgtcaattttaatattactttatactttgaattgctagtgatctaatgattgatataggaatatgtttgaaagccaaaaacattatatagatactttgtggcagatatgtcagaatgtgattatacttaaaacagcattctataaatttgaagaatgtgaattaatgatagagatttcagatttcagattattatttgatattgaatatagatttttatggaagtcaaaatatggagtaaaaatattatataaggagaaatgaagataatctcacagagttaaagcatgtgatttttgtattttaattctaactgaccatgtgacatttgggaaggtcatttaatttatttgagcctcagttttggggtatgtaaaaccacagtaactcatatctttccttgcctaccctctaagattggggagaatcaaattagataatgcaggtgaaatactttgcaattttccctttaatatgacattgttttataacattatattactgatgcaacatttatttgcattatgaaatatcttctaaggaataaaatatttggacatcactacaattgatgaggactgcatgtgtatttttgaaagctgtattctgatttacagagcaaaaataaaaaataagcaagctaccaaatatgtaaatacaggaattagcccagtagtatttgttcttctgttccactacaggctttagagtaatatcagtgtgtgtttttcttacataactatgtgacattacttagggcataattctaaaatttctgtcctaggagacactagataactctcaaaaacttctgatttgcttgcatccctttttggcagagtggtcacagtataatgcgggagggtaggtgaccccagagttcagagtcctcatgcacccgggagcaaaattcacaggaaaataagcccacatggagctactgcattgtctgatggcctcgttcgaggaggcgtcaatttaactttaaacccatgagctcattgagagcaggggagagaaggggatgtctccaaattcaggaaactgttgccatagcattttcccttctctattcctgcatagccctcctcccccgaatcagcaacaatttttgctccaccgttttctttcgggaaccagatgcgttttcagaagacagtactccagtgataaggtatctacaccacttaataactgtacctggtaaggagatttaataaggctgagggtggtattaagtttctcagaacagactcatctttgcggatgcagttgcagaacaggaaacagacccagggagaagtttagtccccccagatctcattggccctccgcacaagccaagccacagccactcctgccacacaatcggattgctttcagcactcgcagccgtggaccgccgtgcggtcctttcctccgcagtgagccgatttgctctgccagcagctgtcggtgccgcgctcgacaccgagtcctagctaggcgctcacagaatacgcgctccctccctcccccttctctgtcccccgcctctcgctcaccccggcccactccagcggcgactttgagggattccctctctggcggcctctgcagcagcacagccggcctcattcggggcactgcgagtatggatctccaaggaagaggggtccccagcatcgacagacttcgagttctcctgatgttgttccgtgagtagcgatttggcgactgggagagaggacgggcactctttgcagagaacagagccggcaaagtaaagtcaattagcttgagataaaaaatatggcccttaatgttttgcggtgttttttctttttttcttttaggggaggagggagggccttcctcgccggtggcagggaattcccctgagagccatacacctctgtggcatattccagacagagcctagacaggccagcttcgtgaggtcagagcattggcaagaaatatttactttaaaatcccaagatgtagaaaacagccagctatattacaaacaaagtcaggatttttaatttttttaactgtattttcattataaattaacagcgaaggaatgaggcttgttagacccgggttagagaaacggctcgtagagcgcacagctgctggcagagaactttgtcactccaaagcctgcagagcactgtctccccaccctagcgcccgagacgcgtgggctgagccctgaactgatggaattgttttgtttgttccgcagatacaatggctcaaatcatggcagaacaagaagtggaaaatctctcaggcctttccactaaccctgaaaaagatatatttgtggtgcgggaaaatgggacgacgtgtctcatggcagagtttgcagccaaatttattgtaccttatgatgtgtgggccagcaactacgtagatgtaaggaatctttcccccccctcagcttgctcctagggctccagggcgaagggcacccttcctcaaggctcttcgaagacctgggttgcccgccttctttcccacaccccggcaggctgctcccgaatgctgcatggggattccagcttgtaatgccttctgttcccctgcctgctttgaaagtaaacccccttctctccgcttccctatcggggctgcacgtagagcatctaaccgcatgttcccggaacctgggatgcgcgcgcgcaaaggagcgcccaagcgtgcaacccagagtttggacgcgccgccctttacagcccccgccccggggccgggcgagctgagggggcgcggggcgtctgtgttcccagctgatcacagaacaggccgatatcgcattgacccggggagctgaggtgaagggccgctgtggccacagccagtcggagctgcaagtgttctgggtggatcgcgcatatgcactcaaaatgctctttgtaaaggtaactccgagcccagcgggcagaggggccgcaggctccgcgtgggtgtgggaagtggcggcccctaggtttaagaacccagacgctgcggggacgattgaagcgcacctccccggctcaacaggaaagccacaacatgtccaagggacctgaggcgacttggaggctgagcaaagtgcagtttgtctacgactcctcggagaaaacccacttcaaagacgcagtcagtggtgagtggaggctggcatggctggggagggagcctgggaactcgcagaacaggcttggagagagaattcctcaaggttttggaaaccgtcccacgctttgaggtcccaggccaagtcttccctcggcttgctctttagggcggaagaggcgggagcgcccatgagtcttctgggtctcaggccttgtagatccgccaggaaccgcaggcgtggggacccaaacgtcacccgtggcctgatcctagataagaagtcccttgaaggcctgtcgttccctggtgcttcaaaacgacctcttatgatttggcctttgaaggaccacggagaagggcaaagctgcattttaattttcttccgcatcctggttttgtttcttatgcgctaaaactgcaagggggcagtgcgactttccttttcagtcaggatgtgatggccttcagtgtctttttgcgcatggcagcatggctcgcacgggatattcagtcatcgactgcagctacctgacagtggattctgcaccatgtataatttactagcgtttctggcccatccctccgacaactcagccagatcctcctcggcaaaacgagcgttcatcccccaaataacaatattcctatctgcagacaccgtcaaag

SEQ ID NO: 1888081 - DNA, 4001 bp, Homo sapiens
cattgatctggccctttcttgctgtgtagccttggagagattcttgggttttcttagcctctgtgtcctcatctattaaacagtacctattaagtagagggttgtggtggtgaggacatgagaaaatgtgtacccagcatgtagcatggggcccaacattaacacagagaaacagttaaaacaaagttagctatttttttttttggttttgtttttatggatgagaaagtactttttaaactataataggctgaggaagagtgtggttttctcacatgctttccattccttattcacagacacctagaatcagagaggacaggattggaagggccactttacaggtaatggataatgaattaatggatatctattaatggataatgaattaattcattcaacaaatatttactgagcacctattatgagccaggcactgttgtaggtgctgggatcagagcagcactgagggcccttccctcaaggagctttcattcctgtggggcagacagacaaaaacatgtgaatacatatgccaggcagagactcataagcaggtcttcacagtctcagaatatcttacctttaacaaatcctggtttctgcaaggccttaagatatgatagcagggtgagacccagtggctcatgcctgaaatctcagcaccttgggatgttgaggtgggagcatctcttgagctcaggagtttgagaccatcatgggcaacacagcaaaactttgtctcctctaaaaattaaaaaaaaaaaaaattagctgggcataatggcatgtgcctgtagtcccagctacttggggtgctgaggtgggaggatggcttgagcctgggaggtggaggctgcagcgagctgtgatcgcgccactgcattccagcctgggcaacagagtgagaccctgttttttttttttttttaaaaaaagaagatatgctagcgggagcccacatttattgaatcttcttagacacggaaagtgtcttaagcattttacacaacttgaatcatttaatcctcacatcgaccctaaaggaaagaattgtcatgaatcctgttttatagatggagaaactaaggcatggagagatggaggggagcggggtttgaacacacaccccctggttcagggcagtgccctcaatcaccctgccatcttgccgtgctagctgcataactctccttccctcaacacctcccaccttcccatcttggtctgcaccagttctttcttccctccccctttcctcccttatcccgttctcaagtatttcttccacattctgagtagcctggggtaagctctctctctctctctctctctctctctctctctctctctctctctctctctctctctgtctctctctctctcgccctcagttttcctatctgaggatggaggattggactggattatcttcaggtccttccctgaccactctaattttcagctccttataagtttgtgattcttttatttgctgatttgttttctagtctcccagcccaccctactgtgagctaccgagcagtgagctccctctttctgttcaccacatctccccagagcctggcactgtgcccggcacttagtaggccctcaataaatacttgtagatgaagaaaggaggggatgagggcgattgtactcagttttctaaagccagctcctgcactgtctccctggcccctcttcttttctcagctcttccccctccccacttccctcccgccctctcacctcccagggcccactccggccctccatccggcctgcatttttccgggtttgatatcattttttccactctcccggctgctgccggccgcctctgccaactttccacagctagagcccctccccctgaccgcaggccggagacagcttggggtgggggaagaccttccttcttttcccttccccaggctggggttggggtgtgggagtgagtgccatccatccccgttggaaggctggggtgcggggattcgcggctggaggacgctgctggctggctggcgggtgctgcggtctttctctgcaccgcgtcccccggggctggggcgtctgggatagttgggggaagggatgtccggcgtcagggacacgatggtccaaacggtttgcgtcttgttttcttctcaaagcagtgacaccccttcccttcgggctggaaactcctgacctgatccccaacacccagccctgaccccagccaggctggacgcctcaccacctccttcctcccgcacagccaaagggagacccaggaggaggctgggccctggggtgtaatcctccctggctgggtgactctggcatgctcacctcccctctctaggcttgtttctgccttcgggaaatgagtgagttggattaaactggggtccatcccggggattaatgcattgagtttcatagagctcctgccccaacctcctttaaattggatgcgaaattatgtttttaaattcgttttgccaagattctatagggttttgtatcatgtttaaagtggacaatggatatgttggtcactagagtctgacaagcctgggctggaatcccggcaacttcgcgtatagcagctgtatgatcttgggtgagccttcggtgtcctctgcctcagtttactaacgagcaaaatggggttaatcggaaacccttctcccaggtgttgggaggaataattgttgtgacagcttagtacacagctcccaacaaacgccagcaattctattgccaggatgagtactgaggtccttccagacatgtgaatctagaacgtaaaacatgggttaatgagaaagtagctggtcacggaactgtggttgtgatccactgttgagagaagggcctgagcacaaaactggtccaagtactttattgatgcgccctgacgcccaggccagcaggccagaccagtctacagtcaagtgtagatgggagggcagtaggtggagacgcctggaagagccgagatggagaggtctgggcattcagatgggacatccttctggtctggtttattgtgagggtttctgagggttggccagagcccagggacaaggaagatttttttacaaaaagacacccaccacgtaaaaaactactttgtgcccagcttggggcttcggccccatcgtctgtctgtccatcgctttcccgggatcccccaggcttggatctgggggatgctcaggccatcagggcagcaggcaagcaagacccatgatgcagactccaggtaacggcgcctttgccccgcagtggcgtccctggagcccagaatgcacctcagtgacccgccaactctcagaagggcggggggcttcagagcacggccagattgtggcaggacttggagcgggccttgagtgcccggcggcgtgcgctgcgggctgtcaggcgtgccaggaagcgacgagcgcgctgggctaggctggccggccgtcggggtgctgggggttccttggccgcactgtcccggcggcgcaagcgcagttggcgcaccacgccctcgaagagctcggccacattgtgctgcagcgtggcggatgtctcgatgaatttacagtcgaacaccacagcgcaggcgcggccctctaagggggcggggcccggcgaggaggggtggagccataacggaaggcggagaaaaaggtaggaagagatgtgtttagtctcgattggaagcaatttttcctgtgctcatgcctggtgctgctgtctggggactcagataaatcagactggtctttgagggaagacagagaggctggggtcagggaggggtcagattattgaatgccaggtaaagggtctaatttgctgtggatcggaattacctggaggagcttgtttaaatgcagattcctggacccaccctcagagtttctgattctgtaggtttgggttgaggtctggaaatctgtgctttaacaaaatctcctggggcttatgttgcagttttttttttttttttt

SEQ ID NO: 1888082 - DNA, 4001 bp, Homo sapiens
gccacccgcaggacacgcatgcagggtcaggggtcagccacccgcaggacacgcatgcagggtcacgggtcagccaccagcaggacacgcatgcagggtcacgggtcagccaccagcaggacacgcatgcagggtcacgggtcagccacccgcaggacacgcatgcagggtcacgggtcagccaccagcaggacatgcacacccatgtgtgcacatgggtaggtgtgctcgacccacacatgttgtgccatcaccccatccttgtccttggagaaagggctattggccatcgtgacggggagcctctcagctgcgactgggccctgggagccatggagtcttctggccgcctctcctggccaccaaccaggaaccccaggccccaggcccacggttgcatctgctgtgccatcctgtggacaaacggacgatccaatccagatggcactgcaggggactgaacggggctctgaaacccggccggagctgccctcaggccaccctcctcaccttgagccattcccctgctccgtcacctgtgtcaggcctgggtgccgccaggaggcctccttccagctctctgcaagctggccccgtgttcacgggcatccagcgggatccaccatggaaagacagctttctcagaggcatctcagcacgtgggcccagccagaacctcgagggcttctgtccctggagggcagggcagagcgggaggacacagggacacagagaaggtatcagctggcgagggcagggcagagcaggaggacacggggacacagagaagatggcagctggctgagggcagggcagagcaggaggacacagggacacagagaaggtggcagctgactcggcgggagcggaaggtgctgctttcttcgaggtccccctctttgcggctcacccttctccctctatggcccccttaaccccaacccccctcggctgcctctctgagtaaaggacaggccagcgccgagcaggtatgtcccctgccagggtcccccgcacacctggatcttctaggctggggagtagtggaaggatctgcggggctctcgaagccgtctgggaggaacgtcaatgaccagaggaaggaacaagggtttcgggtgggattggccaattccctgggtcatctcagaaccacgagcttgtcttcctgggttacagggtcctgagcttggccgaaaagggacaaacgaagggccgggtgtgatgaccctgcataggtttgacagccctgtgtccttccaaatcaagtgagtgggtctgggtccccggccccctccagcctggggtccaagcctccctggtctcctcgggcagtcagcctctctgctccagtgccgtcagttgtcacctacgtgggtaaaacgccaggagaggctggatccccagctcaccggcctgtggcccgggcatcctgggcttgcagagggagggccgagggtggtaactaggaggagtggctctgagccggggagggaacacggccagagggggatgaaggccacacggagcaccgcgggagccccgccgtctgcgcagggttcagcctttcagcctcgatgtgggaagtctctccatctgttcaggttttctttgggtctttttaccagccatgtttcgcagtttgcagcgtacaagtctcacacttcctttgcgaaattattcctaagtagcttattctttctgatgctatttgaccaggacgctttctgcatttcatcttggggtgttcactgtcagtgcagaaatatcctacgccccatgatcttgttaaactccttcgatcatcttatcaggttttacttcattttattttatctttgtagattccttaggcgattccacctacggcgtgaggcgtacttctacatcttttttgctaatctcggtgatttgagttccatgttcttgcctcactgccctggctggaacccgctgtgcagtgtgggaggagcgggaggggagggtccccttgacttgctcccttccgtggggagacggtcaggctttccccaggaagcgtgctgtaggtttccatagattcgagacggtcaggctttccccaggaagcgtgctgtaggtttccatagattccattgctaggttgaggaggttcactctcatttctggtttgttgaaagtttttttttaattataaatgggtgtcagattttgtcaaatggattttctatatcagttgggatgatcatgtggcttttgtcctttattttattaatatgatttattacattaattgagttctggctgttaaaccaatctttcagtcctgggaaatatcccacttgatcatggtgtacagtattatctttttaaaataaattgttggatttggccaggcacggtggctcatgcctgtaatcccagccctttgggaggccaaggtgggaggatggcttgagcccgggaggtcgaggctgcagtgagccgagatcgtgccattgcctgggtgacagagtgagaccctgtttcaaaataaataaataaatagtcgaatttggtttgctaagttaaaaaaattaagtaagtgtcccgctcagcagcattaattacattcacgatgttgtgtcaccatcaccaccagctacatccccaactccaaacagaaaccctgtctccatgaataacaactacccattcctctccacccccagcctctcttaacctagaatgtactttctgtctgtgaattaggctcttctagatatctgatgcaagtagaatcatacaacatttgtccttttgtttctggcttatgtcactcagcacaatgcttccgaggtcgctcagcagggggcttccgaggtcgctcagcacggggcttccggggtcgctcagcacggggcttccggggtcgctcagcacggggcttccggggtcgctcagcacggcacttccgaggtcgctcagcacggggcttccgaggtcactcagcatagtgcttccgaggtcgctcagcacagcgcttccaaagttatttacctggtagcgagtgtcagacttccttcatttttctggctgaatcctattcccatgggtggatggaccgcattttgtcctccattcatctgctgggggcaactgtgctgtttccacctttcagccattgtgagtaacgctggtatgggagcctaagtgtctgtttgggtgtttgtcttcattcttccggacctacccttgggagtggaattgctggatcgtaaggcagttcggtgttccactatttgaggagctgccaaatcgtctcccacggtggctgctccattttacattcccgccatcaattccaacttctccacatcctctctgaggcttgttattttatttttatttatttatttttttgagacagggtctcactctgttgcccaggctggagtgcagtggtccaatctcagctcactgcaacctccacctcccgggttcaagcgattctcctgccttagcctctcgagtagctgggattacaagcgcatgccaccacacccaactaattttttgttttttggagagcagccgtcctatcgcatgtgaggtggtgtctctgtggttttgattcacatttccctagtgaccagtgagtgctgttgagcatcttttcatgtgcttattggccattttatatcttatttggagaaacatctattcgagtcctttgcctatttttaaatggaatttttttgttgttgaagtgtagcagttctttataaatcctgggtattaaaacccttatcagatatatgatttgcaaatattttctcccactctgtggttgacgtttcactttcttttttttttttttttttcgtttttgagaaggagtctcgctctgtcacccaagctggagtgcagtggcgggatctcggctcaccgcaagctccgcctcccgggttcgcgccattcttctgcctcagcctcccgagtagctgggaccacaggcgcctgccaccacgcccggctaattt

SEQ ID NO: 1888083 - DNA, 4001 bp, Homo sapiens
aggcccacagctgctcaccatgggcctttcagggtcttgccctccctcactcccgccagcaggccacgcacatgatcctggggtccttgggcagggtgtgcactgccgcaccaggtccaacaccagccaaccgcttccctggacaggctgcctggaggactgcagaggggcaggccaggcggaggcttttgaagttggctcctccaagctgagggagggagcaggagagggaaggaaaggccacgcaatcccagccctgccccctccctctctccactccctatcacttcaattaacctggccctggagctgggcagccacctctcccaggggatccagggctactgtgggtcttggattaacttgtccgtcccagagatactgttctgtcaaggaggggtgaggcgccgcgtgggctggggcagtgcagggcccagctggtgggggaggggagccaggtgagactggggccgactctgtggccagcaagtgctgcctctcccagggatctggctgatgggcagagctggtgggaggccctcatcccctccccagctgccggacctgcagcctgacatccagggggccctgccccagcaggtcccaagacatggggcttcccgggcccccgctgctggcccggcctcactcctcctgggctgaggggtctctggctgaagaggtaagtctgaggctgttactctgctgcctgccgtaaagatacccaggagcagggtgggctcccccgatccttggctgctgtcgcttctgctgtggtctggggcactctggttagcagcctgacaggcagtggtgaagaggcacctcagaacacgagcaacctctgaggcacaactcatctttgcaggctgaaaaaatttcagttgaagacaagttaaggtagtttcccagggggaaaagtcagtgactcacaatagtcaagaacagaccacacaggtgacaggagtcccctaggattgtaacactgcatctttacgtttttgccttttccgtgtttggatgtgattaaatgctgtgacaggctgtgcaggtctgcagcccaggagccccaggctctggcacccgggcacacagcctgggggtgcaggaggccgtgcctgccagccttgtgtaaatgcactctttaatgtttgcaagacgacatcacctaacgaggtttttctcagaatgtatccgcactgttaagtggcgcacaactgtggtttggccaactcaaagcatttgagaaaaccccacacaggcaagaaagaggagacactcacacatggacaatgtaagcgctccggaactttccaagggccctgcaggaagtatcccctgaacatggcctgaaacattcttttctgtgtgacccctcaatgcccacccagcactggccatttcagctctgaggtcagagaagggcttccttcctacgcctcggtttccacatctgtacagggccaggctggctcacaaacttcctgggcctcggtttccacatctgtacagggccgggctggctcacaaacttcctgggcctcggtttccacacctgtacagggccgggctggctcacaaacttcctgggcctcggtttccacatctgtacagggccgggctgacttcacaaactccaaaaagctgcaggactctcttcatcttcagaataaatgttgagggctccctcatgcttccgtctctccatgagggatcaaaggaaactcctccacaagttccagtgaaaacactcatgaagctcctgcagctgctcctcaggacggggcgagaggaaggacttccacattccaacgatttgagctggaccccaggttgcctgcccagcagagaccaaccagcagttcctgaccccatacaggggtggcaggtcccttgcccgggattgaccatgtcctcaaggtccccagaaccacagggaagggggacccacacccacattctggtctaccaggaccgccccacgtgcaggcagggatctcccaccccagccattctcactcgtcaggagcagggcaggcagaccacaaggcctagcacaggcccccatgtgcaggtgggcagagctgtgggtcagtgactgaccaccaccacaggccctgccatcggtaccacaagacaggccgggaccctccagggctcccctctcacaaggaacatccagggacagctgctctccagcagcctcctcagcccacatgacagcgccctcctccccgcccgctggcctcaacgactgtccacccacaccctctgggccagccatgacctccagccagatgtctctagccccggcctacacaagaaccagctggctcccaactgaatgcacacacatgatcccaggcctgaggacgtcctttatccttacacagctaaggctgaagagaagccaagtctctcgggtgatcaacgttcaacctagagatgagaaccatcactgttcaacctggagatgagaaccattacaagggctttagggttaaactgcgaatgataaattagcaaagataaactcacggccgggtgcggtggctcacgcctgtaatcccagcactttgggaagctgaggcagatggatcacctgaggtcaggagtttggcagcgggcgcctgtagtcccagctactcgggaggctgagacaggagaattgcttgaacccaggaggcagaggttgcagtgagccgagatcgtgccactgcactccagcctgggcgacagagcgagactgtctcaaaaataaaaaaatgaactcacctccaaaagaaagaacgcctcttactggtgacactgtcactcagcacatgcctgaggggcccgggaggctgtgtggagaggccctgcgcagagctgggttctcctgtttgcactcagaccccagggaggccccagctgtcccctgaccaagacccttgcaggcggctgccaggctcctgcgagcacctgcgtcctgcatgcagcttggtccccactgtctccagctgtcctcacagggcttttggccagaacatctgcacccctaccaccttctccacagtcttggggaacccgggcacctccacagtgcctcctctgtgagacaccggctgtctgcaagaggcttctgtccaagcaagggcgatcacagccaccccaggacggcatgggacaggccaggacaggccagactggggcagcagaagcaggagccagagaagggccccagagaaaaccagcaggctgcctgttctgacacgagacataaaaacttttaatgaaggaggacacagctcagagcccttccacatgcggcccaaccctgccccacggagaccggccatggcaaccgctcaatcagaaggtgttcttgatgcggccggccaccagcctaaggatgtccccgatcttcttctgccagttggcgatgtccttggacacggcgcaccacagctccccatgccgaggctctgcactctcacagcgcttcctcacctcctcctgctgctcctggggggaccacagggcacgtcaggcaggggtcctcccacgctactccccggacctcgcctgcttctcgcctggcccctgcagacctggccctggcagcaccaaccccaactggcgggccagagggcacaggccctgcaccggaaggcaaggctctttcaggtgtgttcctcaaaggagccccacctcctgaggagcatggaccccaccagcctcagcccacagatgaggaactgagccaggctccccatgtctgtgcctcacacaagtgctcacgtctgccttctccaaacaaggagttagggttcacgtgggctggcaacactttccagggaggaccaggacagcctgactgcctccagcacagctcagacaacgcttggctctagcggggcgggtgggagcagaggggctgctgcccaggctgtcctagaaagccacactcaggctcaggcccaagaaaaaggccaactccattcccattcctaaagtgagcc

SEQ ID NO: 1888084 - DNA, 4001 bp, Homo sapiens
acctcctagggctaacgcctccttctatgccatattgagccttatctcttgcttcttcccgcccccctcccacattaaaaggcccccaaagcattgaggagcggcttctctttatgaagctggggagaaggcgggcgataaagattgggcgtttaaattggccatttggaagattacatctcttcagcgagggtctttctttcaaaactcgcactgaattaagggtcatggctactccgtacccggctctcaaaggcacggcacctttgaattaggttgcggagtggcctgggcgaggggacccggggccatcaaaggcccgagggaaggccgtggggcgacacccgtctaatgacaagtaattgaaggattcgacgccgcgcattaccagcggaacgggaggcattaattatttaaaaacgattagccttgccgtgtgtcctgcaggcgtcccatcatgttcagcgaagataaccagccacccgaggcgagccggggctcggagggcggcgggcgcgctccccagcaggcttcgggtgcggtggacacgggcgcacagcccaaggcaccagggaaggagaggaggggccaccaagggtccccacacaggaaggtgactacataacactgaccctgctgaacaacgaaacagatttctgcccacttgggttcgaagtctggtgactgcggcgcagatgggaaaagctttccggtcgggggtggtgggcaatttccatgtgccagttccctgtcgcatcagaccaaagacccaaagtaacccagccaggcacgggcctctcacagtgcctgctacccaggcgtttaaagaaaagaccccagagagaatgtggatctggcgtgggggcagggattgggggggggcgctggtagacacctggggaaatacaactttatgaggtttcaaggggcagcagcagaactactatttttccgaggtccacgcctttccgcaggcggcggaaagacgcggctggttctgttgggtcctacaaactcgcgtcctccggaattcccgagggcaagcccggcacgcgcgagcgtgctcctgcccgtggaaggggggaaatcggcgactgggttgcagggagaatgcgatgataaatggccctgcgtctgctttctgactttctctcctggacccagctcgtaaccccagaggctccccaacctgcctgccgccaagcacggctgtgcgcaaaaggccaccagccgcttcctgcagccagagctaaggttcactcgcctcttagaaaggcgcggcccctcccctgctgctgcttgatgacgatccccatcgtctcctcggcctgcctgtgtccgagaaagagttgagactggactcgaacccctgcgcgccaaggggagggcgtcaccatgctccggcctcagcctcttcaaactcccatgcaccacgcacatcattttctgctgacccccacactagattctggggccaagggggttccccacaccccaccctccactgttctctggaaacatgctgctctcagatcgaatccccagacccgagccgctcgaggggcctgtgtggcttcctcggggccctaccaaactcctctaactgagctcagagcctaagcggtctgagtttgcaactctacgacccctcatccttccaagtcatgcactttccgaaccccctgcaaaaaaacccaacgccttgagtctcagttggctgagcttaccaccagccaagcccgcccgggcgtccgagccctggaagggagaaggactggctgggggaggggcggtgagcggacaggagtggggtgcggacgctgaggaggggagccgggcgcggtccccgggtgggcgcgctccctacctgcggcggccggcgggccggctggcgggcgggctgcggagcgtccagctcgcggagggaggaggccgactgctccgagccgaggcatccccgcatttatttgagctcaaaccaagcgactgttgactttagcacacaaagcaaagatttcactgcccgctagtttaaaaatgaatattttaccaagatatcgatcagcgttataaaattcagttaagtacaatgggatcctggcaaaaaaaaaaaaaaaagaataataaaggaggggggaggcaatataatatctgtgcaaatttgctgaagtgtgacgtggcatggaaagtttaccctcctggaattcggatctagaatgtttttttcggttgtttacagactttgtttattcacagatcatggttgcttaaaccggcgcgcggaaagcgtggggaaaaaaggaaaaaaaggaggggggagagtctctgcaccccacaatgagtagagttggggaaagcgcgcagtggcgatttgtgagctcgttatctcggaacccgggctaggggagggatttaagcgggaggggggcgtgaaagacacaagaagcacagaaaagcctccgaaagcgcctgctccccgacatcctttttatgtattcggacagaactatatcttatcggccgggatcagtgaaggggggcgcgctaagtagtttaaaacgaccctcgcacaatgggcgtgccatacgaaacatagcaggttagggcagcgctttcagcctccattgtcccccactcggcccccggccctgcctctcggctccttcgccacgggagccttttatgtgataatgaaacacatttcaggccgggctcacgacgtgtgtgtccttgctaggaggagagacggcctgattgctggctgtggcctccggatccccccctccccaatttctcttccttgtgttcttcgggacaatgtggcatgttaagaaagggatttggtggcgggaggggggcagtggcgggtgggaggcggaggcgatgccaaacccccctcaagcgcgtgggaaggccaggcttgttggggaaggcggcggggtgggggatggggtggcagagaccccagcaaggtagcactcaaagacagtctccaggtctggggcgtagctggaacactccaggttaggatggtcaagaagcccaaagatctaatcttgaaaaaaggagcctgagcttagaaacctgaggcaaaaagtcctagcctccaggctttcggagtgtttttacccaccgcaagccactgcgcgcgggagtggctcccaagtctgcctgacccgcgacgacactgatcctgccctcgcccagccagcagatgtcctgggcaaaaccaacaccagactcccctttgcgctgtcggccttggttttcactgccgttggccgtccttttaggccagcgaggtcgtctggggggagaggcagcatggtgtataagaattcactctgggatttttcgttatacttttagagtccttgaaggctcacaaaatacctgcataacccctggaccctgcaaacctggattgccaacctcacctaacttacaagaagatttgcaagagccttgagttttggagggagatggggagcaaatttgccgacagtggcatcttcactactgtcatggtccattggccagacaccccttacctcctcctcactcccaaatataccctatttttaaaaaacagacttggattgttaccctgacttaccctttcaaaccaattccaggagaagatcttctaaatgtttccctacaccaagtgtctcgccatttctgggttagtaaggtctttctgggttagaaaggtctgccatggttgtgcacaatacctgctccagggagaagggtgggaaagggtggcaccctgtgtacagaggaggctggaagatccaggcagagtcccaattccaccactgttcacagtggtgaacaggcaaagtgctgcaccacaaatttgcaagtttgatccaggctcattgacctgaagggaggcccaagatcagaagtacagcaaaaacatgtgaaattgaggcttcccccaagagaagcaagctgtggggcccaagagaccacaacaacagggcacattcaaa

SEQ ID NO: 1888085 - DNA, 4001 bp, Homo sapiens
ggccctggcggggcgcagcagggtcaccccaaccaggataaccggaccgtcagccagatgctgagcgagcggtggtacaccctggggcccagtgagatgcagaaatacgacctggccttccaggtgaaggtggcccacttgcaacaaggaccgaaagaagtccagctcagaggccaagcccacaagccaggggctagcagcagtgtaacaagggctcgtgggagcggagcatatcagagacgggcactgccactgcccctggggcgtcctctgaactcctgtcagttgcagcccaaacactccagagctcggatgccaaggagcagcttctgtggggcagaacggctgcacacagtcagggaacctggctcagcctggcccaagccttctcccacagcggggtacacagcctggacggcagggaaatagaccgtcaggcactacgggaactgacacaggtggtgtctggcactgcatcatactctggcccaaagccttctactcagcatggagctccaggccactttgcagcccctggtgagggaggtgacccgtgggcagccctgctgccgcccacgtgagctgctcattcccagcacatggccagtgaggacatagcgagtgacgaggagcacacggtcatccatgaggaggagggggtgatgatgtcattgctgatgatggctttagcaccaccgacaccgatctcaagttcaaggagtgggtgaccgactgagagtggggacagctctggggaggagccagagggcaacaagggctttggtgggaaggtatttgcacctgtcattccttcctcctttactcctgccgccccttgctggatcctgagcccccagggtcccccgatccacctgcagcttttggcagtctatggtcacaccctgtcctcctcctacacatactcggatgcttcctcctcaaccttggcacccacctccttcttactgggcccaggagccttcaaagcccaggagtctggtcaacgcagcagagcgggccccctacggcctcaacccctggggatgggggcccagggacaccttccaaggtggcctgtttcctcccaatggatcctgccaccttctggtgcaagagacctgaaagtgtgggcgacctggagctaccaggctcctcagtcatcagggtccctcccaacactaaggctttcctaggcaggagctgggctgagccacccggggagcagagcctgaagagaaactgactgggctttcggggtcggggcagagggaaccccacggacatggatcccacactggaggaccccaccgcgcccaaatgcaagatgagaagatgttccagctgcagtccaaagcccaacacccccaagtgtgccatgtgtgatgcggacagcttcccctttgcctgtacaggtggagaagccgaggacaggctcagggaaccggagaccgagaaggagctgtcctcttcactgcacgtgccctggaccagtgccggccctgatcatgcagctcttccaggcccactgcttcttcctgtccactaggccacagccgccctccaggcccactatgcacacatcttcccctccaaggtttgttctgcccctgccctgactcccagccctgtgggggtcctgaccgcacctcacctggctcagactcttgacgctgccctggctgccccaccactgcctctgcccgagagtcacgtgaggctgagagtaggggcaggggcagcagtggtgccagttggggggcggtccagtgggaggagcctcagcctcgcgggctgctccgtgggactgatgactgcatgatcttctgggcacctcacggatcttcaactgcaggtgaaacggatgctggtggtgggtgcagggccgctgggagctgctgcatggttcccagaggctggactggggcaggtgccaactgaagctcctgggtcagcatgggcaggatgttctgcacacaaaccttggagaagaagatgtgtgcatagcgggtccactgctgctgcccctgccctgactcccagccctgcctgaccccacctcaacctgctcaggctctggcgcaaccctggctgccctgccactgcctctgccccagagttggggccttgacagcctggttggaaggggacaccccagccctgcctcaacacctgggggtctccataactaccacaggcaggtgggcaaccccaaagatcccaggactcacagtaccccctgagaacatggacagtatgtgggggtagcaatggagggcaggatggttatcttctcccaggtgaagccatttaatcctttcagtttgggacagagtaaggccttcctctttttttttttttttttttttttgagaccgagtcttgctctgtcgcccaggctggagtgcagtggtgcgatcttggctcactgcaacctcttcccgccgggttcacgccattctcctgcctcagccttccgggtagctaggattacaggtggacgctaccacgtccggctaatttttgtatttttagtacagacggggcttcatcatcttggccaggctgatttcgatctcctgacgtcgtgatctgcctgcctccccctcccaaagtgctgggattacaggcgtgagccaccacgcctggccaaggcctgctcctcttatctataccccctacccctgcagctgtgccgggggaaagctgggcagtttccctcctccgagcccctgtacataccatgaattgtgggaccttcagagcttttcacttttcggaaaatagctcctgctggggctacaagatggagtgtgaagagggccttgggccacagggaggcgcctgtggactagggggagttcatgcaccccttctttccccagaggggctggactcaggtgagtatgggggtgggggctcctgcacttcgacacaggcagcgggagggttttctccccattccctctgcactcccaacttgagctatactttttaagaaagtgattcaccctgcctttgcccccttccccagaacagaacacgttgatcatgggcgatatttttcattgtgccaaaaagttgccatgaccgtcattaaacctgtttaacaccaaataataaggaaaataaaataaaaaattcgggcatggtgcagaaactcactccaaataaattacctaccaaaatatataatggtggaaatattccaaaattcaatattttgggatttatacacaaaagataaacaaattagaggccaagaggctgccggaagggaaaaacggggcctggaatggccgacgtgaggaatgagctgggcctaaagaggccactggcaggcaggagctggacctgccgaagtggccgaaaggcaggagctttggactggggaggccacagtgaggcgagagctagctgggcgtggagagtccgctgtgaggccaaggccgaggccaggcccgtgcaggccttcgagaggcaggaggccgggcctgcaaaggccgactggagatcaagttctgcgcctgaagaggctgccaaaagtcaaaagcggggcctgggaaggccgccgagagccatgagctgggctgggccgaaagaggccactgggaggcaggaggagctgggcctggagaggctgccaaaaggcaggagcttcgcctgaggatgccacagtgagacaccatctgggtctggagggtccactgtgaggcagaggctggcctgtagagtccgacagtagacagaagttgggcaaaaggctgatttgaggaagttttgggcttcaacagtcagccacgaggcagacactaggcctggaaatagcccgacagtcatgagttgggcctaaatgggccactatgagggaggagctgtgcctgttgaggctcctccaaaaggtcatctgtacacacacagtaaaaatctgggagtaactgaagacagagttggtaagtaaaataagaaacagttataagaaattaaactatggtatccatagg

SEQ ID NO: 1888086 - DNA, 4001 bp, Homo sapiens
acagaaaatgacgaacagcccattttgggtgatggccacttctgtggaggcagggaaggaggaatgaggtccaggaggggagatcaggagccctcagagttcctcataatgttttagtgcttaagctgtgtgctgggaagatgagcatttgttatgtgattaactctattttcttgttcttagatatagtctgtcacccaggcagactcattgcaacctttcccttccaggctcaagctatcctcccacctcagcgtcctgagtagctggtactacaggtgcatgccaccatggctggctaattaaaaaaattttttttgtacagatgaggtctcactatgttgcccaggctgctctcaaactcctggactcccttctccttcagccccccaaagtgctgggattacaggcatgagccactgtggctggcctgattgactttctctctctctatatatattttttgtttgtttgtttgtttgttttgttttgtttttgagatggtctatcacccaggctggagtgcagtggcatgatcttggctcactgcaacctccgcctcctgggttcaaatgattctcctgcctcagcctcctgagtagctgggattacaggcgtgcaccatcatgcccggctaatttttgcatttttagtagagacggggtttcaccatgttggtcaggctggtctcgaactcctgaccttgtgatccacccaccttggcctcccaaagtgttgaaattacaggcgagagccaccgcacccggctgattgactatgttttgtatggttaagatcattttttataattcgtggtctagaggggcgaatagaggggagagtagagaggggtctcttaggcttgagtttacattgcagcttcctaatggtgtgactgtgggcctatggataagggacttcatgcatttgaacctcttttcatctgtaaaatgggcatgaagaactcttacctcatcatctctccttccctctctccttccatttcttccttcttccctccctctctttctcttccttccttctgataaatatttactatgtgtctacagtgtggaaggccctgcacaaggtccgagagatatgttcccttatggtacttacagtctttagagagagatatgaatcaaacatatacatgaatgcaccactgcagacagtgataagagctatgaagacaacaaacaagagcttccgtggtgaagaataaaaagatactgagacagggtggccagggaaggtatttcagaggagatgtgaaggagtttgccttggagggggtgaagagagaggggaatgtgtcggtcagagagcacagcatgagcaaaggtcctgaggtgcgaagcacacagggagctttgaatgttggtgttagcagtccagccagagagtgccaggcaagggggagagaggcatggcaggagaggttgggaagacatgtgcattcaggaacatgggcttgcagagcacgtagcacggtgcttggtgtgcgtgctcaggaaatgctggtggcctttcttcccaccccttcttgggggccatggctagggtgacaaatggacttctgagggcagaaagggggcctggaggcctgggaagcctctaaagagcacctatggtagctatgacgatgaatccaactccttacttcctccccagcatgcccccaattgtatgttcccactctttaccatgttattttgcagtgccctcccattgcaacttgagtggacgttgctcagccatgggacttgctctggccaatgggatgagagcagaggtgcatcgagcaggggcttgataagcacttccgtggttgggcttgcctgcttgtgcctcagctactgccacaagaacatgcccagcctagcctgctggtcctgggaggaggagggggcagagctgagctaccccagccaagccaacccagctgacccacagacttacaagttaattaaatgctgcttgttgtttaccacggggatttttctggctgttctgtgtgtagcactcatttctttgctccagtggggtccctggatctgggtcttttctgccttcacccaagcccaggaatactagaagagagatggttgggccaagcccaggattctgacctcggacctgctgaagcctcaatttaggcaccaggaaagcccttctccatatggggtctcagttttaccatccacttaatgaaacatctggccctgattgccaaagccttcatagggactaagagctcaggttgtccaaatatgactatgtccctcccttacttaaaacactcagtggctctccatagctttcagagagaagtcgaagctccctaggctggcattcaaggctctgcatggctttcctcctgtccacacttgcagtacagctcctaccactcactctttgcttcagccatgccttattggctccagtcttatcatgttgtgcctgttcatgcctccgagtctttgcacctgctattccctctgtttgcaaagcctgccactgcatttctctgctttgtgaattcctatgcatgggctgtggcttgtttttaactaactttcatttcctaacattcactgagctcttacactatgccaggcaccttgctaagctctgtgttctagtttagtcttcctggcaactctatgaggtaggtattattatcatctcttttaaatatgaataaacagaaaagtaaactgactgatacaagtcacagctagtaactggtgaagctaggatacaaattcaggcatcaacaacagatttgaacctaggtctctctgtttccagagcctatgtcctgtggagtcacctctccatgatgcttcttgcagaattctcatgcaagtgcatgaactatattcattcaactcacagatattttcttgagtgccaggcactgtgccaacctcttcatgagcaatgacttccttaatcttcataccagccctaggagatgatgattcttaccaatcccattttgcagatgagaacaaccgaggcccagagaggtaaagggactggtctaaggccgtgaaaccagtaagtggtgaagttgggacacatacccaggcaatcacatagatgcccagacccaaactagacctcctggccacagtgactttcaatttgccataaacttcaagatccagtttgggcaccaactccaggatgctgaatggctaattcatggctctggggagccagaagattcatggctctggcctgtccagcctccctccccacccccaaggacttcagagctgacaacccaggatgcagtatggtttggacagaagtcagatgcttcacaacactgttgggcatcccccatctccccagttttcagcccgatgcactgacccagcccccacccttccccttgggcctcaggctctgaatccaaacaaacacaaaaagccaaatgactttcactctgtcccttccaattcagtgattttggaggagaataaatactgaagccactggcatgaatagaaagtaatataaaactgtgctaactgcacagggatgttttttaaaaagaaaaaaattctcaatttaaaatctctacacaaatagactcttctaaggtcaaatgaaagataaatgcctcaggaaagcaaagaagtcatcatttaggttgaattttttctctctctctttcatttcctctctctctctttcattctgtcccctaccaatatttctttctatccctgtctttgcctctcttatctgccactcgctcttcctgtctgcatgtttgtatgtgtcaatctgtcacttttatttaagtggcagaattgcaactgcaggtgagtagtatgaccttggtcaagtcgtttcccagctctgtgcttctgttttcctatctttacataggaagtacaattactttttgcagaggggtatgaagcaaagcaggacctcataaagtaaaatgatgcttctaaccagagctgggaagtctc

SEQ ID NO: 1888087 - DNA, 4001 bp, Homo sapiens
tggttttcagaattcagcagccagtcatggttctgtaccagggccaccagtccatgatttccaatagttgaggatcttttctgtatttggaacaaaatcttctttatatgtgacaactgtttccacataaaatccttttgggcgttcagagagttcactgggtacttcacttgctgagccatccttttggtctactttatcaccattaagagaaaaaaaaaaaaagaacacctgaattattaacttagaaagcagtcattaaagtcttagaaattaactaaggtaagaattacatccactctctccaaccccaataatgaaggaaggaatgaaaaggaagggaaaagaaaagctgggtgcggtggctcacgcctgtaatcccaatctcactttgtgggggccgaggcaggtggaccacctgaggtcaggtgtttgagaccagcctcgccaacgtagtgaaaccccatctctactaaaaatacaaaaattagctgggcgtggtggcatgggcctataaccccagctactggggaggatgaggcaggaggactgcttgagttgggagatggaggttacagtgagccaagatagcgccagtgcactccagcctgggcgacagagctagactctgtctcaaaaaaaaaataaaacaattcgccgggcagcagtggcctgcgcctgcaatcccagctactcgggaggctgaggcaggagaatcacttgagcccggagacgcaggttgtggtgagccgagatcatgccactgcactcaagcctgggcgacagggtgagaccttgtcaaaaagaaaaaaaaaaagaacgaaagaaagaaaacataaatatggacattaaaatatttttactttatatataaatgtaaagtatttttaccatatattacatataaagtaaatataaaatattatatataaaaatttctttttcttttggtagagatgggggtctccccatgttgcccaggctggtcccgaacccctgggctcaagcaatctcccacctcggcctcccaaagttatgggattacaggcgtgagccactgcacccggccaaaatgtttttaaatgcttaatgctggacacatgtactttcaggccactgacagcttcatcaccaaatgtaatcttcagcatagtttttacacaacaactttactgagatataattaacatatacgattaacccacttaaaatatacaatttaatgtttttagtatattcagatttgtgcaaccagcaccacaatcaatttaaaaatactttcatccacaaaaggaatccatacctttggcagtcattccccaactccccaacccctcagcccctagcaaccacactaatcaacttaatgtctctacagatttccagcatatttttcaaagctgagagacttttctccctttgcgcttagtaactggaagattttaatacgccttggctgctaaaagtactgaaattgctcgccatatacgatgagggacagtagtactgaagcatcactctttaaaaatcaccggccagagtctctgaaagtccaccttgcactttacacagattcctccaattctgaatatggggacggccctatccagtaaatgattcagatttaggaaacaatatttacaaggtattaataattcctggagtctagttctttgcagattccattataacaaacggctgttagcacccgtttcaattagttttgcagaataaacctgggatttaaaggacagggaagttgtttccatgacccccggggaactctcatcgaaggccgtgtgttccggggcaggccccgccgaagagccctacctgacgacttcgccattgtccggctatagtaaagcagtgagcccaacacagaccaggtgccgatcccgtagaccaccgacatccgccggtaccaggccgtgaactcatttcgatacatgggtacgccagcgagtgcctcgattctcgcaggcccacggcagaggcgggacttccggtgagggcgtcgctgcggtccctgccgccggaaccattaaggagccgccagttttcagcgtccgcttccggctctgccccgatgcaccttggggcctctggcccggaaagtcgctcaggtgtccggactttcgggtgtagaactgtgggcgtgcgatactttttaccacgtgacgaggactaaatgacaacttagaggagaagcttctcacttgcaaaattgtaatgccttcgtgggctccagacggtatccgaaaaggttacttccaattcctcttccagttttcagatttgcagggataccgcttgtctctccccgcaactcttcttttcctccatttttctttccggaactctgggtgaactttaaatacttccaggccaaagctaatccctccactaggctctgggtactattttttccagcctcagtggcctttcccctcattgacaccctaagtcctcccccatcttcattattgacgtttatccttcatacaaacgtgcccatgtctcaaaaacaaaaaatctccttcgactccgaccacctccagcttttgtcttatgcatacattttttaaagcaagatgccctcaatagactgaacaacttaagagcaagtgtgatgtgcttggcacaaggtaggcccggtaaattaacgttaagtacttttcagccacactcaaacttggtttcgaaagcatttgccaccactgaccccacctgcacctttcatggcttcagaaacatcattttccctggtatccttcagggttcttttcaccttgcccaccctttaaaaactgatgttctgccctacagaaatagataaaaaacttaactctgaatggatcgctgacttaaatgtaaaagctaaaactatttaatataagcctagaaaaaaaccaggagaatatgtttgccatcttggaataagcacagaattcttagaataaaaaaggcatcccaagcggggtggctcatgcctgtaaccccagcactttgggaggtagagcagggaggattgcttgaacccaagagttccagaccagcaaggccaacatagtgagaccccatctcattttatatatatatgcataaagcgaaaatggataaatagggcttttaaaaaaaaattaaaatttttgctctttgaaggtcacagttgagaaaatgaaaagccaagccacagaataaaatattcataataacatatatctaacaaaaggacttggatccagaatatatgaggacgctttacaactcagttataaaaatacagcccaactaaaaaccaggcaataaatttgaatagaacgaaagaagatatacaaatgaccaataagcacagtagcatcattagtcatcacagaaatggacattaaaagaatacaataagagaccattacacacctactagaatggctaaaatcagattgagaatgccaagagctgtaaggatttggaataattggaactgttattgatgggaacataaaatgttacaatctctttgcaaaacttagtttttaaaaagttgaacatatgcctaccatataacccaggcattccgtttctagttatccatgagaaatgaaaacctgtgtctgcacacagccatgtacatgaatgttcatagttttattcttaataggaaaaaatagaaaccacccccaatacccatcgagtaaatggctaaacaaaacgtgggataccacttacaaataaaaaggaactactggctgggtacgggtggctcacacctgtaatcccagcactttgggaggccaagatgggtgggtcacctcaagtcaggagatcgagaccagcctggccaacatggtgaaacctcgtctccactaaaaatacaaaaattagccgggcatggtggcgggcgcctgtaatcccagctattccagaggctgagacaggagaattacttgaatccaggaggcggaggttgtggtgagccgagattacaccactgcactcca

SEQ ID NO: 1888088 - DNA, 4001 bp, Homo sapiens
aatctttcgaaactaaggaagttcatggcagtgttatttataataaccaaacaaaacaaaacaaaacaaaaaaaactggcatccagcaatagaggactactgaaggcaattatcatatatctatgtgatggaatattctgaagagattaaaatttctgttttgaagcctgctttatgacataaagaaatgtaagcaaccagcctgaccaacatggcgaaattccgtctctaccagaaatacaaaaaattagccgggcgcctataatcccagctactcagggaggctgagacgggaattgcttgaaccttggaggtggaggctgcagtgagccgagatcgcgccattgcactccagcctgagcaataagagcgaaactctgaaaaaaaaaaaagaaagaaaagaaaaatgaataaatgtaggtgatgtaatttgatgtcaactcaaggcagattctgaagagtacacgttcaaactaaatcccagtttcataaaccaagtagagttttttattttattttatttatttttatttttatttttatttttttttgagacggagtctcactctgttgcccaggctggagtgcagtggtgcgatctcagctcactgcaagctccgtctcccgggttcacgccattctcctgcctcagcctcccgagtagctgggactacaggcgcctgcttaccacacccggctaattttttgtatttttagcaagagatggggtttcaccatgttagccaggatggtctcgatctcctgacctcatgatccgtccgcctcagcctcccaaagtgctgggattacaggcgtgagccaccgcgcccggccataaaccaagtagagttcttacatgtgcattaaaaatgctggacgaagtcgaattttattttttgtctatattctaggaatagtttataaactttctattaccttttacatcagaaaataaataaacagccttaagaataaaactataataaaagtatagagcagccttgaggtatgacgtgtaactgttttaccatctgggacatttttaagcttcacaaactctcccttctttgttgggatgccccagggcagggaccctgtctcctttcggtcttggtggcgccaggaacacatcagggctcaataaataattgataacaacaaagacccccaaaggagtcccttcactttgggtggcctgctgaactcctcaaggctttctcttaagtgcatttcatttgttttgaatttttttcaacttaaatggttgaaaatcaaagccaggagagagctgttggcttgtggagagctggaaaagagaaaaataaagagtgagtacagtccctgcggggccacagcgtggggcctggacctgggcacctgcagcttctgaaagtcccttctcgggagacggaaggagaggctttcattcacatcctaaagcgagatgaaaccactttctggttccttttttgaaaacgggtgtttttgtacccagatgggctctgaggcatatgatctaagagtcaaaaaagattggatggtgcatgaaaaaacactgaaaatccttagtataagaaaggtggacttggagattagagagaacggtccctgcatcggagtcacttgctaacaggtgtgtactgagtacccacccctgccaggcactgctctgagtgccgggacagagcagggaacaaaacacccccacccctcccgcccccgcccccgcccccgccccgccccacctcacgagttactcacgagtctggaggacaagcagtagccattgaacctgcaactgcatgatgtgcgggaggtgggggctgttctaaaggacgatagaggtgaagggcaaggccgtgtcaggggtcaggaggcctctctgaggaggtgggcaagccctgggaagagcaccccaagcagaggcacagcaggtgcacaggccccggggtaggagagaccttggtgatcctgggtgaggaacagcagggaggtgggtgtggctggagccacgtgacccagggggaggtgggaggagatgaggtcacaggagagggcgtggagtgaagcagtgaggggtgacctgtggcctgtggtcactgtctccaggtgagcaggctctggtggagagccagggctctcaggggtggtcctaggggcagcagcatcagcaccccggggccctgctgggaaagccagctctgggctctgctgagacctcctgaatcagaacctcagggtgggcctggccatcggagttttaacaaggcctccaaaacattctgacactcaccagagtctgagagacacagcagagctagaatctgggctccagttttcacccaggagacaggaggattctgggtggaagggcaggagggactggggtcccccctagaaggagcgccccaggaggacgccacacaggtggacattcgctcctcctgggaatggtctctaagggttccttggacaggaaagtggctctctgagctgccttagcgttggagatgctggggtgagtgccccaggagcaggcctgcacctgtgactgaggggcggggaataaacaccccagcttcccctgtgtctgggtgactctgaggggcgtcccgtacacagatcccaggctgctcagcaggatcgagttgggaagggggtgtcaggacaggaagcagcatgactagaggtggaagaaccttggcatatgcagggcactgtgtgtaattccatcgggctgcagtgtaagcttgcagagaggaggagggagagtggagtgagatggaaagtgactgatgaaatgtatgtctccccaggaacgtcggtcacggataagcccccagtgaagggacttaggaagcctctcccccttcgtgttctttccccagagagtcttccgagatggaaatgcttgcaaggaaggaagagacactttctatcttctgccatcagaagcacagaagggtgaagccaggcacacccagagaagcatctcatgttgtgtgtggctgctgcagcgctctcttgggccctggggcaggagatgctcaaaggtcaacaggacttgggaaggcagctgtgagtaaagcccccagtcctggtcctggactcactgcaccagggaccccaaggggctaaacatgactggattgtagcaagccattttcaacatgcaaagaagcaaccaggaagaatgtctaattacagatgtgctatttctctcctctttcttcttcaactttctcattaccctcagtgacatcacagcagcttccccttgtcctgtgacaaacccagagcaaggtgctttgggtggtagtcagagtgacatgggagaccctgagttccacgtgtctaagcccatatttccctccttcctccctagttcaaggaggtaaccaggcatggcgactcctcctggcaggcacgttcacaggacagaggcaggagctacttgagagagatttagctcattggagcgaggggcggggcagagagggaaagagatggaggagaagtttattgaagaatggaaaggtgcaatgttccccaggtcctagagatgcgctgcactgcagagggtggctgtgaggtcccacacctgcaagcgggagtcactggattctgctggtggctgacctgctgaccagagatgtgagcccagtttcctcttctataaaatcaggcgtagcccagtggctttcaatcctggttatatgttagtgacatctgggaaggtttaaagattcctgatggccaagctggaccccaaatctatcagatcagatcatctgggtagaacacagaagcaccagagtcgataatgtccctcaggtgactcaaatgtgcagccaacatggagaccactgacctaagctaagtcctgtttatgagaatgttgagaccatgaaatgcttagagcaggcaaggccctaagaaatcacctgacccaacttctgccattcacaggggaggaaactggttttcagagaggccaaatc

SEQ ID NO: 1888089 - DNA, 4001 bp, Homo sapiens
gtgagcaaaatcttgaaatgtgcttgtgtaggatgtcttgccctcttgtgttgcagtcatcatcatgagaagaacatgccccagggagtctgtgggtccaagaaggatggaccagctgagctcagcctacatgggccaaccactagccactctgaaaacatgtaatcaagaaataattgtttactattgtgagccactcagatcaccactgagttttgtggtggtctgttatgcagcacattatgttataatggacaaatatagggctattaagagtagaataagtagaggaggattcttagcgtgctgtggacaatgcttgcaaaagtgcttggcttagggtagtcacatagcaagcacctagtaactatgagagaaatggagctcatcaggttgattgtatatcatataatttaaaggttagagtgaatcacattaaatattctgaatgtctggactgtctgttgatatcttcctattaactgacagtaacttttctctctctttttttttttgagacggagtctcgctctgtcgcccaggctggagtgcagtggcctgatctcagctcactgcaagctccgcctcccaggttcacgccattctcctgcctcagcctcccaagtagctgggaccacaggtgcccgccaccgtgcccagctaattttttgtattttttctttttttttagtagagacggggtttcaccgtgttagccaggatggtctcgttctcctgacctcctgatccgcccaccttggccttccaaagtgctgggattacaggcatgagccactgtgcccggccacttttctctctttttttgtatccttttcccatgacttctttactatctcttccccaatcagtatttcggtatctatctatgactatctatctatgacatccatctgtctatgactcagacctgggctgaactatatactcgccacatagattctgcaattaatattctgctgtatttgttttatgtatatgtctacctacgcttgtatacatccatcaatccatcttattttttgatgcttttcaaataagtggcagacatcagtgctcttcacccctatggtgaattttgacaaatgcatacactcattatccctgaaggtgtccttaggcccctttccagttaagtctacccccaactcccaaggtgaactctattctgatttttttcccaccatagattagttttgcctgttttagaacttcatataaatgaaattgtacatggtgtaatcttttgtgtccagcttctttcattagcaaaatattttcaagtacctgtgttgttataagggtcctcattttaaaacgaataatttgacaagatctttgcaaactgatctttactttaaaattttggacttctctgatgtgtatgtaaatacagtaaccacctttaaattaaatagcctaaatacagtaaccacttgaactaagcctctgaaacagacatctctcccatgtgtctgtcagaccttgtctttctgttttcatgctccccacatccccctaccttgtttagcattgataaacatttcaaaactgcagagggaatttatcatatttgtctcaagggcacagcgcttttgatttactgtgttcagtaagatgcagggggctaaccaacctcttaggattaactgcatttgacttaccttcaaaaggtcatcagcagtacatccttagtaggcctcacaatagtgtgtccacaatacgggttagtgggagtgattgaaaggcttggagagttgtccttctgggtttgctctggttgggcgatcagagtccatagcactgggtgggaaaacatgaaagaaaataagtgaaagtgacatgttcctccagaatagctaaaggtcagcgctcaccccattcaaccactgtattccctagacttagcatgaggcggtttctaaaaatcaaagccacacttagcgtggtaatgtggctttgtaccatgtcaacctagctaagcgggaactacgtttcccagaattccttgcctgtaggtttccggggttagcacacgccacgtgacctgatgcgggcttcgtgaggcggaagtgacgcagtgttgtcgtctcgtaggcttgaaaggtaggtgcccgacattagggactgtcgcagcccggggaattgtccccatctgctggcttaccttgtgggcgtggatcccctctaactttcctaattcccgggcggcccgcgggcctgcggcagattcagctctcaggactccactttcagtttcttccacttctggggcaggctgcttgtcctgccactctcaggccccccaccagacacggcagcaacagctgttcctaagtgttcaactcgctccttcccgcaaatgtagaagctcaaatccctatagcaaattccatattctatgtcattcttaatgcttccgtctctctggttgaatctagattggatacaatcagtgatgcacatttaccagacagaggatgtgcagcgtttactgttgatttctctcttttcctccctatcacctcagtttagttccaggatccacactcctccaccatagtcaggagattcagggaaagttggcagggttcagctttcaagttgacccttgatgaaccatggtcaatcctgttaagaggcgtgaaagccaatcccagccaatgagactggggagaaatcactgaagaacttgtggaaaacagaccctctggataaaagacacgtgtggggaaaaaggggctttttaatgttattctggatgtttcccaaaagtactgctgctgccttgcctccctgacagacactggccttaggatgacatgcggcaggaaggaaggacggatctggggtttttcaagactcactgagatgcacaaggaaccaaccctcaagtagccaactcgttcctgtttgcatgtgtcgactgaaaagaatcaaaataaacaaaatataactatttctaagaggttacaacttgcaggcaggaagcaggcctctacctgaggccataaagcatactttgaaggagaaaaggtaggtatttatgctaggtggagaggtaggatatacgtattctgtagcatacaggagaagcctatgaaaattcatggaggaaactcgttagagacacgcactgggcttacatatgaagaatatccaaaagcggatgacctgtgttcactctggggtgaagatttaacatttaaatgtattataattaggctgtaaatgcaaaaaggtgaaacatagggcacaagttcacgatctgtgcaatctccagagaccagtctgatctagcctgcagctggcagtcatctgtcaagaaggggctctttgtagcccagagtagctgtcaggttggaaccataaaaccaaaaggagggcatcggcggttaggtgaagaaaagaagtcttttggccttttttcctcttcaagtcagcttttgataagatctagtaataataaggggatgggtgtggctgcaggtgggacatgtcggttctctgtcctgtcacagctaagaactaagaactttagagtctttcagccatagagggtcctgtcatccattgaagggatcagtccattgggattttgccagttttagcattgatgctgtgtcctgggaaacccctgaatacttatcatagcagaagttcagccactgtagccctacctcaggaccgcttttatgggaaagaataattcctttaactgcttgagccatttgagttgtggctgcttttggtacttgtaataaattgaaagcatcttgaatgttctgggacagtaaaagaatgtgcctttgtttctgacagcaattataaaatcaattatatgtttatattctaaaaaatgttttgagtaatgctgacatcattggaaaagtgcatcacttagaaaatgtatctgtgtgtcaattttgtttgttcaaaatcagtttcattaatttgtgggaagatacaccttgtacatttta

SEQ ID NO: 1888090 - DNA, 4001 bp, Homo sapiens
ttctcctgcctcagcctcccaagtagctgggaccacaggtgcccgccaccgtgcccagctaattttttgtattttttctttttttttagtagagacggggtttcaccgtgttagccaggatggtctcgttctcctgacctcctgatccgcccaccttggccttccaaagtgctgggattacaggcatgagccactgtgcccggccacttttctctctttttttgtatccttttcccatgacttctttactatctcttccccaatcagtatttcggtatctatctatgactatctatctatgacatccatctgtctatgactcagacctgggctgaactatatactcgccacatagattctgcaattaatattctgctgtatttgttttatgtatatgtctacctacgcttgtatacatccatcaatccatcttattttttgatgcttttcaaataagtggcagacatcagtgctcttcacccctatggtgaattttgacaaatgcatacactcattatccctgaaggtgtccttaggcccctttccagttaagtctacccccaactcccaaggtgaactctattctgatttttttcccaccatagattagttttgcctgttttagaacttcatataaatgaaattgtacatggtgtaatcttttgtgtccagcttctttcattagcaaaatattttcaagtacctgtgttgttataagggtcctcattttaaaacgaataatttgacaagatctttgcaaactgatctttactttaaaattttggacttctctgatgtgtatgtaaatacagtaaccacctttaaattaaatagcctaaatacagtaaccacttgaactaagcctctgaaacagacatctctcccatgtgtctgtcagaccttgtctttctgttttcatgctccccacatccccctaccttgtttagcattgataaacatttcaaaactgcagagggaatttatcatatttgtctcaagggcacagcgcttttgatttactgtgttcagtaagatgcagggggctaaccaacctcttaggattaactgcatttgacttaccttcaaaaggtcatcagcagtacatccttagtaggcctcacaatagtgtgtccacaatacgggttagtgggagtgattgaaaggcttggagagttgtccttctgggtttgctctggttgggcgatcagagtccatagcactgggtgggaaaacatgaaagaaaataagtgaaagtgacatgttcctccagaatagctaaaggtcagcgctcaccccattcaaccactgtattccctagacttagcatgaggcggtttctaaaaatcaaagccacacttagcgtggtaatgtggctttgtaccatgtcaacctagctaagcgggaactacgtttcccagaattccttgcctgtaggtttccggggttagcacacgccacgtgacctgatgcgggcttcgtgaggcggaagtgacgcagtgttgtcgtctcgtaggcttgaaaggtaggtgcccgacattagggactgtcgcagcccggggaattgtccccatctgctggcttaccttgtgggcgtggatcccctctaactttcctaattcccgggcggcccgcgggcctgcggcagattcagctctcaggactccactttcagtttcttccacttctggggcaggctgcttgtcctgccactctcaggccccccaccagacacggcagcaacagctgttcctaagtgttcaactcgctccttcccgcaaatgtagaagctcaaatccctatagcaaattccatattctatgtcattcttaatgcttccgtctctctggttgaatctagattggatacaatcagtgatgcacatttaccagacagaggatgtgcagcgtttactgttgatttctctcttttcctccctatcacctcagtttagttccaggatccacactcctccaccatagtcaggagattcagggaaagttggcagggttcagctttcaagttgacccttgatgaaccatggtcaatcctgttaagaggcgtgaaagccaatcccagccaatgagactggggagaaatcactgaagaacttgtggaaaacagaccctctggataaaagacacgtgtggggaaaaaggggctttttaatgttattctggatgtttcccaaaagtactgctgctgccttgcctccctgacagacactggccttaggatgacatgcggcaggaaggaaggacggatctggggtttttcaagactcactgagatgcacaaggaaccaaccctcaagtagccaactcgttcctgtttgcatgtgtcgactgaaaagaatcaaaataaacaaaatataactatttctaagaggttacaacttgcaggcaggaagcaggcctctacctgaggccataaagcatactttgaaggagaaaaggtaggtatttatgctaggtggagaggtaggatatacgtattctgtagcatacaggagaagcctatgaaaattcatggaggaaactcgttagagacacgcactgggcttacatatgaagaatatccaaaagcggatgacctgtgttcactctggggtgaagatttaacatttaaatgtattataattaggctgtaaatgcaaaaaggtgaaacatagggcacaagttcacgatctgtgcaatctccagagaccagtctgatctagcctgcagctggcagtcatctgtcaagaaggggctctttgtagcccagagtagctgtcaggttggaaccataaaaccaaaaggagggcatcggcggttaggtgaagaaaagaagtcttttggccttttttcctcttcaagtcagcttttgataagatctagtaataataaggggatgggtgtggctgcaggtgggacatgtcggttctctgtcctgtcacagctaagaactaagaactttagagtctttcagccatagagggtcctgtcatccattgaagggatcagtccattgggattttgccagttttagcattgatgctgtgtcctgggaaacccctgaatacttatcatagcagaagttcagccactgtagccctacctcaggaccgcttttatgggaaagaataattcctttaactgcttgagccatttgagttgtggctgcttttggtacttgtaataaattgaaagcatcttgaatgttctgggacagtaaaagaatgtgcctttgtttctgacagcaattataaaatcaattatatgtttatattctaaaaaatgttttgagtaatgctgacatcattggaaaagtgcatcacttagaaaatgtatctgtgtgtcaattttgtttgttcaaaatcagtttcattaatttgtgggaagatacaccttgtacattttacctaattaaaaaaaatattgccagttgagtatacttgtgatatattcaaagataaataaactttttcaattttagatattcatatgtctttgggcctttgtttagttttgtcctaaaataggaatgcttttatatgggccagattcctgcagtgatgatatctgggaaggaagggagggcatgatctttgttctatgtgtttaaaagtctcaaatgagttactgggatgtaaaaaatatattcgcacatgagtttggtacagttcggtgatttttttttttttttttgaaagaaagaaaggtttccaaggcttgacactgtcctgtgggtgtggtcaattaattgcattattggtcccgactctttacacctaccctttgccatgtagcctggtagtggcctctcactatgacactaggatttcccatgtgatgttctttggccaataggtgcaagcaaaggtttgaagagcactggggagttgggattgtttgctcatatctctgctttcatgatgacagtgtgccttggttagcctggggagaatgagtgtcacatggtccaagcaccactattgccacagctgatgataagtcagataa

SEQ ID NO: 1888091 - DNA, 4001 bp, Homo sapiens
cctttttggggactgacatttgttgagaactccccctatgaatgctgtcttgctgcaaaacttcacctctggataaagtggctgtgctccttctggatgtctgcatcagggctgctgaggcacagctgagaatgcaccacacagctgactacgctgctgagcaaatctcattactaaatgcacatccctttcaaggatgccaggcgttagggctgcattgcaactttgatggacactggggattaatgcctgtgtgtccttgttccattaaaaagtttgaagtttgctgggtgcggtggctcacacctgtaatcccagcacttcgggaggccaaggcgggcaggttacgaggtcaggagatcgagaccatcttgaccaacacggtaaaaccctgtttctactaaaatacaaagaagtagccaggcgtggtggtgggtggctgtagtcccagctactcgggaggctgaggcagaagaatggcttgaacctgggaggaggaggttgcagttagccgagatggagccactgcactccagcctggcaacacagcaagactctgtctcaaaaaaaaaaaaaaaaaaaagaaagaaaaagtttgaaatttgattttatgagttactggtataatgataaatatattaatatcataggccaggcgtggtggctcacacctgtaatcccagcactttgggaggccgaggcgggtggatcacgaggtcaggagatcgagaccacggtgaaacctcatctctactaaaaatacagaaaaaattagccgggcgcagtggcgggctcctgtagtcccagctacccgggaggctgaggcaggagaatggcgtgaacccgggaggaggagcttgcagtgagccgagatcacgcctctgcactccagcctgggcgacagagcaagactgcgtcttaaaaaaaaaaaaaatcacatagttcaatttttttttcttctgactgaaattgacactctttggtgggcctgtaagtttcctggccctggtcactgtgcccaccctgcccatggctaaggggtcctagcagcaagcatgtatgtggctggcccctacaccctcccactctgccagagattttttccaaaaggaatctccctgcacggagggcggagctcgagatctccatgtcgcggggtggctccgaggtcaccactgcccagcatgtctctggctgctgacaggactctgtgctttcttaactccttgatggagttcctggagttggagggaagcgcttcccaccagaaacccacttgtgtcggtttttcttccattcgaaacaaatgatcaaagtgatagcgttttctatgttacgtgtctgtctctggtcacttaaaaacaaaacagagcagggtgtcccctgacagcccaggagaagaacaggaaggcagccctggggttacctgtcaaggttcagatcatgacctccgcaacggccacggctgggtgacatcgtcactccccaggggacaggcgatcccctcctcaccccacagctcagaccccaggatcggccccaatccctgtgtcctgagctcctcctacttcccctttccatcccagccagctccgaaggaggccggccctgtgagacagggaggggtccagcctgggacccggcctgagccgggagggagggcttgtcttgctccggcccctgtgatgagtcccctcttacccggcaggtggtgactccccatccgcggaggctcccccgctgaccccaagtccccaccgctctgtccttctccaaggcccggtgcaggagcaccctttgtccctgggtggcctgaccctgctgaccacgggtcacctccctgaccacgaatactctgccaactgcctcctgagtgaccgagacagctcagtctagagtctcgactacccggggtgacccaatagtcccgactccccgagacagggacccggagacgtgggctttgtcagtttaacagattctgcctccgggaaccaactgccgggagattctgattggctcagccgcgtgcccacgtgaccgaccaaaaccggccaccagggtctcccaactgcctgtcaaacgcacagccctgttgggcccccggagaggaagagccgagaaggaggccaggccgggggtcaggtggcttcctctatgggccctttaatccacctcacttttttatcttcttttttttcccagcagctttattaagttataattcacacacgatgtaattcgcccatttaaaatgtacaatgggcccggcgcggtggctcacgcctgtaatcccagcactttgggaggccgagggggcagcggggatgggggtggcgggtcacctgaggtcatgagttcaagaccagccttgccaacatggcaaaaccctgtctctactaaagatacaaaaaatatccaggcatagttgtgtgtgcttgtaatcccaggtactcgggaggctgaggcaggagaatcgcttgaacctgggagatagaagttgctgtgacctgaaatcgcaccacttcactccagcctgggtgacagagtgagaccctgtctctaaaataaaatgaaataaaatagaatatacactggttcttagtatagtcacagaattgtgcaatcatcggcaccatctaatttgagaacattttctatatatatgtagagaaaggggtcttgctatgttgtccaggctggtcttgaactcttggggtgaaaccatcctccttcttcagcctgtgcaatacctatgcttgcacgggtgcaagcatcagcattacaggcatgagatgcctcacctggcccagaacttagttttttactgaaaaatattcccttgtatgcatatatgatatttatccagtcatcagctgatggacttttgaactgtttccacttctgtttattatgaataaagctgctatgagcatttgtgtagaagtttgtgtagatttatgttttcatttctgcttatataagtaggagtataatttctgggtcaaagtataactgtgtagtttttgagaggaattgccaacctgtttcccctcttctttttttttttttttcttttttttttttttcagagatgtggtctcactctgtcacccaggctggagtgcaatggcacaaacaccactcactgcagcatcaacctcctgggctcaagtgaccctcctgtctcagctccttaagtagctgagactacaggaacatgccaccatgcctgcataatgtttttttgtttgtttctttgtttgtttgtttgtttgtttgtagagacagggtttcatcatgttgcccaggctgctctcgaactcctgacctcaggcaatccacccatcttggcctcccaattgctgggattacaggcatgagacacagcacctggccgccaatctgttttctaaagtggctgcaccatttcacattcccaccagcagtgatgagggttttttcctccatccttgctaacacttgttcttgtctgtagattttatcatagccatcctaaggggtagaaggtggcatctcattgtgcgtttgatttgcctttccctaatgactaatggtgttgagcatcatatcatgtgattattggcaatttgtgtattatctttggagaaatgtccatgcacatttttcactcatttttcacttaggttattttccttttgttgagttgtaagagttccctgtgtattctaatacaagtccctcatgagataaacaagttgccaggtttttctcccatcctatggcttgtctttttactttctgggtggtgttatttgaagtcaatttttttaaattttggtgaagtccaattttgtttttgccacttgtacttttttcttttttttgagacagggtctcactctgtcacccaggctggagtgcagtggtgcaatcatggcttactgcagccttgacctcctcagcttaagtgatcctccctcctcagcctctggagtagctggagtagctgggactga

SEQ ID NO: 1888092 - DNA, 4001 bp, Homo sapiens
tgcataagacttagaaagttccaaatggctcttcttgcttatccagcgcttttggctgcctgtgacacactgtccctgaagcaccaaaatttcataagagctgaggataaaacccaaagagggccactctccaagtcacccaacatcccagacttcacacttcacagggtgaaaagaatgtagtcttctaaacatgatgcaaaggtgttagcaaactcagaaggtctaagtcacagcaagattttcttttattccacttccctgccaaggatttcagtggaacaaaataaaccagacctccaaacagcacgactaagtgtgaaagattcagttatctttaggtttcttcaagcagtatttggcaagccgctgtttttggatcacgtattttccacaataagtcaatagatattccattcaaaaaaagaagcaaaatgagtttgaatgttttgtcaaattatgcttgagcatagctgtatacttaccctggcttggcaattaaaatatttattagcatattaaattcacaaacaactataaataaagaaacctggtttacttaaaagcagtgttgtccattggaaaacatggcatcatgctatggattgagtgccctgtgtaatccgtagagagctcactctggatgacttaagctatatttgagcactctgattttccgtatcttgatccagatgtttgacatctcaagaggcatggaggcctggtgtggtggttcaggcctgtcatcccagcaatgtgggaggctgaggcaggagaatggcttgagcccagcagttttagaccagcctaggcaacaacctgagatcccaactctacaaaaaataaaaaaaatcagccaggcgtggtgcatgtgcctgtggtcccagctacacaggaggctgaggtgggaggatcgtttgattctaggaggctgaggctgcaataagccatgtttgcaccactgcactccagcctgggtaacagagggagaccctatctttaaaaaaaattataatgaaaaataaaaaaataatttaaaaaagggcatggtgtagcctgtgctactgaagggtcctttatctctgtcagccattcctaaagtccactagagaataacaaaatattctttttccaccaattggtatttatttctgtgataactgaagaattccgccacacaagcatcacccgggtcagctgccacagacagtgaccatatttgtgaggcttacatggtgaccaggagcttaaattgacctcagacctcaagaatctcctgataatctgaccacgattaaaacgtggcccacaatcctttcagcacgtgaaatgactggccaggctttccaagaatcccaaagacttcagcccaaacaagaagctgacctcttagaccagcagcagatcatcctaccgcggcccttttccttatttgttaaggccccgcttcttgtcattatatcgtcagcacgattattcggtgtgttttctggttgtgtggtttatgcactatttatttcctgattcttatctttttctccaagaatagcagcacagacatcaagtcaatttcagcatggatttattctgcctggaaggtgggtcccagtcacactagtacagaggtgacaaaatcatgtgtgtccagcaactaagtccgcaacgcagtcccatttagtcctcagggagctcatatggcagaaggacttgtttcccaggagagggccggggcctggagcaggctgatggattgctcctccagcagctgcagaactgggcctaggaccggggctcactctaccactcatctgccccgtctccattagcacctagcctcagaacagcatttatgaagcacttaccacacatacccaggaaaggctcgtgttctgcagtggttaccttacaattcagaatgaactttgaacaaatccctgaagacaacgaggctggccgtggatgtgcagctgccttgcgccttagtgtgtcatctgtaaaatgaggtaatagcaacgtatgtctcatgggttactactgtcagagtcaaatgaggtaattgtaggtaacgccctttgcacagtgtcaggcacaccatgagagctggaaaagcgttggcttttaacattcctcttattcttcctttctgttttctgaatttctgggtttcatatcgaagtgtgaagagggatgagtttcaaaggaggtagagagtcccttaagctaaaggttttcctttggagggctgggggccaagaacacgagaaccttctctatctgcagggcctggtcttgcttccacattgtggaaccaagggccagcagagaaagatagagactaaccccagccccaggccccagaggtgggggctccaggatcacaaagaccccagcttggctccgcctctctctttctcaatgcatgagcagcagcactgaggggactggggcttcctggaattttaaaaagggtttttctaacaattcctggaactgtgaagtcagtggggaaggtcatgggtggagtgaggtcatgggcctagctccagaagtgtgccgacagataaggcgccttggtctggggctctccagcctctaacgcccagatggcttccctctggggctgcaaagtttacaggagagaccagatgatggcactgacaatggagggtgggtctcctctacacttcccaccccaatagctgcctttgccctagaggggcccagacacattcgttggcagtaaaagcttcaccctccagagcagaaggggaggcccacaggcttctccctgaacttcatcatcccagtggatgcagggtcggggtatttagggctcttttctaaggagctgcattaggatctcggcacatttttttctttgttaattttgtttatctatcaattcaacttatttgggctaaggccagaaaaagattagctgggatttagggagcatccgtatcagtttattgtgactgtattatgtaggcgtcattgatacgatgcaaactcactttaaatgccaacaggcatcagcaggtggagatagtaaggttagcgcccttcactagaaggcacagacactggttagggagggaggaaggcagagccagcagccagctcctgtggtgccggttatcaaccggttatcagatgggtgctgtgagcaactgatctccctggctatgagtctgttctggaaaactgcggcctaaccaaggctgtcccgggctcttccagctgctcagagggagggtcctaagatcttacagacatagctaggtcatgcttcccatgtcaatcagggcaaacagaacacactaacagtgaacaagtccaagaggggattaagaaaacaattctatttacaacagcatcaaaaagaataaacatttggaaataaaattcaccagcaaggagaaagacttggacaccaaaacattaaaaaaataccggccgggcgcggtggctcacgcctgtaatcccagcactttgggaggccgaggtgggcagatcacaaggtcaggagatcgagaccacggtgaagccccgtctctactaaaaatccaaaaaaattagctgggcgcggtggcgggcgcctgtagtcccagctactcgggaggctgaggccagagaatggcgtgaacccgggaggcggagcttgcagtgagccgagatcacatcactgcactccagcctgggcgacagagtgagactctgtctcaaaaaaaaaaaagaccaatgaaataaattaaagaagaaataaagaaattaaaagatttcctttgttcatgaattggaagacttaatattgataatgtgtcaaaactaacaagagtgatctacagatgcaatgcaatctctatcaaaatcccaaagggatttgctgcagaaatagcaggattcatcctaaaattcatatggaattttaaggggccctggagagccaaacaatcttgagaaaaaaagaacaaagttggaggactcaaacctcctgattt

SEQ ID NO: 1888093 - DNA, 4001 bp, Homo sapiens
gtctgaaaatgtccaagtatgaacacactagtaatattaccttttgcaatttcttccctcctacctcctctaaactattgaacaagtatagacattactatactgttcacaaaggtggcttcacaattcaatttccaaaagcatttcctatgaattttagcaaaaagatatttacaaagtggtattttactacctatacatttaacatacatcgggcacttctaaacatctagatagactagatgtttcaagtaaggagttaatttgtctactatgtatacagcagtcttgaataaactgcaaacatgtaacaacagttataatttgaaagagtcttccaaatgtgaacattctggcctagaacccttcccatctccatcaacccagaagacatcaaattttcagaagacaatctttcctaggacttgtaaaacaaaatgtacaaaatatattagtttactaactctacttttgtcatacactggcaacctctttaacatccagaaagactagatgttgtcaattaggactcgtctgtcctttatgtacactatatacacagataagtaaaacaaaatgcacagacataatgattcatcttgcctcgctgtaaacaggatggcatagagctctctgcacctccccctcctctctcctcccctgaaccactgcacaaacacaatgagtattactcaacaggtgatttggccattcccccccaaaaatatttcctatgaattgtaacaaaaaggtatttacaaaatgtgattttgctacctctaattttaacatatcaggcacttcagaacatctaaaaagaagagacatttcaaaaaagcttagcattgtcaactatatacacagtagtgaggaataaaatgcacacaaaacaatggatagaatatgaaaatgtcttctaaatatgaccagtctagcatagaaccttcttctcttccttctcaggtcttccagctccatgtcatctaacccacttaacaaacgtggacgtatcgcttccagaggccgtcttaacaactccatttccaaaagtcatctccagaagacatgtattttctatgatttcttttaaacaaatgagaatttacaagatgtgtaactttctaactctattttatcatacgtcggcaacctctttccatctagaagggctagatgtgacaaatgttttctattaaaaggttggggtggagttgagagcagctttttcatattatatacacaggccttccataaacggccagtaaatcttcccagagggtggtgggcatttccaacgggccaaacgtggcctgtcattctaccatttctctcttccgacagcaaagtctggtagaatgaagaccaaccgcccgatggccgctaaccgttccacccgtcgtcgttcgggacttcgctcaccttccaggccccttaaggcctttgtccgttgtcgtcaggactaggtaggtctcgcccaatggcgacagagtggtcacccgggaaccggatctgcgcggctccgtggcctaaagaggcggccgagcctgcttgcgtccctaggccgccttcccgggccgtccacgccttaatggcctccgccgcgcggcgttcgagctgccgccatacttcccggcccaccacgcccagcgccgcccaaaggcgctgcgtcccggcggctctgcgggggtttcgtcgaggcttgggtcgggagacccgggtgccggcggggtccgggctgggagacgccacggccgccattagtcaccgaggtggggtgggaaagagaggttcgctgcggcttcaaggtctgggcacagccagtgggcgggcacagccagtgggcagccacagcagaggcctccgttatctgcagggcagagggctcggcctgtcccggggccccccagttcacccgccggcccggggccggagggcctggagggccctggaggagcgggctgcgttctgcgtctctccgcgatctctgccggaccggaactgacttggcagttctctgcgctggcaagagaggagcggtaccggaagtgcccttgcgctgggggcccgcgagccgtggttccgggtctgcaatgttccggcgtgggggtggggaatggggaatggggtgtggtcacgtggggttagggccccctccaccccgcttgctcttcgcaacggaaattgctactggcctcagaattccctgagcaaacgttgcttctctatctccttactcctccggtgctggataagaagactccaatatttcatttattgactcatttaccacctgtttaccgagcacctatgtgcctctaagcacgggggagtgcagcagtaaagaaaaaaacacaggaaaatttctgctctcctaaaatttacattctagtaagggaaacaacaataaacaagatccttaaaatgcataaaagggtagatagcgaaagtgctttggaaacataaaaaggaaagaggaatatgaagtgcaggtgcggaatgctttatagtacggccaggtgactctggagcagagacccgaaggaggcgaggggatgagccatgcttggagatgtctgtaggggaacagcttatgcacaggccacaaagccgaagcatgtgggccaggcctgttccaggaacagcaaagaggctggggaagagaggagagaaatgggaccatgggagggagttgaactgcagtgcgggagagctgaagtggaggcaggggcagaagcagggagacctgataactgactgttgcaatcaagcaggtgagctatgatagggacttatgccagggcgacgacagcaaagggggcaaaaagtggttgaattcaggggttgacataagctcaagtctataagatttgctgacggaccagatgtgaagtgggagagcgagaactgaaagatgactccacactttttggcctgagcaaatgaaaaggcagccgccttaagtgagatggaagaaaccatgggaggagcaagctttggggagaacaccaggagctgagttttaggcatgttaagtttgagatgtctgtttgacattcaagtggaaatgtcaagcagacagatggatttatgagtctggcattcagggaaaggtttgaactggagatgaatctttgggagtcgtcagcatatagatgtctttaaaaccttgaggctgcatgagagaaccaagagagggacaaggtctgaggtctgatccctgggtaacgtttacaggtcagggaatgagaaggaaccagcaaaggagactgagaagcgaccagggtggtaggagaacaaccaggagagtgtggtgtcctggaagtaaatgaggaaagtgtttcaaggggaatttatcaacagtgtcaaatgctgctgatgtgtcaattaagataaggttggaaatgacacttccagcttttagaattaatgctgtgatgaacttcctcgtgaattttcacattttgtgtagacttctgaattcctttgggtttttttgttttttgttttagatggagtcttgcgctgtcacctagtctagagtgcagtggcgcgatcttggctcactacaacctccacctcccaggttgaagtgattctcctacctcagcctcacgagtagctgggattataggcgcccgccaccgcgcccagctaatttttgtatttttgagtagagacgggggtttcaccatgttggccaggctggtctcgaacttctgacctcgtgatccacctgccttggcctcccaaagtgctgggattacaggcgtgagccaccgcccccagcctctgagttcctttgtttgtatttgtatttttattttttttttttgaggcagagtcttgctctgttgcccaggctgtagtgaaatggtgcgatcttgactcactgcaacctccacctcctgggttcaagtgattctcctgcctcagcctcccaagtagctgggattacaggcactcgccaccaggccaggctaattttttgtatttttagtaga

SEQ ID NO: 1888094 - DNA, 4001 bp, Homo sapiens
atggaggtgcagagaagataatgaaaatcatggtggtagatggaggtggaaggggtagttggtaaaacagagtaggcaccccagaaattatactaaatcattttttaaattatttttagtaattaatgcattcctccccctatatggccagagttcttagagttgggagaaatctttgaaattatttggatcattcctgcctcccaagactggcagagaggcactgaggctctccttcatcatctttagggataaagagctcatgcatgaatggggctgggggtccctggcaaattccgaccactggggaatctcttatcaaaatttacaaagaggaagcaggaagctccttgtttccagtgtatatcactcttaactaaagctcagagaaattaagatattctctatggcactactcaaaaccatgcaccatgatgagttggcaggatcagaagaaagaccttttgcggatgcctacctagaaggttgcagtggatactggaatttgggtttagaaagaaaaggacaaggggatgctacaaataatgtcaaattgaggctttcagtttgtgtgggtcaatattagcttgttgggaaacaagtgccaggtagtctgtgacattcaaggccctgatatcctaagagtaaggaagaaatagtgtttaacaatattcatcagagcagtggagtataagaaaagtccacatatgttctgtgagtcagcatgctgggactgaatttctaacctcctggttcttaatttcctcatctgtataatgagagacttgttgaagatcttgctaatattctacagtgggttttaatttttttacatacttggtgaaaaaaaaaacaaaacctcattttttcccctcaatctgatactagctggtctaagtctccatccttcaggttagaggagcactttccctcagtcatgttttctacgaatctctaggtgtcttgcagtctagaacattcaagtaaggattcctggtcctctgaacactttggtcccttttaaaggtccatggcgccggctaccttgaagaggcaacttggatgttctccagacaaacttggacatgggaatgttcagaaaaatgggagtttgcgctctgggggtcctggttctctggttaacccatctgaggtccaactaccctctggagaacagcaaggagacagatttgttctctgtgattcttagagatgggtcccagtcttgggaagcaatggaagcctctttcctttcccattagggccatttacacctttcccaacttttggtttctttctccgggccatacactgaatccattgtcatcatatgcttaatttttctatcacataagccctcagtgaaggatgtcttctgggtgtctaaaaacattctgtttttaaccatatgtcagtttatctttggttgtgtgctgaacatggtatttgtaaaatacttgttgaaataatttgagggcaaggataatgttaccttcctctgaggaggatttgatttgtctttgcaaggcacctcagggagcttgcaattcaagatcaggttaattcaagcacaggactttttaccaagcaacttagaaatatttaaataattgaacaattgatacagctgtacaggtgcctcccaaatgaatatcagccctaaatgcccccaatacttaggttaagttcttgttaatatggctatataacatatcactcccaaatttaggatttgaaacaataattatttctcacggtttcagtgggttagctcagaagcagctcagctgggtggttcaaactcagggtctctcatgatgttgcagtcagatgtcagtaggaactggaggctccaattccaaggtggcccacttacaaggctggcaaagtggtgctggtgattggcaggaacccttaattcttctccatgtgaatctgtagatggagctgctcgagagtccttggagagcggtggctggcttccgcagagagagagatctaagaggtggaagatacaatgccttttgtgacctagcctcggaattcacaccccatcacttcctccacattctattggtcacccagagccagccctgattcaatgcgcaagggaactaagaaggacatgaatacgaggaggcaggaaccatcacaggctgtcttgcagactggttaccacacacagaaattgggacttgaatccaggcctctctgatgtcaaagtccttgtacttcactgtgctgccctccccaagcagcctcttgaatctgtggatccctctaagtgtaatgtcaccttcagcctgcaacagtacagaatggataaagtagtgatattaaacatgctgtaagagaagaagagaagcctaggctccttgagcatgattataaaatggggaccagtgaggagaggatagcctcaagaagaagaattgagaggggcttggttaactatccctaactggacattctgctttttgctgttcctggcatcagctatcagaaagtctctgtgggtgagtttctgagcactcttttatgccattaactacactcttgcgaagcttctgtttgaagggtttggattttcttaggcagtgccaggttttcagaatagaaattgactggtttctcccccagaaagtctatagcctaccgtgtttaaccccaacctctagtaatagctcaatccacgctgatcccccagggtttgcagaacagagtctcggttgcaaacactgcaatcagcagcttgctgtttttctctttttcttccactttattttatattgatatttaatgaatgtttctttggtggtattgctatgttcattatttaaactctgaaaattgaagccatagaaaataattgttgattcaccacagggagccatataaatattgttctaaattctaatgaccatgaccattgggattattttttgtgaagcataatttccattattttgaaagccctcaagtcagtatcttagaagggcagctgttttcttggctattttcaataggtttttcttctttcttcatttttccttccctccttaccacattagacaccctccttttatttcttcccttgccattgtattgttttttgtttgtttgtttttgtttgtttttgagacagattctcactctatcacccaggctggagtgcagtggtgagatctcagctcactgcaacctccgtctcccgagttcaagcgattcttctgcctcagcatcccgagtagctgggactacaggcgcacgccaccatgtccggctaatttttgtatttttagtagagactgagtttcaccatactctccaggctggtctcaaactcctgacctcgtcatctgcacgctttggcctcccaaagtgctgggattacaggtgtaagccaccacgcccagtctgtattgttatttttattgctattgttaatataaacgaggcctcaggacttagagcttcacaactaaataatacctgtgtacatcattttgtattttcaagttgtttttacaaatatcatcttatctgatgcacattataactgaatgagataaatgggacaaacgtcatccctatttacagataaggacaaaatcccaaagatttgcagagctacagggctggttagagcaggtccctcctccaagagcagatctccctcccttagtattatctcacccctccgggcctgggaaacctaaagatactttgtgaacgcatgtctgtatctacagaaagctctgctagttaaagaaactaccctagaccaagctgcgctctaaggggctggtgagctctgttatttttaaaattactttaaatattttttctttttaattaaaataatgagtcaaacatagggaggattacagaaaataatttggaaccaatcagatttatctgaggtgaccttttgccacagatgcttgaagtccatccatctctcttatgaaatgaaatgttacagaaacagctcattctct

SEQ ID NO: 1888095 - DNA, 4001 bp, Homo sapiens
ggttttcaccaccatgacaggacaatgatgatggatggaagctgtggctgggcgtgggaaggctgagtgtgcaaatgtgggtggagttctggggccccgcccccgccagtcttccacttggtccctgtgaggacccacatgagggaagtgttgcttctggcctcagaacccaaggcagagcaggctggagtcccaccccatggatcacgagcccacgctgtgaccctgagtcctggacatgcgcagagggagggtgtgcacgagcccgggagctcctgtctctgtcttaagagtggagcatgtcttaagagctggcatgaggatcagagggtcccttcagtgcggccttctagaagaactacagcaaccaggccctcgcaggggggagatgcacctgctggggctaaggagcgagtgaagccagcccctgagacacatgctcccaaccccatcctcacctcccaagagagggggagcctcctgttaagcatccaagtcccaagtcaccggccggcatcggctgcagctctctgtgtgtggagacatctcattctggtgtcttctttacacaggtcagcgctcacaggctcggctgtgtctcaagacccaattccttcgagtcactgagatgcccaaggacaagggcaacagagagtgtgaaaagctggagtagacaggacagaaaacagggtgcagcgtcccccaggttggcagatagcccagccccagggaccccacagccatggcaacctgtgtgaatgagccccaggagcagggcagtacacgatctgcgcgactgtgcggggcagccctgggtctctgcctcaggggagagattgtgtcctcgccttttgtggtttctagaggttcctgccctccttggctgcacggcatctcccagcctctctctcccttccgtcgtcccctctcctcctctgaccctgaccctcccagtccctcttagaggggctgtgattaaactgtgcccaccctgaccatccagaataatctcccatctcaaggtccttaacagcatgtggaactgcactagccgccccaaggcccccaaaaggcaaccctggattgggccccccaagttgcctgggattcatggccaccacccggctcgacggctccagaccgaaatgcacccagttatagaaacagacagttgcctcttgaatgtgcacatgtgtgaggagagtgtcacacccgtcgaattaaggtggacccgccatgagtgggggcaatgctggccaatgcccacctgcccagcacccacagctctcggcctggggctccctctgtctctggagcccgcactaaagtgtgcgtctccatccacgactggcagggcttggggcatagacatcccgctgccttgcctggaggcgccccaggcctccactcccacactgtctcagggctccccggggctcggctctccttgctcacagtggtccgggctggggttccttcttggttgcatttccagctgtgttctttccttcactttctcactctcccttgcctcagggtctgcatctgggggtccactggggaggactcagcctctcccgcgtcctccatcccacacacctgtccctgggcagccacggggaacaggagcacaggggacagcaggcagagggcagcgcccgggcgaaggggactttcgcccttgcttcatgcagccctggcacccgcagcagggtaagacgagatcccagaggaggagtcttggccgcagaactgcagggccaaggcaccagccgctcgggggcctggagagctcaggtcacaaacttgaagtcagctgcccaggaagcagcctcagctgggggtcacaggccaactgggcagtgcccttggccacacctgtggaaggaggacagaggagggcagggcggaggagggaggtgctgggctgcaatgtcacctctacagacctcggctgatcccaagggggtccacagtggatatggtccttcaggggtgcccttgaaggcaggaaggggacaggactttatactgttcctcccaccccttcgagcagtcaccaactgcagcccagatgaggtcaacaggtacagaaaggagggggtgggacaggaaggaggggcgggacaggaaggagggggcgggacaggaaggaggggcaggacaggaaggagagggtgggacaggaaggaggggcgggacaggaaggagggggcgggacaggaggaggagatgggaacagggaggtggaacgggaaggaggaaatgggacaggaaggaagagatgggagcaggaaggagataggactggaaggaggagatgggactggaaggaggaaatgggacaggaaggaggagatgaggcaggaaggaggagatgaggcaggaaggagatgaggcaggaaggaggagatgaggcaggaaggaggagatgaggcagaaaggaggagatgggacggaaaggaggggataggacagaaacgagggatcagggtcctattctaatctcctgggggcatgattgcagggggtgacatgattacttccagccagccctacatgagccacctcgtccatggagtcagccccgccagggcagcagagccctgggttcgcacagggagccagggtggcgtggggcctgcattgcagactccatttgtccacatcaatcacttctctacggcccaaatcacccttagttgcccagttcctgctccgcggcagtctggctcctgctggcgccccagccatctgtctgcattagagaatgatgcttgccagggcctcagggaggtggcacggatgggcaacactgtgctcccggaccaggtgacagacaccacctcatgccccatggcatggacctccacctgtctgatggctttgccccagcctatctgatggcatggtccctggccagtctatctaatggcgtggtccccagcatgtctgatggcgtggtccccagcctgcctgatggcgtggtccccagcctgtctgatggcatggtccccggcctgtctgatggcgtggtccccagtctgtctgatggcgtggtccccggcctgtctgatggcgtggtccccggcctgtctgatggcatggtccccggtctgtctgatggtgtggtccccagcctgtctgatggtgtggtccccggcctgtctgatggcttggtccctggtctatttgatggtgtggtccccagcctgtctgaaggtgtggtccccagcctgtctgatggcgtggtccccggcctgtctgatggcttggtccctggtctatttgatggtgtggtccccagcctatctgaaggtgtggtccccgacctatctatctgatggtttggtccccagcctgtctgatggcgtcgtccccggcttgtctgatggcatggtccccggcttgtctgatggcatggtccccagcctgtctgatggcatggtcctcagcctatctgatggtgtggttggtgtggtccccagcctatctatctgatggtgtggttccctggcctattcgatggtgtggtccccagcctgtctgatggggtggtcctctgttggctggtgtgatcctgcctcttgtctcacatcgtgaaccctggcctgcaggaggtgacccaaggctgatgactccttctccggggcccttgcaccacacagcctggccctgattacagcccctgggctcctgtacctgtcctcgcagcccccactctgccactttgcatttgtctgtttcactcaacacacatttaatgagcacctactgtgtgtaccaagcccagtggggaacagcacatcaatgaggctggtgcgggaggccttgggtaccctccgtctggctccccgccccagcgcatgaggctgcctctctgggtctcggacgcccacaccgcagtgtctgggagaaggcctggaagcctgcatttgggcagtggctctggggcccggccttgctggcttccggtggccccaggcaatgactcctccctg

SEQ ID NO: 1888096 - DNA, 4001 bp, Homo sapiens
tgtagcacaggagcaatagtctatatcatacagcttaggtgtatagcaggctataccatctaggtttgtgtaagtacacaccattattttcaaacaatgatgaaattgcctaaggaggcatttctcagaatgtattctcattgttaagccgcacatgactgtattaggtttactagtatttcatttctgtttataacttagatagtaagaaacaatttgtgtagtcatttttacagtgttacactaccataccaaacaagggctgccagtatataggatattctttccttctttctctttcccgctctctttctctctttctttctttctctctttctccttctctctgcttcatctcttgaccatttcataatagtataagtactttaacaaaaatggggccataagaaaaccattgttttaaattctactttatttgtttcacatataatacattactttcacattaacaaatataaataaacatcattttacattcagtaaatgcagactattccactgattggactgtgccaaaacccattcaactattctcccattaataaacatttaaattattccttttgtttactagcatgggcagaacagcaaagagctttctagaagcttaattgctgaatcaaacagtatatgtatgtatttttaaatttgatacatactgttgaacatattactaaactgaatttccaaaagttaccccaatttacacttccaggagtgaagaagaacccaacactcagaatccatatcaacagtagttatttttagtctttttaatcattgataatctgataagtaattttttgcattttttaattgaattgtttaactgaattaaatttgtgtggtgtcatgatatatatgttggtttttatccacagttcctggctcctaacttctacagtactttctatactcttgaggcactttaggcctcaggaaacagaatctctcattctggccttctcctgactttctttcacctgcccaaggcaggactctaatctgattgtgagtcaaaagaccctcatttcagagagtcctgcccatagtctagagaagggaatgctgcatggagagacctagaggaatctgaacagacaggtctttctgggtttagatcatactgtttttgtccaatcacattttgacacagttgctcatgcttccatcatggacaactgatgaagcctccataaaaggcccaaaggacaggatttgaggagcttctggatagctgaagatgtggagcttcctggagggtgtgtaccaatgcatctctttatctgtatcctttgcagtatccttaataataaactggtaaatgtaagttctgtgggccattccagcaaattaattgaatccaaagaagggatagtgggaaatccaacttgaagctggtcggtcagaagttttggaggcccagacttgagactggggggaaagaggggatggtcttgtgggactgaacccttaacctgtaggatctgatgctatctctgggtagatagtgtcagaactgaattgaaggacattcatgtggtatccactgcttggtgtgtgggaaaaaaaaaaaccccatacctttggtcacagaggtcttctgtgttgatgattattgtgatgtgaaagcagaggacaaatttagtttaggagagtttttccacaacacaatgtgtattggagcaaaattaagagaccgtagcaaatttctgttttccattgagaagcataaaattttaggtcatatggtttaaagttattcatattcaaatagactgttctgcagttcttcaaagacagcttttatagaatctgatgttatctcagcctttacagactagaaaataggggctaccagaaacagaatacaagttttagattccatgaattgttctttttactgacctgtttgccatagaggtctaggcattcatagtaatccacttggatgttgttgtacgctaaaaatgcttccaacattggaatccctagaaaacaaagcagggattgacacatactgattttgacattgactttctatcaagagtaaaaacgtaacactaaaagtgggcagaggtaaggaaaaaacccaagctaaactaaaagtgagcaataaatcaaatttacttaaatatcagagttaattatcaactttattacaacaaaaacttcaaagtttagcaataattttatatttattctgtgataaaatgatgcccttgctatttatgaggcttgggtagcatagcagatttttagtagttgagaaaattttaacactgggagtgttcaaatttccaagttttcttgaatcatcaaaagttctgataagatgagacctctcattcctacatgacaaatataggcaggagctgaaaagtaactgcttcctttactaaagggcaaatttaataatgtctaacttaccttctttattcaattatattgcctgcctaccctttgcttaagaaaataaatcaatctcgagcttccttacaaatttatattactaggagaaggaaaagaaaactcattatggagcctgattagcatatcaattatacttcaaagggacagcaaataagctttatcattctctgtagacattttatttcaggaaattattttttttcttcaacattgttctgctaagttctttccaactacctgaccaaagagatgacctaatgctgacataccctgagttaatgtgctgtttaggggttacacaggtttccacagacgtttccatagtcctaatgaaagcatttatccaacttgatgtcactggactctgctttgcagctgagaaacttagtccttttatgtatcagccccacaaataccagctcccttttccctaagaagagggtatatgtaatctgcctaaaggcgctctcaatattttgtaggtaaatgtcaatgtcctctgagaaggttatgctcttctactccagttgtaaattatttgcttcagaattgacttggctctgagaaaattcttaaaatgtatgttttagataagtaagtaaacttatagcccttattcctttctacccccaagtaaccttcaaattctcaaaagaaggaaataaagaaagacagggtacaaaaacatttaaccagccagcaggaggatggtcctcctctaacctttacccttgatcttgctgaggtaggacccttcgtgcccaggcataacacacactgttggaactgtgctgaatttctcaagattgcatttaccccccagcttctgcacactccctcctcctcctcctcctctttctcctcctcctgcaactgctgctgttccttctcttcttctccttctcattttcctcctccttctccttcctcttcttgtttttcttctcatccttctccttctcctccttcttcaacttctccttcttctccttgaaatgaggatcacgtaagtttattcctgtacctactcacaaaaaaatcaccatgaattccaaaaaaatacaaaattggtgtgttgttttggtcacttagttatcacaagttacagttactatcagtgttgtgatttgccaaaaggatgaacatttcttgttaaagctctgcaaataacaaagtacaatcttcttacactaccattccatttctagaaaaatcagtctatgctaaaaccatgcaaaatgtgtaatttgtgtggatatgtaaaatggggttaggttctaggttaacgtaagtggtttttttgcctcaatgaatgtctggtggaatatttgattgccatgctactggggactttttcactgtgtgaggatgaaaacatctacatatttgtctctagcctattaaatgacactgttacctcccattcttttgacaaccactaaagcctctgaaattttttgagacatgccctaggactgagcagtatttctctgttgagaatgattgccccagactttctcattaacaatagctggaaaacccccttc

SEQ ID NO: 1888097 - DNA, 4001 bp, Homo sapiens
ttagtgactgtgtcttccctggatctggtcctaaggccatgtcctctcaaggcctggtcgctcttcctggaggggctgtctctgctttgcagacttgtcctatgtccccagtgggcttcagtgggctggcttgccattccctcctttccactgaggtgagtgagttcccatgcactcattgcccatttgggtttcttctatttttcttatcggcttagagaatttctttacatcctcttgaatcagagcatcttctagagtccagacagtgctgtccaatagaaatacaatctgagccacatatacaatcataaattttctagtagccatacttctaaaagtgcagagaaacaagcaaaattaattttactgggatacatggacagatacttttccaaagaagacatacttgtggccagaaagcatatgaaaaaaagaaaaagctcggtgtcactaatcattagagaaatggaaatcaaaaccacaatgagataccatctaacaccaatcagaatggctatttttaaaaagtcaaaaaataacatgctggcaaggttgtggaaaaaaggggatgcttataccctgttggtgggagtgtttaaccgttgtggaaaacagtatggtgattcctgaaagagctaaaaatagaaataccattcaacccagcaatctcattattgggtatacacccaaaggaatataaatcattctaccataaagacccatgcatgtgtatgttcattgcagcactattcacaatagaaaagacatggaaacaacctaaatgcccatcaatgacagattggataaagaaaatgtggtacatatacaccatgaaatagactatgcagccataagaaagaacaagaacatgtctgttgtgggaacacggatggagctagaggccattatccttagcaaacaaacacaggaacagaaaaccaaatatcacatgttctcacttatacgtgggagctggccaggcacggtggttcacgcctgtaatcccagcactttgggaggccaaggtaggcagatcacctgaggtcaggagttggagactagcctggccaacatagtgaaacttcatctctactgaaaatacaaaaattagcccggcctggtagtgggcgcctgtagtcccagctactcgggaggctgaggcagaattgcttgaacccaggaggcagaggttgcagtgagccaagatcttgccgttgcactccagcctgggcgacgagagtgaaactccatgtccaaaaaaaaaaaaaaaaaaagtggcagctaaatgatgagaacaaatggacacaaaaagagggacaacaccggccaggcgcggtggctcacgcctgtaatcccagcactttgggaggccgaggcgggcagatcacgaagtcaggagatcgagaccatcctggctaacatggtgaaaccccgtccctactaaaaaaatacaaaaaattagctgggcgtggtggcgggcacctgtagtcccagctactcgggaggctgaggcaggagaatggcatgaacctgggaggcagagcttgcagtgagctgagatccccactgcactccagcctgggcgacagagtgagactctgtctcaaaaaaaaaaaaaaacaggtggggggaaaacacccactggggcctctcagaaggtggaggctgggaggagggagaggatcagaaaaaataacgattgggtactaggcttagtacctgggtaacaaaataatctgtacaataaacccccatgatatgagtttacctatataacaaaccctgaaccgaaaataaaagttttaaaaatattttactagaataaatattatttcaatttataattcatctaaattgttaatgcaatattctatatattttatgttattttttcacaccaagtcattgaaatctggtgtgcattttatccttacagcacatcttaattcaattcaccacattttaaatgccccctacctgcacatgggggttggctacagcatagttctagaaccttctacctatgtaataacacacatcgaggtcattgcattctgattcccaccccgctaggatactagcagcgcagatacgctcacttgaagcttgcatctctgtggttggtgggttttccatgtttaatccagaagagttcctccccaacacctgtgcaaggccacagctccaggtgctctggtcaaggtgcccagtaggataaagaaaatttacagggtcatttatttctgttgtctccaagacatctcttcggaggacctcaagaacgcacatcacttgcttcttttcccacttctatttctgactgcttcggagccaggtttttgctttttcctggccaaacagaaaataaagagcatctcttggattctcatccaccttcccgttcttcaagtaattgcaaacccagcctccctttgtggttttctaagggtacggtcttgtggggacatagaacaggcaaggtaaagtgactcattctctactctcccctccttttcattgtaaatcccaaaaagagagacaaaaggccacatatacctttgtccctcaatgaacaggaaatgaagtgtgttaccttctcaattgcacacacggatgcagttaactgctgtgtgtttttctgaatggaaggaagaggggcctgggcccacagagccatctgggagccgcttctgtgatggtgaggagtgcccaggtggctgctgcttctgcctctcctcgctgctgcttctggtcctgctgctggaggccagatctgggtgaactgagtgctgggaattcaacccggaatctagatttagactgctaagtatgtccacagagttcccgaaatacatcagcacctgcttctggaaggcagagcatttggacattccgtgggaacgctcctgagatgtcttggttcttacttgaattgccaacaaaaacacagttccatctctcacctcttccctctccttcccccatctccttcttcatcccctctccctcaactggtttttctacccatttcccccaaatccttacctgaccccaaaaactccctctatatgcaatccctttccttctgccaggcccctgctttcctgtccacatcgtctcttggcctttccttctctcttgtgaagtgatggaaatgcatggtattatttacctaaattaattgactcaaaatttccctttcactttcaatgaaccctactcttttaatgaaatagtgacattttctgtttacctagactacataaattttacttgttgtatttctgttagtaaggatataaatcccctagctttaatagaacgttgtaattataaataaaatactagttatttttaaatctttacgcataaaactagaataaaatttttatagtgaaaattaagaataacattttgaatattatacaaaaagtggaagtcctatttctgtggctctcataatccccagcagtaaccactgttagtggatgtgctggccgggcgcggtggctcacgtctgtaatcctagcactttgggaggctgaggcaggcggattgcatgagcccaggagtttgagaccagcctggacaacatgtcaaaaccccgtctctaaaataaaaaacagcgtatgtgcaggctttggaaacctttatctttctctgcaatttaacaccatataaaatatatagttttcttaaagtttgaatacaatgtaattattctgtaattggttttattcatttatacatcttggggacctttccattatttgtgaattgactaaattctttttaagtgtttttttaaaaaatataaaacatagacatacaccattattatttaaacagattaacagagctaaccaacatttctagtcatgtgtcaatattttgtgaagacagaagaaagtaaaatcactggatttaagactatgcatattttgagtgttgaaagatgttgccaaaatttccctcataagagttgacagtcccaccaa

SEQ ID NO: 1888098 - DNA, 4001 bp, Homo sapiens
atagaacttccggaaccctaaatagcccaaacgatcttgaaaacgaagaacaaacttggagaactcacgttttctgatttcaaaacttactcataaagctacagtcatcaagataatgtgctgctggtaaaaggatggatgtagaggccaatggagtagaacagagaacccccatatgaacccccatatacatggtccattgactttcaataagggaccaacaccagtgaggaaagggcagcctcctcaacaaacgatgctgggaaaaaggtatttacacatgcaaaacaatgaagttggacatttatcttacaacatatacaaaaattaacatgaaatggatcaaagacctaaatgtaagagctaaaactataaaacgcttagaagaaaacataggggcaaattatcacgaccttcaacatggcaatggtaaatggcacagaaagcataggcaacaaaagaaaaaagacagggccaggcatggtggctcacgcctgtaatcccagcactttgggaggctgaggcaggaggatcacctgaggtcaggagttcaagaccagcctggccaacatggcaaaaccctgtctccgctaaaaataaaaaaattagccaggcatgatagtgggtacctgtaatcccagctactctagaggctgaggcaggagaatcgcttgaacctaggaggcaaaggttgtagtgagccaggatcgcaccactgcactccagcctgggggacagattgagactctgtctcaaaaaaaaaaaaatttttttaacagaaaacagataaattggattcatcaaaattaaagttgttctgcattaaaagacactatcaagaaagtgaaacgtcagccgggcgcagtggctcatgcctgtcatcccagcactttgggaggccgaggcgggcggatcacgaggtcaggagatcgagaccatcctggctaacacagtgaaaccccgtctctactaaaaatacaaaaaattagccgggcgtggtggcaggcgcctgtggtcccagctactcgggaggctgaggcagaagaatggcgcgaacccgggaggcggagcttgcggtgagccgagatcccgccactgcactccagcttgggtgacagagcgagactccttctcaaaaacgaaaaaaaaaaaaaaaaaagaaagtgaaacgtcaaccacagagtgggagaaaatatttgcaaatcatatatctgataagggttttaatacccaggatttataaagaactgctacacttcaacaacaaaaaaattccatttaaaaataggcaaaggactcgaatagatgtttctccaaataagatataaaatggccaataagcacatgaaaagatgctcaacagcactcactggtcactagggaaatgtgaatcaaaaccacagagacaccacctcacatgcgataggacggctgctctccaaaaaacaaaaaattagttgggtgtggtggcatgcgcttgtaatcccagctactcgagaggctaaggcaggagaatcgcttgaacccgggaggtggaggttgcagtgagctgagattggaccactgcactccagcctgggcaacagagtgagaccctgtctcaaaaaaataaataaataaaaataaaataacaagcctcagagaggatgtggagaagttggaattgatggcgggaatgtaaaatggagcagccaccgtgggagacgatttggcagctcctcaaatagtggaacaccgaactgccttacgatccagcaattccactcccaagggtaggtccggaagaatgaagacaaacacccaaacagacacttaggctcccataccagcgttactcacaatggctgaaaggtggaaacagcacagttgcccccagcagatgaatggaggacaaaatgcggtccatccacccatgggaataggattcagccagaaaaatgaaggaagtctgacactcgctaccaggtaaataactttggaagcgctgtgctgagcgacctcggaagcactatgctgagtgacctcggaagccccgtgctgagcgacctcggaagtgccgtgctgagcgaccccggaagccccgtgctgagcgaccccggaagccccgtgctgagcgaccccggaagccccgtgctgagcgacctcggaagccccctgctgagcgacctcggaagcattgtgctgagtgacataagccagaaacaaaaggacaaatgttgtatgattctacttgcatcagatatctagaagagcctaattcacagacagaaagtacattctaggttaagagaggctgggggtggagaggaatgggtagttgttattcatggagacagggtttctgtttggagttggggatgtagctggtggtgatggtgacacaacatcgtgaatgtaattaatgctgctgagcgggacacttacttaatttttttaacttagcaaaccaaattcgactatttatttatttattttgaaacagggtctcactctgtcacccaggcaatggcacgatctcggctcactgcagcctcgacctcccgggctcaagccatcctcccaccttggcctcccaaagggctgggattacaggcatgagccaccgtgcctggccaaatccaacaatttattttaaaaagataatactgtacaccatgatcaagtgggatatttcccaggactgaaagattggtttaacagccagaactcaattaatgtaataaatcatattaataaaataaaggacaaaagccacatgatcatcccaactgatatagaaaatccatttgacaaaatctgacacccatttataattaaaaaaaaactttcaacaaaccagaaatgagagtgaacctcctcaacctagcaatggaatctatggaaacctacagcacgcttcctggggaaagcctgaccgtctcgaatctatggaaacctacagcacgcttcctggggaaagcctgaccgtctccccacggaagggagcaagtcaaggggaccctcccctcccgctcctcccacactgcacagcgggttccagccagggcagtgaggcaagaacatggaactcaaatcaccgagattagcaaaaaagatgtagaagtacgcctcacgccgtaggtggaatcgcctaaggaatctacaaagataaaataaaatgaagtaaaacctgataagatgatcgaaggagtttaacaagatcatggggcgtaggatatttctgcactgacagtgaacaccccaagatgaaatgcagaaagcgtcctggtcaaatagcatcagaaagaataagctacttaggaataatttcgcaaaggaagtgtgagacttgtacgctgcaaactgcgaaacatggctggtaaaaagacccaaagaaaacctgaacagatggagagacttcccacatcgaggctgaaaggctgaaccctgcgcagacggcggggctcccgcggtgctccgtgtggccttcatccccctctggccgtgttccctccccggctcagagccactcctcctagttaccaccctcggccctccctctgcaagcccaggatgcccgggccacaggccggtgagctggggatccagcctctcctggcgttttacccacgtaggtgacaactgacggcactggagcagagaggctgactgcccgaggagaccagggaggcttggaccccaggctggagggggccggggacccagacccactcacttgatttggaaggacacagggctgtcaaacctatgcagggtcatcacacccggcccttcgtttgtcccttttcggccaagctcaggaccctgtaacccaggaagacaagctcgtggttctgagatgacccagggaattggccaatcccacccgaaacccttgttccttcctctggtcattgacgttcctcccagacggcttcgagagccccgcagatccttccactactccccagcctagaagatccaggtgtgcgggggaccctggcaggggacatacctgctcg

SEQ ID NO: 1888099 - DNA, 4001 bp, Homo sapiens
ttctattttgaactagatagtcacatagttttttttttgttcttttttttttttttttttgagatggagtctcgttctgtcacctaggctggagtgcagtggcgtgatctcggctcactgtgacctccacctcctggattcaagtgattctcctgcctcagcctcctgagtggctgggattattggcatgcgcctccatgccaggctaatttttgtattttgagtagagaaaaggttttgccatgttaaccaggctagtcttgaactcctgatctcagggtgatccgcctgccttggccttccaaagtgctgggattgcaagcgggagccaccgcaccctgcctcatatagtattaataagagatagcaaaagatttttttgtttaccttttgagtaaactgctgctaaaaaaaaaaaaaaggagaaaagaaacgggggagagggagagacattctgttggtctcaagttgtctttttcaggtcttttgtgtcaggcctctgagcccaagctaagccgtcatatcccctgtgacctgcatgtatacatccagatggcctgaagcaactgaagatccacaaaagaagtgaaaatagccttaactgatgacctttcaccattgtgatttgtttctgccccaccctaactgatcaatgtactttataatctccccccacttaagaaagttctttgtaatctcccccacccttaagaaagttctttgtaattctccccacccttgagaatgtactttgtgagatccacccgctgcccacaaaacattgctcctaactccactgcctatcccaaaacctgtaagaactaatgataatcccaccaccctttgctgactctcttttcggactcagcccgcctgcatccaggtgaaataaacagccttgttgctcacacaaagcctgtttggtggtctcttcacacagatgcgtgtgacatttggtgctgaagacccgggtcagagggactccttcgggagaccagtcccctgtcctcaccctcactccgtgaagagatccacttacgacctcgggtcctcagatcaaccagcccaaggaacatctcaccaatttcaaattgggtaagtggtcttttcactctcttctccagcctctcttgctacccttcaatctctctgtccttccaattccagttctttttcctctccagtagagacaaaggagacacattttatccgtgaacccaaaactccagggccggtcacagactcaggaagacagtcttcccttgccatttaatcactgcggggacgcctgcctgattattcacccacattccattggtgtccgatcaccgcagggacgcctgctttggtcattcacccacattcccttggtggcaagtcaattgcggggacgcctgctttggctgctcacccacattgcagcccagggctgctccccacccccttctccatatctctacccttctctttaaacttgcctccttcactatgggcaaacttccaccctccattcctccttcttctcccttagcctatgttctcaagaacttaaaacctcttcaactctcacctgacctaaaatctaagcatcttattttcttctgcaacaccacttggccccaatacaaactaacaatggttctaaatggccagaaaatggcacttttcatttctccgtcctacaagacctagataatttttgttgaaaaatgggcaaatggtctgaggtgtcttacgtccaggcatttttcacacttcgttccctccctagtctctgttcccaatgcgactcgtcccaaatcctccttctttccctcccacctgtcccttcagtcccaaccccaagcgtcgctgagtcttgtgaatcttccttttctactgaaccatctgacgtctcaccttcttcccagactgctcctcctcagctcgctccccaccaggctgaatcagcctccaactcttcttcagcctctgctcccacatcctataacccttctattacccgccctccccacacccagtctggttttcagtttcgttctgcggctagctctcccccacctgcccaacaatttcctcttagagaggtggctggagctgaaggcatagtcagggtacatgtgcctttttctctatcagacctttcccaaatcagccagcatttaggctctttctcatcagaccccactaaatatatacaggaatcccgatatctaactctgtcctacagtttaacctggagtgactgaaatgtcatcctgacttctaccctctccccagatgaacgggaaagagttttttctctagcccaatctcacgctgataaccgccggcttcatgaacctgacctccaggaaggcagtagagcagttccccgagaggacccccaatggaactatcaggcagattccccaggtatggctaggcgagattacatggtttcctgcctagttgaagggcttaaaaaggcagcttacaaagctgttaattatgacaaacttagagaaactacccaaggtaaagacgaaaacccagctcagttcatggcccgctcggcagcaacccttacacactttaccgccctagacccagaggggccagaaggccgccttattcttaatatgcattttatcacccagctcctgacattagaaaaaagctttaaaaattggaatccggccctcaaaccccacaacacgaattaatcaacctccccttcaaagtgtacaataatacagaggaggtagccaggcagcaacgcatttctgagttacagctgctcgcctccgctgtaagacagcccacaaccacgtctccagcatacaagaacttcagaacatccaagccacagctcccaggggctccttcaaaacatcctcgtggaccttgcttcaaatgctaaaagcctggccactgggcctcagaatgcccgcagcccgggattcctcctaagccgtgccctgtctgtgcgggcccccgctggaggtcggactgtccgactcacatcactgccactcctaaagcccctggagcccaaaccctatgttccttggccgactccttcccagatctcctcggcttagcagctgaagactgacgtagcccgatcgcctcagaagcctcctggaccatcacagacgctgagcttcgggtaactcttaaagtggagggtaagtccatcccgtttaatcgatatgggggctacccactccacattatcttcttttcaagggcctgtttccctcgcccccataactgttgtgggtattgatggccaagcttcaaaaccccttaaaactcccccactctggtgccaacttggacaacgttcttttatgcactctttttcagttatccccacctgcccagcttccttattaggctgagacattttaaccaaattatctgcttccctgattattcctgtactacagccacatctcattgcccccttcttcccaacccaaagcctcctttgggtcttcctctcatatcccccgaccttaacccacaaatatgggacacctccactccctccctggcaaccaatcacatgcccattactatcccattaaaacctaatcacgcttaccccactcaatgccagtatcacatcccacaacaggctttaaggggattaaatcctgttatcacttgcctgctacagcatgggcttctaaaacctataaactctccttacaattctcccattttacctgttcaaaaaccggacaagtcttacaggttagttcaggatctgtgccttatcaaccaaattgttttgcctatccaccctgtggtgcccaacccgtacgctcttttgtcctcaatatcttcctccacaactcactattccattcttgatctttaaaatgctttttttcactattctcctacaccccttgtcccagcctctctttgcttttacctggaccgatcctgacacccatcagtcccagcagcttacctgggctgtactgccgcaaggcttcagggccagc

SEQ ID NO: 1888100 - DNA, 4001 bp, Homo sapiens
ccgccacctctgggcctgtctgtgtgctgcttcccctactgggaacgctctcccagcccttctgccccagccacagcttggaggtcacctcctccgccaggaagccatccaggcagccccacagcccacagctctcggggctgcagggatgaatgtgggaccctctcctccacggcctgtgttctggcttctggcttctccgggggagttgaactccctcgattctcatgcctgtccagccactgaccttctaggggaagctggctcgggcctcactgagctcatctgtgagatgggtagaagttctgaatgcgatctcaggcagtcttgccatctctcacataggctcctgcccaagtcccagccgcggctgctcactcagcccaccaagccctgcatggtccaacccctgctggccctccagcaccatgtcctgctgctgtcccctcctcacaccccttcagcctccttgcctttcctggaacttcccaaacccattcccaccctcagggcctttgcacgtgctgtggtgagtttccctctgctggaaatctcttccccaggtctggtccttcttctccttcaggcatctgctccacatcaccgcctcagaaaagccctctctgacccactcagctcccaaacacccctgctgattcccatcacggcccttctctctggtgaaatcctctcgcctcttcaagcatttgctcaccgatgtttatctcctccatcctctcctccaccatagtgagggcagagaccttgttcactgctgggtcccctggagcctggcatacagtaggtgctcaagcagtggtggtggaatgaagggaagaacatcaaagtgctgccccacccctgcccaccaccggcccccagcccaaaatcagggagtgggaaccaggaggccccactcccgccagcagcaggcgccccctctgagcccgagcctgtctggttcccaggcccataaaaaccaccgccctcaccttgccctggggcggcaaagggtgaaggaggaagctgtggggttcagagattgaactgtcatggattcagaggcctgggccaatgaaagtcagtgttcacagagtgccttctgcgtgtccaggtgcagttgagacaccccacactcacagccctcactgcagttctgcaagatcaggaccaccacgatcacccttcacaggtgaggaaactgacgcacggtagggtgcagccacgtgctccaggctgtgcagcctgagaaaggtgaagtcagcattggaacccagctccgcccgacaccgcagccagcattgctctcatccatggcagtgcacggagaccatgtcggtgccagctatgtgccaggtgctggttcagagcacaggtcctggagccagactgctcagtgcgttaggcaggtgactcagcccctctgtgcctcagtttctccagctgtgaaacagtccacatggcacctcccttgtcggctgctgaggagacgaaaggaaattatttccagtcaaacagagtgctcttgttgcatgcccttgggagaattcattcccgctctgagcctcagtttccccatctatcatatggggattaaactacgccactgtgttgcatcgctgcgagactaacgtgacgtatttgcacagtgcctcccgcacagtggacgtttactcagagctcactgttcattcactccagtcctgcaggcctcactgtccccatctgtaatcccagaaggcagccctgatcacccaagacggctgctaagtccctagtgcaaaggtcgaggggtcccagggcagccctgacaactggggatatcctgggggtggggaggacagctgagtggccgggatcaggaagctgcagggggcccaggtgactcacccgctggcggggcttgggggctgggctgcggcccccacgcacccctctgggccctgccttgtgcccaaaagtgctgtgtcatgctccgtcatgtggctccgggtcattaatacccgagttctgggaagcttgggccgagttcccggaaggggtcagccagttcagtaaacagattggctggttcgtcgtcacagctgagccgggcgggcctgcagctcaagaggcaggagatggaggctggtggccaaggggacacaggaactgcccccggccccattcggggctggcacctcccagggcagcctggcccaggctctgcagatgaaaggagaaaccaaggcccagagagggcaaggcagttgccagagatcacacagcaggtccggggcgcggacctagaattctggtcttatcatccagtgctctcagcatcactctgactgatgggcagggggggacaaatcacctcaaattgtaacctaagccccccaagcccccaaatcctaacctggaccctaaggccagtgtgttggatgaagggagaaataaatggaaggcaacttgggaaggaagcaactttgaggggttactgggctgtcccctgtggtcgatcctataatcatagtaactgcttctagtgtttcttgagcatctattatgtacagggcattaccataagtgccttccataaatccacccatttaatattcagccacctttatacgaataaacacaggcatcacgtttaaagcatccactgagtgccaggcactgagctgggtgattgacatacaccacccgggatcctctgcggaccttgccagggaggcatcgccgtcacccctgttcatcagatgaggaaacagatgcccaggagggcgagcagctgaggtgtatggtgggagaacagcaggctccagagtcgactagacccagggattcaaatctttacttttacccttcctgctgtatggcctcaggcaagtgactccacctctcagagcctcagtttacccatctggtaaatggggatgattatggtactggaaacactggagccagacttggtgggagctcgtgagtgtcatgatagggcagtggctggagtgcagacttttgggttgaatcttgctgtgccccttcttggctgtgtaacctcgggcatgccgcttagcctctctgggactcagtgtcctctgtaaaatggacatagcacctccctcatgcggcaggtgggaagaatgaatgagcagaaatccccgcagccttctgtgcgaggccaggtattctgcagccactgaacgcaggtgacttgttcttatatttcacctatgatggctccactgggactggggtgaggggaaggacactagaccatgggcagaaggacaaggcacccacattctttgctgcccttttgcacccacaaacaatctggaaagggaagctcagccttgcctgcctccttgagggtcggggctgaggcttggcgtgaatggttgccatggcatcctccccacctccccaccagccactctgccttgctatggactccacgttcctcccctacttaaaaccctctagggctccccattcctcttctcgtgtactactccccagtttggctgagccccagacaggccttatcatggctctttggttcttggcaccccagccccagcccccttggtacaaactctcacactcatcattcccacctcacccttgtgcacacacagggcccttcacccggcatgccctcactttccctaacccacctgcctggtctggatttcacccacccttcaacgcacgtattcaaaacctcctcctccagggagactgccctgatcctcccctttgaaagcgaactctttctagactctctctatatatatacctcacttacgtctttctatcattatatatcaactatttttgtccaccacctcaaattttggcagctgtgaggtagaaaatttgcacaagggagattttggggaaaaaatattgcctctaaaatacttaaagaaatctgctggccaggtgtggtggctcactactgtaatcccagcactttgggaggccgaggcaggtggatcacttgcagt

SEQ ID NO: 1888101 - DNA, 4001 bp, Homo sapiens
gcaacatctgcctcccaggctcaatgattctctcacctcagcctccccagtagctggtactacaggtgcgtgccaccacacctggctaatttttgtattttttgtagaggcagggtctccctattttgcacaggctggtctcaaactcctgggctgaagaaatccttccgcctcagtctcccaaagtgctgggactacaggcgtgggccaccatgcctggccagaaggtcacatattgtatgattccctttccaggaaatctccaaaataggtacatccattgagaccagtgaagaatggtggttgttaggggaatggggagcggctgctttatggtcacagggtctccttttggggtgatgaaaatgttttgtgattagctagaggtgatggttgcagaacacaatgcaaaaatgccaccgaaatgttcactttaaaatgcttaatatgatgctatgtgaacttcgtctcagtaagttatttttttaaaaaaccagtggagtaaaccaaaaaatcaatttacttaagaaaaggtatgaatggctttaaagatggcttttaagtgacgtgtgggagacagtggctaaggggatgattctcacccatcgtgagcctgggaccatggatggggccagaggtagctgcaaggtacagggacccggcgtgaaattccatcagttaacactgtaggtgaggctttccagctccctttcgtcctccctgtgatgccaaggggagggagaaactccacgtggggcttgtgtgtcttgaacacacattggcttataccttgctcaggcctggaaggccctctgctcactgacggaatcctatgcatccctgggaacccagctcaagcctcacctctacgggaagcccttcctgattacacaggtggtcaggcggggtcagtcctgcagcccttcagacccggttgtgaatcccagtcttgccacttactagtgggaggagtctcttaacttagacatattgtttgactaagagggcctcagtttccttatctggaaaatgggggcttatgatagctcttatctcactaggttgagctcctacatagaaagttttaggacagaacctggggagatgtagctgcccttcattcacacttcagtctgacactgatcacatcacagttgcattccttttcctcctgtctcctacactgtgggcaagggctcagcctttgtgatctctgtatcatgttgctgtacagaactcacacacagtaggcacccaagaagggcgggttggctgacgtgcagaggaactcccagaattccacctcttctctcacctccacggtccccaccctggtccagaccctgcatggcttacctggactattgtggtctcctcctccctggtttcctggcttctgtcctgaatcctccacctccaatccattccccacatgcagccagagagatcccgtgagaatctaagtcagatctcgtcccttctctgcctggaaacttcccacagctctcaccttgcttagaggaaaagccaaagtccttcccgtggctcatccactgtgggacatgccccaggtcctctctgctctctgttcctcctccccaaggcctcatccctacgacagtctccttgttgttgctccgacactccaggctccacctcagaacctcgcatctgccgttctggtttcctggagcacccattaccccacacggcccgctgctcacttcctcacctcctccaggcctctgctcaaatagcacctgctagggaagcttccccctgcttcccaggttttgctggactccaaagctcttttcttcccagaggcaaagcccttggctggggtcctgggcccagcccggtgactcaggcggagaagatgctcccaggcctcccgctggatttggggcccagggtcagccatgggggtaggcggtacctaggctgtacctggcgcagaggcctctgcctgcccctgccgtgggaggcagccctgccctgcacacacgggcttccaggctgcgggtgggaaagccccacatcctcctctgcttacctgactccagctgactcagacccccagccctggccagaggggagccgcagctgctccgccccttgatgggaagcagagctgtggctgtgagggcctggctgggccagacactgactcacctctctctatcccgcccctgcgctgggagccacgcctccctctggccagaacctcttggccttctgctgtgggagctgccccaggcggagtcttcccgaggggtgccttcttctgcctctgggggcctttctgttccttcaaggcccagtttgagggccatctcctgctaggaaacatcaaatgccctctggccagaaggggaaaaggatatgggagaggtaaaataatgataataataccagcaacagtaatgaaaacaactgttatacaagaataatagcagctagccatgctcactgtgtgccaggcactgtgctaaacacttcacattttaactcattcaatcctcacaatagtcctatgaggtaggaactctcatttcccaaggcacagagtggtcagtatccagcccaaggctaccagccagccagtgggaggaagggatgtgaatctaggcagctggacattgagtcgcattctcacccccagctctgagaaccgagtggaggcccccgaggctggaacgcagggagctgggagggaggggagccaggtcctgggctctgttccagtgcccgtccccacagtgggattttaagtctccccaggcagaggccagccccctctctccaggggaagaacctcccagagggagggccctgccgcagcacaggctggtgcttgttccctccattggagtggagctcagagcagagggtctgggcagtctaccaacattgcccagccccaagtgatgccagcccctgctctgggcagccaccaaacaggaattcacacaggtagggcagggaccatggcgtgggcacttaacccattcaccctgccagccacactgtgaagtggggacagtacaaacatccgttttacagaggaggagactaaggctcagggtggcaggacttgctcaaggccacagaggcagaacatggtaggagcgaattcaaacccaggattgttctgatgccacacggtcagagtcccttctactgggtggtgacacagcatctcagtgaagaacagggcagggtgggaaggagacgcaggaaaaagcctggagcctcagttcacatcaccctctccctctggccttccactaacctgaactcaccagtccatcttttcattcctttacccatacctccacctacctactcatccacacattcatccgccatccaaacatctctccatctgtccttccattattccatctatcctttccatccaactctcagccatccctccacccatcaagacttccctccacctgtccttctattcatccacccatccattcttctattcctcctgccttctatctattcaaccttccattcatccatctgtccatcagttcaaatatcatctatccacctctccttccttccaacctccaatccatccatccaaccgtccgcccacccattcatccatccactcatccacccacacatccatccatccattcatccgcccacccacccactcatcctcacatccatctacacatccattcatccatacagcccacaaatgtctatttgaatgacagctgtgatgcccaagccttggggttgccgtgccttgagccaggagaaacatgcctaattaggtttctgtttatttgttgttccaagaaggctaattgtgggctttgtaaacagccctttgatggctgaggagttactttaggaggacagttaaataaacaatcactgggtagaaaacagttagtgctggtacacggcgggtccggagtcatggcctgccttacagaggaggggtgagactgagttccagacag

SEQ ID NO: 1888102 - DNA, 4001 bp, Homo sapiens
gcaatgacactatcagctcatcgcaacctccatctcccgggttcaagcgattctcctgtctcagcctcccgagtagctgggattacaggcatgcaccaccacacctggctaattttgtatttttagtagaggcggggtttctccatgttggtcaggctggtctcaaactctcaacctcatgtgatccatccaccttggcctcccaaagtgctgggattacaggcgtgagccaccgcacccggcttcttttttttttttttttttaattttttgagacagagtctcactctgttgcccaggctggaatgcagtggtgctatctctgctcactgcaaccttcacctcccaggttcaagcgattctcctgactcagtctcctgagtagctgggattacaggcgcctgccaccacgcctggctaattttttttgtatttttaatagagacagtgttacaccattttggccaggctggtctcgaactcatgaccccaggtattccacctgcctcagcttcccaaagtgctgggattacaaacatgagccactgcaccccgccaagggttgtagttcttaaagtctttctttatcaggcatataagaatgagacccctctcttcatggtctgcctctatttgtgaaggttttcttaacattagtgacaccaggccaggcgcggtggctcacgtttgtaatcccagcactttgggaggctgaggagggcggattacgaggtcaggagatcgagaccacgatgaaaccccgtctctactaaaaatgcaaaaaattagctgggcgtggtggcgggtgcctgcagtcccagctactccaagaggctgaggcaggagaatggtgtgaagctgggaggcggagcttgcagtgagccgagatcgcaccactgcactccctcctgggcaacagagcgagactccatctcaaaaaaaaaaaaaaaaaaaaaaaaaaaaacattagtgacaccattttgattctgacaactgtcacacatttttttattgtggtaaaatatttaacagaatatttatatttttcaccattattaagtgtacaattcagtggcattaaatgcattcacactaggcacagtggctcacacctgtaatcccagcactttgggaggccaaggcgggagaattacttgagcccaagtgttcaagaccagcctgggcaacatagcgatacccccatctctacaaaaaaatacaagaaaaatcagccaggcgtggtggcacgcacctgtagtcccagctactcgggaggctgaggtgggaaaatcacttgagcacgggaggtcgaagctgcagtgagctaggattgcaccactgcagtccagcctgggcaacagaataagaccttgtcacaaaaaacaaagaaaagaaaaaaaattcacaatgctgtatactcgtcataactctctgtatccaaaacttttccatcatccccaacacaaactctgtcctcattcaacaattcccccctctctccaggtaatctctattctattttccatctctcagaatctgcccatcccaggtacctcatacaacattgtccttctgtgtctggcttctttcactgagcacaatgttttccaggtccataggtgttgtggtctgtgttggaatgttcttcctgggacaaaacaaggcctgtctgactccagggctgcccccgatcccccacgcccacctgcctgtcccctctgcaggcctcagtgcttctgtctgtaggaagggaagggctgggcggcctgctgggctggtcacctgccaccttgccgtcagcgccttccctcgcgttaatcactgttcagccagaaaaccgaaacccctgaacaccgcaacagagactctcccacagggaacgggttacagagacgacggtggaggcagaggccgaacgggatggggaggacgctccgagaaagaaatcgcagccgcagagagccactgccacctctaagctggaggggctggtaaggttgctgtagcccagggcctgcgtcactccgcaaagcgggaggcacaggggcctgtcccggggcgctccccgaccggggcctcccgttggccaataggaactcaccggacgcgagcctgggaaaggcgccgcagggtcagctctgggatacacagagcagagctgcagagggcggagcttggatcggaaggcaaagagcccccgcccccgcccgacagaccctccctccctggtcaactcctaccaggcagcccccactgtggctccaagccctggcttctcggacccagcttccttctgtcccgctggcctagggtggagcgcctccagctgtggccaatgcttcacctggcctttctgcatctcggctcgtccgtcctctgtgtaagcaatgcctgtattccatcccttctgtctgaaatgcctagggtggtctccctcttccagactggcccccaatgagacaccagtggtgctgtcgtttacagagtggccacagtgctaccacgggaggttagtggatggctgagtcatgaaccagaaaggagggcagaagtgaggtgagatgggtccccaaggcagggccactccgtggtaagtgcaggatctcaaggcagaccctgagctttacagagacgttgagtggccacaatcaggcccccagctcagccagtggacgggctccatgtggcactgggccaaagaaaccagcctccactgagggcctcctgtgtgcccagctgtattcccacgtcaaccccatctcagctggcagggctcaccgtaatagaggactgcagactgtgtggtttaatcaacagagattgttgtcaaggtgtgagcggggctggcttctcccgcagcctcgctccggggcttgtagatggccgccttcttgctctgggctcacatggccctccctctgtttgtgtctgtgtccacatttcctcttcctatgaagacaacgattatattggattagggtccaccctaatgacctcatttttacttaattacctttttttttttttcaagagggagcttcactctgtgacccaggctggagtgcagtggcgggatctcggctcactgcaactcccgcctcccggcttccagcaattctcctgcctcagcctgccgggtagctaggattacagatgttcaccaccatgcccagctaatttttgtatttttcctagagatagggtttcaccatgttggccaggctggtctcgaattcctgacctcaagtaatctgcccacctccacctcccaaagtgctgggattacaggcgtgagccgctgtgcctggccacttaattacccctttaaaggccttatttccaaatacagtaacattctgaggtactgggggttagaatctcaacataattatttggaggaggtcatcattcagcctgtgacaccccccagtttcacaaggtgggcattatcggccctgttttccaaatgaggaaactgaggcccagagagtggctcacccaaggccacccagagctgggtctcctcaggtccagggctccccaccccccacaccatgagcagggctgctgctccacctgccagcccagggaatcttctgtcactctctgtgactgccgcagaccctgggaaacggattccaatccctcttcctttcgttccctctgctgtgtgtaataagatgatgacccaccatttattggccctttcctatgtgtgaggctcttccactagcatttctcatgcattccatacacacacacgacacggctcctctggctctgctcaagcctcctcagagatgccctcctcacacaccccacttgtaacaatgcctccacccacaccagcacgcctcctgctttattttcgtttgtagtgtcataaatacctgaaattaggctggatacggtggttcacgcctgtaatcccgccactgggaggccgaggtgggtaaattacttgaggccaggagttcgagactagcctgggcgacatggaa

SEQ ID NO: 1888103 - DNA, 4001 bp, Homo sapiens
aatctggacagcaactcacttctcactgtaatttactctgtatttccaatcaggtactatgtgctgttgattcaacccccttaatgttgactgttatgctgacctttagtctgtctccattgctaccatcctagtccaggccttcagcactgttcccataagtggatatttaacttgtcttgagttgtgaaaatattttctaaggaaaaaggaagagatttatggatattagtgtattaaagttctgaaatgtcattaagtcataaataacaggaaacagtggaacatttttaaatggacaaaaagtctttgctaggcattttccagaaaaagtattaatattcttggtaagcaaagaaggtttgaaaattaactataaaattatgaatgcctcaagagaaaaaataggaaaatacatcaacaggcaatttattaaagaaattccaataatgaatgtgaaaccattttaatgcctatattaattttttaaagttcatatatataatatcagttatcacattttcaaagatgaaaatagacaatatttcacaaaaaaaactgtccaataacttccttgcaagtaacttgtccaagtctttctctctacaaagatagatacacagatagacaagtagatatagacataaacatacgtgtaaagagaacttacaaggctcaatagataggaaagataagtttcagaaatctcaaaaaaagtaagctactgtcagtaattgcagtattcaaaagaaaattttaagaaactattatactcaaatatgtagaaagatatgacccttaaatgtagagaaaagaaataattaaggagacagtgtgtgttccttaattatttcttttccctacatttccctacactcacccacacacacatttttagagataaactgaattaaggattagtgaacatttttaaaatcccagcaatattcacatcgagcacagagaagagtataattgagattgtagggatgttgaatcagtagcgaggaggatattttgagaaaacatctgagaataaaaagtaggagaacaatgagataaaaatggcaagaaagaaaattttagaatgaacaaagaatagagacctaaaatagaaataataggttctcctgaggaaagagtcttggaaagattaggaaaatgaaaagaaagacaataaccacattcgtaataagagacatttccataatatgggggagaaactgtattggtaaattgcagagatttactgagaagtacataaaaataatagaattaatggtctatattctttacctttttaatgataaggatttttaaatgctaaaatcattttggcagaaaataataaaacttacaagaatttttaaaatatataaatacaaatatgttggcatcttgggaggaacaaaaatttgtctaatctgaggcttttaatctaaaacctgaaacgctagaagagaaaatagccatgtcgataaagtttttacaagaataagctgtgtacttttttgtttgctttttaaaaatgtgttttatttatttttgcttttctttttaatgaatgaaagcagttgctttaccctaaaggaaaagataattctttgtaaaataaaaaaatatagaaaattatgctgttcttggttgcaaggagccaaagtatgggaagagaagaaaatttgaaaaatgtgcttccttttggttaagggacaaaattcatatcaaataaaggtgaaagggggaaaacaactttcagtaaagcaccaaaaacagtttttaaaaatccattcctatttttttctacctggctaaaataagtgcaaatttcagcattttgcaaagatatgtaatataaaattaatgttaaagtaacacaaatatgtccctaaacctttaattttcaaaacttagaactgtatgtttgtttctacatgtacataaagaaagaaaaataaaagcgaactacataccttgtctcagcaggacaccaaatggtagtttcttctaaaatgacaatgaaggtgagagaggttaaatcattattttcaaatggctaagataatggccattatccttagcaaactaacgcaggaacagaaaaccaaatactgcatgttgtcatttataagtgcgagctaaatgatgagaacacatggacacacagaggggaacaacacacactgggacctttcagagggtggaggatgggaggagggagaggattgggaaacaaacaactaatgggtactagggttaatacctgggtgatgaaataatctgtacaacaaacccccatgacatgtttacctaagtaaaaatcctgagcttgtacccctgaatttaaaagttaaaagttaaaaaaagaaatggctaagatactttttaagtagtagtaacagtatgctggagaagtgtatggttttcaaagcaaaaggaaaaactaggaaaaaaagataggagggattatatatacgaatgtgtgtgtgtgtgtgtgtgtgtgtgtacattataccatttaaagcattgcacaaggcaaaaatgctgctatcaccatgataattcaccagaaggttaaaacaatcacaaaaaatcttagaagaaaggagaaaaaagtcacaatcattgaagggcaacaactttgcctaaatggaagccctcaccaaatcatgtgtttatcaactctatgacttattttcttttactcctgaatagaagtccatcctgtcatggcctcttggtgagctaatgatttctgaaacatgcatcttgtctttataagaggtcttgtgtctcactacacctcccatctcccttcccctccctttaactgtgaactagacttagtaaccttcttataaatattaataacagggtagagaaagggggaaataataactttacagaagggaatttggagacattcattaactacataatcaaagttaatatcaccagtaataagacattttaatatcacgtgccactgataagatgtgatgagatgatgtattaggccattctcacattgctataaggaaatacatgagactggataatttataaagagaagagatttaattggctcatagttctgcaagttgtacaggaagcatgattctggcatctgctcagcttctggggaggcctcaaggaacgcaatcatagtggaaggcaaagggggagcaggcatatcacatggccagagcaggagcaagagagagaaggagaggtgttacacatttttaaatgaccagatctcaggataagtcactcatgtcctcctaggacaataccaagggggctggtgctaaatcactcatgagaaatctgcccctatgatccggtcacttccaccaggccccacctccaacactggggattatattctaatacaagatttgggcagggactcacatccaaactatatcagaagggtacatgacctctgtggtattcattcccccaaattaataacctcagtctgttcatgagaaaacatcagataaactcaaaattaaggacattatacaaaatatcagactggtacttttcaaaagcattaaggtcatgaaattcaaggaaagacagaaactcttctagactggagaagactaagcatacattactaaatgcaatatgtcttggattagatccaggtccagaaaaaccaaagaggggagatccaaagaatgcctattacacttagttaatagtgtacatgaatgttaatgtcttagttttgataaatttactgtggttatagaagatgttaacattagaagctaggtgaaggctgtatgacaacactacacttcctttgcaactcttctgtaaaccaaaaataatggcaaaacaatcttttttttaacaattcatagaaggcaacctacgattatgatgatgattattattatttaattccggtatacaagtgcagaacgtgtaggtttgttatgtaggcataggtgagccatggtggtttgctgcacttatcaacccat

SEQ ID NO: 1888104 - DNA, 4001 bp, Homo sapiens
ggtagattaacctgctagaaacatctagaatgtagagcgagggtgcactagaaataggaaaacagatggactttgcagtaatccagatgcaaggcaactgagaagagggcaggaacgggaggcatccaggagccggagaaaagaggatgctcgggacctggcagcttccttttcatctctaggtaaattaaatactttcccacagtttggtgcccttcatggtgctgctacctgccaggcttgagagagtgagaagctggaggtctctgccttttctgtggctgcccaggacaaacctcattggttctgctgaatgagcatcattagcgtatttatactagaactcagttccagatagcagcatttgagaatcaagataagagagtgttattttcagtgggaaatcagtgggccagtggaagagctagaatagtgagtgacaattgtcttgctggttactctcagcattggcacaggggtgtggtgttgggctaacttaatttgcactcaaatactttgtcctcccactggctgaagttccactgcacagagattatgctttgggtcatgtggctctcgtgaggtgaatgtcctttatgaagaacgagaactaagactctctaggaccggctgggataaggccttggacgtggtgtctatctggttctagccccttgagatggagccatctattccacattagcctgttcaaacagggcctccagcatgctgtcttggatttactctaaaattctaatctcttgatgaagattttggtggctacaaattgctgctcttcctctgggcactggaatggatgggtgtcctggtttggattttctagctcagccctaaagaggaagaagatttctgctaaagaagaatgctttgcctggagtttctggtgctggcaattggcttgggcccactcttgaactaataggttcaactttatcccctggccacaggtataaactcaagagtgaactctttatgccatgtaagccacacaggctgcaggtattagaaaaagagctgcagtactcttctgaaaagtcatctctgctctcccttcctgaaggtggtggaagaaacttgtaatcatgagagctgctgggatccatttgcaaccctgcatgatgctgaccacacagaaagaagacgagaaaaacagaatccagaggccttgacattcttactgggccccagtatcaaaaactcaaaatcttccctacctctggacttccagttatgtgatccctgaaaggcatccacgtgtggcctttcccagtaaggctttagttaggttagctaaaatgttagcaaagtctaatcttattggcagaaaaaaaattgccttttactatgtttgtacctttcaaagacctcatagcccagcagacttcataaatgctggtgaatttctttcaaaccattgtcaaataaaacctcccatctccaattagcataatgtctccattctgaaagtccaggaggcttctttatttttttgttctaaagatatctataccaggattgcaacaattatgaggactactaacaagaaaaactcctgaaacttttgagaatgggatttgcatttgcaaaatgatttgcaaccagacctgccaggtagcacttcacggaaatcaaaaaatgggttttgaatatcgagattatattttttggcatccaaattcgtagtaaaatcacctttctagctgtctgcagtagatgtgactaaactctcagaatagcttccacaagtgctgaatacttttgataaaagtcgatgtagctggaacacagtcacatttgattgacttaccttaattctctaaatcagcttattgcccaaacagctcctcaattcgggtgtccccatgctgcggccaccttctctagttgccagagcccgcttctccaccctaaataactgcgactgcggcagaggcatttgggttggtttaagacggcagtatatccctctgtttcttcattcaggatttctttccttcaaaggagactttgtgtttcccaagtttccttcttctgcttgtatgaatctaaaatgaatctgaactaaaagtacttgttgagtggttatgctcccaactgtaatttggagtcaaggtatgaatattttatactcaaagagtcactgaagatttgtaggaggcttttaaaaataaaatgaatacactcattttgttggctcaggtagactatagctgggggaaaacaaaaatacaggatgagccctcaatcatgagtctttaaaaaatgaatcaggatttgtgttttgggataatcaggagtccctgtggtgagtacacagtgtcctttggaggaaagaaataccagcctgaaggagaaccgggaaacaaaaacaaaagccacccaaatgctccaatctcgttttaaaccaacccaaattccagaggtgcagtttcagaagggagctcttcataccctggcagaaattaggtgtcaagctagagagccagtattcagatgcctgtggcttcctttcactgcaaaaatagatttaaaaaataatccagtctttggcatattttctccgagacggagagacctgagtagcccctttgctttcgctgtatgtttgtgttgcactgagctgagggctttgtgagctcataggctacttcaaaagctgttgaaaacagtcaaaacagaaactgaatacatgtgaattaagcatttccttttttatataaatctgtgagtctttttttttaaaataacatctattggtttatatggagggaccccgttaagcaattttcactggatgcagtttcagcttgaaagaacaaaaagtagaagaaaagtgtctaggctcttttaaccttcaagcatggccacacttaggaggatgatcacctgagaatcataagttctttcctgaagactctgtagaaggacatttggattacaaatcatttttgacgttcatcaagtactcaaatatatgttttaattgtgcctgatgcacattgcttcttttataatgcactaatcttactctaagcaaagtatgtagcaattttgagataaggaagaaagtttctgagctttcatgaggtggctgtcaagatcatgaccacctgtggggtgctgggtacattacccttgagaagatgctctgaaatgacattgtttcttcttttcatttatcgcaaagggtttcattctttatttatttattttttttagttggagtatcactctgttgcccaggctgaagtgcagtggtatgatcatagctcactgcagcctcaaactcctggcctcaattgatcctcccacctcagcctcctgagttgctgggaatacaagctcatgccaccatgccggggtaatttttttttttctggtggcggagggacagggtcttgctatgttgcccaggctggtctcaaactgctggtctttagttacccttcacccttaccatcacaaagtattgagattgcagatgtgggccacagcacctgaccaagggcttcattcttaatgtctaccttctgtcctggattctggatcctttgaatagattccacctgtgagaagcttgaaaacatcagatgtatgcaaattaaaaccctaggtactaattttacctattaaattggcaaaaattctaaaatttgttaacatgcagtattggccaaagtttcactaaaaaatatgcccttgtagcggtatgggaataaaatcagtacagcttttatggacagattggtagcccatgctttgtccccacaattctgcttctagttcttcatcctgcaactgtagaagtgaacaaagatttacatgtcacatttattgtcatagtgaaaacatggaaacatcatgctaatcagcaggagactagttacataaagcatactcatacaaaggaattttagcagccatgaaaaaggatgactaattacaatgcgcaggcactgaggggtctccaagacacagtg

SEQ ID NO: 1888105 - DNA, 4001 bp, Homo sapiens
taacacacttcaaaagcactaggattaatgtcagacttgtttcaattatgccgatataaaaagagttggatgtcttgtttgttcatttatattgtgcctcattctacaaaggatgtgagctggtatataaaaacacatacaatataataaaaggttaaaaaattaataaaattctagccagagaagatacaaattaaaataggaggtggaaacaaaatgaaagtgtttttccatttaggatttaaccttttaattctatattattttatattaatattgcaaccactgcctttttctatttactgttctatcaaatctgtttagttcttttacagtttttttacaattatcaaatatttcaaaaattttaaatagttttttgattaatattacaaacactcataacaacacttagatttttcaaactaatattcaaaataaaggtgccatatttgtttgaacattaaaaaaagtacaatattagctggcacagtaactttccctcatcccactggcttctctcacccaaaaagacctctgacctctgtcttgaaggtggttcgcatcttttcaaatcatattttaaaatttataacatgtgtaagtaactattgtatatggtgttgctttctgttttttaaagtttacatgaataaggaattattttatgcataatattttcaacttgcttttatttcccaacactagatgttagaaattcatctatgctaaaataagtagatttagtgtatttattttaacaactgtgtagtagttaaaacatatccccaatttgtttatccattaccaatgaataaacatttggattgtattttaaagtattttttaaaagcttcagtggtcattctcataccttcctccttgtgcaaggcagaggtttctctacggcttatttttggaagagagatgggtaggtctcagagtatctcatgaagatgaactttactagatgatagccaaattgccctctgaagtgcttatactacttcctatttccaccattagcagagaattttcctattttgctgtattctaaagagtaaaccctcaaaaggaggtaggggcagaacaggaaacagataaaatttaacaagatacagctggggattctaagaagcagtaccatgaaaggcctctcaggtcctcctgaaatgtcctgactttactctgtaaacagtggaaagccttcaaaatctttaatatgaattttcattaatagggaaatattcactttgcttctttcttgaactttaaacaagttgcttaagcaaaagttctaaaaaacggccataacctcaaatatttattgattcagatctcaggaatctaggagattaagggctaagaatcaggtgtgggtggctcacttctgtccttagtttcttggctataatttgctgaatgttctcttcccctccatatctgccagttggaaatcttatgagaaatgttccctgttcaaggacatgaatgacaagatccgcatccagcaccctctgggcctatggggaagccaccaaagtagactcacattttgtttaaaatgatgggtgattgttccatcaagctctgacgttaatggtttcggttaatctgatacaattgagacaatattttctcttgtcattatttcttcatttttatcaaacgtcactcactgttctgggtaaaggcagatctagccttcttctgaagctgcacctccaactttatgtgctgacttggaaggatggctgtttacaggactcctgggctggttcaccttccttggatactcgagtactggagtgctcaaatgcatacgttctagagacggtttgtttcattataagatgtgactaaatatgaacctgaaagagccaattcataaagatggatcccaaatgtaaatagagttatattagtaaactgggcccaaatttaaaataaagccaagtagctatttgctgactagatgtctcacacacacactttgagttccctgaaaaccgacacttgtgttcagctttgggactcggttgaagctgagccctttctcaaccaatcattgttcagctgcctcaaccaatcaggactcagctgccttgaccaatcagggtttatttgcataggtgaacctgattgggaacttgggcaggaactttcagtagaaaaccagagctctcccttcgctttctggtacacaacttagtttttacactgaaggctgcatgtccccagtttgcagactgtacaccagaataaaatctcttttctccaaactccttttcaaaaaaattttcattcacagaaacatgttcaacattcttttttccctgagcaaacccacttaacttttctcctccagccttcctaggtcagagtcacaagttgtgccagaggcagaacaaactagacacttaggaacacaataaatagcaagcatctgctccagcacctctgaggaaggtgtgtacatacatacagagtaggacttctttcatttatgaatactctacatgtgatctggagcctttttcatttgcaattaaaagaaaaagactttaaaaataggagagatgaaaacagaagccaaaaccctaagcagtgtgggtggggacgtggagctgggtggggacgtggagccagccctaaggatggctggggaccggtcctctgcttcctgcatccgcttctctctggtgcttgcctcgttttccctggccgactgtcagagtgaagccggggtaatggctccttctggaaccgtggggcttgcctcttcacattacagggaccagtgaggaaacaggaccctccacattgattccagctacagtcctcatagagaactctgactgggtcagcctgggtcaggtgcccaccagggtccagggtatcagagaatgatgattgatagttccaacctcaacaaacaagtaaacaggaggagtaaacattttacctgaaaaacaagaagggctgttctggacagacaaaaccatagatgtgatatactctgattttgccacaagggctttatgccacaacataccagaattttccagcctcagatagctttgccttgacaaatgttgcacggtaaagaattttcttcggttacagaatccttttttggttttccaattctaatgattattttacttgttatttcaaatacctgagcatcctctgaactttcctctggcctatgtatctcttgaaggcaaatacttgctccaaacattacccaaaacatgaaggttcaggggctttgttgagatcatagtgccatgtcctctcctgtggtcagtgatgccagttttcaagtggatccttgccttgtagtaattttggctggatggggatcatgctgaatgactcacatccaaataaaatgaggacagcacagaaggagcactcttaggccgactgcaaaagtgggagagctgctcacggccagtccaactgtgctccctcccagtctgccttcaatggtggctgccttcacaggacagatttggatttaatgtgtgtttcatagagagtaaagggaagacttcatctctggaaagtcattttacagctgagaaaaccgagccccagagatgtcacatgacatgaacagagccatgcagcccatgagatcccctaaggaacttcacaacagaaaacatcaattaggtgcctgctgtgtgcatccatcgctgggccctttgagtaggatagagagtagaggaggcttaaagcatggttcctgccccctgtgagcctccagtcccagctctgcagccacacacgtcaaactctaaaaacacaggggcacatttgacatttttccaaatagaagaccttacaaaatagtcaaatgaatttcaaaattcaggttgtcaccaaccatctatcccgtatgtagggcttacttcaccaagtgaacaaatttattacagcacggagatacttcatgctaattctaacacgttgcctgttgtaccctggcc

SEQ ID NO: 1888106 - DNA, 4001 bp, Homo sapiens
gcaggctaactaagctacatttaaatggatgaagcagcgtgtaacatgggatttggagatgtacaagttggtgtcaagtcttgtctaggaattctcttcacctcttgaggcctcagatttcaaatgtataaaatggggatatgatagtgtctgatttatgagattatggcaaagatcaagggaacctatgttacggtacctacataaagaagatgtgcctaaaagcaaaatggtgttaattcataaacagttgtatcagtctactattttctcaacaatgctacataacaaaacagacaaacttagtggctttccacaatgaacacgaattttcttttcattggctttccacaatgaaaattggctttccacaatgaacacgaattttttcaggccagcagggagtctgcaaattgcaggccgagtttgactcagagttttgctcagagctataggctgggtatagatctgccatgactatttctcatcttccttatcccggtcagtggcttctcatggcagaagacagagcgggagagcaagcctaaatgtatagcacaattcaagcatctgtttaagtcacatctacgaacatccatggaccaacagctgagctgaaagtcaagcatgggcataaggaaaaaaaagcatatatttgctaagaaattattcaatctgccataatgttggcttattaatcagtttttaaaatttgaacgtataatcaaagttatctataataatgaatcacttgagtagctttataaaaaactataaaattaactatacaatttgaaagtagccttaaaaaaggagggctcaaataatctataactgattatgaaatcatacaaagttgaacaattaatgtcaaaagatacacaaatgattatataatgaatagtatatccaataaataactcaccatctaaacctttatgtgtcaggctacatgagaaacttcttaactgtgtgttttggaaaatcagaaagagcagaaaacatgtactcagttttctgtgtggttattagaggccaattgtttttccattttttcatttaatattcacaagtttattgagcccttttgtatcaattagctttacccaggcatttattcattctctcaaagagaaatttataaggtgcctactgtatgccaagctctgtgttagttattggagaaacaaccgttgactttaaacatctttccaaattggaaacttttatttcagagtataaaatataattgattttttaaattccacaaagccatgaagggcaaagaacttagtttggaaaaggttgcctacgaccttgaacatgccgcatgcctacatacttactaagtttccaggagtacatcaaatgagatcaaatgagcaatcctaggtagacatcaaaggcttcaattgtgtgcttaaagagcaagcctttcttacattttgggtacacagactttttaattgggtttttaatgagatatttcactggttgagaattattccaatttttttgctgctagtgaaaaaagttaatcagcagatatttgttaattttgaggccttgttctctttttttgtttgttttaggttttgtttttgagacggagtcctgctctgttgcccaggctggagtgcagtggcacgatctcagctcactgtatgtagcctctgcttcctgggttcaagcaattctcctgccccagcctcccgagtagctgggactacagacatgcaccaccatgcccaggtaattttttttgtatttttagtagagatggggtttcaccatgttggccaagctggtcttgatctcctgacctcatgatccgcccgcctcagcctcccaaagtgctgggattacaggcgtgagccactgcgcccagccgaggccttgttctcttctgaagcatttccacatacctcacattgagtctagagtcactacacttagacattctgcaaactgagggggttaagagtggaattctgtttctgcttttcaggattatgggctgtgtgtaaagacaataagggtgattccgctccaagttatagcacattctaaattctaaagatgttatgtgagagactcagtccaacatggcaaagacacatagaattaaagcattgctccactaagttcaaatttaatgatttcaataaccacactgagatgctttctactagtttctttttttccttttaaagagttcgatacagtttcagctttctagtgacaattagtgaaggcacggaagttggcatcttacctctaagccctctgttggtttttgtcttagcatcaacctctgagctacctttcagagagaaaagaattgatacagagcatcttttggaactgtgattaatggtgtaccttcattatccatcattttaccaccttgaacccacaacctggctttaattgtaccctataagaacacacctcatgctacaattctgcaagttttaccaaaaaaggactatatttctgctctaattaccatcacaacagctcccattatggtttgaccctagtaatttagttatatttatgctgctacaatgcaccaaatagataataatgaatactgatgcagactaaggttgaagcaaactataattatacagacctaatgaagttaccagaaaaggcagtatataaaaaaacatgctcagataaagaaaacacacacacacacacgcacagagagagagagattatttctcatgccccaagttctgcattatacttagaaattcctggatacttgacatgtgctgttcatgttcctttcttgctttctggtctgtgatttctggacttacaggtcacattccaagctttcatctttcatttctaagtgtctacctttatttttcaaataaagacaaacagctgtattacttatagagtaaatcaaatgggacacttattcggcaatcctctttcatgttaaacatgctaaattaaaattttaaaatcaaggggtttgttcaagatgttggcaattaaatctatcaaatgagcccatggctggagctcctcaaaataacagctaacaaagttactgcacctgtaaaataaagtcatagccagttagcagctcaggacaaagttgaaccagaaattggttttgtgcaagttgattaacaagtagtgtatagaaggaaaaaaacaaaggaagggtttggctatcaagtgttgacaatagaggtcctcctctggaaagacttagataaactttgggaatcagtgagacaaggctaaagaatcttgctcctccaagtattcagagggacctgaacacactgtttagctcattgacaaacagagataagacagaaaaaatgcattcaactgcctcattatttcatacgaatttgtgataattatcatggcacttttgctgattttcatttgttcctaagtaaccatctgatagaaatgggaaagccagaaaatgtgcagattccctggaatggctatgactctgagaaggaaggagatcccttgggattcctgtttcacctggttcttatccactctaatctcttgtaaacatgaagagcagtcattcttatcttactccacataggataacttctatagttatcaatttctaagaaggatgacattgttaatacagagccaagtccttgtagtaaaaacccccctaatggtttaggggtcatgttaaattatctgtgactattaaggttcaactggcttaaattctaaaatgtccttctaaatagatttctctcattctcctcattgttgaatagctctcaactatttcatgccccagtaggcccacattcctatttgaagtgcatatctgggtagcagattaagagaaaaaggatagaggcaaagtttaaatttgccaaaaagattttttttaatttgacaatttttccccatgtctcctcatcagtccataactagaaataaatcctggccaaactgcatttgtatgctccctaatgtct

SEQ ID NO: 1888107 - DNA, 4001 bp, Homo sapiens
caacctccacctcccgagttcaagtgattctcctgtcttagcctcccaagtagctgggattacaggaatgcaccaccacgccctgctaattttgtatttttagtagaaacagggtttcatcatgttggtcaggctggtctcgaactcctgacttcatgtgatccacctgccttggcctcccaaagtgctgggattacaggcatgagccaccatgccatgcctggcctagcttttgtatatccttggagcaaaatttatatacagataagtcatttcttcatgtattcattcatttattcagcattagggtataatagtttagaacactcactcaggagtctaatcgactttcgtgccatttcaggtacgtgatttcaccttcctgaagtttattttgcatatgttgaaagtcatggaggaaaattaaatgaaattatctgtgtaaattgcctggaacataataagagctcaaaactattcactattattgtctatcatccatgcattcatctgtccatccacgtattcaccatccctctatctatccatccatccacccacctatccatccattccttcacccttcctttcttccttccttctatcatttattcacctatctgtccattcttccttcttttctttccttccttccaacatttatccatccatccatccatccatctatgcatccacccacccacccacccatccttccatccatccctccatctatccctccatctgtccatttatctacacactcactcattcattccttctttgcctggtactctatgccagattgttgagattataaaaacaaataagatatatcccgacttcatggagatcccagtttagctggaaagacagcattaggtctctggctgtaggcagcatctgatcctgaaggaaatagtgagagaaaacctggggaagtgtttagtttctggtctagccctggtgatttaagatgatatgtgagacgcactcacctcccagggctcctgatggctcagagctcagtggatgaacatggcttcatccacacagtcagttacacggtgagactacacatttggcaaatgccccaaacaaacaaacaaacaaacaaaataatttgggttcaaggtaacagtaaatcacactcttcaaacctaaatattcttctctaggcttcttcccaccttttcttcccttctttctgccaactccttctcctccattttgcgtcagacaccatgtgcattgggaggatgttgctaggtcacagtggggacacttgctctatttacagagaaaacagggctcctcagattcacagggtttgcaaaggaaagccctcccagaaaggaattccagccttcccttctgaggctggtgcagcagggctgggggctgcaggaacagaccagagaaagtgactcagaattcccttcggctacagtacgattgcgagaaccattttaagtatgagctgtggctcccctctccctttttcctcagcctccagggagctgccatttaaaaaatcttggcctggccaggggcggtggctcatgcctgtaatcccagcactttgggaggctgaggtgggcggatcacctgaggtcgggagtttgagaccagcctgacccctgaccaacatggagaaaccccgtctctactaaaaatacaaaattagctggaggctgaggtaggagaatcgattgaactcgggaggcagaggttgtggtgagctgagatcacgccattgcactccagcctgggcaacaagagcaaaactccatctcaaaaaaaaaaaaaaaaaaaagaaaagaaagaaagtaatccatgtctttctcacgtaccaacatccagatagaagcagtccaggatgggtagagcagctcctttggtagaacccacctctattgcgctgccatgcctggcacgttgctcccatccccatggtccaagggtcctctcctccacatccccatccagccagcagaaaggggagacaatgaagggaaggcacgccccagaaggatgtgcctccgaggcctctcacatcactggaatgctctccccatagcctaggatttagtcacgagaccgcacaggggagctgagctctttgttctggttggccatgtgtccacatctattactacacaaaagtggggatggccatggagggagaaccagcaaattctttcatacgctcctatggccttgatccatccagtgggtacatttctgagcccctcgctttctcactgcctcttctgctgggagcatgactcccgggctgcagaaggacaggctggtgcattgagagtctttaggctttgcttgaattgcaaatgctctggttttctggcaagacggaagtaggtccctgggcagaagtgtcagaagacctggggttgcctctgaacgtcactgtttctgggtctgagaccttggactcagaaatgaaaaaaacctctgaacctcagtgaaatgggggaaaaaataaatgacttccatagagttattgggaggaccaaactgcattaccaaatacattctgaaaaggtgaaagttctccaaatgattgtgtgttttatcatctccaccaccaccatttttctttttcttttttttttgagacagagtcttgctctgttgcccaggctggagtgcagtagcgcgatctcggctcactgcaagctccacctcccgggttcaccccattctcctgcctcagcctcccgagtagctgggactacaggcacccgcctccacgcccggctaatttttgtatttttagtagagacggggtttcaccgtgttagccaggatggtctcgatctcctgacctcgtgatccacctgcctcggcctcccaaagtgctgggattacaggagtgagccaccgcgcacggcccatttttcttttttcttaatgcatgtatgtagctgaatttgtgtaagtacaatggatccatgatgagagtctatttattgaatttttttttttttttcagatggagtctcactctgtcacccagggtagagtgtagtggtgtgatcttggctcactgcaacttccgcctcctgggctcaagtggttctcctgactcccaagtagctgggattacaggcacccaccgccacgccaagctaattcttgtgtttttagtagagatggggtttcgccatgttggccaggccggtctcgaactcatgaccttaagtgatccgcccgcctcccaaagtgctgggattacaggcatgagccactgcgccttgcctaattatagaaattgtatttggagagaaaagtatactctttctctaagcatttctgacattacattctttcaaagcaatgcgaacaacttctgaaggtactggtctgggctccaagctcagatctgggtggcggaagattctatgaacaggtcctggccaggtttgggggaggtccatgagcaggtcttctcaccaggagcaatatccctaggaaaccaacccacagaatagaaattgaaagagcaaaaaggcttccttttctaagaaaggccatgatgtctccaggaatagcataaatatcccctgcagggcttatcccagaaaagaacattcagaggggcctctgagttgctctgcacccccagcagatgccctgctccaaatggtctcttgtgtctccagctctccacccaggctctacctggaaggctcttctctgacttgtcctcacgcagccccttcaactgagccacagtgacgtcccccataggcatcctggtgagtcctggtggggtatcgtagaggctcaatgacctttaaaatgagttcaggccaggcacggtggctcccacctataatcccagcactttgggaggcgaggcaggcggatcacctgaggtcaggagttcaagaccagcttgaccaacatggcatctctactgaaaatacagaagttagccgggtgtggtggtacatacctgtaatcccagctactcg

SEQ ID NO: 1888108 - DNA, 4001 bp, Homo sapiens
caggagtttgagaccagcctggccaacattgtgaaaccccgtctccaccaaaaacacaaaacaattagccgggcctggtagtacatgcctgtgatccctgcgactcgggaggctgaggcaggaggatcccttgaacccaggaggtggaagttgccctgagccgagatcgcgccactgcactccagcctggttgacagattgagactccttctcaaaaaataaaataaagtaaaattctctgattctgtgttcaacactccatcattcttcaacacaaaatgttcaatgatatcaccatatgtgtaggatgcccaaccttaccgccctccatccctcctttctgagcttcagttttccttgtttacaaagtgaggatcattaacactgtccttgcaaagcagccgtgggagtgggagacggtgtgtactcagcatctgcacagaaatgtggtccatcatggcaggcgtgtttgtctggaagtgctcaacacacaggcactgtcaggaaagagccgggtgttgagagaacaagacatcagcagggaagagcagggcaggcaaggaagagcctggtccttgtctgctcctggagacctgggctgctctggcctcccggcttctgcctgggcatctgatacccagatttggttgtttgcttccgggtaccgacaagtttacatgttgtttgtggaattccccatttctgcagctggccagaaactcccctttcctggtcttaaactcccccaagggctacagacaccagctgggggtagccaggcaagatctggtcttccctggactgatctaagccagatcaagtcccaacctgctcacactctagcgccccctctaggtcacactataggcattcccttcttagacaactaactgtccattggctccagcaagagcaagtctttggagacagaaccctcactcctctccccaaaacacatggtctcctgaaccacacccaaggtttatgtgtctcctgcattctaatttgcttctcaccaatggttcagttttaattcagtccaatccacaaaacatccattgaagccgggcatggtggctcacacctgtaatcccagcactttgggaggccgagacaggtggatcacttgaggccaggagtttaagaccagcctggccaacatggtcaaaccccatctctactaaaaacacaaaaattagcagggcgtagtggcgggtgcctgtaatcccagctattcgggaggctgcagtgggagaatcgcttgaacccgggagacagaggttgcagtgagctgagatagctacactgcactccagcctgggtgacagaacaagactccacctcaaaaaataaaataaaataaaataaaataaattgaacaacataactgtgacaggcttacccgttgcttggagaaagagatgggaggccagcagtggtgggcctgaagctgccagtgcttagtggatcagggttgggcttagggtgtgaggccagagagctcagttcatttctttgcacacagtaggggctctgtaaacacccgtgaaattaaatcaaattaggagtttaagtgacacaagctagcatgtgcaccaactatttccggaaggcgatgagagaccggagagtgagatggctttcggggtgggtgttggggggctgggtagctggggtcggggtgggaggaagacctacttctcattttatgcccttttgtaccttttgaaatgttttactttcaccacatgcacacagagcagaatcaatcaaacaaacaatcacaattaaataaacaatgcagggagccaggctgtctcagagctccatggcttcatgcctgctcttcctgctggtgagatactgtttcccagctttctccaactggggaagtacacgtcctccaagaagtacacaaatgtcctgtcttctggggcctgttcctgcctccctgtgatggttcttctctgcttacccacctcatccacacacgagtggtccaatctccaaccctgtctgtcctgctctgtggcctggaggcacctgtgccttctgacatcacaatacattcagccaaggggaggaatcggcagagataaaagggcaggatgagggagaactgggcatgtttatgccacccccagctccctccctgttttgccttaattttggcagtggctgaatttctccatggtcttaactcctgtcttagcctcacttatatggctccagctatctctgggtcaagtaacaccattctctctctcacctctttggccttggggtgctaacagctccccactgttgccagtccctgcatgcctcacctctgcaaacacttccttcattaagtttgcttcagttaagccagtggttcacaatctggggtgactttgcccccaggggacattcggtgatgtctggagacactttaggttgtcatgactggtagagaagatgctactggcagaggcaacagatagtgctaaccatcctactccgcacaggacatcccccacaacagaattagccagccccaaatatcaatagcacggagactttgggtctcccactgctccctgcctgaagcccgacagttcatggctgggattctggactcctgctggcctctctgctttgtggtgtgatctgccagtttccacacctgctgttgatctcctcttagtgacacagagatgaaaagaccccatccttgccctcaagctggccatagtgcagtggagagagaccctggtgagcggggttccccagcagcctcgagtccttgagggcaaagtctctttgtcagtcaccacgtagccccagtagtaggagagcagcagacatttgccaattgaaacaaaaggtcctttaaaaatatcttaaaacaaggccaggctcagtggctcacgcctgtaatcccagcattttgggaggccaaggtgggtggatcacctgaggtcaggagtttgaaaccagactggccaacatggtgaaaccctgtctctactaaaaataccaaaaaaaaaaaaaattatctgggcatggtggtgagcgcctgtaatcccaagccactactcgggaggctgaggcagggagaactgcttgaatctgggaggtggaggttgcagtgggctgagattgcgccactgcactccaacctgggtgacagagcaagactctgtcccccccaccccccccaaaaaaaagtcttaaaacagacagaaggttaggctcaatggctaaacaagacccaggaaaccctggtgagtttccctgtaacaaaagttccaaggaaaccacaatcaggcaaagatgtaccaaatgaatgaattctagtcccaggggtatgggtgggtgagtgggacagaagacaactatgagcatcccgtctctaaaatggttataatggtagaacccacctcctaagattgaatgagattaaatttaatgaaaatcacttacagtgttacctagggcatagtgagcaccagataaacagtatccaccagctacctggaggaaatgatggggcagcagcttcaagacgggtctagggaagagctctgccgctaatattggactggtttgcacccctgggcctcactttcccaatctgtaacgtgaggaaaatataagcaagattagtgttttgcagaaattatatcatagggatgcttgagaggggttctacaatacgtagtgcaaatatcattttcaacatcaaacctgtaatttaatacaagtaaaaggtcagtctgttaaactggagggaaatattaccatcaggcagggctagggtgaccaactcatcctcttttgcccaggacttgtctagttttagctctgaaagtcctgtgtcctgaaactctccctcagtctcagcggattaggatggctggtgaccccagcaggtcaaatgatcagcttgcccatactaattttaaagataataaatagctagctgcccgacacagtggctcacgcctgtaatcccagca

SEQ ID NO: 1888109 - DNA, 4001 bp, Homo sapiens
gccattatcaatttggggtgtgtgacactgacacacagcagtaatcctaagtgaggaaaaggatttgaatggggcagactgtattcactacagggcccagaagacgcggggacggccccaactactgcccttcaggtccgggccagacccgcaatgggcaggatgggtagggtacagggcgtgcgtccccacctacactagcctggttgcaggcggcctccaagggcacagcgggaagctccgcccttgccatgcccccgccaccggggaaggcaagacaaatgtgcgtggcaccctcctccttcggttctgggacacatctccaccaagcggccgttcggcaggtagggccagatggtcccggctcgtccctgcgggtggggtttcccaccggcggaaagcgcaagcccctcccgttctgtccagcgcgctgcccgctgccttaattataaggcagatgaaggtgaaaagtttactggtttttatttttgcaactttttgtaaattttaaattattctaaaaagtttaagaaatgaattgtgctgaggagtataatcagcacgcagtgcgagttcttatagtggccacgtccacaaaccctgtgttgtggaagaacagaaggcgttctgctttctgtgtttcaccgtctctccctcgctttaacttccaggtcccggagtagtggtgacagcaaggtctgttggtttctttggtttaggtttgatgaaaggccactccagtggggtaggaggtgggcagggagaacaggggctagggtgggaggggcaggagttgggtcctgggggtggaggagatgacggggagagtggcttggagaaatctgcaagaagagacattggaaggccgggggaggtgaaatggacactgggtgaagctgaggagtcctagtgaaccatgttacctctgatccagatattcccagaacaacaagaaatcaagcttctgaatgtggtctgttgcaagcttggaaggtgcacacctgttgctgctaatttggacaatttgggggaagagcagagatttagatgttgctttggtcgaccttaaacaccagccctgtctcccctaccactttgccaaattagggccccgtctctctaaagagcaaacagaaaactgcagaaagttgctttgtcctgtagacaagaggctgggactaggtaagaggagggagccaggatgcaaaacttaagaccagcctggccaacaaggcgaaaccccgtttctactaaaaatagaaaaattagctgggcgtggtggcaggcgcctgtaatcccagctactcaggaagctgaggcaggacaatcgcttgaacccaggaggcggaggttgtagtcagccaagatcgcgccactgcattccagtctgggcgacagagcgagactccgtaacaaaaaacaaacaaacaaacaaaaaatcttaaacatcaccaacgagccttgtgagaaatggtttaacgttgtgataccttgcccaattttaaggcaggtaaaggtgtgtgttaaaactcaactcttgaactgaaccccagctgccctttagggcatgcttaatttgatgtggactgtaacctcttttgcagcattgtagagatttggaatctgcacattaggaagagaccccacgaggcggtggcgttctttctcgttcggagctcacacccctcctggggagccctctcccaacccgggctcccggtaagcgcggtcgccgctcctctgagggctgctcttccctcgcttctgagccgaggcccccgcgacacgaacgccacgcccgaagcgctcttgccaggacgtactgaccgagggtaggctgcccagccgggtggtaacgttgaggaaaggacagcagcttcgcaaaggagctgggtaaaaccacgcccagaccccgctggccaccagcccgagaccaagacgcaggcggtggcgccggtttctcactcaaccgcaggttccagcatccccgatacggccgacgtcattaccctgcgaccgctcaggacacttctgaggactcttttgacagctagtaatcgcgcggtggcgcgaccacgtgactccggcgccctagccccgccctccgtctccaaggagccctggaaggagctataccagcggctccagaaggcggggagaggcggggccggactccgggacagccaatgggcgaggagtgccgcccagcctgacccaccggccgctccctcacgagcctgtgggcgtgcgccggctgtgcaggtgaggggcagcgagggcgcctagtgggcagggcgccggcgttgcgcgtgcgtcagtgttcttccttgtgcagtttagaatttgatacatttctttccagtctatttctatagatttgttttcaaatcacatcagaccctatgtaaaatagtgtaccgtctttactcattataacatggtgagcatttccccaagctattacacatatttttaaacattgttttaatgaccggcataataatccagtgcttggatatatcaaattcttcggccatctccttataggtgagattgtttccaaagtttcactaatgtaagtgcactgcagtgaacgcccttacgtaacaattgttcactcccgtgtacttttctcgtgcagagttctacagcatgaaacactatatttaactttgtcaggttgatgtttatcagtggtttattattgtttttatagtattccattgtcagtgaagtatgccattcacactgtcaagtgaattgtctatttgtattatttaaaaaaaagatcacaaacatagaaaggagagctttatttctttaaacggtgataacctgcaaggtggcccttctgacaggctgggaagcatagcttctggcagaagctcaaaaggcaggcagctggagggaagggggcctaagacaggaatttaagctgaaggacttagccaagtacacatatgaacaggccacaggaagagctatgaatattcatgaaacgggtcctgacccatgcttactggacaaacgtgcatgttacaggtgacctatgtttactttggggtggactcttagcatttacaggtattcatgtattacatttagaccctataagttgaaagatcttttcaggacaccgatgcacttgtgtgcagcctctgtaaaccgccagaatcagcccctgttcggttgtttcccatcaggaaaaagttactgcagtcagtctctggtccaatcaaagcagtaattatttgtggaagtggtggggctggggcagggggcgtgtcagtcagcatgtggaggtggatgaaaagcacattgtttgaatattgcttatctagaggccagtgcttgtttggctgccagagaataaaaaccttgtggcagttaaggcatagtttcttcttgaagtgtagaggtgcatgacaacccttgccaggcatggcccttcattctttatcatttagtattgccacaaagagtctgtgagtcttatgacctctatttttaaagctattaagacactcaactaaagcaatcctttcagtattgaatggataagctagcattatgttatgctagctaacataatcggagacggagtctcattctattgcccaggctggagtgcaatggcatgatcgaagctcactgcaacctccatctcctgggttcaagtgattctcctgcctcagcctcctgagcatctgggattacaagtgcctgtcaccactcccggctaatttggttttgtttttttgagacagagttttcctctgttgcccaggctggaatgcagtggtgcaatctccgctcactgcaacctctgcctcccatgttcaagcgattctcctgcctcagtctcctgaatagctgggattaaaggcatgtaccacctcgcccagctaatttttgtattattagcagggaaagggtttcaccatgttgtccaggctggtcttgaactcctgacctcaggtgatccgcccacttcagcctcc

SEQ ID NO: 1888110 - DNA, 4001 bp, Homo sapiens
ttcctttcaagagaaagaattctagaatacattccattaccaatatacatccctatgtgaagatgatcaaaaatatgtgcattgaaaaaaagaaaaggaggaaaaaagattgtaagatgtcccaaacagaacagattgctctattgtagctgatgttttcctctttccctataatcaagcatcaaaggccctaacagacaatggctaagttgtcccagatggcggcacacacatatgggaaaagaagaccagtgcatgactgtgctgatggggttaggatgcatttcctaaatgtccatccaggaggacaaggcagacctggccagaccaaggctacagacacatcgaaagaattggaaacctgacagtgcaccaacccagcaagcctatttgggtgccagtcatacaagcagcatgcataggttgcctctcgtctgtaacagcatctcgtactcattagcccactggagcctcgtgcttccagggcaaatgtgaaataaattaaaccgacagggtcctgctttgcaagaatttatgttgtctttttttttttcatggccatattgggccccgaaaagggcctcctgctccaaccctagccccagcttgcatcctggccaggtaatctaacatttatgaaatgcctcattctccacatttagctggagagacaaatccttgaagacattagggatatgttttgcttaaaagcaaattctaatatataagatataagcatggggtaacttttattctacaaaataattctgaactttatagaagaatttctcagacaattttgtctcatgtgagctttttaagtaagagacaatttacaaaatcattcatactcaactttttttctgagaattcatctattgtgtaaagttaagtacaaccacattgttagagtcatcataattagattggttagttcatacaataaaagccactagtaacattgtgtcttatggttgacaaagcactttcataactatgatctttcataactatgacctttcataactacgaccctacaacaacctccagtgaggtagtaattactattctctctgacacactaatgaagaaaactgaagctcagagaggttgagtaactttttaagaatacacagctcgtggatgatagaaatggggctggaatccatttcttctcacttaaccatactttcctctcatttcaactcttgtggtatagaaccaggataaccgtatgtcccaattttcctggtatcacccgtttaagactttttcccagaataaatttattaagaatgtcttcttttattctcgaaattgaccctgtttgtatgataaatgacagaacagtgttttatgttccatatttttcaggctgtaagatttcttgtgatgccacatagggatggggaacagggcaagaggtgtaaagaccaagtaggctaaagaatccctaattgcatttcaactgcagtactcataccattatctgtttttatgtctttgttctgtttttaaacaaaacggaaaacggatactactcttttaaaaggtttaaagccttttatctataaaaatagttgcagaagtaagactatggaatacacatcattagtaaaatctaaccactacacgtggaaaataatggattctaataccaacactgagagacttatacattcaacaaaacctaacaaagcataggctatcatatcatttaagactggtggttgctattaactgaaaatccaattcactgatttaattaaaaagtaaagagaaaaaataatgacagtattgactcacataactaaaaagtctgggactagatccagatgctccaagctgtcattagaagttggtttctccatctttaacgtctgccttacactctaatggatccattctcaagatttctactgctccctgggagtgcagggtttatatagtgccagtaatctcagcaaaatgctttgtatctgcctgatgcgccttactctctccattcaaagcaatcaggacagccaagtgaaagcaatgctcagattggtccacaggaattgccaatcacattctgtacctagaggtgggatctgcccaaagtatgtgtcaggagagtagaggaagacagattaccccaagaatgaaagaggggaaatcattacaaaccatgtagatactaaaagggggaaaatgtatgctatactatactatcacatactacagataactccaggctggtaaactagataacttagataaaacagggtgatgctgcattttggagttgaagattccatcctttcttttgcacccatatcctagattcttggggtaatctgtcttcctctgctctccttataagtgagaacacgtggtagtatttggctttctgtttctgagttatttgatttaagataatggtctctagttccacccatgttgctgcaaaagacatgatttcactctttttttatggctgagtagcattccatggaatatagttatatactaccacatgttctcacttataaatagggccttaaaaaggtgtacacatggacatagagtgtggaataataaaggctgaatacttggaagggaggaagagtaggaagagggtgagggatgagaaattacttaaggtgtacaaatgacattgtttgggtggtggttacattaaaagctcaggttttaccactatgcaaagtatccatgtaacaaaactgtgcttgtactccctaaatttacacaaatagaaaaaaggaaaaaagaactcaaaaggagaaaaatagtctactctatttatgtggctatttctgttgatcttcttttatttttgaagttccaagttccatttcttatcatttcccttctgtctgaagaatttttttaagcaattcttttagcacaggtctgatggcaataaactctcttagttttccctcatttgactatatctttgttaatccttcattcctgaaggaattttttgttgaatataaaatcctggtttgataagacttttctttcagcatttgaaaacttgtgtcacttccttctggtcttcatggtttctcaaataacccagtacttaatcattttcccctggatgttttccaggtttttctttgtcttttatatttagaactttaattacaatgtatctaggcattgatttatttgggtttattatgcgttgggtttgcttagcttcttcaatctttacatttttctctttaccaatgcgaaaagttttcactcattgtttcttcaaatacttttctacaccagactctttctcctgtctttttttactctgatgacatgaatattagacttttcattattgtcccacagcccatgaggctctcttttttttcttctctaaaattttctgtgttgttcagattagataattttttttttgtctatcttcaattttactgacttttgtctttcttctccttactgctattaagcccttttattgagtttaggtcttcttatagcttctatttgtttgctgagactttctatttttccccttatttcaatagtgttcacaattgcttcttggggcatttttatagtagctgctttaaaacctttgtcagtcagttccagcatctgtgtgttgtcatctgttgactgtctacccttgcaagcacagattttcctcattcttcatatgatgagtaattttgaagtgaatcttagacattttatttcttgtgttacaaaactcaggatcttgctttaattccatacagaatgttaatatttttgttttagtggcaaattgacctgataaaattaggcaactgttccaattcaccacctgagagctgtggttctgtcaattcacttttcaaagcttttgcagtgcaattcaatggagaaatgatagtttttcaacaaatggagctgcaacaactgtaatttcacatacaacaaaatctagacacaaagtttacaactttcacaaaattgattcaaaa

SEQ ID NO: 1888111 - DNA, 4001 bp, Homo sapiens
cggggttgagggaaaataaataaacacataaacatcaaaaccaaaaacatcggggaaagagaaggactatgaagaaacaggcaggatgagagagcagagagtgcgggaggctgtggaaacaaggtgctcaaggaagtcttttgctcaggaagtcttcccaaagaagtgacatctgagtagagatctgaaggcagcagcaaagagccttgcaaatatctggggtacgggggcatttcagttaaggaggacagccagggtaaagggaaggagagggtggagaggaggtgcgacccagggagacagatcacataggatgttggaaatcacctttgatcgttagcatgatggttgttactaagaaccagggaagtggcgtggctggatttatattttgaaaggatcatgctgctgctgtgtagaggacaggctaaaagggacagtcgtggaaaaaggaaccccacttaggaggctgttgcagccatacacagcagagatgtgaggagcggtgaaggaggctcaaagtcatcagactcaggatgtgttttgtagggagagccaacaagatttgctgattgcaaatctgatgatcagatgtggaatatgaaagaaaaaggagttgatgatggcccaggtgtttgccctgggccaaatggtggtaccacttactcaaatgtggaagaccaagggtagattagatttaggaagaagcagaatttctgctttaaatatgttaagtccctggaaagattctgcaggcagtgttgttatttgctttgcttcggccagcaggtgtggctctgtttttttccagcagcaactgatggtggcccagccgtagctgtagactgaatgctgattggaattgtgtcaattggctttaacaaaacagggggtaagagagttgagggtattagaaagagacccagtgaaatgacagaccaaatgtaaaactccagtcctggaaccaattttaattagtttgaactgatcagaagtgacagaagcctaacccaaactaatttgagcaaaagaggaggaaccaatggctcaagtaacagaaagcacacccaagtagctcatagaagagaagaaagagcttcaaggcataataaagtggccacatgaccttgaactggggatgaaagacagctgtgtaaccccatgtgccccatgtatgggagtgggatggtagcagatctaagacaaaagggagtagctgggactacagtgaaatggagagggaatacccaatccaacgcattgaaattgcacaaacacagagtttgcagaaataaaatgtgcctaacactttgcattctctgagagagatccaggctttgaacgttctggcaaaatcggtgttaaacaatcaccgctagaatcatgggaagtgagaagacttttgtacctaccagtctcaagctgaacagtatgaaacagggcagtgaacgacccccttttttaatattaaatacataacacaagattagatgtcctggctgccaccttagtagagcaacaactctgcctgcgtgttgatggcttgattgtcctacacaaataaggagtctcaacaaacagcccagccagtcattataaagaatacagccttctgtaactctaccattaagtttggcagaccactaattagacaggcaattctcaagaactgaaccagcagcctaactcactctgcaccttggagttacccttgagctcacccccaacaggacctagtaagttaaggtgactcaaactagaggtgcttcactcctacatttgtttgcaggaggggcagacactccaggcagctcccaagaaataggatataacatattactcacctgtcatacagcagcaaaggcagcaagagacagcgcctgccaaataccccaggcccttggaggacacagttctgaggtttgcacaaagccacagctaaataccttcacctgaagtccctgatgcccacagcacgagaaaccatgcaaccaattctccatagaacctggtgcaggaaagaactttcctctcctgtgaacttctaccaggcaatgggaattttataggaatcattggcatgggtgttggcctgagcgtgccacatttgccacttctgatagagccctttgggtttcaatctatgccaagtctattgtgaaacttcatcacagcatgaaacatatcctgtgttccttgtacgtcatacctcctcacttctgaatggctcttgctcttccttgctcatctgtagtgagtgagtttggtttttggaactgtcaatcataaatggtatccacattatgcaattattgatgtggaggcagcacactgcaggaggtgccccctctggcgcctgtccctgcctgtgtgtccaaaggctccccctcggcttcctccccgggttgctcccttccccacgaggtcatgtcctctccaagccgagtagccttgcatggcctccccgaggtccttccgagaacctccatttcctctgctgtggaacaatcccaacccctctttcgtggttgcagatgcagagaggataaggggatacaggcaatggagctggtaaacagtgacatcctatattaatttgaggtcactgcttatcaccaggcagccagtggggcctaagagggcccctcctccctttatctgctctcagatgtgtcatctctgctgcaaggaggaaattagctgggccaatatgaccatgttttggaatgggagaatggagggaggcattctcagactcttgaaactttcttccatgtataacttgatgcatttttaccaacgtgtatgcccatgcaaccgccacccagatcaagatgtggaacacttccgttaccccaggaagtgcccccatcccactcctgcccagccgccacccccagcccctcatttccaacacagtagattagttttgcaagttcttgaacgttacataaaagaaatcatatagtacatagccttttgtccggcttctttaactcaacataatgttttgagggtttttgttgtgttgttgttgttgctgttgctgttttgagatggaatcttgctctgttgctcaggctggagtgcagtggcatgatcacagctcactgcggactcaaccttctgggttcaagcatttctcccacctcagcctccccagtagctgagactataggcacgcaccaccatgcccagctaatttctgtattttttgtggagacggggtttcgccttgttgcccaggctggtcttgaactcctgagctcaagcaatccacctgccttggcctctcaaagtgctgggggtacatgagccatcataccctgccaacataacatttttgaggttaatccatgttgttgcaaatatccattccttttatttattgctatatagtattccattgtgtgagtgcactggaattcattctactgttgatggacatctgggcagcttccagttttttagctgttagggtccatgttactgtggacacattggtatatatgtttggtgagcacctgcacgcctttctcttgggtgtatacccaggggtgggaacgctggcaagcacatggccagttttagctgactccgccacagtcccccagtgtggtcgtaccacacccactctctccagcaatggccttaagcttttttggtggcaccagcctcttcttttcatcatacaatagaacgagcctacaccacgcagtcagacagacttcagctcatgtctcggcacctctgagcaaccctgggcaagttacttaacttctctgaggtttcacttgcccacaggaataaataaagcctgagttggcatcactgtcaaatcagtatcacattcacatggcatagtgccaggcaattggcactaagtgaatattctctccctccctcttacccacccatgaagctccctgaagtgcagtcaccaagtaaacatttccagacctttcaccccaccatggagtcctttaaaattcctctgccta

SEQ ID NO: 1888112 - DNA, 4001 bp, Homo sapiens
ctgccactattaaaactaagaggaaagttttgaaaaaattaaaaccaccctctctaccctcttcgaatagaacatcaatttatgtaaattgttttttataagtagcctccgagtcacttaaaacattttacttaatccacatgggtgaagcctcaaggtttccagtttttgtgcttctgctggaaggaagcttctcagtgttgtgtggttttcaaaaggtgcttgcacagctttccaagaggaattgtccacagcaagcaatccagagctggagacctcagtcattgcagcaggaggcttatctgacaggcttatctgtacttttatcagcaagataggcgatcttgggagcccgtgtctcaaagcagcacaaccctctctctaccatttgctgacatgtgtttcttgaccatgaaggcaaaaaacactgcctaggttctgctttcaggggaaatacacgtgaccagaaggaggagttgaaggtccttctctttagggatgtacaggaaaggcagcaaatccttgtcctttgcaggaatatgcatgaggctcttgctgtgccctctaatctgaatgccactcccttttattctggacacagagagcttggtagtgatcatggctctgcctcttactagctatatggctttcagcacactagttaacctttctaggccacatttttcaaatctgtagggtgggaataaataaattaatttgactaatatctgagttgctactctatgcaggatttggacttttgcagtacaggaatagttacagaggtacaaaagagaggttgttcaggaagcctctagtctaggactgtaataaaatattcttccttaggttactgattatgacgggatatttctcctaaggttactgagggtgatgggccattccccttacggttactgacaatggtggagtattcttcctaaggttattaaacacttctcataagattattgagggtgtgaagggacaatgtctacctacaaaattagttgtggagacttggagaaatgcaggtcaagctgtcggcagtgctgtcccagattaggcagcgagcaagtgtgaacactgcccacctcagcctaatttcagtttctcagggaagtccccaactggttcaaattcttctactctgtgctttcagaaatcctggtacctcttcttgagggtcttattacatttgcaattttatattaacgtgggtaattattcaatttatttctgattctcccactagatcttaagttccatcaggacagggctgctggctttttattattcttatttgtctctattttctcccaagggcagttgcccaatgaaggcctgagagatgtacatacttgtatttttaatgaataaatgagcatattgagcaatatgtgccccctttttctctctcaatttcatttcagaaagccagaacatgtatttctcttgcttatcccaggcaggatctaaatatgcaaatatgccacttttctacaagataactcactgtgagtcaattgcaggacagacacaatacaatggagcccgaatttctcaggtaagcatcggcattttctccgacctggaactgttgcttcatttgcattgttaactgtattatgaatatgttcaactccattcctggcacttgatgccttaataggctttcaaaggggttttgtgatggagaaattgtcctccaaattctcttggtggccccctgcatgctcttttataatgtctacctggcaggtgcactggccatacaatgaattcagcaataattacctttgaaatccaaaaccacatactgtttcaggacccaggagggatttagctgaatgcccatattagcttgaagctcagattgaagaaaaaagaaacaccttcttttcacattttaacagcatttgtgaaaatccatgggcattctctgtgtgccgtgacagggcacagctccgccttgctacccctgccttccatacttcttttctttgggttattttgtcttctctagaatcttctcgcattccattttcattgtgactccaaacagcattttcattttggatttatggcagcccaagttcgtgtcagagaataaaatcaaattaacagggtcaaacattcaggacgaccaagcccaggcatgaatgtgaaattgttaacacaagggcaacctctaaaggtttatggaaacataagaaagacaaatgcagatgaggacaggctacgggactggctgaccaaaccacaagttacctgaagggcaatgctgggcacagagtaggcacttagagttgtgtttgaatgattctgtagggcgataaatcatcctgtttttctcaagacatgaattcctgtgctaaaactgggaaaatctcaagaaaactaggacaggttagtcaccttagattagcatacactgactttgggttttctgatagcccagactcatcctgctttcaccctgtgataaccatggtctcaggcaagattacatccacttcccttctattcttcccagccatatgagttcaaagcacatgtccatattgtggacatattgtggacagtgcacttggagatggaaaggatgggtgagggaagaaagaattgatgcgttttgatatatccaacatattttttcttcccttttattctcttttcaggcaaagaaatgtggatatggacatctaagagcttttagaatataatttcaaaggcaggactgattctgtgaaaagccatcaaatgtactgtctgacagctgttcctgcccagcaaatgaacaggatacctacgacacggtgactaccatgtcatcagggccatgagatgtacagagttgaccaggaagcaacagaaatgtaactcaaaacctcaaaacagaaaaccacgtagcctatgacagtggtcgctggagtatatattttactcttgcggattagaaaaaaatctcaagccgtcaaagatagaaaagaaaaactggggaaaacaaagaattgaaatcaacatataagagacaagactacaattgctacatttatagtattagaaggaaaaaaaaaacacttcaaggtgagggaaaaaaaactggatcagagttcagaaatccctccagggcatgagcaaaatgaagtgagagactcctaggtaggaagataataccatgcctgaagttagcaaagttctagacgtgatataacagagatatcatgcagttgaaaaacaattcctggggtcacgtcatacagatggttgccccacaccgctccaggaattcaaaccaagacggcattctgggggaggctggacaaggaacaaatggctctgttgtaaaagttaaatgagattccatgcctgccactccaatggctcagggcacacctctaactatttttttttttttatttgaggtggagtctcagtctgtcacccaggctggagtccagtggtgtgatctcagctcactgcaagctctgcctctcgggttcacgccattctcctgcctcagcctcccgagtagctgggactacaggcgcccaccaccacgcccggctaattttttgtatttttagtagagatggggtttcaccgtgttagccaggatggtctcgatctcctgatctcgtgatccgcccgcctcagcctcccaaagtgctgggattacaggggtgagccaccgtgcctgccccaatttgtttatttttaattggtcctcagcagcatcaccataggaataggaaaaactaaagtggacctgcgtcaggacaccatcatccacaaaaacccagccttgttccctcaggctgcaacgggcagtaggttgggggactactttaacaagggaaaacgatggcaacaacggacaggcaaaatctcccatgctttctgaggaaatagacgtaaaaaaaacatggaagaaaatattcattaaatttttgtgtcttagcaattgcagatataaattaaggtgcatttaaaatgcc

SEQ ID NO: 1888113 - DNA, 4001 bp, Homo sapiens
cattctccatgactcatgctttctgggctctgagatgctccaattcatttcagggtatttaatttctaagagtattcaaggttttgttgaagatctaaacagtgcttagaaatttttaccctggtttaccttgatgaaaatgaacctgggaggactgaggtgcaagcatacaataatcacacacacacaaaagacaaatactaagctcatccatgtggcccagacaggaaaaatgtcataaatataaaatcatggattataatgtggttacatatagttacttattttattgtccttgtttttttaagaggtgatatgtgaatatggtaaatattttaaacagattaaaattattttctaattagagataattctctctccttctctctcatgtcacccagttttccatttaccctccaaaaagatagcaacataatgaatttcttctagactcttccagaaatatgtgttgtccatttaaacatatattttccatcctctaacatatacttttatacatggatatagtatgtggacagtattatgcattttgatttttagttaataataaatcttttgaggtacccacttcaataataataataacaacagcagcaaacaaacccatatagagtatgtgtctaaacctggcacttttctaaattattttcagataatccctacaacttctgggagaggtgcaagtatcaaccagttggagacacagggaaagggtgatataatgcagaaagtgacttgaacaaatttacacagaaggcagtgaagtgtgattcaaattcaagcagtctagactgtgccccacacaactctgcagcataaccttgcagtatgaaaataatgcctctcatgcaggtatgccttattctttttaagagctgcataatattcctttgcatggatgtatcattgatttattttgttcactgttagtgatgtcttagactttttcctacagtttgccattgtgagcaatgtttcaatttttgaatatttcaccacgcttttgaacccatactaaccgcacatatttgtaaaatcaattaatcaatttatagtagtagatttataggctttttaaacaccaaaagctaattttcttcttactagtagggagatatggatgggacttactgaaacaagtcatataatgcatctctattcttgcagccaaatgaaaatggccccatcaaagtgcaagtgctcactaaatattcgttaaatgaaagaattaaatagaaaaagctaccatttaaaaacattatcacaatgctaaaaatatgttgatttataagatctcattaagttcatgcaattaaagcaaccattatcctcattttacagatcagggatatgagatccagtgacttacccaaagtttcaaaggaaagatgtaacagagccatctctgaacttctgctcttgggaatctacacactctttccactagttctgaccttagcaggtgtttgacccaggacttgcccaacttggtttccatttgtatagaactaatgccaaatttcaaaagaaaatattacataccataatcaataaaaacaaaatatcaaacatgtattatgtgggaaagactgagataaatacttggcattgcattacctcaatactgttggcaaccttcctacgagcctcatgcaattactgctaccactttgcagatgagaaaaagaaaactgatgctaagcaaagtttagtaacttgcccaatatcacaagaagtagtgagtgacagaggaagacttagctcacatctgagtgtctccaaatcccaaatcccaaagcctcatgctctacctttttactggaagttaaaataaatattatgacagatacctttttaaaaccttaaagatgatatgtattggtcgtactgattcctgaatgcatctgtatttcctaaggcttttctgtcctttattttcaagagtcttccatatacctcttagggaatctgtctcagctagtattataatgagaactatcatatagcaaatatttagctgcttaataaataactacatattttttaaaaaatgacaaactcacgagaattggcctttacttaataatcacaaacaccaagcttatgaatatttcatgctcactgctttctgctgagagcgtgagcatcctgcatttctatagctccagattatgcagggagcaatggaaaccatatgttttgtgtgttttctttaacaatttgatgatggaagaacacctggcagtgttggagataatgtaagaaatggtcgccttttgttatttgagtgcttgaaataaaaatctcaaatggcaagttgtaatccaaaccacagtaattatagaagacagtacaaaaaggtatacattttaaattcatacatctaaatgagtctatctgcaagtaagtaaactgtattcaattttccacagcaactaccccatcaacactatcacccaaaacactgatgacatggtactgctcaaatgttggaaactttcagttttgagttcaattgtttctttctttgttctttcctttcttccttcaatcaatgaatgttagagttgtttttaagtgatctcaggaagtacacagttcaatgaatatgaggagtaagaaacctaaatgaaggataggaagacagagaagtcttcctctaagacggaatgtttaaatctggatgaggggattggtaagagtttaccaggcagaagggtagaactcagaggaggttacaggcatgggaataactcacagaaagaagcaggtactttctagacatcggagggaagccagagtggcaattgcgtagtgacaaggggagtggcaacatgaggctggcagaagcagataatgcagagccttgtaaagcttgataaagagtttgaacattcgctcaagaacagtcagaagccattgaagggtgtgaagctagtgagagacagaatctgactcaggattgtcaagattattctggatgaggggagacaggaagaggaagggagagaggtaacttaggacataagtgtagtaattcagataaaatattatgttggcctggagacctggtccggaagagtgacagtgagctggaaagaggtgggtggactggagagatattacaaaaatgaaatatacagacaagagtgattgatcaggtgttggcagtgaaagaggaagatgtcaagactgacttagagatgcatgacttgacaagctgcagacatggagatccgttttgaactttatgacattatttcaaaattctctattttctctcctgggaatatttagcaaaaagaaaaaagcctgtagaccattttcaaattgtgcttaatcaagccaagacttgtgcccacctcttcagggtgaggaacgccctctgtgttcattttactgctctattttcagtgcctggtgtagcatagggagggatagagtaggtgtccaatcatgagtctatactaggagatgagatgtgttcctagctgggttataagaatcttgaggaggaaggcttccctgtctttatcctccatttttttctgtccttctttatttccttctaaactttttcctaagttactcatttgtgagttattttacagagttaaacaaattgatactaaagtccatatgggaaaacaaatattatgaataaccagaaaaaaaaaataatagaaaagaaaggtgttctttcttttctgaaagacagtagccctagagcagggctctaggcggagtagccctagaagacattaaaacacactataaagtcactatacttaaatcaacatggttcgggtacatgaataaactaatagaccagtgggatagaagggaagacccacagatagtcccaagtatccatgaaaatttattatataataaaggtagcatctcaaagcattgaggtaaagaagaaaattttaataaatggtgttggggcaactgggtagccacttggaaaaaagtaa

SEQ ID NO: 1888114 - DNA, 4001 bp, Homo sapiens
tttcctaaatggatttttttttttactgttgagttttaataattctttatattattctaggtattaaatcctttgtagcataagtggtttgaaaatattttctcctagtacatagcttgtcttttcatcctcttcacaaggcctttcgcagagcaaaagtttcaaattttattgaggtccagttgatcaatttttccttttgcgcattgtgttttctgtgtcaagtctaagaactcttcttctagccctgggtcctgaagattttctcctaagtatttttttaaaaagttttatagttttacgtgttacattatgagtccaaaatccatttttgagttaatttttgtatcatgtgtgacagggtgtgattaattttttgtctatgtatgcccaattttttttctgacactatttgttgaaaaggctattgaatattaaagttctagaagcacaggcttaaattacaaaggcatttttttttttactcacttaacaagacgtccagaaaaggcaactccaatttggcttactctgtagctctaggaagtctctgtctgcatctctgggattctctggtcttcgccttggggtttccggtggttgttgtggctccagcatcaccagcctgtgtccagaacagaggaagggaaggagagctgggagatttttctcctgtgtggcttgggaaggctttcccggaagcctctagtagatgtctcttaggtcccattagctattaatagaactggatgacaggcctactcgcaaaccaatcacaagcaaaggggagaggattactgtgattggctttgaaccactgaccaatcactttgctctgcttagggctgaggcagggccaccttccttcagcacattgttttctactggaggggtgaacaaaagtgtggctctgttaccaaggaagaaaggaaagtggttgctcagtgtctgctgtgaacctggctgtccctatgtgtcctctctcctctgtgtatgtgtgtgtgtgtgtgtgtgtgtgtgtgtcttgcaaacatcagtgcacaacacaccacagtcccataattcagtggagtgtgtatctgctcggcagactccactgtccccacagtcagggtccaggcactagaaggtatgtggcaggaaggtagaggaagacccaagccacagacccccatccaacttcgagtgcaagcaatggaaaccgactctggattccttgatttaattttttgaagacatttataggaagaaatgggttaagtctgtaggaaaattaaatatgaagagccagattcacggggcttggggacatcagggcagctcctgggtcctctgtgtggccatcatggtgaatccactcatgtgtcactgttcaccattcaggtccccacaggaggacaggatggtcctgtcttggccacatgttaccccctggactcagggacagtgttgtcatttgactgaaagtccctcctcaccacaaggacagggatggggagtttctcagcggaagcccaaggatttgcttaggcctggagagcaaaccccacacgccctccacacatcacctgcacagacgcccctccagctgagccagcctgctcactacccctcagacagtcttccctcccatccttgcttgtgctgggacccctcctggaaggctcccctctcctgcctgctcttctaactttcatgatccttcaagactctagttaagccaccctcctcctccaacaagcaccagccattgctgctgctgtgtcgaggtttctgaacctcagcattattgacattttgggctgggcagtctctgttgtgggactgtcctgcacattgtacaggatgcttacagcatctctggcctctacccagtaaatgccagttacacctttacctagtcgtgacaaccaaaactgtgtccagacattagcaagtgttccccggaggggacaactgcccctggttgagagccactccttttctgaacctgagtcactaagatttactgccatagcaacttaattacattgtgatgtttacttaacttctcactgctgcttattactttggcagactgcagccagccagagaacagccaggttaacccatacggtggccccacactaagttgtctcccacaccgtgtagggatggctcagtgcacagggagcatggtggggtttgggcttgatggctttgaagcctctgctagactgggaggcacacagtttggtaccatgtctggatgcaacgtcatgttcctgaggcaggatggtgcttgtgtaccgaagacagtcttgctggctgcggtgaaggacagagctctcggtggatccagtgggaaccaaagcctgctgtaaccctccaatagtaacagccatccgctcaacctctgggcccaggcacgcctcacaggagctctctacgggcactgtctcatccataatgaattaggtatcagtgtctggtttttagagattcggaaactgaggccagagcattctaatgtcctaagcacattcatggtgagtaggagcagagctggcttccacctgcagggtctgagtctagggtcagtgctcatagccacgattctcgtaggctacccaggcccactgtctccttgagcacccatgtgccccatgcagcatgtaacttgtaggaaatgaaggcgtttgccagcctttgcctgtgtccagtgtgaactcatctcctatttagcacaaagttattacattagagttactgatttagtggatacatcactttactctgtcatcttgacagcgataagatctgcattttgctcacttctggatcacgcaatctagcagaattcttcatgcatggcaggaactcatcattatttgcctcatttaattgaattgtattatggttctgtggacacttcatcacacctaacagtgttttgcacaaagcaattgttaaaaaatacttttcaaagggctaaatgtttgatcaatcaataggtttttaattgagcatccttacaagttaatatcataaagtgatgataaaagtgtttttattactgtgtgttggttacccggattaaatgtttcttgaagcctcagagtgcatgatgattcagttcttctgattttaagctcggatctattcagtgacgagatatgcaggtctggaagcctctgaaatttataatgtggatgctgagaacccatgatgctggtggccaattttgaaaattgttacagaaatttatattcattagacatgatggcaagttctggaatggtattctgcagagtcaatttaaagaaatttgtttcaaggagataactgaggaagcagcaagcagagacactaacttggatgtgacaccgctgagagacaaaactcagcttgatgaatgcagccaagccaggaaagggctgtggacctgtcccagaggggccacctattttctgacaattggcaatgttatctattaactagaaatctgttatgggacaaggagaagattgcctgcagctctcggagaataagacagttgtcctcttggcttctatataatatgtctctaagcaatgttttaggatttatcagcggtgagatccttggatatttaaccaagtccccctgagggctataacatggtagtgatgggaaatagagctgggggcaggggaagaaaagctgggatgtagctgttacccctaagcacattctcctgaagtgatatctttgcaataatctgtttcaataatatgttgacatgggcagtattaagacaataatcagaagaatttagaggaagcattctgaaatatgcgagtgcagtgtaagtggccagaatgtgagactcccaggtgaagtcgagggtgaagagtctacatggaagtgtgctctctcaccgcccccctacaaatggcagaagactccatgcagactcacccccagtccaccgccagagttaggaccagcctctgactctgcgacttataagatgggagagt

SEQ ID NO: 1888115 - DNA, 4001 bp, Homo sapiens
tccttcctggaatcagggatcccatgtgggcctctcagacccagctctactgtgaagttgagagcttcaagtgggtcttctagggaggtcaagaggcagagggaatattggaaatggctctgccactagcatgctctgtgtccttgggtgaatgatttggcctctctgaaaaccagtttcttcccctgcgaatggtaggagttgcatcaggtgatttcttaggatcctacctgctctaagtgtttcttggtctctaaattctcataaacaggacttagcttaggttagtgctctccatcttggctgcatatttgagtcacctgagggacactaaagatactaaacccagatgttctgatctgatagatctggagtccgatgtgggcgtcagaaatctttaaaacttcccaggtgtcactaacatacagccagggttgaaagccaccgggctacgcctgattttacagaagaggaaactgggctcacatctctggtcagcaggtcagccacctgtggaatccagtgactcccgcttacaggtgtgggacctcacagccaccctctgcattccagcacatccctaggacctgggggacattgcacctttccattcttcagtaatcttctcctccatctctttccctctccaccccgcccctcgctctgatgagctaaatctttctcaagtagcttctgcctctgtcctgtgaaagtccctgccaggaggagtcgccacacctgtttacctccatgaactagaaggaaggagggaaatacaggcagagacatgcagaactcagggtctcccatgttactctgcctcccacccaaagcaccttgctccaggtttgtcacaggacaaggggaagctgctgtgaggacactgagggtgacggaaaagttgaaaaagaaggaggagagaaatagcacatctgtatttagacattatccctggatgcttctttgcatgttaggaaaggctcactacaatctagtcatgtttagccctttaagagccctgggatagtgagtccagagccagcactgggggcttttctcccagccccttttcaaagtcatgttgacctttgagcatctcctgccccaggagagcgctgcagccgctgcagacagcatgagatgcttctctatgtgggctcagcttcacccttctgtgctcctgaggatggaggacagaaagtggttcttcctccctggcaagcatttccagtctctgaagactctctggggaaagaacacgaagggggagaggcttcctaagtcccttcactgggggcttatccgtgaccgacgttcctggggagacatacatttcatcagtcactttccatctcactccactctccctcctcctctctgcaagcttacactgcagcccgatggaattacacacagtgccctgcatatgccaaggttcttccacctctagtcatgctgcttcctgtcctggaacccccttcccaactcgatcctgctgagcagcctgggatctgtgtacgggacgcccctcagagtcacccagacacaggggaagctggggtgtttatttcctgcctgtcagtcaccagtgcaggcctgctcctggggcactcaccccagcatctccaatgccaggcagctcagagagccactttcctgtccaagcaacccttagagaacattcccaggaggagcgaatgtccaccttgtgtggcatcgtcctggggcgctccttctgggggggaccccagtccctcctgcccttccagccagaatcctcctgtctcctgggtgaaaactggagcccgggttctagctctgctgtgtctctcagactctggtgagtgtcagaatcttctggaggccttgttaaaactccgatggcgaggcccaccctaaggttccaattcaggaggtctcagcagagcctgaaagctggctttcccagcagggccccggggtgctgatgctcctccccctagaacgacccctgagagccctggctctccactgggacctgctcacctggagacagtgaccacaggccacaggtcacccctcaccgcttcactccacgccctctcttgtgacctcatctcctctcacctccccctgggtcacatggctccagccacacccgcccccctgctgttcctcacccaggatcaccaaggtctctcctgccccggggcctgtgcacctgctgtgcctctgcttgggatgctcttcccagggctcgcccacctcctcagagaggcctcctgacccctgacacggccttgcccttcacctctatcgtcctttagaacagcccccacctcccgcacatcatgcagttgccggttcaatggctactgcttgtcctccagactcgaaagtaacctcgcagtgggtggtgggcagggggcgttgttttgttccctgccctgtcccagcacccagagcagtgcctggcaggggtgggtactcagtacacacctgttagcaagtgactctgatgcagggaccgttctctctgatctctaaatccaactttcttatgttgtagtaacaatgttgaatgttgttccatacatcatccattttcttttttgacttttagatcatagtgccttagagaacaactgggcaaaaaatggactttcagacacggcaggtgctcaggtccagcccccaccctgtggcccttcagggactgcactcatttatttttctctttctggctgtccgcgagccaacagctctctcctggctttaattttcatccatttaagttgaaaaaaaaaatcaaacaaatgaaatgcacttaagagaaagccttgaggagttagtgagccacctgaagtgaacggactcctttcaaggcgctatcaattgttgttatcaattatttattgggccatgtttgttcctggtgccaccaagacagagaggagacagggtccctgccctgaggcatcccaaagaagaagggagcatttgtgaaatgaaaaaatgtcccagatgataagacagttacccgtcacacctcaaggctgctctatgcttttattatatttttactcttaagaatgttcacttattttctgattttaaaaagtaattgaaaagtttataaaatattcctagaaatagagaaaaaataaaatctaactccagtgtttttaatgcacatataaaatctacttggtttataaaattaggatttattctaaatgtttaatttagttagtttggaagttttgttaatttactcatcagattctgccttgagttttcttcacattataccatgttcatttcttcaggccatcaagcagccttcaaaaacataaatttcattagttacaatgtatttcatatagatatacgataactgccttcaccaatcttctatttctggacaatacaatttttattttttttcttgttttgcttttggttattataatcaatattcctgtgaatatgcttagtttagaaagccttgactcgctgttattataatttcagtttataatcaggaagagggaaagcctaactctaaggttgaaactaaatcttaaagctagtgacacagcctctctgagctttgctgtcctcttctgtcctatggtaagaatgatactgaggtcctagggagctgtgaagcatatgctgtgagacaacacagctgagcagcccagccagagccccctggggaagccgtcagaggtcagccgctcccgtctgcttccctcttgactcctaataggctgggacagaactttgccctcccttcttcctgtccaaaagacgcacaatgataatgatgctgatggttatttagtaagaaacttcccaacaggaacagttgtcaggagggggcacagttggattctctccagcaaagatgtcagggtggatagaaatgtcagcgtgatccaaagaggacacaaacactcctgttattttgttgtcaccatagaaaggccagctgtaggtttgacgaatgtttagtg

SEQ ID NO: 1888116 - DNA, 4001 bp, Homo sapiens
tgcactaaattgctacccttgctataaatcactggtatttatatatatttttttttaataaagaaactagagaacttgaactttcactgtgttatcttagataaagccacaataaatcacacccttccttctcctgaagaggagtttctggtctttaaaagatgaagttccaaatggtggatcctcgtacctttgaccactggggatggatggtgtaagtgtgggagaaaaggagatgggagagagaggaaaatcattcaaaaagtcaaaatcttggaattttgcatttcacagtcatgtaaaataaaccaaacaggcaaaaagcaatgatgagaacttttctcacataaaatatctcctattatattccccaaattacaaacatatttgagatttgccaagtacatatattctagcacataaaaaaagaaaatacaccatttagatagactcaggatattttttaagtacctaccaactgtcagtcaccctccagttgctttcaaatatcaatttcatctccagaacattccagtggttgagtcagcaagcattcctagtcattggcactttagtttgaaataccatcatgagccactccagtttctgagggagattgttctggagtacaggggaatttatcctaaaggaaatgttttatttgggattcttttggcagcagatgtcaacatctaatttaatctgattttagcaaaaaaagggactttattgtcttacttatcatggaattgtttgcaataagcctacctcccaggaccagatccagccatttcaagatttcatcagaattctttctctaattttcatctctgcttacctcaatgctggctttattatctgggtgactctcccttcacagtaacagagcatccaacatgcattctatgcactttgtagccctagtgagaagatgtcttcttgttccccataaagtccattgaagtacattgtcacatctggaaccaaggaggaagagtcaaatctattcaaactctttggactgggatgagggaggcatggttcctcaaaaggaaattcgagatgttactatcagaaggtctggacttggggtaagcaaagaaacatatgtctgtttcagggaataacaagaagaagtggtttgggccatggtgtcctgcagactcccagggacccttctgtagcacaaagcctgccatgtggtgagtatggctatgagtgagaaatcagggagccccagaaggtcacacgagggtaatgggaacagctggcctgctgattcaaagtctaggtttggaatcccctgatgaatcctacactctttagagtttgagaagcttgggttctgagctctgttaaaacaaacaaacaaacaaaaaaaaggatacccctgctatacctgcccacaaacctatagacttgaggacataaaggtagggcttatgaacatgggctctgacaacaaaccagggccgtctccctcctatcctacctgccaccccttagcttgtgatgtgtggaagtgatttaactttcctgcgtttcattttctcatcaggaaaatgcagctgattgccaactacatggacttctggccagcattagtgttttcttcaagagttgcataggggagcagctaagagggtggggaacggaaccccatgtttaggaggagtttgctctcctgcttaccagtgaggtgaacttgctctgaaattgtttcctcacctgggaagaagtaaagttaatgatagcacctgccttctacaattttctgtaggattaacatcacaggtgttctgcactgtgccggcagatagcaagcactcaacatatggcaggtgctcgggctctcactcagatgcagctcaaggctttgtgtctgtcttagctgagctgtaacttagaacagtgtctggcacataattgatgtccaacagatatttgtcacagaaaatgctgaatgcttgtcataaattcagtaccacctcaactcagccttctcttctacaacttctcctacttcccaaattttctgattcagattttatattcaatgcatagttatcaagaacctattttgttgcaggcactcatctacactctgggaacggagctgtgaataagacatgcaaagaagttactcctgggagttcatattctccttgagagagggaggggagttgtatatccagtgggataaggtctaagaaagaaacaaagggcattgatgacaagaagttgaggggtgggaagtcaaaaatgtgtgatctgggaagcttccggacaagatggcttttgagctcactcccaaaagataaaaggagccagccatgaaaagggctagtagaagagaattcaaggtggaagtcctgaggtggcattatggattgaattgtgtccccgaaaagatatgttgaagtgataactgctagtacctgcaaatatggccctatttggaaatagagccttggcaaatatagtcgagttctactcaatttaggtgggccctaatccagtgactgatgtcttcataagaagaggagaagggatgtagaaacacacagggaggcagagatggggacaaagcacccacaagccaaggaatgccaggaattgccaacgtcaggaactcagagaaggaaatggaatagactcccctagagccttcagaggggatacggccatgcagacaccttgacttcagactccaagcctccagaactatgagagaatacatttctgttgtttttcaccacctggtttgtgggtctttgttatggcaactccaggaaactaatgcaagtggaaataagcttggcatgttcaagggacagaaaggaagattgttgacagtggactgtgggggagagagtcaagaaataagggcagagagttaggaagaggcagactcagcaggacctggtgggccatggtgtaaacaccacctgctgctcagcctgcaagggaagtcaggggaggagctgtcagcgggggcaggacatgatctacgtttttcagaatcacttcggcacctatactatgggggcacatagcaaaacagagggacagtttagcctggagatagtcattgctaagggcatggggtggcttttattaccctggcagtagcatcctttaaatactggaagaaaggaccattgactgagttgagtctggaagcacctttcaacccgggagttgctcaaggaagaagggtggatgctcattttttgtgtgtgtgcctccagatctttccacctcaaaccataatctgccatctttctcccattctaaattcactaataatgttccagaagtgaggcacatattttctgtgaaagaggataggtgcatacatctgcacataggcatttgcacatggctgtaaatgaatggctcatagttaaggaagaagcaagtatcagttcctgctatgtacggtcagcctgtgttttctctttctttctctaagcatgaaaatgctgcattttgtatttttccctcactgtgatcgttctgtttttgtgactgtgtattagttaccctggcaacgtggtagacttgaatttgattggtcaggttgtcaggttcattgtgagagccaggggcccatttttgaacgctagacctgtgcatgtttaccgcagctacacagacaggcttggtcaggaaaacctgattgagcagaacttctgcatctcctctgtctgccagagggacccttccagcacctgctgtgtgaatgtcccttgcattgcttttgaaaagatgcaagagctcatctatatctttgaaatgtctgtcagaaaatgtgcttagcattggtatgttcagaccatggtgcagaatatatttatttgtaatgagaaattaattttccaagaagcttagagagaatggtctaattgctggaccatgggattagaacctgttacacagatttaattcagacttgctgtgcaatctcaagtaagtcacaaactcagccaaatgcttcg

SEQ ID NO: 1888117 - DNA, 4001 bp, Homo sapiens
agtcaaatagttttcaacatctttctccaactaataagctaattaggattaatcagctaatagtattagaaagcccaggtatcacttctggtatgggaaagaatggaatcagacaggacatggtgaccagctctgagcattaggttcagccatatgcagaaccagcaaggatggggggattctgttccctgttgctggggtgtgttttgggggcaggtggttggtctctctgtgagtagcattgctcactgtattgggaaataccgttctcagagtgacagatgtagaagcataaagcacattcaaagtcattccaagagtggaaataactcagcctcacagatagaaaagaaaatgtctaggtagataaaaagaacgtgaacccgggatctgcctgtgttggcaggggccacacagggaaagggaggagaggaaaggcttcaggaggaatatgggaggaagcaaaagcaagctgagtcatgctgcgaaaagcaggtccaaagggaatatggatccaggagggacaatcttgatttccttacctgcagaccaaaagaaccgggcttggtttctgaggcccttgattcagaaccaaattccacaaggaagatgatcatgcctgaaacaggagaagttctgttcaaatcctaacacatcaagggctgggtcagagcccacgtgcttcatgaagcttgcttggaccaccccagactgcagcattcttttctgactgctgctggtataaaatgtctccacatgtgctgttaaatatggacattcaatggcaatttcaattcaagtgaattcaaaccaactaaaattaaatattcagattctcagttgcaccaactacatgtcaaatactcgatagttggatcacagatgacagcacaggtcccaaaacatttccatcatcacagaaagagctattggacagggtggtcagaacttgcagttgtctttggatgtatctcctgtctttccagcccaattgcaaacatctcaagggtgtagagcaaatatgtaaatctgagggccttatctctaccccgggtcttagagtcacactgacctgaagctgtggactttggccaaatagccaggttctcagagtctctgtgtgcttctctagaagttgacatcatcattctgatctttcatgattgctgtgagaattactaataaagtgtggacagcttagtgccctgggtttgatggcactgtagtaggagtgtattcgtgaatttcccaccctctgtcctggggcatcattacgggtggggcacagtgcaagattcctagagcaacattctccagctactccctgcagagcgagtctgtcagcaggccacaccgcaggtagctcaggtctaaacagaccgtcatctagacaggaggcttcagtaccatcttcccatgtaggcaagccctgaagacctcaggcttggcaatgaatgccatcatctctgctgcattgactatttctaacaacaggatcagaacattgccacagacacatgtgagccctggttacctccatgcccttaccagaatgctgtcgaagctggctcctcggtctggactggacagatattttatgaaaaaagttgagagccaaagcacccataaggtcctgatttagaagcatcattttaataatattcatcttctctgcctctaacttgttgttgggtgaaatggttgagcaggagtgaggtgagggcaggttcattctaaaactttgttcagttttccttaagaggccctgggcacaatgaatactacttgtgctggttaaatatagtgccatctgccctcgaaaatcttaaatagagaggctaggaagtgagccctgtggttcctggactctctcccttcctatttatgatgatgtcagcggcagcagtacacttaacagagcctacggagcaggcttccctctgtgcttggaggagtgaagatttacacagggacttgagtgtttggggtgcagtgtgtgtcctggctgtctgagttatggtggcaaggtcacaggcaggagttaatttggcatttgtcataaagtacacccagctgccacttgtgatgtcatggggcttctcagactgtgctgtcagaagccctggctttagatgctattagaggaagcctgtagattcagagactggagacagagttacctctattctggttatattccctgttggggcatgattctggtttgcctctcagattaccatttcctcacctacaaaatagatcttcaactacatttatcccttcccttgcacacatccatttattccaagaaatttcaagaatagaaattcaagaaaacttcttccccttgacactctcccatttcccttaataactgctgtgtttgcagaattccatgccatacctcaagccttcctctactccctctcccctcctccccttccctctgccctgccttctccctttctctctgtctgaaaaccaggagcacagagtgcccagttttggtgccagagaaagcccagggtgctgtcttctgatgacagctgctactttaaggatatattactttatacattttctgctttcaaaaaaatggcactgggcgcggtgactcacgcctataatcccagcactttgggagcccaaggcgggtggattacttgaggccaggagttcgggaccagcctgggcaacatggtgaaaccccatctctataaaatgtacaaaagttagccagtcgtggtggtgtgagtctgtggtcccagctacttggggggctgaggtggaaggatcaactgagcctgggagatggaggttgcagtgagctgagatcactccactgcactccagcctgggtgacagaatgagaccctgtctcaaaaaaaaaaaaaaaaaaaaaaaaaggcatttttcctttgccccttgaagacctagttttggtagaaatttgtgatttttttttttttttctaccttcagaactgcatgaacaagactgactgacctccgggctccaacttttctttgcaattgttccagctctctgtgaatttttaaggttgttttcttagcctgacactgccgacttcatctgaagcctggaaacatttttttttttttcttttggcaagtaacacttgaaattgtttactcagatgacctattaagagaaatttaactttgaataatttgatccatggaaaattaagttagctaaatgtaatattgaagatggtagacaactgtagcagaaatgaattctttgtaatatttatttgtgcactttacagaattttatttatacactttgcagtgtgtctccagaaaaatatatcatcttttggtttttggttccttgatattttaaggaaatgagcttttcctcagagtgctttttccaaataaactttggaagaaggaaaatatttaaaatgatggcctttggtgtgggcttcactgtgagatcactggatttcccttgataaaggatcatcccactctgtctggcttagctgggcctaaggcctcgaaaagtgaagaggatgcttggcctgtgtttcaagaccaaagtcaggctggcagggcactgccctatggggatggccaggagtgcctacaggtcagctattgactggcccgaagcccacagttaacagttaaatgtgagctgcagttgacgagggaaaccgggaagtctatatgagagaagcaacaggaggggaggttcaaggggtgcctgtggtccataaacaagaactggagtccaggcacagaccagcaagcagaaaacatgcgttcagggtactggccatgaacagtgtcaggatcccactgtttggggtttaaactgtgacatcagagtgggctggtttaaaatcagagggctggacatgaccagtctacaaagcatgatagggccaacattgtcatcttttacatgaaaaaaacaagaaccagaggggataaacaaccgcccaaggtcagagggcttgtcagaag

SEQ ID NO: 1888118 - DNA, 4001 bp, Homo sapiens
tcctccaacgcacctgctgctctgtgggcggccacctcggcacccacctgagggcggggcccctccctggggaccgtgcgcctgggctcccctctggacgcctcttgggtctctgcggaggtaccagggaaggcgggggctgcaggcggacagagagtcctgaacggctcgctggggaacaagaccagagacgcgattttcaggctgcagacaccggctggcgcgatggagtaacccagatgtgctaggggtgcccctccttgcgccggatcccctagatgtgccccccacccctgcaggcagggagcgggcgcccaggctggagatgtggggagggaggtcagactgactccgggaccccccagtcgcactcagtgaccccggggtccccgtccccggctcaggcacgtctcgaaccccaggagaacaaggaaactttacccccgcccggggcccagcgcagcctccccgtccccctgggcgcgcggtccatccctgctcattctccctggcccttgctccctcctcccttttcactctccgttccctccccctcccctgctccccctcctcccccctcccctgctccccctcccagccggctgaggcgggcagggccgggcggggccgcgccacggagcccacagcccggcgctccctgccgcgccgccgccgcaccgcgccccacaggagaagacgaaccgggcccggcggccgaagcggcccgcgaggcgcgggaggcatgaagttgggcgcgcacgggcctcgaagcggcggggagccgggagccgcccgcatctagagcccgcgaggtgcgtgcgccatggagctagggggccccggagcgccgcggctgctgccgccgctgctgctgcttctggggaccggcctcctgcgcggtaagttacggggcgcgggatgggccccctttcgcccgcgttcggatggcctgggacccccagagccagagggaggcaggctcctgactgcggtcccaagccgcgggtgcgcgcgactgggcgaccgcgaggctccccatccccagccgcacaggctgcgctcgcacccgggctgagccaggcgaggagggagttgaccgccggcgaatgcggagggctgggaaaggggctttccgcggggtgtggggggttccgctgctatttcagggctggccccaaaagctcgaacttgagcagaggtggggccaccttcgcccttcccccatccatccagctaaatttccctgaagacccccatgcctgcttcctccggtttaggggatcagaggggtggcctctgcccttggcggccgccacccaccttttctgcaggaaggacaaggtcgcgggtggggactctgggctgggagtcaaggctcccaggggtgtagaactgacccctccccctccccgagtcctgtctgcgctctcaggccagcgggacccaccagggaggtggaggtctccccctccgcccagacccgccccttatggcagcgcccaggacaggcggggaatgcctcagatcctggggccccggacctggagcacagatggacctagggctgtgctcctccagagcgactcatcaggggcgttctgggtctgcccaacagcacgggcaggctggggtgcggagggggctggcacctcgttggggtctgcatctgaaacactcctcgggcatcaggggattgatgaaccaggggaggttccgtaggaagcgggcgcttgtgggggcccgatcctccttccccttcctccctcttcctgcctgggctggccccgctgccctgtactccctcctttgctgctgttacccccgagtgtcctctgactcgccagctgctagagacacagcccttccctggaagtcagtgtgacaggagacccaaagcagtcctcggcccatccgccgcctggttttgtggtgcggtcaaggtgctgggaaggcctccgtgggctgaggggcctgggaagcttccccgaggaaatcacaattacacccaggggtgggagagagccggaggccaagagaggtcagcgcacgccacgcccggcacacacacacacacacacacacacacacacagcacacgcccggcacacacacacacacagagcgcacgcccggcacacacacaggtcctggggtgggaagggctcatgtgaggagctgaaaggaagtggacgtgctgggcagggggctggggcagcctggagagctcctggacagctcccggctcctgtcccgcctgcacctgagccactggcctgcctctccccgcagccagcagccatgtggagacccgggcccacgccgaggagcggctcctgaagaaactcttctccggttacaacaagtggtcccgacccgtggccaacatctcggacgtggtcctcgtccgcttcggcctgtccatcgctcagctcattgacgtggtaggtgagggcgtggccatcgtgcactgtgactgaggtcgccctgcaaggagcacaggggtctgggtgggcagaggggacacagccatcaacactccccgtggctgtgagtgtccggcccgggctggtacgtcagaacgacagccaccagctctgccccgcctgagccccagccaagggttgattcagagcgtcccagccaggccctgccctttcctcccccttgacgtgggaacactccaagtggccaggttctcagtacagagcccaggcaccttcggaagcaaagaacagcaaaggccttgcttgggggtggcggggcacgctgtgacctcggagcaacagggacaaccggccggggcaggggccggggcaggagcaggcactgtggtgtcccggcagcaccccaaccttagctggccccagaggcccctcacccacagatctggaatgtggggtttgggggagtcttgggcgaagtctgtttgtctgaagatatgttctttctggtggggggcccaagaaggctgctgggaggaagcctactggtccagccaggcccctgcagcgtgggccagtgcacatggagccccaaggcaggataggaaccaggaggcttcgaggctgagagaactgagctgcgggaggctcggccttgtgctcggttgagatgcttggttacctacccaggcctgagccagactgtctgggggtctcggcggccctggaggggccgggtaaggggcagcagagacatttccacgtttcccagccaggctcagccactccaaatggggtgagaccatccctcagggtacctggctgggtgggggtgcatagcctgggggctgccaccatggaggagggcaggttgggcaggccatggtctctgggagctggcccacttgcgagtgggcagccaatggccagctgagctgcaggggctcgtcttccacactgaagtccgccagctccagccctgctgccaaatcccagctcgctggtccagggagggcacccccacatggggaggcatttgtatgctgtagaggcccagcccacaccttgccaggatgccaagcctgggtctgccgctgagggaggagccaccgggttgcgggagaatttcctctctttgggaggctggtgccgtgcgtgttgggtaaccctgggcctggggcctgtgaaacggggtgagagctgcttcactatcccaggctgagtgggccacaccccaggggcttttgggaggtgtggggagctgcagccacattcccgcggacaggctgctcagtggtggcagttgcccatgcagggcagcgcatggagactccagtcagccagccccgtccagggttggccacccagacctccagcctcagtgtcctggagctgcccttgagtggctcctgtggagtgtccctggcggaggcccagccagaagacaatgcgggttgcacaggcttggcaagcctgctgaggtttgcaaacacggctgcaaagtgatagctggcagaggcggccgctggcagctgcccaaggctctgggtctgccacccc

SEQ ID NO: 1888119 - DNA, 4001 bp, Homo sapiens
aggtgatccgcccgccttggcctcccaacgtgttgggattacaggcgtgagccaccatgcacagccgcagcatctttacgtggtggctggccagggtaatttgggtgacatgttgggtctgaactcttcgctccccaaaggaatgtgacaaggtgactgtggagggcctgtcccttcgtacctggcgtttcagtagagaattttgccttctttaggtggcttttagagataccatccagggcagatggggaccttggttggttagcagtggcgcctcttccttcatctgccccctttctgaagctaatttccctttgcttctcccaacccacttctgtgcttcaaatgctgccagcacagaactgtctttttgtttctgaattgccctctgacgccgcgattccccattgcagtttggaagccactaccaccggagatttccagaacccaagccaggcaggggctggataaatagtgccaacgggtgtcagccaccagaaccagctcctcagccagccacaatgtaaaggccagaggcaaccggtttctccacattctttgtggtgttccggtcgagtttgaagggcctcatgtacacatgttggagggagcctttggggcctgggcctgctgagggggtgggtgggtggtgggcagtgcgttctcacagggagtcggatcctgcctcagtaaaattggaaagaacttggcattcttgatccaggaaattcctgttgcgatgttgtcgtttttccagagggcctcatcccagctggggaggagaaagggccgcggttgctattgcctctagttgttgagggctaaacactgaattcaattgtaaatcagcctcttttctgtagattgaagcaatttctgtcctgccaggcgagtttggaagttcgccttttacatatgaatgtgccctttaatcaccacttctgcattattgagagaagggtggaggaggctgtgtctagtgggaaaggattatacctcaagtataaaagatgggttttctcatttctaggagaggggcatcagaactggagaatctgaaacaattactaaaaatgttaaaaacaacttcaaaatgcaaaccacagctgtttccctccccccaggctcccttctgatattgtcacctcggccagcagaacaactgcagttcctcgtatttattcacaatcccacgaaatcaatggctcttcggtgcactgcaccggagactttcagctcagccgagctgctgttgagggtgataaattataggcgaaagcccggggacatgaaggcaagtcgctgggtttcagactgcctgattgcaaagaggtgacagtgtccttgccccgccgggcgacctaatgcgtacaagaccggggctggcctggtaagtggtgactcttagcctgttctctttgcttcttcctcctccccctgggagaggccgctgaggatccggaagcaggaatgtctgctgtgggtgagcctctgttctcttttgaacaagagaggctaggccctctgagcagccgcactttctcaatggcaggtaagtgcctcctcttggcgttccctgcccctcgcatgttctgcctccgaggtacttgatgttcctggtgaaatgccattttccccaagttgagagtgacctttcattccacagcctcatttccattccagccctccctatcccggctctggatgagaagttcctgttgatttgcagagattctttataagcacagttcaggccagtgcagtcctctggaggagagggctcagcccggcagctctggcaggcccaagtcagccagggtgcagaccggtcctcgagtttctgtgggtctaagagacggtcagcgttggaggaaataatcatttgctaatgcgagcggttttcatttacaagttcctcctggcttaggcattctctgctgcgaggacaattttgcttcctccccacccccaacctttgctcctgatttcttacttctatgctctgccaggaggaaattccggacttttgtctctttatgatgtaattactggttggggagggccccaaatattcctggggaagggaggcctgtttgggtacctgctctgtgtctttgggaaacgctttgaagtgattaaccatgctctgctttgctgcttctgggggagcagcagtgtgtggtcatgtttgaagtaggccaaggggaggactggtgattacgaaaagggctgtagagcaggcctctgcttctgaccctgccttcacagttactgggggaaacctggcattttcagtctgattgaaatgcagaaatcctgtcctgggctgattctggtctccagtctacacaggccggtgttttccatagctttgaacttgtggaattgatttaacatgctccttccagaaagcaagctgtgtttttggagtggggggcggtagtcggggaggaggtggaagagaagcaagaaaaggaggaagagtgattggttaaaaaaaatacagttacccattagttaccattgaataggtgcttactatttgccaggtattatactaagagctttacgtgaattaactcattgacttcttcgataactttacaaggtaccacttgtaaagtggtaaactctctgaggcacagagaggttaagttgcctttttacggtcacactgcaggggagagcacagccaggttctgcatgcattttgacgccagaaagctgattccccaccactgtggcatcctgcctctctgtcgtttgcaacctggcccatgagagcatatgccttgacctatgtgtcctggtttgcccgggacccagctaagcacatggttggttgccctactcctgtggcctgtcatgcctgtctcagcctgtggaccaagcttctcttttcgttcaggccccagcaggcttgctgtcgacatcattaaggaaattaaacacccacaaaaacacaagaagctcccggcctttcagctgcggccctttcccttgagggaggagacaattccctgtaatggtgtgtcatttcctagcccctggagaacggcatgtgctgtgactcaggcaccggatgtgggggcaggagtggggtggagggcgggtacctgatgtggcctgctggggaggcctagccttgatggaggctggaaaaggggaggtgagttggccctggagcccccagcctatttcagggactgatgccactgtttggaaattgggaggtgaatgtgctttctggggactgcctttgagagaacggtgtcatcagtgaatgacacgactttccaccttttcccagttcctgaaactgtttgttggaccttctctgtccctatacttccatctgcagtttaggggaaaaaaggcaaaatgagagtgtgctcttaaatcatagaccctaaattagggagtcctcttgctacagggctgaggatgaggccctcctggtacaaggccatgtggtacagagattagaagctggccctcggagtcccactgcctgggttgaaatcccagtactgctctggccctcggagcctcactgcctgggttcaaatcccagcactgctccttggtagctttgtgatctcaggcaggtgacttagtggggactacaggaaatgcattttgaacattgcctagaatatcacatataataaaagaaactcttagctttctttctttttttttttttttgagagcgagtcttgctctgtcacccaggctggagtgcagtggtgcgatcttggctcaccacaacctccacctccctggttcaagcaattttcctgcctcagcctcccaagtagctgggattacaggcgcacaccaccactcctggctaatttttttgtatttttagtagagatggggtttcaccatgttggccagactggttttgaactcctgacctcaggcaatctgcctgcctcggcctcccaaagtgctgggattatgggtgtgagccaccacacctggccgaaactctt

SEQ ID NO: 1888120 - DNA, 4001 bp, Homo sapiens
attgcttgaacccgggaggcagaggttgcagtgagtggagattgcgccactgcactccagcctgggttacagagcaagactccgtttcaaaaaaaaaaaaaaaaaaaaaaaaaaaaaaacagcaagcccttaggacattccaaggattttaggagttgtatgccaggaaatagggacaaagaccaaatttgtatttgacaaaatcacagaaccgtatgagtatttaattcaatacaggcatggaaactggcccaagcatttactcacagatgactgggcaaatccctggtcctatgggtacaaactattgatcaaacccccaatctcattcctacccctaaaatatagcaacgtgaaagatcttattacctatttggactgagattaacaccatcccttaaactgcatggctttcaatcccagggctatggcgtgtgatgccacatagaatatgcatgaatcttctctccaacaattgagttgttaggataaaggctcttgtctttgccttctttctctcacagccaagaatattaaggaacgtggacacaaagaatgagtttggaacagaagtttaataagcaaaagaagaaagctctccccagcagagaggggacccgaaagagggttgccaactaggaggctgaatctgggggttttgtgaactgggaagaggaagaatgtgctcactggtctgtgagctgtcttggagatagcacgacttcgcttggcccgggaccttagcctgggaccaatcagaggctgaagtgaaattttggcccaagaccaatcaggggctgaagtgaaagtttggcccaggaccaatcagaggctgaagtgatgattcatagaggctcggctcacagtccaaagcatgtccagaaaacaaagtggccgccggagcctgttagtccaagctgcaccgatttgtaagcccccaccatttcacagaccctgttcagagggaaacattccactggggtttgggctgcgagaaacatcctccccaaccgcctgacttccttatcacatcctgctggggaaaggcccaagaaacatccttaccaacattctcccaggcaacaagctatactgcccagacccctcctgcccaggcctataattactccagcttgtaagcggcagtgggctctggcatttagttggtcccctccatagagccgccaactctctttctttaaccttcgccttcccttcaaaatctaacagagcccactgtatacatgcccacaaaaaagcgactatttcctggaagcccgctggtcacacaaaggacaaaggcatttctatgttgggcctcggtcccttatcagtgcagctgaggaatgtctttaggacaaccccctttgctagttttccttctctgtgcctgcagcctgatttttctggctgtttctctgtttaaaggagttttaccaaggacccgctctaactccctaaaggtttttttctctcaaggggacacacaaagttccaatcacacacatgcctccctatatccacttaccctctgcctcacagccagtcacactctcctctctcacacagaccacggggccacacaagttgcacctgcacagccacagacctgcaactcacgcacacacagtactgcacacacacgcaaagtcacacatccaccctgggacacgcagccccaaccacacagtcaccggttgtccacatccgcacacacaacgcggctcgtccaggacacacacatccactccgagcgcgcacagtcacaagcgcccacttgatcacccagagtcagcaccacgcagccacagtcacagaccacgaagacccacggcaaccatggcaatcacacacgcaaactcctctcctcagccctccacacacaaaaggaccggagccggattcctcaccctcagctttctccagttccgctcggggccagcctggccaagttactccggactccaaggcgcggcagcagctaattgggcacagcgaaagaatctgccacctggctaagaggaagccgaaatctcgcgagacgtggtattggcctgcagaatcctccgggaaatgtagtccagagcccgactgctcccctactaaaaatacaaaaattagccgggcctggtgggcgcctgtaatctcagcttcttggaaggctgggacagcagaatcgcttgaacccgggaggtagaggttgcagtgagccgggatcgcgccgttgcactccagcctgggtgacagagccagactccgtctcaaaaaaaagtaagcagacatgtctgctgcccacatgaggtttacattcttgtctggagaaaaaaaaaagattttaaattaaaaggggaaaatgaagtaattttatattgtgataaatactatgaaatatatcaataggtggtataagcagtaacttgagggatctttcccgtagcattgataggacgggtgtctgagagataaccctcgagctttggtggtgaggagccatcagtgtggaagggtattccaagcagaggcacagttacactgaaggccctgaaaaatcagagagcacttggagcattccagaaacagaaagcagcctggtgtgactgaagcttagcaagtgagtgggaaattagtttagatttaggatgcagacgtcggcattttccgattcatgtgagaaaatgatagtgctgagattacaggcgtgagccactgctcccagccccaaaccaagtttttatagcagcaagaatagatgctctggtacggtcagcgtctaaagattttacaaacaatatctcttcttctagtttgcagtcattattgaaataacaaacatgtcctattgtcaggccttactctcagtaactgatttcattgatctgaataggaaacttacttgattaatcagctactctttggtattacctgacatctcattaatgcatctttgaattgaattattgctcaataggagtgattgtgaaatagtggcaatgtattacatcactattgaagttaccgtctctcatgtgagtcctgtgacagtttcagcaagtataaagcactatggggttttacaatgatttctgtaatcttttcttttctttttctttttttttttttttttttttttgagacagagttttgctgtgttagccaggctggagtgcagtggcatgatctcagctcactgcaagctccgtctccgggactcaaatgattctcctgcctcagcctcccgagtagctgggattacaggtgtgtgccaccacgcctggctaacttagtatttttagtagagacggggtttcgccattttggccagactggtctcaaactcccgacctcaggtgatgcgcctgcctcggcctcccaaattgctgggattacaggcgtgagtcaccacgcctggcctatttctgcaattttgtaaggcaattatttcatcataattggtttgcttatcctttttttttttttttttttttttttgagaccaagtattgctctatagtccaggctggagcatggtgctgcaatctcggctcattgcatcctccgcctctcaggttgaagcgagtctcctgcctcagcctcccgagtacctggaattacaggtgcacacaccatgccaggctagtttttgtgtttttagtagagacaagatttcaccatattacccaggctggtctccaactcctgggctcacgtgatacacccacctcggcctcccaaagtgttgggattacaggtgtgagccacctccccccgcagcttgtctttcttaaataagaagtaacagtgtcacagttcaaaattctattttaaactttttaaatattctgtttctcgactttatcaggatgtttcttttattgatgatccacaaatcttgatgatttcatagccgtttgtaaaaacaaacaaacaaagactattattcataagaaacaagctgttttgagttaaatagggttttcaataaaactgtaagctaggctggg

SEQ ID NO: 1888121 - DNA, 4001 bp, Homo sapiens
aaaaagtttatttatctttgaatatatcacaagtatactcaactggcaatattttttttaattaggtaaaatgtacaaggtgtatcttcccacaaattaatgaaactgattttgaacaaacaaaattgacacacagatacattttctaagtgatgcacttttccaatgatgtcagcattactcaaaacattttttagaatataaacatataattgattttataattgctgtcagaaacaaaggcacattcttttactgtcccagaacattcaagatgctttcaatttattacaagtaccaaaagcagccacaactcaaatggctcaagcagttaaaggaattattctttcccataaaagcggtcctgaggtagggctacagtggctgaacttctgctatgataagtattcaggggtttcccaggacacagcatcaatgctaaaactggcaaaatcccaatggactgatcccttcaatggatgacaggaccctctatggctgaaagactctaaagttcttagttcttagctgtgacaggacagagaaccgacatgtcccacctgcagccacacccatccccttattattactagatcttatcaaaagctgacttgaagaggaaaaaaggccaaaagacttcttttcttcacctaaccgccgatgccctccttttggttttatggttccaacctgacagctactctgggctacaaagagccccttcttgacagatgactgccagctgcaggctagatcagactggtctctggagattgcacagatcgtgaacttgtgccctatgtttcacctttttgcatttacagcctaattataatacatttaaatgttaaatcttcaccccagagtgaacacaggtcatccgcttttggatattcttcatatgtaagcccagtgcgtgtctctaacgagtttcctccatgaattttcataggcttctcctgtatgctacagaatacgtatatcctacctctccacctagcataaatacctaccttttctccttcaaagtatgctttatggcctcaggtagaggcctgcttcctgcctgcaagttgtaacctcttagaaatagttatattttgtttattttgattcttttcagtcgacacatgcaaacaggaacgagttggctacttgagggttggttccttgtgcatctcagtgagtcttgaaaaaccccagatccgtccttccttcctgccgcatgtcatcctaaggccagtgtctgtcagggaggcaaggcagcagcagtacttttgggaaacatccagaataacattaaaaagcccctttttccccacacgtgtcttttatccagagggtctgttttccacaagttcttcagtgatttctccccagtctcattggctgggattggctttcacgcctcttaacaggattgaccatggttcatcaagggtcaacttgaaagctgaaccctgccaactttccctgaatctcctgactatggtggaggagtgtggatcctggaactaaactgaggtgatagggaggaaaagagagaaatcaacagtaaacgctgcacatcctctgtctggtaaatgtgcatcactgattgtatccaatctagattcaaccagagagacggaagcattaagaatgacatagaatatggaatttgctatagggatttgagcttctacatttgcgggaaggagcgagttgaacacttaggaacagctgttgctgccgtgtctggtggggggcctgagagtggcaggacaagcagcctgccccagaagtggaagaaactgaaagtggagtcctgagagctgaatctgccgcaggcccgcgggccgcccgggaattaggaaagttagaggggatccacgcccacaaggtaagccagcagatggggacaattccccgggctgcgacagtccctaatgtcgggcacctacctttcaagcctacgagacgacaacactgcgtcacttccgcctcacgaagcccgcatcaggtcacgtggcgtgtgctaaccccggaaacctacaggcaaggaattctgggaaacgtagttcccgcttagctaggttgacatggtacaaagccacattaccacgctaagtgtggctttgatttttagaaaccgcctcatgctaagtctagggaatacagtggttgaatggggtgagcgctgacctttagctattctggaggaacatgtcactttcacttattttctttcatgttttcccacccagtgctatggactctgatcgcccaaccagagcaaacccagaaggacaactctccaagcctttcaatcactcccactaacccgtattgtggacacactattgtgaggcctactaaggatgtactgctgatgaccttttgaaggtaagtcaaatgcagttaatcctaagaggttggttagccccctgcatcttactgaacacagtaaatcaaaagcgctgtgcccttgagacaaatatgataaattccctctgcagttttgaaatgtttatcaatgctaaacaaggtagggggatgtggggagcatgaaaacagaaagacaaggtctgacagacacatgggagagatgtctgtttcagaggcttagttcaagtggttactgtatttaggctatttaatttaaaggtggttactgtatttacatacacatcagagaagtccaaaattttaaagtaaagatcagtttgcaaagatcttgtcaaattattcgttttaaaatgaggacccttataacaacacaggtacttgaaaatattttgctaatgaaagaagctggacacaaaagattacaccatgtacaatttcatttatatgaagttctaaaacaggcaaaactaatctatggtgggaaaaaaatcagaatagagttcaccttgggagttgggggtagacttaactggaaaggggcctaaggacaccttcagggataatgagtgtatgcatttgtcaaaattcaccataggggtgaagagcactgatgtctgccacttatttgaaaagcatcaaaaaataagatggattgatggatgtatacaagcgtaggtagacatatacataaaacaaatacagcagaatattaattgcagaatctatgtggcgagtatatagttcagcccaggtctgagtcatagacagatggatgtcatagatagatagtcatagatagataccgaaatactgattggggaagagatagtaaagaagtcatgggaaaaggatacaaaaaaagagagaaaagtggccgggcacagtggctcatgcctgtaatcccagcactttggaaggccaaggtgggcggatcaggaggtcaggagaacgagaccatcctggctaacacggtgaaaccccgtctctactaaaaaaaaagaaaaaatacaaaaaattagctgggcacggtggcgggcacctgtggtcccagctacttgggaggctgaggcaggagaatggcgtgaacctgggaggcggagcttgcagtgagctgagatcaggccactgcactccagcctgggcgacagagcgagactccgtctcaaaaaaaaaaagagagagaaaagttactgtcagttaataggaagatatcaacagacagtccagacattcagaatatttaatgtgattcactctaacctttaaattatatgatatacaatcaacctgatgagctccatttctctcatagttactaggtgcttgctatgtgactaccctaagccaagcacttttgcaagcattgtccacagcacgctaagaatcctcctctacttattctactcttaatagccctatatttgtccattataacataatgtgctgcataacagaccaccacaaaactcagtggtgatctgagtggctcacaatagtaaacaattatttcttgattacatgttttcagagtggctagtggttggcccatgtaggctgagctcagctggtccatccttcttggacccacagactccctggggcatgttcttctc

SEQ ID NO: 1888122 - DNA, 4001 bp, Homo sapiens
attattgtcaagggagagagggaagcaagaaggaaggaaagaaatgatcagactgtcccagaaaaaagtcaactctcagcaaaaaaaaaaaaaaaaaaagcaaaagtcactccaaggtgctgaccagacagccccctcaccctgaatgaagttcccctcccccgggttctcccaagaaagtcatttttcatccccaaagtcatttggcttagagacaggggagagaggcagtggcagggtctgtattgtgcctgccctgccaccatccatcacccagccgacagaaactcacctcccacaaataaagttatgacaagcgtccccaacccattctttcagccgtcgcctccctgtttccatcatctttgacattataagccatcagccaagctgtttgtcatgcctctgacagggccttggcgatgtgggcaggagggctgtgctgaggtatggctggactccagggtgcatgtcctaccctcgcccgacattggtgatcttgaactatgtcacaggtgctttcaaaaagggtttctcccctgtggggcaggagtccagaggtggagcagaactggaagggaatatttgttcattgattcattcagcaaacattagtgaacacccgtactgtgcctgaacctgtgcaaggcacagctgcagccacaaagaggggccaaacacagtctttgcccttgcagagtgcccagtccagtggggaagtagagagcaagccatgtcaacagacagtgccagcacgtctgtggcacgggcagtccaggaaactgggagcacagagaagggtagaaaatcagggaaggcttcttggaggaggtgccatttgagctgagagccacaggacaaggaggaggcagtaagagcaattctttgaaaatgtctcctttcttctctgcagatatgtccacttacaagcaccaaagggcaaagttgagaaactgtttgggaaagagaagagcatcatgttccaggcaatggaacagcatacactaagcctctggacttgtttcccagggctgcagtcacaaattaccacaaacttgggggcctaagacaacagtcgtgtattctctcacagttctacaggccagaagtctaaaatcaagagatcagcagggttggttttctggaggccctgagggagaatcagtttcatgcctctttcccagcttccagcggctgtgggcaagcctaggtgttccctggcttgcagatacatctctcctgtctcagcctctgctccctatattcacatggcctttctctgtgtctgtgtctcaactctctctcctttctctgataagaacacccgtcattggattgcgagctcatcctaaatccaggatgatttcaacttgagattctcgacttaatcacatcattaaagaccccatttccaaataagatcacattcacaagtacctgggattaggactctgaccattctctctctctctctctctctctctctctctctctctctctctcacagggtctcactctgtcgcccaggctggagtgcagtggcgcaatcttggcttatgagagcccaatctgtgatagatgccaaatgcttaacccagcacttggcatgcaggatgaagtggtgaaagtttactgagtgaaaattggctccttgagtgaggaaaggaaaaaaggaaagaggggcaggtgagggaagttggtgtgaggactggcaggcgctaagcaactgttgtcatgaaaagggcctgcaggctggcacagcagctccagtctcagaggggagaggaaggtctctcagggggcatcctctccacctccacacacctgcagccccctgcttgccaagcaactgtatctgttctgcgtgaggcttcatccgccgcggtagacctgaagatgggctgattttagttttccaccaggttggttcccaacccacggtgcttgcctggggtcctgaggccaggtggcccctggagaggcagcagagacagctcaagtcctgaagcagaggctctctccactgtttgtagaatctcagagttctagaatcttggaagtgagaatcagcattccaggaccagccatgaacacaaaactgcgaacaactctagagtcttggatcgagggagtctcttgtttaaaggatctcagtgttttcaggctagaaagggccaggcagcctcttcatttgagcttctgtctccctgaactctgaccctaactatgtggcctggatgcaatgaccattttcgtctaaacagggcggacaaacccccaggctgccaggtcccaggcgtggagtcaagagcacacaggaagaatccaggaggacttaggaggcgaggtttcctgggcagaagaaatggcaggagcacaggtgtcacagatggaaagagcagtgtgtgtgtaggaatgggataaggagcagtagttatggtgggagggactgtattaaagtacgtaagagcttccaatgaaataatacacacgtgaagcacctgacaggtgcattgcagatactcaataaatgctacttcccttccccttctcttctgctcacaaatctctatttcctgcatttctgcgttacccacatttatactgaggagttctgagaaatgaaaagattttctggaagggagacacaggaccaatttcccccacccagagacaatcacctatcacaatggataggggctgtgtcctcaatataggccaagactctctgcagggaggatggctgactgattgcagagagaagcccaggaacaggatatttgaactgggttttgagagtaggagaggagtttcccccgcagagaaggtggtggtgagaagaaaggaattctatgcagtttctgtgactgttaaatgaatgaattgctaagatctctggactttctagtttatactttagaaataattcaagcaactacccaactttgcaaatggaaaaactgatggacatgggcatatacatgcaatttcacactttatctcccattaccaaaatccccaagctgagaaaacaaagagaataacaatgtgtcctgagccctcaaggtagaccttgagatggagagaaatttccaagagtttggggacaaaatgaagaaaagaagagggtttttaataaagctaaatttatttcacttaaaagactgtctttattctgaggtcatgttcttcctactctgggagtgttttaaatgtcctttcatttatgaaatcatggagatagtaaatggccattcatagttgaattgttttttgtttttatttggcaaaatagttagcaaccctatattagttctcaaaaaaaaattttatattgtatagtccctgaaacctcacattttcagaaccactgagtcacaaggcattggtggcagaagatgtgtatattccttctcaacaatttgggctgtgctcaggggtcacctatcaagagtgaccctccctgatggccctgcctaaagcaggtcccctccttttccctatgttttctttctattccatctcccttgtattagtccactgtcatgctgctaataaagacatattcgaggctggttgtgatggctcatgcctgtattcccagcactttgggaggccgaggcgggaggatcacaaggtcaggagttcgagaccaccctaaccaacatggcgaaactccgtctctactaaaaatacaaaaattagttgggtatggtggcacgtgcctgtaatgccagctactcaagaggttgaggcaggagaattgcttgaacccaggaggcagaggttgcagtgagccgagatcgcaccattgcactccagcctgggcgacagagcgaaactccttctcaaacaaaaacaaaagtaaaagacatattctagactgagtaatttataaaggaaagatgtttaattgactcacagttcagcatggctggggaggtctcaggaaacttacaatcatggcagaaggggaagcaaacatgtccttcacatggtgg

SEQ ID NO: 1888123 - DNA, 4001 bp, Homo sapiens
aatgagataccatcccacaccagccagaatggctattattaaaaagtcaaaaaataacagaggctgtacaccaaactgcccccaacacagtttacctatgtaaaaacctgcacatgggcccagacctaaaaccaaagttaaaaaaataataataagataatataaaaatactcaaaaaagagagaaagtgaagaggacaaggaaaaagagaaggatggaaggagaaggaaagtgagggggaaaaggaaagggaaaggaggaggaggatctgtttgaccccgtgtaagggcctgtcctgaccccatgtaagggtctgtcctgaccccgtgtaagggcctgccctgaccctacgtaaggccgtgcatggaccctcttttccagctgaattcagaattctggcctctgtttaaagttgccatccagaaactttcaactgtgccagtcttgattaatagcctttctagaaggcactttggtgctcagcagtccttaacctctgccatttcttgcagtcaagtgttaaggtggagaactttcaacatcaagaatgcatggaattagggaaggggagtcccaccctttcttcttggggagggtgtggaggaaggcgtgagaagtggagtctgggggcgaatgtgtgagagttgtatcaccagctgcgggtatccttccttccttcaccatcatccaatgccgccctgagtctctgaccctccccagccgtgctgcccacaggggatgtccagaggggctgggccagaggctgtacccacctttcccctgcctgcgcacctgggcttgcagggtgacgttggccttgagtgggggctgctcatcgtggaccacccagcaagcaaactcacgctcctccagcgtggcctctgcctgccacgtgtgctccagagagtatgtcccatctggatttctggtggcctgaggggacgaggggacaccagggtctggatcatgctcctgttctccatccaggtgagtcgcaggtgggcgggatagaagtggaggacgtggcaggtgagattcactctgtcttgcacatgtacatgggtcccagaggtttcagtggtgatcttcagggtggggacaactagacagaggaataggaagtaagacctggtgaaatcagcccctgcctgtggccacccatgcttccctctcccagggaacagcctcaaggtctctcgcctttttttaaagaaatatttttttcttgtatgcgtaatgtaaagcaaatagggctaaatgttaatattcattaaatatgggtaagggtacctgggtgtctgctatattctgtatttttgaaatatttcatatcagaaaatataattttaagaattagtaaaaggtgatgcccatgacgacagggactttattttgctcgttgctgcatccccagcactgagcacagggtctggcatacagtggatattcattattattaaatgaataataaacatttaaaaaaaaaactgtaacaatgacattaatagaacaaagatgtttagaaagggagtctgggaccagataataacaagatcaaacattcgtaagtaagtcactgcatgccaggcactgttatgtgtgttttataaggaataattcatttaatcttcacaggacagctatgaagtaggtcctcatttttttcctgttatataaagaaactggtattaaatagtcaagtaactcacaagatcccacaagttgtaaagtggcacagctaggattaaaacccagacagcgagcccctggaacctgcgcttataaccacaatacacatgatcagaaatccatgaggaatttcatttccccatttatgaaatgaggctttgggcaaaaaccctgaaagctggatgcttccagggttaatgtccaccccacctgactgcccattcacctcagagcacttgggagagattcatggttgttttcaggggctctgccagggccctgtgggtgacttcgcaggtgatctcagatgagacatcctgtcgggtcagtgtcacccatgccttgctggtgatgaagtcattgcctccattgtcaggcaccaggcgctgagctgaggctggatgttcatcactgtccttcaaccacgtaacattgaagtcccgggagaagtcctgggagttgaaggggacagcagtacagttgaaaggcactgagtctccagggcttgtcctgtgagatggaccagtcagagagatgaagggctgtccagctaaggaaagagcaattgtgattgtacactgagagtgggacacaccccacaggcaccagtggcaccagagctgtgtcaggccctgggggcctactatatgctgtgtctgattctgtcttcaggcagcatatcggcatttgatcataagaaaacaagcaaatgcaaatgtgattatgactgatcccagtgccatcaaggaaacccaaagactgcatagatggagaatacagggaggacttattctagaagggcagctggggaagaattacttgaggaggtgacatcattgagctgaaactcaggaatgaataggagccagcaatgggaagggacagaggaaggacattccagacagcggggacagcaggagagaaggacctcaggcaggaagggcttggtgggcttgagaaactgagaagtctgtaggggaccctagtgtcatggcaaagaggtccagagtgagaagagcctggggaccatggtgatgatcttgattctattctgagagtgatgggaaaccagcagagactttaacagaggggcaaagtggtctgatgtacattttttagaggataactggggttgttgtgtggagaatgggaaggagcgtggcaggaatggaagcagggagaccagtggggaagctggtacagacctccaggccaaggtgatggtagcctggactagggtggtgagaaaaggaggctcgagacacatttggaagatacagcccacaggactcagtgatgggcgggatggggggtgagggacagaatgaattctggatcaacaattcccaggttttctctagagcagctgtgtgggtggtagctctactttttgagctgggaagatctggagaaggaccaagttgggataggaagggaatggtgatgaatcaggatttccattgtggatgtaagtttataaggacttgagtgtaaagtcaagaatcaccccaacagggatggttggcccccctactcgggtgcctcccatcaacacttcactagacccccgttgtctgcttgcttacctgcagtgacagggagctgtctccatgagaagcagctccattcaccctcacacccagctaggactatgacaaaatatttcctgcttctgggatataacctgggatctgtctcccagaattttcccaggaaaactgcaggatgagactcacccctccttctaaggacagccttgcagagctctggagcaagaaactccccaagtcttcacagcattccctaagcccctgctctgcaccaggtcaagagctgggtgctgagaccacagagatgagtcagacaggacccccacccttgagaagcatctggtcagatgggggtgaaaggcaaataaacaaccaatgacaagcaggatgacaggcagagggcagcgcaggaggccataggaacttgtcctcttagcacacagctctggtaccttctggactgtgctctgccctcatcacccaccctgcacacagcaccgtgtggttcagaaaacattttcagccatgtgtgcttcttttcttccacatctcagctgtgggaggctggtattattgtcctcactttccagaaaaggaaacagagattcagaaaggtctcgtgacttgctcaaggtcacacagcctatcagtgactaaagagggagggtaagaaggcctgtctgactttgggtccaggactcttccatgcctccaatgccggaggctccatcactctggcgacttctctctctctcttttttt

SEQ ID NO: 1888124 - DNA, 4001 bp, Homo sapiens
caaactgaatgcaaatagtgacacaacctatcaaaacctctggaatacagcaaaggcagtgctaagaggaaagttcacagctctaaatgccaacatcaaaaaatctgaaagagcataaacggacaacctaagttcacacctcaaagaactggagaaacaagaacaaaccaaacccaaacccagcaagaaaaaggaaataaacaagatcagtgcagaactaaatgaaattgaaataacaacgaaaaacaatacaaaagataaatgaaacaaaaagcttgttcttgaaaccagcttaataaataaaatagataaataaaactgattgaacattagcaaaattaaccaagaagacagaaaatcccaataaactcaatcagaaatgaaatgggagatattacaactgacaccacagaaatacaaaagatcattcaaggctacgatgaacactttcatgcgcatgaactagaaaacctagaggaggtggataactccttggaatgatataaccctcctatcttacaacaggaagaattagataccctgaacagaccaataacaagcagcgagattgaaatggtaactaaaaaaatgttttatattttaaatccctgtatgtacttctctaatttttactccaaatatacaagatatgttagtgtgtaggaagcaagtgtaagtttgatgttcacataagaagcagtatccaaggagagtaccattgaattgtgaccttatgtgtcatttattgcattaggagtgagccaatgttttaccctttgagatgagcagattgcttgaggggagttaaagtccttacatatgtcatcagcaaaccattttcacggactgctgggcagaatttaggcagatcagggaagtgatgacaatggctagaagaagggtagaaagggagagacataggtgagaatgacagacattcaggaggtgcatcagtgggagcaagatacggcaccacaaaaaaagacccggagaataatatactgtaaagccatatttacaatttatggacatgcaaatctattcaatatattgtttaagagtacagaaagttgaagtcaagctacaaagaatagcaattgataaataaacataaaattcagcataatggctaccgaggaggtggttttttgatatagggggtgggggcccacagaagaaggctaaggtaaatactgctctgtttcttaagacaaatgatggctatgctgggattctttaattaattatctttgtgcttcgagtacacattttatgcatttcctctagtgagtcagatattttattttattatactaaaataggaaaagtaactgggcatagaaaccttaagttatactgataatttttgagagcctgggctacagtactgagccctttcctataaggctctttcctgtttttattaaaaaaattaaaaaaatgttttttaataggaagttcctataaagaaagaactgctgccttgatccccaagttcagatcccaaatttcagagcctcttccatccatatccacttacctaggctgctcttccctaaagccaagccactccactcacctgggggctccaggcctccctgttcctgctcatcacagcctcacatcttggctgtcagtccctgagcagccagaaagatcaggagtagggtgaacacagcagagatggccaggacagtggagacttgtttactgtcaccattgggaacctctgaaggtgctttaaaagggtggggccaaaagctgggggcagagtcagaacagctggggcagcagtaagtctctgacccctccccacccagtgattttgggaagtttttctgcttggctcctcagacccagcttgcccctctgtcctggaaatgagcctcaattaatttctcccaagaaggtgggacatctggctccactggacagatggaggtgagatggttgagagggaagcaagggtggagggagtcaacggctgccgctgggtgtgtctctctggatcagagaccacttgagaagaaattccggtgacggaatcacaagtggggtgggggagcattaggtcacaatggtcagattgtgacccacatggagtggagctggggattggccagccaggaagagggggttgataaaagccaggttaccagggagtgagcccggcagagaggggctgggcttgaagggatggggtgaagggatggtgatgattgggttctggctcctgctccaaggccctttcatggagacttatttcccatggtcctctcctaaggaaagcctctccactctcacctgcatcctgccctgagtctcagcctctgactacagtctatagtctacagcttccctctccccacgtcccaaccccagttttcttagttcctggctgcaaggattttagatcctccactcaatttccaaaaatttctcctggcaccagcttctctacccagcatttttagcctacctgtcaatcctcccctatatgtcccatcggtatggaagtccagatgacagtcattgatatgctgcttgcattttctgaatcactatgtcaatgagaaatgcgccctatcagagctaacagagcttcacagcaaggtcattttgaagataaccttcttcaaaatgaagagtgaggaggacataagtgctgtaggatcagtatgtgaggctaccacaaacatgctgtggtttgcacattctttgaggcttgcagagagaagcctgaaaaacacggctgatgtcttggcagaatttaccctggcccccaggctggtgtacaaaacatcttcatgacaaggtgtcttgctggccactcttaaccattagaagaaacagatgccatggaactttgaaaaatcagaaagtgaatgtacaaatggagaacctttgaagacagcagagcccaatgtgggtaaatgacattgctcgtaggaaggaaacagtgttatggagcaaaaggggctcactgcctgatgcactagaaggcaatactaggacaatgggttttgagaaaataaaagccttacactgaaattcaacaaccaagaagacaggagtcaagctcatctgtctcctgtgttggctccaaggcagtttttagaaaagttttatggggtggatactggggttagcaggtgattggtggaaggtaagcagagtctgaaaagtcctcaggcatgtgcagttatctcttcatgctaccttatgagtcatatgtgcaaatttgggagaagttagtatgaaacaagcagtggaaatccaggctgcagtttcagcaagcttgttctagtaggccatcttggtcccaaccaatgttaggcagttcttttacctcaaaagcagagggagtttcagtgtttcagtgacttggttttttttcatctgccattctgcaaaatcaagattttctgttagtcattatgaactctttgggactggtttcaacagcaggcccagaagcatcacagacatatcttacagtgaaagagttctgggcaccactttgggaggcgaaggtgggtggatcatgaggccaggcgttcaagaccagcctggccaacatggtgaaacccgcctctgctaaagatacaaaaaattagctggacttggtggtgcgcacctgtaatctcagctactcgggaggctgaggcagaagaattgcttgaacccaggaggtggaggttgaagtgagccgagattgcgccattgcatgctagcctgggtgacagggcaaggtctcaaaaaaaaaaaaataagttctgggcacgtaattactgctatcatatttctgacatatctgcttttttttaaagagaggatatgaagtgtttactaagcagactaagaagaatataaacaacatctcaagagaaatctaaggaattttaaacagactacccgattactaatatttttataaaatcctgaatggtacttaaaaatgactattgaaaaaaaagaaacttgaaataattaaagtatca

SEQ ID NO: 1888125 - DNA, 4001 bp, Homo sapiens
aggcaaaggctagacttgaacttctgttgactccaaggcctctgctcacctctgtgtcagtctgtgggtgtgtatctcacaggttattggcatgtctgcaaagagtcccaaaatcctggtccccagacgtcacttttcttttttttcttttgagatggagtttcgctcttgtcgcctaggctggagtacagtgatgcgatcctggctcactacaacctccgcctcccgggttcaagtgattctcctgcctcagcctcccaagtagctgggattacaggcgtccgccaccacgcctggctaatttttgtatttttaatagagacagggttttgccatgttggccaagctggtcttgaactcctgacctcaagtgatccgtccgcctcggcctccgaaagtgcggattacaggtgtgagccaccacgcccggcccccttttctttttcacatgagctcaaaacttagtactgtcctttttcttatgggaactacctatgctagccacatttcctgtaatatgagcccctatgaagcaagccttctttccctggtgatctttattacaaaattggagatgcattcccaacgaaatcatctcccagtagacccaagcaagaatgtttggcaaataagaaattaattaataaacagcttgtagtacacaaactttagtgtctgcctggaatattttgcaacacttttggaaactctagaattacaatcccagcacaagctgtttatttcaggctgttaggccacatacatatctcatatgcttgagaatctagtgactccactctgagcatcaggaatggagcccctgttccttttgtgtgggcatttatagtggctggtagagcagggttgcaatacctggggagaccaggagggggtctgcttccaacaggaaatggatttaaggctaaaggttcttgaaattcaaggctttgggttctagaaaataagtctgttcctttgggaggaaatccactttcctcatgatgtaggttaaccatctgacttaaagttgctcagtcctgggccacgcacagtggctcccacctgtaatcccagcactttgggaggcccaggagggtgaatcgcttgagctcaggagtttgagaccagactgggcaacatcacagcaaaaccctttctctaaccaaagatacaaaaattcccctggcatggtggtacacacctatggtcccggctactcaggaggctgaggcaggaggatcactggagcctaggacattgaggttgcagtgagctgtgaccgcaccactgcactccagcctgggcgacatagtgagaacctgtctataaataaataaataaatacataaatacatgaagttgctcagtcctgggaatggaacaaagaagatgtgaaaaaaaatctgacttttctgcctccctgcatagatcctgccccagggaggcgctttagctggggtcagagtgcctggaacagtctccctctccaataggcaccaggatgaaaaagaaactgcatatttcactgtcaaaagaaaaaccagaacagcaggccggcttgatgtgtctcttgtaaattgtttacctctggaggaccagatggctcatctcttgttgaacccttgaccacttcccgtgctgttaacagcctccactagcaaacagacccggctccaccggctcacgtggctgtgcgggagtcccaaggccggctggcctgtggggagttgtgggcattccagagggttgactcagcagtcctgggctccggatgcttgaggaaatgcaagacaggaaggatctaggttaggcaaatggtcaggtgtggcagggatggacagcagctggagggagcggggatgggcttgaactgcgcatgcccacagggttcccagtgcccttaggctatggccctagcgcctcacccttctaacgtagggtccttctaacgtagtccccattcacctcactcgctcacctcttaccactcagatgcctttgaatgtcagcctctcccccggccccacctcgccctggctacgtgttgggtggagtgggagaggccgcatctccctgctgccttacagacctgggagaatccgcagacacaggatggattgcgaacaggctctgtcctatgacatgagctggctgtgatttatttttgagggataggaacgggacacaacggtgctcctgccttcctgggcaggggtagcgagcttttggccgtccctgcctgggctccatccttagacaccacagaacaaggcctctctggagctggctgctgggatttttttgtaaactactgtataataagaaatgggggccaggcgcagtggctcatgcctgtaatcccagcactttggaaggctgaggcaggcggattgcctgaggtcaggagtttgagaccaggctggtcaacatgatgaaaccctgtctctactaaaaatacaaaaaaattagctgggcttggtggcgtgtgcttgtaatctcagctactcgggaggctgaggccggggaactgcttgaaccacggaggtggaggttgcaatgagccaagattgcgcccctgcactccagtctgggtgacaagagcgaaactccgtctcaaaaaaaaaaaataaaaaataaaaaataaataaaagggctgggtgcagtggctcacacctggaatcccaacacttcgggaggttgaggttgaggatcgcttgagcccaggagtttgagaatagtctgggcaacatggtgaaactccgtctctacaaaaaaaaaaaaaaaaaaaaaaaaaagcaaacaaaaaaaaacaaaacagaaattagccggtcatggtggcacatgcctgtagtcccagctactcaggagactgaggtgggaggattgcttgagcccgggaggcagaggtagcagtgagccaagattgcaccactgcactccagcctggtgatagggccagatcttgcctcaaagaaaaaaaagaaaagaaaagaaatatgtaccaatccaggttataaaaagtatttcatgtttatattaaacaaattaatgcatttaacatgtatacatgtgctccttgagaaactaaagtggtaatttgtttctgtgcacaagaaaagactagaattaacatatctattttagcagttataaaatactgtttttagtgtcaaaaatgtgccttaagaattttcggttggggtcaggtgcagtggcttatgcctgtaatcccggcgctttgggaggctgagctgggaggattacatgaggccaggagttccaaaccagcctgggcaatatagtgacaaactaagggacatttttattttttatttatttttaaatttttttagagatgtggtctcattctgttgcccaggctggagtgcagtggcacaatcctggctcactgcagccttgaactcctgggctcaagaaatcctcctgccttagcctcccagctgggtgcggtggctcacgcctgtaatcccagcaccttgggaggctgaggtgggcggatcacgaggtcaggagatcgagaccatcctggctaacacggtgaaaccccatctctactaaaaatacaaaaaattagccgggcacagtggcgggcgcctgtagtcccagctacttgggaggctgaggcaggagaatggcagaatggcgtgaacccgggaggcggagcttgcagtgagccgagattgcaccactgcactccagcctgggcgacagagtgaggctccatctcaaaaaaaaaaaaaaaaagaaagaaagaaagaaatcctcctgccttagctgggactacaagtacataccaccatgctcagctaatttttcaacatttatttttaattaaaacaatttatttatgagtgaccatgacccaagacatagcctcagggggtcctgagaacatgtgcccaactttttttttcacttcttgtagagatgggtctctctgtgttgcccaggctggtctcaaactcctggctttaagcggt

SEQ ID NO: 1888126 - DNA, 4001 bp, Homo sapiens
aacagacagcatagaaatagatgtatgatgggactctaggtggttatagatgcctggagtgatgataaagtgaggctggaggaatgagactggcagggaggagagcccaactgtctgtgatagatggtcagagaggacctcagagcagggcatctgtgcagagaccaggcaaagtgagggagctggtcatgtgactaccctcgagaagagcactagggcagcaggaacagcaggtgcaatggccctgcagcaggcatgtgcttgggtgtggtaggaacaaggagaccagtgaggctgagtgagtgatggaaaggggcaagtttttgatgcccacaatgccaagaggtggccaggggaggatcccagggaggtgccgaggcctgggggaagacttgggctttattttcagagctgcccgttgaagatttgaatggctgcagagtgagatgagattgtgctggaggattcgaaggtcatttagtcagagatgctggtggtttggagcaggttgttcacagcagatgttctttgtgcctgcatcacaattccttggaccagctctgccttggtcttcagctgtggcttcaatcaaccagcatgttgggtgatgagcgctgtattggagcaggtggctacactttcaggaatgctgcaagctggctgcagtgggaagtatttacaccatggcaattggcaaatgtacatatcagctcccttataccacccaaacactttccagcacagcacagccatgagcccagtgctgtggatattctcccaagcatcaaagtgcagccaggacatgaggggagctaatgtctgaaggacaatcctcagctgacgaaatgggagtaaacatcccaggcatgcatcctttaggtgggtgcttcttggagctttcagagaatgcaaccttgctgcctacagctgtgaccctggaaatgcacgtgtgtgggtttgcccttcctccctccctcactctcattgctcccttgcttctgcttcctgagatacctcccaaataagctaccttcacctaagcccgcctgcagctctgcttttaggagaatccaattaagatggtggtagagctagatgtggtgtgagagggatcagatggctgggatgagacagaagagtcctggatgactccaagcgttccagcctgagcagctggaaggatggagaggttctggcggcaatggggaggaaccattgagatgagcaggatgggggttgggcaaatcaatgctctgttcagctgtggacaggttctgtttgagagacctatcagatccccaggtggaaattgtacctggagttagggagaggtgtgtggttggatagagatatctgggactggacaacactgattaggtcaggtgcccacctgcatctgtgattcagttgtgccctcctgcttaggaagcgtctgtgtatctatgtatgtatctatcatccatctatttatcatttatctctcttttttatttatctctcaatatatctatcatctataaatatatgtatattctagcatctagtcatcaatcatttatctatttttatttatgtatcaatatatctataatctatttttcaatatatctataatctgtcatccatctgctaatcgatcatctaccattatctatcaatctgtgtatctatcgtctctctctctgtccatccatccatccatctatccaggcagtgcttgcttccttctgccccctccttagcccatccctgcccaggaaaattctcgtccctgctcaaatgccttcagtgacaggaaactcaccaacctcttaaggcttcggcatggaagtttccaactcatgtggccactccagaatgctgtcctccagggactgtgtttctctctcatgtcctcctcccaagatttatttacactcctcacttgccaggagagagtacttgggagctccgagccatgcgtgttccctggcagggtcgcctgtgtgctggggaagaatgggcccagtcatggggtggagacgccccccagctgcagccctggctcccgagcagaggcggctttgtgcttctcggggacaagggttgccattgaggcaggccagggatgctgtgcaagctagcgatggctgcaggctgaaatcgggcatttcacagagagcaagcactgcactgtccccgcagcctgcacgtgaatggaggctttggccctcggagtgcagccgtgcatggggccacgtgcaggcatttctggctcctggctcccagggagagaggcgagccctgttctctccccgagttctgtttgacaaaattcacaaaaacacaaagaaacaaaaagtacgggagaggatcagttcattctcctgactcctggttggtctcaagacctcccctgttgcctgtgctctggaagattccccatagtacctactaggtgggccagagaaggatggatttgtgggaccctggaaggctgggaagaggactgagaagccacagccctgcgctgggaagagccacggaggttagatcttgttttttgtttgtttttaatacaattgttcacactttctaaacttttttgaaataattttagactcacgtgggggttgcagagcttccctcaatgacagcatccacctttccatggttcactggttggcaccaggaggtggacattggtacagtgaggttaactaaaccaactaaaccagaggccttagcgaattccaccaggttttgcaagcacttttgctgttttttcagtgaataattgaatgaaattttatcacacctatagcttcacgacaaccaggtgagacttgacttttaaataatgaggcgccaggccccttggctcctgaagtggcatgggcgacgtgtgtggatgctgactggatgcccacctgcttccttttctctacgttgtgcccccaccatgctccagtggcaggggcagcctcctcctggcccccaggcctctgcttctctggtgcctgtggaggctcaagcctttaccccacctcccttcttcccaggaaggccctggctgcctgagaaggcccagccttccccttctccctccgctgttctggctgagctcatctcctgtggctgccctagcatgtgctgcagactgggggattccacagcagaaacctactctctcgcagtgctggaggctggaggtctgagatcaaggtgccagcagggcgggttccttctgagggctgtgagggcaggacccgtcccaggactctctctgtggctgtgagtggccgccttctccctggttctcttcacatgatcatcctgcccttccagggtatgagctccatgcctgtccccagaagatctggaggcttccatcttctgctccttatcagacaatggagcggaataaacacggttgcctctctggaattggagcttagtgctcatgaaataaaattctcttaatctcacaattgtcctcaatacagttgcagtgggtggcaccgaatgagtgtcgtgcttgtcaagacagccactgtggccttccgtcttcccactgactgatggcaagtcactagaaggaagcacccaactccccgtgatggcattaaatgacacccgtgggtgtggctgtagaccaggggttctaggcagccaagggggttccatgcagccaaaggaaagaagaaactttcctgcagaatgcatgaatatagggccaggtcctaaagcccagcccacgggcaagtgtgtcctggtggttgccactttccagtcaactgattagtgtcaatcatgacactgatttcctggcaatgtgtgagatgattttaggtggtaaatgaactattaattttataaagaacgttcatatcaggtatatgtctgtttaatttttcttttttcttttttttgagatggagtctcactctgtcccccaggctggagtgcagtggtatggtcttggctcactgcaacctctgcctcccaggttcaagtgattc

SEQ ID NO: 1888127 - DNA, 4001 bp, Homo sapiens
ttgctgaatggccagaagactatgatgagggtttggagaggtagaaataagaatctaatattgaatccagtaggttgcaatgattaaaaaacaaaattataggatatgccttagaaactgtgaaaatagcctcatttttaaagacctttcagaatgtgtctgttgaatgcatattttcttttgcagttttctcaacagtaaacatcgaaataattgagtgtttgctgttcagagatgcctctttgtgtgaactaataagtgcccttcggtgctgcattttgggggagaacttaaataaaaatggtcaagcatgattaattctgcccactgccaagatgttaattgcttcattttctttcatttcagagtcagaacaatgggtcttaatgggcaacctatctctctctaagaatgaccaatcagagaacaaggccaggccttgaaagtgatggtgatctgccattcaaaataacagaaccttgaggaaaggtgaaagacaggtccttctcagagctggtctggacccctgagcctcctgggtccccctccttccatgatcttccctctcagggagttagtaactcaaaagtcgtttgggggaacaatgtctttgcttttgctcataaatcagtcccactggtcacttgagggaattgtcgcattttgctgtgacacattgctgtctttgagagaataattgccagatttggccaacttgggaacagcttccttcatcttcatttcctatctggggatgccctaaagagtatttactttcgtttaaaagagagcaatttcttctcatgaaatcaacagttttctccatgagccaagcttgttttatgatattaaacatttaaataaaattataaatgtaccataaaatgctgatggatgattaatttatttttattttgcatgttttaaggctgtggggattactgctctgaagcagatccaaatatagttcttgaattctatgtagagctgaaagaatcagtccccagcaacggttgagtgggcagtaagagatggcggcccactctctgtgctgttgctgtcccaaggagaagagaggaaagaagctggaggtggaagggaagtttaggagcaataatggggatggatggatgaaagggaattatttcccctgtaccctctttccctcagccaatgagccttccaggatgggcctatcctgtccctgcacagctgccccgtccttcagggtcaccctgactttccatccagagcacagaacttgagctgggaggcccgcgtctgagccatcactctactccttttagctctgtgaactggagcatcacaggaaactccataagcctcagttttgccatctgtgaaatgggtgaacaatcgccaaccaaaccactgggatacccagaagacccagataataccctgacaacccctaaggtgtctgtggacttgatgagcacagcaccagcccacactaacttccctgtgctgccttcactggccttatgaatacactgagtatttcaatccggaataaaaacataatagtcacacaccatctttcctttatcatggtgaaaattgaggatttactcagttaagtaacttgtcaaaggctaaaggaggaatccaaacccaggtgagcatcagtcctctgatctgttcttcccaagctgttaatagattgaggaacccagaattagatcacgaacccggcacctatgaagcactcacctgttctttcaaataccacccctcagcggcaggagggtcaggagggggtgggcaggacaattgaactaaactaagctacattgaagagcaggccattttgctctgagtgtgtgtgtgatgctgatggggctacatcaggttgagatttcgctatgatttcctccggctcccggttctcagcttgggggccaatcaggcagctcttgtgtgcctcttaacacacgaggctgtggagtggcgtccaaagaggcgcctggcgcgtaagtagtgggtgtgagatgcaaatctgggctcttaagtcataatcctgtttgtgacatcgcctccggttgctacagtgatgattatgttatcagaggattaccgttttctgtgaagaatgggtagaaagaccaaaccagcctccaagaaaccaaaggcctcgttcataaacaatcactctgaaaaattaaaacaaagcataggcaggaacacattagctgacaaatgtgtgacactgtggattcttttattccaaataaaatgcttttcaggtttttaagttcaaagcttgttttagggcagaaaataagccatcataacaaaaggacaaaaaggggaaatttaatgagaaatatgacagaagacaaggagagcagagaaaacacaaaagttgaaatgtagcagataacagaacagaaggatattaaatgacttttaatgaaaggatcaccctgaaaaaatacaactcgtagagcaaagtattttaattattttattacaggaagaaagcaaattagctgtcacccataaataaacacaatccccatattagagtgaattttgagaagaaagttttcaattgagactgactgaatagaaggcccatgtttgtacatgtatttacatgtaagttgaacattcttcattgacagaccaggttgtcaattgatgtttcaatctagcatcagtttagtgttaggtataaacaaaagcctttaaaaagtgagaagtacgtttttggagatcttgatgcttccattcaaaacatctccaatgaaaaacgcctgtcccatctcaaattccaatttccttttaaattgtaaagagctagcttgaatactggtttcagttagcatggggccatctattttggattttatgttgtacattctttctgaatcagagaataatctgttattctaaagatatattccatatttgttaaccatccaagtttagacccatctgtatcagttagcagtgctgtaataatgctgagtaacaaatctttccataacccagaggctgaaaacaacagacatttctcacttatgagccagtaagagagttgcatggcaccacggctgggctaggttgggctctggactcccagctcctggctctaggttccaggctccaggttgtgaattgggttgagttctgctccttgagcctcccatcatccttgaattagtggctacccagggcatggttttttgtggtaacagtaggaacacaacaggccatgaggaagcaccagatgccacctaggcttggctcaggattggcatgttgtctatgcttatgttccattggcctgaacaagctacttatccaagccctacttcagtgagatgaggcaagacttcagtgggatgagggaagtggcccggggaagaagggagggaagattttctgtattgtaacccagcacatggtgccatctgaccagaggctgctccatccactttggaccctgaggaggaggcatcttacagcagcaagagcctggaatgggaagcagtggaatttcaactctgttcatcacttctcagccacgggacattgggcaagcctctgagccccagcaccttcatctgcaaggcagttgctgtggggtatgtgggagcacagccttggaagcctggaagacacgcatctgagttctggtatttgccacctgctggttgtacattcctcgatgttcagtttccttatcgtgaaatggggataaggccacctctcttccttgttggaagtccagtgcaactccctgttgggagcggggggagatatggcatagggactatcagatcaaataagcaaacaaaagtgaagtatgtaacaccttgactggcatgccatcagtgtttatacaatgtccacaattttattatttataagtatatggtgatccccagaaagatatgtgtgctaataccaagaacttgtaaatgtgaccttatttggaaaaagaggttttgcagaggtgattaagttaagga

SEQ ID NO: 1888128 - DNA, 4001 bp, Homo sapiens
tttctaggaagacagaaaatggggtcaagggccgggtgtggtggcttatgcctatagacccagcactttgggaggccgaggcaggcggatcaccttaggtcaggagttcgagaccagcctgaccaacagggcgaaacctcgtcactactaaaggtacaaaaattagccaggcgtggtggcgcacacctgtaatcccagctactcaggaagctgaggcaacagaatcgcttgaacccgggaggcagaggttgcagtgagctgagaccacatcactgcactccagcctgggtgagaacctgttaaaaaaaaaaataagaaaatggggtcaagaaacggtgggaggagggcagatttcatgaacctgcctgctatgatgtggctgcatttccatcatgcattgtcctaaaaaaagaaaaagaaaaaaataaaatgtagacgtggagggatgggggaaattgcacaggccggtccaggctgtgaggctgccccctaccagggacgacgagggccagctccgccgcgccgtaaggaaactggccaagggaaccccttgaatctggcgagggcccgccatgagacgctcggggaaccagactgccgagcccccctctctgggccgacgccagcccggctgtggactggagaaaaccgcaaggccacctgcagaaagaaaagaaggccatcgcgcctacgcagctgagcacccatactccgcccgcgcctgcgcaactgggtcccccgacccccacctcctctcccgcctgcgcatgcgcggctgggtgcgcccccccgcccagcctgtgacgccacgtgcatggggcggagcccaggccctagggaatcgtggggtcgtatcccgcgggtggaggccggggtggcgccggccggggcgggggagcccaaaagaccggctgccgcctgctccccggaaaagggcactcgtctccgtgggtgtggcggagcgcgcggtgcatggtaagcggcgggccggggcgctggcgggggcggccggggatcaccgactgtaggcgggcctcccccacgcgggcgcgctgcgctccggaggacggcctcggggtcactcgcaccccgggtcccacctcctgctgccttcctgtccaggctccattagggctccctggatgtctgggctccgctgaccggtggggggcaagtccagtgttttgggccacagggcgggccaaatagcaggggcctgtagccccagggggccccagccctgctgcgttcattcattcagcccgcttttgcggacccgcccccagtctgcgtcagggacagacccctccgccctggatgagcccggcggggaagcttcgcgtagcagtttctgggaaacaggtaggatcaggccgctcggacaggactgagggtgtaaggacgattcaccctggcattggggtggtgtcccgaggagctcataggtggtcagggcggttctgcccgagctgacctgtgagccgcgaatgccctggaccgagggagggagagccccctaggtggacagactagactccttcagtggaaaacattcaacagccaggagagcgtggaagaggaaggagagatgggagggcccaggggagcgtggaagggagggtgtttttattataagtgcacctgtaagtgcaaagtgcaaaggaagcagccgccgggaagtgcctgggcagctctgggtgtccctccaggcacctgtattccagccttacctgcgcgaagccacacatcccacgtcacacaggatacggggaagtcagccatagcctgcaggcggggaatctgaaacctcgcgcaggagttccttgggagaggtggattacaaggactcttcctcccacccgctgtgcaagagccatgggcggccggtagtcatttttgaaggacctggcaagcactgtacaaatctcaaaattgctttttgtccccctccccttgccttggagagagtggctggctagtgtgtgtgtcgtctgcctcctgaaggttcgggtaaaggaccagggaggtgggcagccctttgtgtcaggagatctggaagcgcctcccctcccaccgcctcctgtgtaaaggaaacagcaggtggtgttgacgggcggttcacgcaccggtttttgccaaggagagaaaaacctactgaaacccaccaggaggatgagtggaagtttctaatgtgcttcattttttgatacagcgtgcatggcaggcatttgcattcatgacccttccgtgtacttgaactgaaaacctgaagaaactggccaacagattaggcagccatcaatccacatcagatggcccctgtatttccaagaggtgacctgccatccccatctagaaagccaaccaggggacagggtagctcctaccaccaacaacactgctctaccctcagattctcttctctgactcctgcctccacctgctggagggtggcctcagcaggagccacacctctctgtttgcctgtgtgcaccctacttcctacccctgccttccctcagtccccacccgctaccttccttacagcctcatcccaccctgtctctcctttaaagaacagactgagatggcattgttttcctcaaagagtctgtcagggagaacctgatcaacacattcacgctgtggtgttagtggttcccacagaaaccccatttcctctccggcaggtgtctcagccatgggcaaacaccttaacctagtggaatgaaattgctgtttagatctgggacacaggtacatggagatgacctgttccttggggagaggggatggtgaacatgattataagaactcttcttcccacccttgtgcaagagcaaggctgttcctggttctgtgctctctcagtactgtgttctagttggactcttgcttttgtcttcctgaacttggtgtgtaacttcagtaattatgtctatgtaaggtatgtctatgtatgtgagtgttttttggatctctaaagtcgtgataaagcacgttcaatttggggactgaagccagggactcttgtgtgctccaccacacactgactgcaatctcagacagttccgtttacacacattcccagggccttggtgctgtcttagggaaacccagggctgtgaggcaggctttgtggggtgctggacacagggcatggcacataaagggtttttttaaatgggtagacagtaaataaggagcaactttgcctctagatttaatataccacctgtgaatctgatcatgtagaatatggttcttagactaacataggacatgataagatttgattatgggccaggtgcggtgtctcacacctgtaatttcagcactttgggaggccgaggtgggcagatcatttgaggtcaggagttcgagaccagcctggccaacatggtgaaataccgtctgtactaaaaatacaaaaattagctgggcgtggtggtgcatgcctgtaatctcaggtacttgggaggctgaggcaggagaattgcttaacctgggaggcagaggttgcagtaagctgagattgtgctacttcactccagcctaggtgataggtgagagagtgagactctgtctcaaaaaaaaaaaagtcttgattacataaagaggattttattaaacgtattcacagttgtagggtgttactattgctttttgtcctcattattcatccctggagtgtttcagaactttctctagaaatattgtaatttaattaaacatttgatgattacttagaaacctgaaactttgggttatagtctgctaaggaagggagggctgttgtggtatgggaggtgctactttggaacggacattcctagtgccacgtctcttctcccagtctcagctgacgttgccttaatgtgcatcattcccagccccaagcctgtcacctctcatagggtccgtcctatttctggaccagccccaaacctgtcacctctcatagggcctgtcctgtttcccactgatgtcccgctggcata

SEQ ID NO: 1888129 - DNA, 4001 bp, Homo sapiens
cctgaccttaggtgatccaccctcctcagcctcccaaagtgtggaattacaggcatgagccagagcctggccttacctggctaattctttgtatatttgaagagacagggtttcactgtgttggccaggatggtcttgatctcctgacttcgtgatccgctggcctcagcctcccaaagaactgggatgagaggtgtgagccactgcacccggcctcaatgtagcttattatcaaagtatttacacagaaaaattaatcaaagggcacaagcatttcaatacttaggttaagatgaaatctgtggccggaagagggccagacacacatgaaatgttttgtgcatgaaggaaccacaacttaaaatgattttctgttattcgttttggtatgttattttggaaatgtgattaatcacgtatgtaaaggacgttgggaagaatttccagatactctgatatgcatgacatcttaatcacacaatataaagcaaggctatcttaggaaattaggtatcactgccaaggacctttacatgagatgataaattaaaattactattaaatttgtaacagtcagatgggctggcaggcaagttgcgtcatttttttctcagtattttttctttttccttgattcaataaaacaaacttaaatgccagttatctgcagaaccctcactagactatgtttaatgatatgtgaaacacagcctgcacactcacagatccttgccacgtcccgttcccatcctctcaaaacctgtgttaccctgtggctagatttctcaaggagatgaaagagagagacgaatgagaaccaccttctttcaggtcgctctgcactgctcctgcaggtagacaatgacctctccggtgaggctattatccttggcttgggggtggaggcctttatcctggaaaagaggcctctcagggtggggaggtgatttaaattcttatgagagagacgcagctccccatctcatctggaccttcacaaacctaaactggaaccgccagaaaaatgactgacaacgggccacgcaagccaggcagagacgcggggagaggctgaccacaagaaaggcggacgtagaagataccgtcctctggcgcacagggcacatatgtcccaacacacacacacacacacgcacacagggacacagagcaaaagagtgagaaaagggagagagagaaacaagagagagacatacgcacacacacaaacgcacagacatacagcagtggcacggtaacacctacacccaggcagcccctgaattttcagggttctgctctccacgactacaacccactagtgagagagcagcccacgggcacacaagcaaacctctccttttttgaagagactcactggcacaccgtccgtgcaggcctgaacctgggatcccgcgctgcttgcccggccctccacctgcagtttcttcctcctggacgaccctccgtgaatcccggcctccagagactatcctgttgatgccctggccaggactggtcttagccccgacactgactaatccctctagtaccaggtactcgggaggcggaggcaagagaatcacttgaacctgggcggcagagtttgcagtcagctgagatcccgccactgcactcgactgagtgacagagtgagattccgactattaaaaaaaaaaagatagaaaagaaaaatgaccgcggagcggcggctgcggggactggggcggcggcgggtgaagtgaagattgggaaaagggcttcgtcgacccttcccgaatccgggcctgaggctgggatctcgcgctgccgcccggcgatccgcctgaggtttctaccttctgaggtttcttcctggtggtcagccctccgagaatcccaggctccggagaccatcctgttaaagccctggccaggactgctctcaggcccgactctgacgcactatcacacagggctcctacttcgcaaagtctcagggacccatccacggcaacagtggcaatcactacgaccaaagcggaggctcaggccttgcgcatgcgcactggcgagaccgaatccccgcttgctccgcagagtccggcggcggatcctttaaaaaatggcggcgacgcgcggctgaggggactggggcagcggtggcggcggcagcgcagtccgaggcggcgggtgggaagaggactacgatagggtcctgcgggagacccaagggttgtacccatagaggtcctgtcatcaggaccttcttgatcggtcttctgcttcggttaccggtggaggaggagcttcagggtgcggctgggctctctggaatcctcttcgacctgactatggatcccacggggtgatcaagaatggggttacaatgcagtgaggcgggaagggtctcgctggggcacagaaagatcctaagggctgcaaggtgaactgtcagctgaaaatgcactgacccatgagcccactgcctccctccttcctaggtggagcagtggcctgacttcatctccaaggttcggggctctggcatcccgacactgctttccgcagcatgtgcaaggagagacagaggtgagtccgagatggagccaatgtgaccacacgtggcactaatgttccccaagagcagatggagtcagggtgggtctttgaggccatatggggtgatgctgagacggatagtgacgtccagatgtgcgcaggtgggtcactgggacctcccacacaaagccaaggaaaagccaagcacactagaaaacctgtgagacagggcctgtgcctgagtccaagccacattcagggatgactgccagaggggccaagaggtttcgacaaacgacaccataccgacatcccgctaccggtaggtacccctgacgccacctcccctgcacccagcaaaacccagtccctttggctccctgacatccgtggcagccaaaagattcagtgcttagaggcactttccccaggagcagaggaacggaatggccctcaggaatgagagaggaagggcaggtgggatgcaacactaacttttctagaaggcaaaggtcagccacagtggggttgcctcccgctcttcctggacggaccacaaagccatcacttgggacatgcagacaaagggagcttccctgtccaagacaggtatggaagcccagaactccaggatcatgacaccctatcatccagaaataggtttggagagggaagcaatcataaaagggaccccaacgaaatttcttcctaatggactgagaagtgttctttgttgaagacattgagccagactaagaagcctctaggcttcacaggaactgggcagacagaacaagagggaggacagagcagaggccaatgccacagcacaatgccactatcacgggcatccgggaaaatgtgccaaatgggtgactaggccaggaaggccagcgtttgagtgacagacatgcttgccccatcttgtagccagcttccttctccgtcccagtgtatagctgtgggtagctttctcaatgagggcaaagggcgagaggagtgagaaccatcttcttgaagctctgtgggcacactcctgcaggtggacaatgagcacctctgaggcctttgtccttggctggggtgcagtcgtcttgatcctagcaaggaggcagcacaggatgggaaggatattaaaactcctgcaagacaggccggaggcacgaagccccttcactgaagcacagccatggagaactcctgctatgccaaaattcagggactggatactaagacaacagtggaaatcactgtgacgagacaatcagctagagccacgcggaggcacactggctgggccgactaaagctccggtgctggacggcaggcagctgcccctttaaacaatggctactgcgcggtagcagatgggctcctgttgcagcctcggcagcgactggatccagggtaaagtttgcagcggcctggtagaggctgtggccggtgtcctgtcccagggc

SEQ ID NO: 1888130 - DNA, 4001 bp, Homo sapiens
gagtacagatcactaatatcatcatcacagagcacaaaacaagttctggtattattaagaaaatcatagctctgactaaaacatacatggaaaacacattctattagaaattaaattatactaatactattgacaatcacttttatagctgtcactgtaaactcaaagacaagaaataacttcatcaccagaaaacataaaacaagtacttagccttactcctgagaaggctgtagttgccttttactgaacgacacctcagttcttgggataaagtttgaaacagcaactggaaggacagctttaactttaaaatggttttatttttagagttgtcatgttataaaagctattctcacatagctaagctgttggaaagagaccaggttttgtgaaggtttttcatcaggtatttcatgttgtcctcactgcaacctcaaacaatggcaaatgcttcgtaagccattgtgatgtttactcagttactgagttagcaactgtaatgctaactcagctgataaattaataaaattctgtttctttaggccgggtgcagtggctcacacctgtaatcccagcattgtgggaggctgagtcgggcggatcacaaggtcaggagattgagaccatcgtggctaacacggtgaaaacctgtctttactaaaaatccaaaatattagctgggtgtggtggcacgcatctgtaatcccagctacttgggaggctgaggaaggagaatcgcttgagcctgggaggcagagcttgcagtgagctgagattgcgtgactgcactccagcctgggtgacagagagagactccatctcaaaataataataatgaataaataaataaaataaaaaataaaaaggtggaagaaactcagactttcaaaaattaaggatcctatttttacctaagatattggctttactcttcggttcccttgattgacttagccaataattttttttctacctaactacacaagaaaaatgaaatgaaggtgtagaactcaagaatccctgtgcatttctaaaagccaaattttacaaccactgcaatattaccatttactaacattttctttctgtctcagccaaaggtaaggggcctctaactgggacaggcatggtggctcacgtctgtaatcccagcaattcgggaggcctaggtgggtagatcacttgaggtcaggagttcaagatgagcctggcccatatgttgaaaccgtgtctcaactaaaaatacaaaaattagctgggtatggtggtgggcacctgtaatcccagctcctcgggaggctgaggcaggggaatttcttgaacacaggaggcagaggttgcagtaagcctagatcttgcccctctactccagcctgggtgacagagaaagactccgtctcaaaaaaaaaaaaaaaaaagagagagagagagaggcctccagctggatccaagtcagttaattaccagatcaaatctgatcctggacctagttcagtttctgtcctaactttcaaactgtttggatcacaaatttgttcagagaaactcagagaattccaaacacaaatccatggagttctgaaatctgagagaacttacccatgatccccagccactttgagagatcaagggacaaaagtaggtccttgcaggtaccttgcttgttcactcagcactcctggggattgttaagtctcttcttcagatcctacttctgacaccatctgttaaaagaaaaacttcagctgaattaaatttaaagaagttcaattcaacaatcaacaattcatgatagggcagtccctggaatcacagcagattcagagagatttcagcacagccacgtggtgaaagatttatagacataaaaagggaaatgaggtacagaaattggaggtgaggtacagaaacaactgaattggttacagcttagcatttgccttagttgagcacagtttgaacactcagtagtgtaagagtggttgaagtatggttgctgggattggcctacactcagctattgttacaggtgcatactcctaagttaggtttttcaaccttgtctacctattaagttaggttgcagtttgtccacaaagattcaaatatagaagtatggagtccttctcaggacatatttagtgtgtttcaacactctaaaatatataaaatcaacctaaaccccaaccaccttgggaacattttctcagggtctcctgaggagggctgtgtcataggccatggtcactcatatttcactcagaataaatctcttcaaatattttacagagtttgactcttttactcaacactgttcagtaacaaaagagaacaaactatcaagacacacagcaacagacaaatttcaaaaactacactgagtgaaagaagctagacccaaagattacatgcgctatggtttcatttatatgaagttcaagaactggcagaactaacttatggtgatagaaaccacatcaccagttgccttatgttgcagcaatactgactggaaagcggtatgagagaagtttatgaggtgaaagaaatgttttgtgttcagattaagatgtgtgtcacttgggtttataccttgaatatgtgtatatttcactctatacatttaattcctcataaaataaaataaaataaaataaaactgaagagaagtaaataagagtactatgtctttatgctactccaaagagaaggtttgcctccaaaagagaagcccgagagctttactttgagctataacaaaaataaggtttctgaagaaagaggagatatcagacaaaaagttgtttctctaggaattaaaaaagaagcagaaatagataaagaaaaattgttcttgtgaatttagtgcatagcaaaatattattgtttttagggctgagtctcttttctcctaaaacctggatatgctgtattctttaagccaatttcaagaaataagtgaaaaatctcataggaagaaagaaaggaaaatcgctctttgaatatacactaaaacctgaatgtacaaatggtacctatcagtgtactagggaaaatgcacaatacacttaagttgtttaatttgaatagaatataataaaagagtaaattaaaagctgtggatagtgtatagataaaccaaaagggataattctgtatgtaccctgcaactgttaccttctctaggcctgaagggatgaagggcagtattagttatcgaaacttggagacaaaaaggccgtgtggagataaccaccttcaagacagtgatccagggcattggtgagagataaaagcatatggcttagagaaggaagttatagaaagaagattattagtggagacaagacaagccagtggggaaggaaaatggtgaaaacaaagaggagggaagaggacaatagtatgtatgatgagtccagtcaggcactggggacagggaagtgggtgtgattttgttttatttaacaacaaaatagatagagaaatgaaaggcaatgaagtgcacatgaataagctggtttctactgtgggcaactagggttcagtcatgctggagactgtgaaagacgtcgaacacacctttataattggccacctgaggaatgaaggagccgtgtacatagtaatttcctgattttatctatggactaaaggttgtgttaatagcaaaacccacagttaattttgcaccatcctaataccttgagcccttaacttcctggcatttcttgtctgctaggaataatactcagagaatggcctcaggctgagagatgttgagatagaaagctctttagaatataagagaaacaacaactgaagttgcaggtgatttccagagcagcctttagagataggagtgaagaatgcatagcttctgttacagatagtaatcaagatacacaaactcttctgtggacttctaaggtgtgataacttctgaaagcaaagaaaaatggcataaaaataaaacagaatgtgataaggaatgacta

SEQ ID NO: 1888131 - DNA, 4001 bp, Homo sapiens
gcaaagagtaatcttgaaaatgttgaggttttgggggataagggggagccggggcagacagagtgttgcagatcataaaacttcatctggtgctaagttgttattgaattatgcatttctgaatgacttcactggttgcaacatgatgttgttaagtagactgaggctgagctcttaaatttatttgctggtaggagttttggcaggagtacacactgacatgactgtagactgtcttgatcctgacacaggaaggggaatgcgtttgatgggatctttctgtctctctgttgggggggcacaaaataagaatatcagttaaggctgtcactgacagctgaatggctcatcggtggctggttgggaggatgatgatattagtagcaaagacagtttacttgttacgtgtaggaactgttctaaagtatcaactataataatttatataatctttatggcaattaccatgaggaagatgttactatatccccagtttacaggtgaggcagtttagacacaaagaggttaagtaactttccctcgttttcataatatgttagactggatttccccaaaaaacagatcctttagcatggatttgcgaatagtttatctaagttgtagggaacactggtaaacaggagacgaagtgagactgagaagaaagaaagccccttaaagagtgcactatgggctgagcagggtggctcacgcctgtaatcccagcactttgggacactgaggcggatggatcacaaggtcaggagatccagaccatcctggccaacatggtgaaaccccgtctctaccaaaaatataaaaaattagccgggcatggtggcgcatgcctgtagcacctgtagttctagctactcaggaggctgaggcaggagaatcacttgaacccgggaggcggaggctgcggtgagctgagatcgcgccactgcactccagcctgggtgacagagtgagactctgtctcaaaaaaaaaaaaaaaaaaaaaaaaaaaaaaaaaaaaaaaaaaaagagtgcactatgagctggaagtgctagaggatatctggtgctcagtcccacccaggaccatctaaaagactgaataaagccaccccattgtcccactaggggtcaaggaaacctggatgtttatccaccaacttccatccctcactgggtaagggctgctcctgggagtggtaacacctgggcttgcgggtaggtgggaagtgcaatgcctgtagccacagagcaggcggtattgacacagctgctttctaggtaaccttggtgtcctcatctgtaataagggtgtagtactgtctgctttgtgttgtcactatggagagaaaaatgaggaaacaggtaaactactgtgtggttgcaatgattagaggattatctgaaagtcaagtgtcaaaactcacagtggaggtctttgagggggtcccagaggtagccaggatgtctccttgttagtgaactattggtgaggaacttgctgggaaaatggatgtaatcgtggttcttgactcctgctacctgggcagataggaggggagattgactgctaaacactcctagtgattgagagcagagaactgcaagagaggtcacatccagatgtaaaagcttgaaatatataaaaaccttacctatttcaaatgcttatatttataataagcaactgatgcaggtttactaggcatttgtaaaaaaatcaaataagaaacagaataaagaaaaaatagtacctatattctcataaccctaagaaaaacgtcagcgttttcatgtatttaaatctagatgttttaagcttaggtagatgagatttgtttgttgaatttagttcagcaaagtgaaggagagactttttcataggaatttatgatgtcccttttcaggatgatggccgaagctaaagttaaccgttcataatgaaattgcttgtttttaagcattccctaaatgctgtgtggatgaaaggcatgccattctgccccttcttacagattgggctatgtgttcacttcagtctggcacaagatcatgctcctcttctagactcacatctgagaaaggagggtcttgtggtagctaaccatctcataggactgatcattcttatatcacaattcccctatgctagaggtcatgattttgattcatcacaaggcggactagggtaaatcttcaagcagtttttctctaagggaaggcatgcacatagcattttcttctctgcgttcttcagaaactgagagcattttttctgctggctttgaaaatgcaccacaactaacctcctataaaactcttgggactggaaacatcccccttaagaccttttgtgtataccattgtctttatcataatgtaccattgtctttatcataatggttaggagtgcagaccccgggcatgttgccttggcctcagtcctggattttgaatgactaactgtttgactttggatgggtatctacccacccataaagttgctgtgaagactaaatgaatcaatactgtagaacactaagggcagtcagaggtgtctgaaagtgtgcagtacatgggagctgccccatggtgttatttgtgattattctcatcatcctcttcctcatcacatcccagtgtttgaaactgtaatgataaagtctggaaccagagtttttagtctttttattttgttttgatagatatctgttattttttctgaaggcttatgggaatttttctttagttttatatttcaaaaatattgccagtatgtacttaagctgaagtctcatcattgattttgcctggaacccactgtgctcttcagagtctgcaaactcaggcctttgggtatttcagagaagttttctttacatatgtctttgattgttgctttctgtcagttgtttgatgtcttctctctaaatacttccaatcctttgcttagaggtgcattcagtattctctacaacatcgtacttcttgttctttttcatctctttgttgccaccctcaacctttcactttgggaaaacttatcaaatattttttctacccatttaagtaagacatcagatatttattgaccactggctgtatgtttggttagggcacaaagactaatttttttttttttgagacagagtctcgctgtgttgcccaggttggagtgcagtggcatgatcctggctcactgcaacctctgcctcccaggtccaagcgattctcctgcctcagcctcccgagtagctggaattacaagtgcttaccaccgtgcccagctaatttttagtagagacagggtttcaccatgttggtcaggctggtctcaaactcctgacctcaagtgatcctcctgccttggcctcccaatgtgctgggattacaggaatgagtcaccgttcccagccaacaaagactaattctgattggcacctactggaggatttgatgctatatctacttaggttgtgtccaaggactgtgagcccaagccagggaagaatgagaaggctgggctactgccgattgctcactgttagggtagtcattcagtacacatagaatccctgtggcccttggtagagaaaatttagggacttttatgacttgaatctttcattgtcaaggtaaaataaatttgaggaccatgaagattgagtagagtcacacatctggctagtggtaagccaaggtcaaggaaagcttgaaccctggccccaaggtagtcctttttgatcctcagtccattattgtatgaaaacagtgttgcgcataaatcgtagaaagtttaatcagcattgaacatctactctgtgcctagccctgtgctacacgaaagtaagtcgtcatgaagcagttttgaaaagaaaaataggcatggtttagttaaaagtaattgaaggctgggcatggtggctcaagcctgtaatcccagccctttgggaggctgaggagggtggatcacctgagataaggagtttgagacctgcctggca

SEQ ID NO: 1888132 - DNA, 4001 bp, Homo sapiens
cgacaaagcaagactctgtcaaaaaaaaaaaaaaaaaaaaaaaagagcttttgaagaacatgaatagctaaacctaccctactgtataaagaatgttggaggctgggcgcagtggctcatgcctgtaatcccagcactttgggtgttcgaggcaggcggattgcctgaggtgaggagttcgagaccaggctgaccaacatgctaaaaccccgtctctactaaaaatacaaaaattagccaggcatggtggcgggtgcctgtaatcccagctactcaggaggctgaggcaggagaatcgcttcaacctcggaggtggaggttgcagtgagctgagactgggccattgcactccagcctgggcaacaagagcgaaactacgtctgaaaaaaataaaaaaagttggaattttgattggaaaaagtaacacttcataagggaacgttttagtttgtattgatttcaattttgccaactttctagcatgttcaggattcttccagcagcttctcagacagcatatcagcttcggttagctactattcagacaattgcatttcataatcagcaatcaaaattgtacttttctgttaaagctgttaaaatattcttgcttttaaaaaagctgttaaaaacacaattggaaaagtcagtgaaatgatcatttgatatttgattattcagtgaattagttttaggcaaatcggactggcaggctgcagaggtggcaacaggccagaggtcattagaggaccaggaagccacaggaaggtcacctcggctacattttatagctcacaaaatgtttttacacacacactacccactcccccccctccactgcccccatcaccccgagatggagtctgtcgcctaggctggagtgcagtggcacaatctcggctcactgcaacctctgcctcccgggttcaagcaattctcctgtctcagcttcccaagtagctgggattacaggcacccgccaccatgcctggctaatttttgtatttttagtagagacggggtttcaccatgttggccaggctggtattgaactcctgaccttgtgatcctcctgcctcagcctcccaaagtgctgggattataggcgtgagccactgcacacagcctatacacacacttttttaaaaaaacttttttattttgggatttttttttttttaagttttagtcttgctctgtcacccaggctggagtgcagtggtgtgatcttggctcactgcaacctccgcctcccaggttcaagccattctcatgcctcagcctcccaagtagatgggactacaggcgccaccacacctggctaagttttgcacttttagtagagacagggtttcaccatgttggctgggcttgtgtcgaatccctgaccttaagtgatcctcctgcccttggcctcccaaagtgctgggattacaggcttgagccacctcgcccagcctggaataattttatattcacagaacagttgtaaagagattgcagagagttcctgaattcgaacccaagttccaaccctgcacccagctggccctagtgctaccatcttacataagcacaatgcatctgtcaacactaagaaattaacactggtatgttactttatttagaattccctagttttcccattagtggtgggattttttttctgtcccaggatcctaccttgcattcagtcatcatgcctcttgtagtcttctctcgtctgtgaccatttcttagattttccttgtttttcattccgtggacagtgttgggaaggactcggtgttttgtagaatgtctgctgatctgggtttgtctgatgttttctcatgattgtctgggattacgggttttgtggagtataatgcagaggtaaagtgccttgtcatctcatcatatcatgggaggcgggggtagtattgtgggaggcaggggtatgtgagagccgcctggcaaatcttgcctctaccagggtgcttaatgttgtcacatgtttgattatcataacctgtaaaataactggaaaagttaagattctattttatcatttcaatgattttttttttttttaattttgagatggagtctcgctctgtcgcctaggctggagtgcagtggcgcaatctcagctcactacaacctctgcctcccgggttcaagcaattctcctgcctcagcctcctgagtagctgggattacaagtgtgcaccaccatgcctgggtaatttttgtatttttagtagagacggagtttcaccatgttggccaggctggtcttgaactcctggcctcaagtgatccgcctgcctgggcctctcaaagtgctgggattacaggagtgagccaccacgccagcctcaacagataatattttagtgagcagtcatatatgcaggcgttgcttaaattgaagtcattcagtattaatgaggaaggtcagatgagatcctgtacttaaggagctgggaaactgaggattcgagagtctaaacagctttacccaatgtggtccaggttgtaggtggcagagccaaaattcaaacgcgtgtctcacttcaaaggctctgtgtgtgtttgtgtgtgtgtgtgtgtgtgtgtgtgtgtgtgtttgcttttgctccattgattccaaataacaaaacaaaaccaaacaaaaactttgctacaaaaccctcactctgatcctgatgctatcttaattgtgataaatgtgttgtttaatcttcacaacaaactcatggaaaggaactatatgtaatcccagagctttgggaggccgaagcgggagaactgcttgagcccaggagtttgagaccagcctggaaaacgtagtgagacctcatctctacaaaaagtttaaaaattaaccaggtctggtggcatgtgcctgtagtctcagctactctggaggctgaggtgggaggattgcttgagcccaggagttcaaggttgcagtgagctgtgatcgcaccactgcattccagcctggccaacggcatgagatccctgtctcaaacaaaactaaacaaaaccaaaagaaaaggaactacatatccttcctttttcaggtgaggaaactgagcctttgagtggttaaggaacatgttcaaggttataaagctggcgcatgggctgggcgcagtggctcatgcctgtaatcctagcactttgggaggccgaggtgagcagatcacctgaggtttctactaaaaatacaaaattagccaggtgtggtggtgcatgcctgtaatcccagctgctcgggaggctgaggcaggagaattgcttgaacccgggagacggaggttgcagtgagccaagattgctgcattgcactccagcctgggcgataagagagaaactccatgacacacacacacacacacacacacacacacacacacacacaaaagctggcacatggctgagttgggactggaaacagactgctgggctcgagggcctgagttttcttcatcagaacatcacacacatttaaaaatgttttgaaaatgtatatgtttatttatattgaggtaaaatttacaaaacataaaatataccacattatgcaaagctggaggccaataaacaaaatatatgtaaaaagaagaaaaaaattcaaaaagaaaaactatattaaagtgtacaattcaatagctgttagtacactgacaacgttgtgcaaccaccacctctattatcaagtttcaaaatatttccattgtctcaaaaggaagcccagttaggccaccacccgccatccttccctcccctagcctctggcaaccactaatctagcttctgtctgtatggatttacctattctgggcattccatatgactggaattatgtggtttttgtgtctggtttcttgcccttagtgtaactttttttttttttttcgagacagggtcttgctctgtcacccaggctggagggcagtggcgcaatcgcagctcactgcagctccgacctcctgggctcaggtgatcct

SEQ ID NO: 1888133 - DNA, 4001 bp, Homo sapiens
gcttacctgtaaacccatgattccacctgctgtcatttatttacaaagtgaatgctttatttatccatcagtagttagtcataataaaatataggtgaaacctacacttaaaaaatttttgttttgaagagtggcctcatagattgagagctgaaaggagtaaagcctgatcttgcgttacccatttctaggacaatagtcccaattgtgccttgcctaggacgcatgttagtatatgacatggggcagtttcactccttttaaagttcaggtgtgatgtttatctaaaaggggaaggtggtaatggagctcagagatttccaaataaggaggctcttcattatattcattgtataactttgtagctcctggcataagtatctaggttgtatttgttactatttaccttgtacctcttaaagacaatgtatctgtgctttgccacagtagaagcaggaaggaagatgcttttgaacaaatggagcataacaaaaatgtctggcctattcttccctcttacaagtctttaacaatttttaaaaatgacaatcaatcaaattcagccaggaatttttaatttaccatctaaagatatagaacctgtgctgtgtcatcaagcggttctaatttaggtggtggatggtagtgagcctcactatcactagtacaggcagcctaggaatcatcgattctgaggccttactgctgagttctcctatgagcacattcaggtgtatctgcacaatatttttatgcatctttggttaggtgaaaagcatcaacctaggatagttcctttgagcattttcaaaataaggtgtatttttgtgtggaagagaggccatccatgatcaggagtgtgacaaaaacctggccccaacttttcagccaagttcaagaaagtcaggggtctgcagcagcccagggcaggacggtgtctaggctgcgcttcctgttcttaattccaagtgttgtttggtgactttgaatcgccctctgttgtcttttcagattcataaaaaagaggccttgtacaatgggggcagcagtgtacctgaaggggccaagaaaaataatatgtggcatcttcatctgtcacaccttttcttactcgaagtggagcaaactggggaaaaggggggaatttcagtcatccggttgaatggctaacagtgtctttttattttcaaagctaacttaaaatgatacaagtttgctcaaggcctctggtggtatcagccgccccatacccctggggactgttaaatgtgtttccatttataggtagacttttcttttttctccttctccatcaaacatcttaagtttcatgggctctgttaagaagtcaaagaaaaagttggaagacagtttgtggactttgcatatctgggctttccgggacgtaggcctgtgtcccatccaagacactgctcacgtcttagcctgattacctggccgcctcggctcacctgggcacatggtgagccgcggaactggcaggcaccaaacatttattgaatgaataaaccgtatcccagcagacaccatggtggcagcagatgacctaaccaaggtcccaggaaaggcgggctggggtcaactgcttgaaaatttagtaaccctgctcctaatcccgtgcactgctatatcctagtgtgcggcgggacacttgagagttttgaaagaaccctcaaacaagttcacgttccgtaaactacttttccctctgttccagagcccccagggcgcccaggcaaggccgccacctctcccacctgggaggacgcctcgagcaccgactccacagccacggccaccgctcctcggctcccgtgacaccggcgcgcctgctgcttcgagcaggggaggctttgcactcccatcgcacttttctcgtccgaagatacgaaactccgtccgggcgtcgcaaataattcgaattcggctctctgacacctacctcggcgggcgcgcgccgctgggagggcggggtgggtggctggaggtaaggaggcgcacagcaggggtaagcgccgccgtcgcacactttgcacgccgcccagggctacaccactcaccgaaaattgggaggcaggtctgggaggcggggttgagcgcccaccgccttgggcgcgcccgcgccccccgccatcgcggcccccgcgcccccggcccacgcccgcgcggtcccggcaccggcctgcacccccagggtgcgcggcggcccatttgggtgcgtccccggtgggccgatttttcgcgcttccccttcggtttataggggccgctgctatgggtcggtcctctgaagaggctggggcgtcatcggggccggttagaagctctgctccccggcggggacactcagtcgcgtcggcaccgcggagcgggctgcgtcaggtggctggccggcgcggcgctcccctgctctctggctccgggctgcggcgcggcggctggagcgagcccctgtcccggcgcggggcggcggcgggcggccggcaggcgctgccttgcgtgtgagtgcacctcactcacatgtaagtcggggagcgccggggcctcccgcggaagtgcgagtcgcccggcgcaggcaagagccgccgggtccgggacaaggcaggggcgcccgggcgccgctgccttgccccggggcgcctccgggcaccccccaattctctctcttttctcttctccattggcgtgcccaagagccaaaccaaggagcgcctgagggtaaacagactcctgccatccgcgcctttgcacttttctttttgagttgacatttcttggtgctttttggtttctcgctgttgttgggtgctttttggtttgttcttgtccctttttcgtttgctcatcctttttggcgctaactcttaggcagccagcccagcagcccgaagcccgggcagccgcgctccgcggccccggggcagcgcggcgggaaccgcagccaagccccccgacacggggcgcacgggggccgggcagcccgaggccgggggcaagcagggagcccgggccaggcgcgagccgagctccccgaggtggccgggccaccatgctgaagatggccatgaagctcaaagcccgggcggcggagagcgagaagaagacggccgcggcggctgccgaggtggctgccgaagctgcggcggcggctgcggcgttggccgagccgagagagccgctcgcgccgcggaagagcggggaccccgagaagctcgcgaagaaccccaagaacccggcgcgggaggcgctccccgaaaagttcctaacagacaaggagcgcaagaagctcgagaagaagctgctggagcagaggcgaaaggaggagaagaagaaggagaaggagaggaagaagatggagaagatgctgaagaagaagaagaagaaggtgccagaagcccaggaggaggcccgatgccccgaggccgccgccgccgcggccgccgccgacgacgacgagggcgccgaggagggcgccgtcgggggcgccgaggagggcgccgccgccgggggcacgagtagggcctgggctgactgggacacggactcgagcgacgaggacgacgcctactacgcggcgccgcgcgttgggggcatcgtgtggcggcccgggccgctcaaggctggcgcgctgagcgcccacctgcccctcgtggtgttcctggtcttctcggtgcgcagcccctcgtgggtgctcaacttcctgctgcagaagcgcacggagcagggccgcggctgcggcttcgtgttcggggcgacctgctgcttccgagtgttcctgggctgcgccttcttctcctacttgggcggccgcgccaagcgcagaggccgcgggcgctccggggccagaggcgccttcggctcgggccatggcgcccggcgccgggggcgcgaggagcggctcatctagtcagaccccccaccccgccaccgccaccagacaccaccatcgctgtgtagtgtgggtttttattcgtgttcgt

SEQ ID NO: 1888134 - DNA, 4001 bp, Homo sapiens
accagaagacaggggaaaaatatttttagactgttgaaaacaaaacaaaaactttcagctcagaagtctgaatccattgtggtatcaaatgatgactttggagagagaaagatctgattagaatcctagttctatggccctatttccaatcctacaatgtggcattaatgcaaaaaatattatattaatatacaaaatatgacccatgcaagaatttacacctctgagctccggtttccatatattttgtttacaaagaaaaagtcctattgcagccatttgacagtgccattatgacattctgtaaacagtaaacatgaaaatgctttgtaaacggaactaacacaaagacttagtagaatctgaaacagacgtactcttgctttcctttgagcacacatgaaaggtatgtatacagtagggaagactagagttctagagtcagatgtgtaaggattagatggctctttttactacttgctgactgagatgacttatactgactgatcattcatcctctttaaacttcacttttttatatcaaatggtaaagtagtagaattacctgagaaagctgttgcaaggattaaatgagatacacaaagatacttcactatgcttggtatacagagtggctcaacaaagagtaggttttctactttagtgaagtatatattaaatgtatgtattcatcatcgatctgggaaatgtataaaaatgaggcaataggagaattcccactgtccaacactgagcaggttgtttatctccctgaaccttagttccccagttgtggaaatgaatgtgaagagtcagcacagggtgaatgtgaggcttgtggaatgtatacggcacttgtgtgctcaaacaaacaaaagcaaaagtaagtctgtttcagattctactaattatttgcattggttcagtttacaaagcatcttcatatttattgtctatagaatgtcataatggtgctgtcaaatggctgcaatgggacttttctcttcgtgaagaaaatatatggaaactggagctcagaggtgtcaatccttgcctgggtcatattttaccggaacagctagatggttactgccactctgaagttctctctgtgtagaccctccctctccacttccctcatgtgattttctattgttgggagtgggttctatttataccacatcccagtaggttttaaggtggtatatatggtattcaaatttgcaaatttggccaattgtgacatcagaaaatgttacggtgtagcacagccacgaggcttgggttcaagccccaggtctaccacttgggtgagttggggcaagaggcttaacttctctactctcagttggttcctcatttgccaaacgaggataatagcaaagtctagctcacagtgttatgtgaaggattcatgaattaatgtgtaaaacgtgttcagcacagtggctggcgtgttctcagtgccacgtggtggctgttacttatctccatgagattgcaaactccataaaggcagggattcttgttcattctgttcattgcttggtacgttgcggtgtttaataaatatctgctaaaagttgctgagtaaattttgtccttaagtgccttccatattgctaataataataaaaagaacaacactaacttctaaaataattttcaaagtaacgtgatcaataatacgtgatgctgttctcctgtctctgccctgagctcagttgcccctttggtgctggcactacagacccccacactgcaggatgcccagaacactcattctgttttctgtttctgcctccccctgcccagcctggcctgactggggagatatctatctcaaggtgtttccacctgcttccccttgaagacgttgatttccttctcaaagtctcccactaggataagcccccaaatcatgctagttatgaatcttaccagagtgggacggaatgatgctttaggcacaggcaaccttccccaaaccctgcaaatcactcagttccccttgagaaagaaatggcttgattggtggcatttgtggaaaggggcgggcggtggggggcggggggcggggggcacagttattgagtcacaatgtagaagtgaaaacacacaattcaaagtctaaaatattttaaagcttccctggactcacaggcctcccttccactcacagctttttgaagtagctctgtggacttacaccagagagatgaaaagctgaaatccagctgccgttcattcctgctttgagattaggaaaggtagagctgaatttgggctatgttactcagaagcttttccccagctgatggaggcctgccctggaggtgctcagctccatctctgctgtccaggctgtgagcaagaacacctaaggaaagccagcagcctccttcactctccctccccatccattcaggtacaggccacaagtctgcagcatctcactacaaaatcagcacagaggcagtgatcacaccacgatgaaaaaaaaaaaaatagattaaaaagagaggaaaaaatcagctgctagaacaaaagccaaacagaaatgtgttccttaaattattagtagtgtattagaggtgatttagcactcacatggccattcctacaactgcagagaccctgcaacatatcttattccctttgtaatgcggatggcactgagattgctctcatcttctgggcttataagcaaatatatttaatttggatgtaatacagccaggagggtgatttctccagatggcgatttaagcaacagatcaagagatgaattaagcacctcattccttcagattttaggagatctgcaggtgccagggatcctgcctccagcttgggtccagggtaaatttcggccaagatgaagcctcttattggctgcatgaattctagcctccttcattaacatggtaattatccaattagttaatgctcccttcttgagttgagtaagctcctggggggtaaagattgcaggtggaatcttgaggctataatagtggtattctactccttgaggagatgcatttgatgggtgttttttctacagaacttgattcagtttagaatacgaatcaaggtgaaaacaaaacaaatctagtagcaatcaatagaatttctctatggtagatctgagtaatttgagattaattagcacaaaggaagctaaatcaaaccaaccaatgcttagtgtctttatgagcaagatctcaaaagggggcctttaaggtagttattagctggtggctcagagactagctttagggggtttgtgtagttctgcagacaggattgcaaggccagctggtatgtgcactttttgggggaaaagagtccttatttcttcatcaaattctttacagaagagtgccgtgctccccgctgtcttaggagttacagaacatttaaaagatgatttgcggacagattaaggacttcagaaggagagatgacaccagacctaggtcttgcagatgcaaactcctgtcaagtgtgagaggagggggagtattatccaccagtggcagataggctgggcatctgggcagaatgataagagctgtggccctgcagccagtccctgcatttgcaccctgagtttgccatgagctgtgtgaccttagtcaagtttctcaacctctctgtgcctcagcttccttctctgaaaaatggggatcgtgttttgcacacagcccgacacacagcaaatattcagtgactgctgccgctttctgccatggctaaaggtggtgttgtggttttccttccaggtttttatgctttaatttcctaactgttcctgcattacttcacagttgatgacgtgtggggccaagctcttggcacacgtgagcacagtggatattcaaggagcgttaactcgggtccatttttctttccatcaaacacagcctcctggtaaaagagccattcaggatgcctggaggagcccagatttcaaatctgatgaagtctgcagttct

SEQ ID NO: 1888135 - DNA, 4001 bp, Homo sapiens
acgtggtgcaaggaccttggacaactatgtggaaaatactaaagttaaatgtacacacggtaacccagcactccactcctgggtatgtttccagcagtttgtaacaggcccaaataatccatcgaggataggatgattatgttctatatcacaactgtggtgggggttacacaactgtatatatttccccaaactcacagaactgtacactcaaaaggggaaattttagcactaactttggcagcacatataataaaaaagggaaaacttaattttactgcatgtaagtttttctttttaattttgaaacaagccaggagcagtggctcatgcctgtaatcccagcactttgggaggccaaggcaggaggattgcttgagctcaggaattcaagtccagcctggacaacacggcaagatcctgtctctacaaaaaaaaaaaaaaggaaaagaaaaattagctgagtgtggtggcacgtacctgtggtcccagctactcgggaggccaagatgggaggatcacttgagcccagaacgtcaagcctgcagtgagccacgtttgtgccaccgcactccagcctcagcaacaaaatgagaccctgtctcaaaaaaaaaagaaaaaaagaaaaaagaaaaaaaaattcagcctgggcaacatggtgaaacctcatctctataaaaaaaaaaaacacaaaaaatattagctgtggtggcatgcactgatagtcccagctactggggaggctgaagtgggaggatcgcttgagcctggaaggtggaggttgcagtgagctgagatcacgccaccacactccagcctaagcaatagagccagaccttatcttgaaagaaataaaaataagtaaataaataatatatatatatatatatatatatttttttttgagaaggagtttcactcttgttgcccaggctggagtgcaatgctgcgatctcggctcactgcacctccacctccaggttcaagtgatctcctgtcttagcctcccaagtagctgggattacaagtgcgccaccacacacggctaatttgattttagtagagacagggatcaccatgttggtcaggctggcacgaactcctgactttaggtgatctgcctgccttggcctcccaaaatgctgggattataggcgtgagccaccgtgcctggccataaataaatattttttaaaagataagagaaagagagcgcgtggtaactcacgcccgtaatcccaacactttgggaggccaaggtgagtggatcatgaggtcaggagttcgagaccagcctggccaacattgtgaaaccccatctctactaaaaatacaaaaaattagctgggtgtggtggtgggcgcctataatctcaggtacttgggaggctgaggcaggagaattgcttgaatccgggagttggaggttgcagtgagccgagatcatgccattgcactccagcccaggcgacagtgtgagactccgtctcaaaaaaaaaaaaaaaattagctgggtgtggtggcaggggcctggaatcccagctaattgggaggctgaggcaggagaattgcttgaacctggaaggcggaggttgcagtggactgagatcgtgccattgcactccagcctgggcaacaagagcaaaactccacctcaaaaaaaaaaaaaaaaaaagaagaaagagagtaggggtatattcatacagtggaatagtatgcagcaatgaagaagaaacaaactcctgctacacaggacaaaataatgaatctcaaaatcattgtgctgggtgaaagaagccagacaaaagagtactgactgtataatttcatttataggaagctcatgaacagataaaactaaattactgtgacagaggtcaaaatagtagttacctctggagtgggggtaacccggagggagcctcctgaattgatggagatgtcctacatcttgagctttgtggtggtcccttgggtctacgctccatgctgaagatctgtgcccttgatgaaatgtcaattattcctcaattttaaaagaaaaccttaatttgtaaaattgtcatggcaaaagttaccgggtgaacaattcagacaatggagtggatgaagattcttcccccttccctccagacactactgttcccccaactggctctctgtgcttacgccagcctcatgtagctctctaaccatgtgagctggcagcacgtggctgctcggaactcctgcaggctggaattcctgccccaccctggccaaagctaaacaacttttaaaactggctggcagcctgggattttaaactgccttcctgcctgatccacttccctttagcacatccaggaagaaagttatagcttctcttgctggggggaagggagatgagacacctctgccccatccccctgaactttccagggcagagggggtcccgagtcagaaactgagaggcaagcccacagcaccccctttcccaggcccaggcccaggctcctgcttcctcagcagagatgtcagcaccagagccttttcttggggaagaggtgtctcctggcttgaccaatgcccgcatctctcccacaaaatgagctgaatacctgttgggtgggcttaggagacattatatctaaaagtgtctagagcatactaattgtcccatggctgcaactaagactctgatggtgagttacaatggggacagatgtggccacggacatcagcacctggcacaaagcctgggcattgtagacactcagcccatgtttcctcctcatcacgtggcctgatcccggagtgggaagaggacgctcacagcagaagtgaggctgcccagccccacccgcctgggggctctgggactaagatgggaggtaaggggggatgggatactcctgggaaggctgggatagctgctctgcttacatcttgtgtgtgccctggggcaagtgagtgccttctgtgagcttctgaagctgctttcgtctgtgaaaccaggagggagggtggcttcacaagactccctaagcacttagggtggagcaggcatgccagcatgatggcgcccggggcccatcctctcccctcctccatctccctttctcagggatctgcacagctgtttccccttttctgggcaaatcctctcaccaaataaacatttgcctttctatcgctgcctgctaggtggaggggacttctgaacccttgaggtcccttccctccctgagcacagcccagccccaagaccaaaaccacaccccaataactcccacctattgtgcccttgcagagggctctgaaccaggagtgaagaccaagctcttgggcataagaaacttgagagaacaagctagagatagcacaagtgtcctttagactcagcatggggatctggagtcccctttttctgttctgataggaaatagcctccattttcccatctgaaaaacggggtggataatcattgcatcacctacttcacaacatagatgaactgtcccagaaagtggtaatcatgcctgacatgtgtgtgcactctgtgtcaaagacagcatcttatatatacagatataaaggagtccctcccatcgcacagctcccatttgtgtgtggggggctggggggagggtcacctgcagtggtattcagggaggatttcctcagagatctgggtttggcctgggctcccagattggccctttcccaatttcttgagggaatgaggctggcgagggcccaaatctcaaaaggccatgccaggagtttttcttttttttttgagacggaatctcattctgttgcccaggctggagtgcagtggcgcaatatcagctcactgcaacctctgcctcccagattcaagaaattcttctgcctcagcctcccagttagctgggactacaggtgtgtgccaccatgcctggctaatttttgtatttttagtagagatggggtttcaccatattggccaggctggtctcgaactcctgacttcgtgat

SEQ ID NO: 1888136 - DNA, 4001 bp, Homo sapiens
ttgtaggtgcatgaattctttcttaggggcagagcctgttggagatgtttttaaaaaatccctcaaccaaatgaggaatatattcaccttgttgactcacagaggatacgaatcatatacaagcagatggggattcagagagcaaatgttttcaactgctgtcaagggagtgtggaggttgggtgaggggaaagaactgcatgagacccaaagagggcagggaaggggggtcaagtcagaagaagcagaggcacctacccggatgttctttttagatgtggcattttgagcgtcatgatttggagagttgctgtgactgtgccgagctgggacagagggaagaagggaactgcttcaagagggggagcagcagggaagaggggcattggtctctccacatatctcaggagggctctcctcccacactcattaaaacctcatttcttcccaaagctcagctcacacattgctccccaaaaaggctgcactgatgacaatggtctttcacccccttctcttgatcccctctgtgctcacccctctgacctatctttaccacaccctgtttcctttcagaatcagcttccttctgtctcatccagtgaactgtgagctccctaagaaaaggaatagggccaggtgcagtggctcacacctgtaatcccagcactttgggaggctgaagcgggtggatcacctgaggtcaggagttcgagaccagcctgaccaatatgatgaaaccccatctctactaaaaatacaaaaattagccagacatggtggcatgagcctgtaatcccagctacttgggaggctgaaacaggagaattgcttgaaccctggaggcggaggttgcagtgagccaagattgcaccattgcactccagcctgggcaacaagagcaaaactgtctccaaaaaaaaaaaaaagaaaagaaaaagaagaaaaaagaaaagaaagcaagaaagcaaagaaagcaagaaagcaagcaagcaagcaagaaaaggaatcgagtcttgcccttgtttttcacccgcagtgtctatagatatgccatacacagaagacagacggatttgcaaatgcttggttaacaaatgatttcagaggtacaataaggaaacaaaatggctttgcagagtgggcatccgagtgtacttttgaagagtagttcctgagcattccccaggtgggcaccagtgatggaggcaaagctctccaggcagcagaagaccatagagcagccgcccacctagagcgttagtgccacctcctctctgagggctgaagtttccaggtcgaaacttctgtgctcgacctggaagtttgtgctcagcctgggagcttcaccagggaaactgtggcaggagacaaggtcttgattctgaggcctctctctcaacccagtacaacctctctgctagaatttgaaaaaaaaaacatggtatttgtggtaccctcagagactggatttaagggacatgtgttgcctaagtcccatcttcaaaatgacccagcagtgacactgttcctttttactctgtagggcacatttctcacctgcattatggcccaggaatctcaagtcaccatccctaccatggtcaccccaatttgaagcagcctggtgaccccaggcaggaactgatcatcaagggaggctggaggcaggaggattttaaaagaaatccaacagcaggaccaaaacaaggaaaaaggggaggcaggagggtggtcaactagagacccaggagaggattccaggatggtgggaagccctcacccagcaagactggtggaggccccatctgtgctctgcccctttcaagaggtttcctttgcaccaacacccacccccaccctggccactgacctgcaggaacagcagatatgactgtggggccccaaggcctgcgggaacccagggaccgagagaaggcaggtgttgggttgagcaggatccaggttagccggggagggacgtgggagtccttgtcagagaaggatgtgaagggattgggatgaaggagtccaggaggagcagcaggacccgaggccctccctctgcacacacccttttcctgctgggctcaggccctggcaacagtgccttatttatttcccccacccttgctcaggcttagccagtccttgctccaatgatgggggaggggtcacagtgggactcttgtgacatcactacatcccacccctcattctttcctgtgaaatcctcctggagccatctctgtcctatgccctgtcccagagagcccccctgctataatgcttccttccttccttctagccactgcctccctcgccccatccaccccccaactattcagtgtccctcagtaaacgtcccaagtttgcaacagaaaatgaaaatgtaactcagaaaaggtggcattcacacttcacaccttcatacagaaatccaagcaaagctcttgaatccagaatcaggatgccttccagagccagctgtttcaagacgctgctagaggcagtgaagagcgcaggaggcctgcctagcagctgcagggaggggcggaggattggggtcgccctctcagggagggcagaggagggttagaatgcatctgaccctgcattctaaaatacctgctagcactggatgctgcggtgtccatggtactgaagacaagactctgctgcctggtccaccactgttatgactacagtggcccccagtctaatgttgccatcaagattggtagtccaggccgggtgtggtggctcacacctgtaatctcagcactttggggggccaaggtgggaggactgtttgagctcaggagttccagaacagccttggcaacatggcaaaaccccatctctacttaaaaaagaaaaaaaaatgagccaggcatggtggctcacgcctgtaatcccagcacttcgggaggccaaggcgggtggatcacctgaggtcaggagtttgagacgagcctgaccaacaaggagaaaccctgtctctactaaaaatacaaaattagccgagtgtggtggctcatgactgtaattccagctactcggggggctgagacaggagaattgcttgaacctgggaggcggaagttgcagtgagccaagatcatgccattgcactccagcctgggcaacaagagcgaatctccatctcaaaaaaaaaaggcaatctagatgcactggatatgaccagcagaaacatggagaaacacagttcttagtggggtcaggccttgtgaagtagcagcctgcggtttggacgaggccagcctggctctgtggtcacccacagtcaaccccaccacaggggctgcagggactgagagaagggttggagtgtgttatccagctcttctgagaagcagacaccaagacaggattaaattgcaagggttttagtgggagatatacctttgtgaaaagagttacaaaagactgggagagccaccggaccatgaagcaagtctcactcccaatgtgagggagagaggggaagagaaggggtgggagcactccggaccacagttctgaggaaaatccagagccttcaccaactatttgaaacagtcaggcagcaaagtaggtctgggcaaccagcctggccttagcatccccaccacactcggtcatcagagagctgccgcaggaggcctggcctgatgcactacaaggtagatacctgtgaggagccacactccctccaggaggtcagccacagcatcctggacactgaggttggggaccacggatggaagtgtagctgagagaacccagaggttcctgggcccaggggcccaagccaggaccagcaagagaacactcacagaaagaactagaagacctccttgctggtggggttgtcttagaagggagcaggcaggtgggaccagaacctcctgcaagaaactagaacatcatctgtggggctcagagattgggtggtgtcaggaaagaggctcttctctatttatttttaaaatcaaact

SEQ ID NO: 1888137 - DNA, 4001 bp, Homo sapiens
tgtaagaattacttcgcactatagactacttgctgatgcttaaaatgctcttttctctttgtttccatgtcacaagactgttttggttttccccctacatcttcgtttacttctattttatcttcacttcaaatttaatctcattagttggccaagaaatgttatttcgcaaggtttgttcctacgccctcttcttatactctacagttaagcaaaaagatcccatctgggccaatggcttcaattgtcacctcactacagacgactcatgaattagtgtctctatcacagactgcctgtgagccccaaacccatccattcatctgcctctttgatatcaccgtttggatatcactaaagcacctcatatttagtagtttcaaaataaagttaattgtcctcctctccaacaaattgactctaccctcagtgttttctattgcagggaatgacactatcatctatatgctacaaaacccaaaaatctaggagttatcctttataaccttctatcaaatacagccagctgcatgccctgtggattttatcttttcacattactcaaagctgactattctctctcactttaaggccattaacttattgcaggctaatgtcatttttttttaagtttactgccttacagtaacctcactgccaccacagtacacttgaaatttccaaaaattgccctccttttttttcctctcttacaaacacacatagagacatacacaaactggcatacttaaaacatatctaagtcttcatttcacatgggataaagaccaaaactcttatgatgacctgcatgattggtcacttccaatttttacagcctaatttcacacatgtatgcccctctctgctgctttgccactctgacaatttcttcagtctcttgaacttcccatgcacccttttgtcataagccaggtcttctgatgatttcatcagctacattccccaggcacttgctctgtctctgggcagaggcatcgcctcttacataccacagaaccttctagaagttgaccactgatctgaactattctatgcttcctggtgcagcaacttcttcccatcatatgccttacctcctccagttctcttagtttcttagtttctatacacagccagagtgtaccattaaaatatttggcacatatttaaaatcatgaaatattttaacttgtctctatttttatttataagcccctggatcattcctacagaaatgaacacataggactttcaaagaaacccttcacacaatcttttcttttagtcttgatacattctacagtgtcaggggctgtatctatcttgatcactgatgccttctcagcccctagagcagtgcctggtagagtaaggacaagtaaacatttgttgaatgaaaaagaaaagaaaggatgagggagaaaagaagagaggaaagaaggaaaaaagaaactcacatagaataaatacaatattgtgatttcaggctccagaattcaatgctcaataaacatgaattaattctgcccattcggtttataattaccaaaataatctatccataaagaggagtgaaatctgcctgacctatacacccagcccttcttattgtgatgtctattatttcatttaagaagagtatagatgtatgtttcatttaagaagagtgtagatgcatgtttttgatgtagcactggcaagacagagtctgaactggcctcataaatctccaggaaacgagggtgggtacaaaccttcaaagactgtcttgggctgtgcagcatgtcccaacagctcccatccagtgccgcagccactttggaatgtagctgacctcatggaaatggttctgtacctacatgctgagagtttctcccttgacctttcactttccctctcttttgatcactcatgtcacctttacattttggcatgcagtatatttctgtgtcttggcctgattcaacaaatatctaatttgttgccatggttgtgttttggttgtagttcattgtcaacattctgagaggtgaggtcgagaaatcccgacaagttcttttgctcttccttggtcatgagattttgtgtttttgttgttctctacagagtgatgatttccaattaatgcttctgacataatccagttcaacaattcaacagatatatactttggtgggaatgagagagaagaaattctgccagctacatcagaagctaagtcagagctctgagaagaaggtctagagaaagagaaaggggcataccagaaaggcaaggggattgtttacaccatattactccagttcagaggtcatctgtcccaggcttggctcaatcaaatacacaaaccaaaaaaagtacatgttcatttttacatttcctcaaattgtattccctagtttataataggaatatattttgaagaagtatatgtatacacagtgcatacagtctatatacacacgtgtgtgtgtgtgtgtgtgtgtgtgtgtgtgtgtgtgtgtatctgattctgtgagtctctccacctggccagcactctcctgtaatacttttctttagagaatttaggagattctgacctgaaaggggttatttgaatgatgacaaaatggtgtgtcatctctcccattctactgactgggatgggccttggcttctgtccaacagacctggtttctaattcccatctttactactagatgactctagggatctaggcaaggaagattatgcaacatctctaagtctctgtcttatcatgacttaaaatgatctaatgataaaaatcaacctcccagagcttttgtaagatctaatgcctaaggtgcctagacaataggaagttcttaagggcgctggattctttcccgcccttcctgtggaacataagacttatagcatcttataaagtggcatgatttttaccctgattcaggaagaattactcatctaaacagagaaatctggccttctataatacatactaatttaatccttcttccagtagaaaactctgatccccaaattaactcttttaattattttgaaatgccatttgattgtactctatttagtacccataatcataaggagcttaaggtaacatgaaaacagtacacatattaaaatgtacagaactctaattgaattgtagaacatcctagtgtgtgcatgcgcacagtcctgtgaaagatactatgagtaaggtcaacacaatgttcctgcttttcaaaaaccttattcattcattaacgtttaccacgcttgaagcattgaattaggattcagtgacacattggtaacacaacaaggtccttgcttttataaacttataatataaaggagtgaatagatattaatcaggtaattacaccaatgtatagtatgatgatgttccactgctatgtgttcaaagcttggaaccatgtgtggtgcaagaattcaataaatatttcctgaataagttatctaattaatagttgcatgttgactgaagttgagatcagtattcaaagagacagaaatcttgatctttgatttaaagggtagaacaaaggaactcaactcacactgagatctgaaagatgattaacaagtaaccaagaaactgcttctgagaatgtatattatagaaagggagggtgttagggttctctagagaaatagaaccaaccaatagttctccagagaaatagaactagatatagatagatagatgatagatagatagagagatagatagatagatagatagatagatagatagatagatagatgatagatagatagatagatggataggtagataatacagagtcaaaatggtgatgatttgggaagacagaagggagacaagtaaacaacagctgacatttactacatgctaggcaaagttttaaaactgtgtaagcattagctcaattaatccttgccacaactctatgaaggttctctcattatttctattttacaggtaagaaaatgaaagtgcagag

SEQ ID NO: 1888138 - DNA, 4001 bp, Homo sapiens
aaatggccaagaccacacaagaaatctttgttggggtccaaccatggcccatccccagtgaatgttagcacagtagagtgtagagttttcttcagtatctaagagcttacacaaggcaaaagtgaatgttcaccttggtatacctcaatttcatcacatcctacattcacattgtgtctcttttccaccctcctcttccttacccctaccccttagttcttccgggggatacctgacttcaccagtgcctcacatgcaggacctatgcttctgcctcctctgaatcaaaatttacctaaattattcctcatccctctagaccctgtacatatgttgtggagtgaattaatggcaagatttaaagacaaacagaaacatactctgggtgcctctttcatgatatttgcatggtagtcaagttttcttagaactgaaaaaccatttcattaaataccggttccataattgtaaattccatgcaggtaatcagcaattaagggcaattttttttcttttacttttttttggaggggggaatggaatctcactgttgcccaggctggagtgcagtggcacgatcttggcttactgcaaactctgcctcctgggttcacaccattctcctgcctcagcctcctgagtagctgggactacaggtgcccaccaccacacctggctaattttttgtacttttagtagagacggggtttcaccgtgttggccaggatggtttcgatcccctgacctcatgatccacccacctcagcctcccaaagtgctgggattacaggcgtgagccaccgcgcccggccagggcaattgtttataaggtattcttccgttgtgcatcccccatcccaccaggtaggtcagcctctctacttctgtgcataaacctggaaatgatgcaatggagatgattttaaaatcccttactaaaatttgtactcattcaacaacacttaaccagtttcttctgtggaggagctattgtactcttcagcaagtggcatgactgatctatggataacattattatactaaagcaatttttttttcctaaaattttatgcatttatggcctcggaggctaagcctattatttttcctttattgagtatgattttgctacattttgtaaggaattcatgtaagtgttatctaacatttagactgaaatgatttttcagtttgtttgtaagaaatacttttaaaaagttaagaagtcagaagtctacaaggcaatggagatgaaatatataaacaaggacttggttttaagagttgtaatcacaactgctaaaattaaatcaacttaccagaagcttctgaaaacaaaaatatatgcaaataccataaaatatatgcatttataccacaaaaacccaaacacaggaacctatggtagccattttttctgtcaaaaaccaaggcaaaactgatttgcttccactgaaccaaagctgtgaaatagaatagggatgatcaaagcatgcattttctcaaactttctcttctaccaaacctttcaaccgaactgttagagaagattaaaactgaagtttcatcctcttttgccctttgtctaatcagtacttgggagagaaaataacataggtaggattccttggtttgctgggtaattgagactcagctaaaaacaaaaacttttgcagtatttatagacgatgacaactccaattttgaaaactagaaggcagtgattaaaataatttgtttttctcctctcatctcaagaatgcgttttacttgtattaaggaggaaaatggaggtcaatgtccaatatgctcaccttaaaaagtacctcttggtcaggtgggtgcagtgttctgggaagtcttcacaagcctcctccacctcagagagctccttgctctttagaagagaggaccactgtccttgggcaggaaagacccttctcctacagctggacaatggacaggaagcagcttggagctgactttctctgcgccacctgccaaaggctcctcagtagcattgctagaatccagcgcccagattcggcgcttgttgaagtcaaagttttttttccatctcccttttgaaaatatagaaaatgaccgagatgaaaaaaacagtggcagccattaaataaaagataacaaaaatggccaaagcaagcgtgagatccacaatgaaaataatcagttttgccaacatgtttgcatttcttctcattcacagaatgcatttcaaaagtcccaaaggcatctaccacgtgattatgtctttataaaatgtgggcaggaataaggacatttctaaacatgctaaagagtgttgtaattcttccaagtatctaccaggaaggctggtttaatgaaagttttgatttcccaactggtacaaaacagtggctaaaggtaaagtgtggaatattgcttcactgtggggactctaatggggagaagtccaagaatttatttcatcccacaactgtgtaattactgattcacttggattttaatttccacagggtatagacacactaatgtgcatttgtagcataaaaggctattatagatatctgatgtttcttagaaaattaaaatgtgccagtccagtgtaaatggaaaataaagccattttcagacatgcaaagcttcagaaagtttatttctcttgtgtatgttttttttaaaagttactagagaatataattcaataaattattgtgtttgctgaaagggaaagacttggcatgtaagaaactgcaaatttatccaatagagcaatgaaattaaatcccagaatcatagctcagcagcagacatagaaggcaataaattcaaattagaaaaggaacttagtgagctaccagagacagtctttaagaagacagtcactttcctatgttaagtggtatgatgaaaaggcatgacaatctaaaaataaaatggccagtatacatcttagttaacaaggtaaatgaaaggtaataagagaattcaagaaaaaccacaacattgaataatgagccatgatcctcatatgaaacaaactaaactgaagcacaattctgagaaactgatagaatacaggaaatgagaatttatttgtccttaatattcaacgtttcttctttaagtagcacagattgagagtgggagattgtacttccaaagggttcaattacactgcttgattgtacaatgaaattgccagactcataatatttcaaatactgtcacatgttttacatttctagagacctaaaacaagacaagaaaattaaatttattaaagtgatagaacagaataaaaaggttatgaaccttaacaatttaaaagtaattattatagcttgacaaaagtttggaggcatagtgggagaggtggagagaagtgagggaatattagtttccacaccttgcatagctggaattcaaaggatattgtctaatacgagtgtaagaaaagaagagtaggtatagttttcaaaataataaagaagactaatgggagacctaaaaatacatatttaatgagatttgtaagatagaatgggtagcacaagatgttaaattcttcatctttttggcaggaaactagcaaatactgtttaaaattgctaaacaaaaaatttgatgtatttagcatattatctagatcttcactgtccaatatgatagccactagccacatgtggccattgaacacttgaaatgtaactaatctgaattaatatgtgctataagtataaaatacagttaagataaaacatagaatttaaaatattcattttttaatgttgactatatgtgaaataataacattgtggataaatgagattacataaaatgtatcatgaacattattttcacctattcctttttgctttttaaaatgtggctactagacagattaaacatggttcacattatgtttctattgaacagcagtggtttagaatttccaagctaatcaccacaagaaccaaaactaaaaaatgttaaac

SEQ ID NO: 1888139 - DNA, 4001 bp, Homo sapiens
aagtctgccaggggagaaaaaaaaagtgcatacgccaacttcttgaaacatttggcacctgccgcaatcaccaataaatctaaactggacagcttgacatttcctcaaacaagaccccacctctcaaagaacatttgtcctaacatgaaaaacaataaaagcccagctgatagaatgcaaaacattcttccttgtctaactgcagaagcaaaaacaaaataattgcttgcttaggcagtgatttgagccattccaccatccatgaatgttatggtcctgttcaaatggcatcagtaataaccctcaataattttcaaattggaagaatttatacactgtgtcaacactcttttttttttttttttcgaaacctacctgcccaaagaaaactgcactctgatcttcttaagcattgtatatgcctgaatgagggctgtggaactcgttgcatccttttctactttgtaaaaacacagttgtcagttccggctttagaaacaattcaacttataaacaatttaatggaggtttcctgtctcctcctttcccctttaacatggaggcttcctccgttgtttccaaaggaggaccttagcttccccaccaaacccccatgcccaccaaccctcctccctctctctacgcaagggctgccaagatctcccaaaaggaggacaggatatagcagagcctcttccagtttcccaatctcttgagctgcctctcgaagggctgaaagtttaagcctcagcagcttctgagcacattcgttgcagtcagccacttgaggaatccaatagacctttgcttggaacattgttctgtaggaaaaatacatcccaaattccaggggactttggaacagaacattttcacatgatagcatgtgatctacacaatatgttagagtctgatgcatggtttccatggacctacaagatttcatgggagtttcctagcaatgtcactaacaattaatctaggggcctttgggaaagactagaaagaccatccatttactttaaccattattagcaaaatagagacaaaaagttcattctttgagtttgatttctgttattttataatatatcagaaatagtcacattggaggaaatcagaactgtttgggacttcttttaattctttcatgggttgacattgttattttgatttctatgtagacaaaccaagcttaaggcctattaacaatactaagaaggccttgatattagatagagaagaaaagtatatttatgcaaataccagccttggttttggtactaaactgggtaacatgtgggtgtctgttttcccatgagttaggtttgcctagggcttccttccagtttaatgtttcatgattccaatcatttcttccctgtcttcatgcatggttctccaatggtaccttccttccctggaggaatctttgccaagaagacttctgctatagctaccaacatagctgtgccacctgattccatggattggcatctccatcacctaatgaagcagagataacacggaggacctcagtcaatactatctacaaacctcagttgatatcatttgcaaacctccctgattcagtattaacattcacaatatttaattaggcaccattgaatttcatttaccaaatgtcaagcagatgacaaaattctcccaatttgataaaatttgataaattttaatgttgacattaagtcacttttattttagaaaacagcaagacatcttagattttgaaaacggaaaagtcaatatcaccaaagtctgtttgttggtataagataaaaaattgagttaattctttttgttgtctgttctttgcgcctcccttctttctttctttctctctctctctccctccctccttctttccctccctccctctatccccctctctcacacacacaaacacaaacaaatatatactcaccatcccttcaatgtgtgccaaaggtctcttttcaacagtcaaagcatgttgagcataaaaccaagtactacttggcagggaggtttttattccaaagaacattagattaaacaacctgctaagtcaaaacagcttgcgtgagctttagaatcagataaaacaaagggtcagctaaactatggcctatgagccaaatatgtcttaccgcctgtttctgtatacctgtaagctaaaaattgtctttacattttttaaagagttaaatataatttttaagtataatattttaagacacaaaaattacaggaaatttgaaatttcagtgttcataaatagttttattagaatacaaccacacctgctttcctctatattatctgtggctgctttcacactacaatagaagagactagtaattgcaacaaagaccatatgacccacaaagctgaaatatttattatctgcccctttatagaaaaggtttgccaattcttgcgataggactgcactttgattctgccatttaacatctctgtggcattaagcaagtttcttaccctctgtgacctcagtttttatttctaaattaagtcatgatatacaacttgcagatatctacaatgatgcttggcaccacatatattggttcttctgccacacctctttcccatgtctttctctatgtagctgtcagaggcaacaagccaacagatgttggcacagttcaacttgcaaagagggcagaccacatcatatcttggttgcaagggcctgggctgggcttctgggtctgctttagtaatagttatttttggccagtacctggactttttattattttcctttcagtggaggaaaaagtggatattcacaaatttgcatctcccacttttgctagtatactcctgggaaactcttgagcaagaggaaagtgtgttttagttgttaaactgataaaatgtataaaaatatgtcaataagcactaaaagttggagggtccgggcagcccactccatgaaaattagaattatgtatccaatatgcaattactgcaaagcataacaactcccacagtgagagcccaaaatcacaaggtccttggagacttccctgctgttctccggatctctctgcccacttcattcaaaatttcttttaccactaagtcaactcaacaaggaaaatggtactctgaaaccagctgagcagatgatttctacctcagaaggaaaccactatgtttagagaaattgaagtacaactcgggtagttttctacttaattgggtggcggcgtgttcctgtggaatgaactttggaagaggcctgagttcagatatcagtgtgcctcctacagctttgtgaccttacccatccggctctctgaccctcagtcaccttatctgggtaacgatggaaataatttttaccccatagggttgatatgggataaaatatataaagcatatcatgagcttatgagcaatgactagcacagaaatgctgctatcctgacttccattccaagtggaatcaggggttcaggattgccaccatactgaatacctgccagtgccaggaactatatctatatacaagatgctagttaatatttgcaacagctatgtgtagctgacatttctggcttcatcttttagatgaagatattgattaagccattctgaaataatgatgggaaagtactattttctgtatgaaatgtataaatttaaggactgtagctggttggttctgctgctagctttgttccataaaaattactaatggtgtccagggctgaaaagatgacaaaaataatgtatttaatcttgccaattaaaaaaaaactttttattaaaatacaatatacaaaaagtacccttaagcatacagtccaatgaactttcacaaactgaacacaatcttaaaaccagcacccagactaagaaacagaacctgactagtacccaagaagtccccgggaatgctttcttctggtcaccaatactaattagtatcctgacttctattttttgtttgtttgtttgtttgtttg

SEQ ID NO: 1888140 - DNA, 4001 bp, Homo sapiens
acctagttcatggaatttaagtaaaggttttagaagttcactctgacaaagaaaaactatatttttgtaaatgagcttcttgctcaaaatcagttgggaatatttaaatcaaagtattcaatggactaagtgtcaagaagtcagcagttgaaactcttagggacctgcaattgttgacaacaaagcttgcaggcaggaagatattcaaatttatttctacacaatatacatattaaacagtgaaagctcaaatggcgtgtacaatttccatttgaaagtctataattatgctatggaaaaactcaccttgtggtaagaaactattgatagacctcctgtttttaacagaataaagttgcattgcatatactgaaataaaataaaattgagaaggtctgtgattctgttacatttatgtttagcgaaacattcaaaagtatcataaagttttttttgataagttttgcttgtaaaatatttgcctaatacaagcactctgaggacaggcaaaaagtcagtacatatacagtacatattttagggctgaaacaacatttttatattttagtaaagaataatagcattgctatggattgagttgtgtgttccccagatttatattttgaagctctaccccacagtgtcactgtatttagagatagaacttttcggaggtaataaaagttaaatgaggtcataagagtggagctctgacccaaaggaagggagctttctcttcctctctccctttggacacagcaagaagtggctgtctataaaccagaaagagagccttcatgagaaactgaatccactagcaccttgatcttggacttctcagtctctagaattataagaaataatacccaatctgtggtgttttgttatataagcttgaactgacttgtacaatattcatttagcaaaacttactgtgagcttggtaggtatcacagccaatgtcaagggatattttttctttaaaacaatagagaaattcacatactttaatcatgcgattttgaaaagatctcaggtattttataaaaataagaaaaataataagataatattgaagacatattaccaggttggtaggtatcacagccaatgtcaagggatattttttctttaaaacaatagagaaattcacatactttaatcatgtgattttgaaaagatctcaggcattttataaaaataagaaaaataataatattgaagacatattaaaataccagtaatatggtatgagtcccatgtggctaaaaaaaccccaattaatatatataaatatataccaagaaaaactgttttgcttacgttatttttaatgttcatataataaacattgtatttaaaataattttaatatatatggatatattctatgttgattaaaaaatattatttttcaaaaatagttttgactagaactattttatagttccaccaacaaattaaaatcaataattaatttttaaaatttcaaaatatcatttagatttattaccactcttaaccactttgtttctctcttaaaattgttctaggttggaccatatattatgggagcaccttttgcaaggatgaaatactccgtctgggtaaggcattttcattgaagcttgtagctgtttgtttagttatttaaatcaggttgatggatgtaaagtgagctccttctactcacctgaagcagaaacagtgctaggtgatactcaaatctctgggcacccaagaagactccaaatctcagcatctcttgaaataggtggcaatgtgtaacagcattctagccaatgtaacatattttacgtccaggactggcccctaaaacattttgcatgatccttcaacattcttttttcctttcctactagatggatgggaataattcagctggggatttggaggccctaaagggcagtgtagccaatggacaggtgatcccaggtacctgcatgagtggaggcaggcccttcctgcagacctgcactgaactataacgtgggcagtaagtaactatactttgtgttaagccactatgatgtggggctgtttgttacaactgcaaagattgctgtccttgattaatgcaccatgcaatgttctcccaggcttagtttctctgcttgattgctctcttcatgttcaactcttatatgagttggtgacactttggttgaaacatttccaaggactgaagaatatgtttattatcaaaccaactgattatgaaaataatctgtatttttaaggtatgtgaaggagtaggtatacatttgtgctttgggccaattttatatctttaaaataaaaatacattaaataagcaggtaatattaataattaataataccatataatgatctgtaaagcatatattgatatgtaaaacactgtgctaagtacacatatataagcacaactcttatagcaatgctttgaggtaaatgctttattaactccattttacagatgaggacactgaggcttaaagagcttaaataacttactaaaagttacatatgtggaaatagtggaatggagcttggagtcaaagcatactaggctctaaaacttgggctctcaatcactttattaaccataatagagacattaattctcagtccttagacctcttaagtctcaccatgattcatgatgataattatcagtgatgattgacatttctgtatactcactcactactgctctgtgctctgtgctgtatgtgagatagcttattaaaagtcttcacaatcatcatatgagacaggcatattactgtctgttatatgtatacctagtgtatctagtagttacagtaagcactccataaatataaatcaatcttcagcttacagaagagaaagctgcaatttagagactaaattactgactatagcacctgtgggaatgttcttttaaaaaaagtgacttgggtgtcatgagtctttccatttcagtttttacagattgcatcccttctcttctaaagaaaaaaaattaaaaagggggaaagtagtgtgacttctctaggttaaagcgacccctaagttaaagaggaatgaagaaatttacatttcataagctgagagttcccattgagagttccgtctctccacttcccacctccaacacatatacacacacacctttgtattactttaatacttttgtgaatcaacagagaacccaattttgctaaaatcaaggtggcacaatttagcttcctgagactggtcgtagtcagccttcacattaactttgagcagggagggaaaaagcagcagacacgaggactgagaggctctagctacatagtctggctcaggcttctctaccgtgaaaaatgatgggaaaaagaaaaagaaaaagaagcagaaaaacaaaacccgagacagaaggtaggaggagacactggggcagctccagctttcagcaagccggctctgttccacttccttttgattgtccaggaaagctaagaaaagtaaaaacaaggctgtgactccgtggaagcagccctgtggaaacgttatgttaaacaattggcctgtgggtcaattgtgaagggcgttaatgtgcgagaccccgataaagagatttgcacgaatggccacaaagcatttcatatttaaatatggatccaagtttcttctgcacaacagtataaatataactaaggtggggtggagaaggagatttggaaatcagccgatttgaaggaagccaacacaaacactccaacaaatgcagcatttcgcacagcctttgtgctcattgcttgttgttggcatgaactcataaaaacagaaaaaggccatgaagggtagtggttgagatattgcatgccctggtggtaatgaaatacactgtttatctgaaaacaaccttcatgtcagtgtgctttgcatttcctgaaggtgatagtctattttattttgtttcttgatggtagtaaaagtctagaaaaacgtacaatttttcagaag

SEQ ID NO: 1888141 - DNA, 4001 bp, Homo sapiens
actgggtggggaggggtcagagacttactgctgccccagctgttctgactctgcccccagcttttggccccacccttttaaagcaccttcagaggttcccaatggtgacagtaaacaagtctccactgtcctggccatctctgctgtgttcaccctactcctgatctttctggctgctcagggactgacagccaagatgtgaggctgtgatgagcaggaacagggaggcctggagcccccaggtgagtggagtggcttggctttagggaagagcagcctaggtaagtggatatggatggaagaggctctgaaatttgggatctgaacttggggatcaaggcagcagttctttctttataggaacttcctattaaaaaacatttttttaatttttttaataaaaacaggaaagagccttataggaaagggctcagtactgtagcccaggctctcaaaaattatcagtataacttaaggtttctatgcccagttacttttcctattttagtataataaaataaaatatctgactcactagaggaaatgcataaaatgtgtactcgaagcacaaagataattaattaaagaatcccagcatagccatcatttgtcttaagaaacagagcagtatttaccttagccttcttctgtgggcccccaccccctatatcaaaaaaccacctcctcggtagccattatgctgaattttatgtttatttatcaattgctattctttgtagcttgacttcaactttctgtactcttaaacaatatattgaatagatttgcatgtccataaattgtaaatatggctttacagtatattattctccgggtctttttttgtggtgccgtatcttgctcccactgatgcacctcctgaatgtctgtcattctcacctatgtctctccctttctacccttcttctagccattgtcatcacttccctgatctgcctaaattctgcccagcagtccgtgaaaatggtttgctgatgacatatgtaaggactttaactcccctcaagcaatctgctcatctcaaagggtaaaacattggctcactcctaatgcaataaatgacacataaggtcacaattcaatggtactctccttggatactgcttcttatgtgaacatcaaacttacacttgcttcctacacactaacatatcttgtatatttggagtaaaaattagagaagtacatacagggatttaaaatataaaacatttttttagttaccatttcaatctcgctgcttgttattggtctgttcagggtatctaattcttcctgttgtaagataggagggttatatcattccaaggagttatccacctcctctaggttttctagttcatgcgcatgaaagtgttcatcgtagccttgaatgatcttttgtatttctgtggtgtcagttgtaatatctcccatttcatttctgattgagtttattgggattttctgtcttcttggttaattttgctaatgttcaatcagttttatttatctattttatttattaagctggtttcaagaacaagctttttgtttcatttatcttttgtattgtttttcgttgttatttcaatttcatttagttctgcactgatcttgtttatttcctttttcttgctgggtttgggtttggtttgttcttgtttctccagttctttgaggtgtgaacttaggttgtccgtttatgctctttcagattttttgatgttggcatttagagctgtgaactttcctcttagcactgcctttgctgtattccagaggttttgataggttgtgtcactatttgcattcagtttgaagaattctttaattcccatcttgatttcatacttgacccagtgatcatttaggagcaggttatttaatttccatgtattttcatggttttgaaggttcctttcggagtggatttccagttttattccactgtggtctgatagagtactttatataatttcaattcccttaaatttactgaggctcattttgtggcctatcataaggtctatcttagagaaagttccatatgctgatgattataatgtatattctgtagttgttgggtagaatgttctgtaaatatctgttaagtccatttgctctagggtatagtttaaatccattgtttctttgctaactttctgtcttgatgacctgtctagtgtcgtcagtggagtattgaagtcccccactattattgttttgctgtctatttcatttgttagatctagtagtaattgttttataaacttgggagctccagtattaggtgcatatatatttaggattgtgatattttcctgttgaacaggccttttatcattatataatgtctccctttgtctttcttaactgctgttgctttaaagtttcttttgtctgatataagaatagctactcttgctcgcttttggtctccatctgcatggaatctctttttccacccctttaccttaagttaatgtgagtccttaagtgttaggtgagtctcttttttttttaatttttaaattattattattattattattattatactttaagttttagggtacatgtgcacaatgtgcaggtttgttacatatgtatacatgtgccatgctggtgtgctgcacccattaactcttcatttagcattaggtatgtctcctaatgctatccctcccccctccccccaccccacaacagtccccagagtgtgatgttccccttcctgtgtccatgtgttctcattgttcaattcccacctatgagtgagaacatgtggtgtttgcttttttgtccttgcaatactttactgagaatgatgatttccaatttcatccatgtccctacaaaggacatgaactcctcgttttttatggctgcatagtattccatggtgtatatgtgccacattttcttaatccagtctatcattgttggacatttgggttggttccaagtctttgctattgtgaatagtgcctcaataaacatacgtgtgcatgtgtctttatagcagcatgatttatagtcctttgggtatatacccagtaatgggattgctgggtcaaatggtatttctagttctagatccctgaggaattgccacactgacttccacaatggttgaactagtttacagtcccaccaacagtgtaaaagtgttcctatttctccacatcctctccagcacctgttgtttcctgactttttaatgattgccattctaactggtgtgaggtggtatctcattgtggttttgatttgcatttctctgatgaggtgagtctcttgaaggcagcaaatagctggtgaattcttatccattctgcaattctgtatcttttaagtggagcatttaggccatctaaattaaatattagtattgaaatgtgagatactgttccattcatagtgctatttgttgtacgtatatgcaattctcatcaaaataccaccatcattcttcacagaactacaaaatcaattctaaaatttatatggaagcaaaaaagagcccgcataaccaaagcaaaaagaacaaatctggaggcatcacattacctgatttcaaactatactataaggccatagtcaccaaaatatcatggtactgatataaagctaggcacatagaccaatggaacagaacagagaacccagaaataaacccaaatacttacagccaactgatctttgacaaagcaaaaaaagacataaagtgggggaaaggacaccctattcaacaaatggtgctgggataattggcaagccacatgtaggagaatgaaactggatcatcatctcttaccttatacaaaaatcaactcaagatggatcaaggacttaaatataagatgtgaaaaaattccagcagatgacatcagaaaaactcttctagatattagcttaggcaaggatttcatgaccaagaaccaaacagcaaatgtaatataaacaaagataagcaactgggacttgattaaactaaa

SEQ ID NO: 1888142 - DNA, 4001 bp, Homo sapiens
cacacccagctaatcttgtagttttagtagagatggggtttctccatgttggtcaggctggtcttgaactcccgacctcaggtgatacgcccacctcggcctcccaaagtgctgggattacaggcgtgagccactgcccctggcctgaactgtagtttttactgcttccatttaaaatctgagaaactggagaaaaatcttgtactcaagattgggtaaatctcttaaaagttatttaaagcagccaggtgcagtggctcatgcctgtaatcccaggactttgggtggcagaggcgggcagatcacaaggtcaggagatcacgaccatcctgctaacacggtgaaaccccgcctctactaaaaatacaaaaaaattgtccaggcgtggtggtgggtgcctgtagtcccagctattcgggaggctgtggcaggagaatggcgagaacctgggaggcggagcttgcagtgagtggagatcccgccactgcactccagtctgggcgacagagtgagactctgtctcaaaaaacaaaaaaaattatttaaagcaacattacaaaaacattgaatacaataagaaaaccaatgtgcttaatacaactattttgattccttatttcttcatagtgttttgcagatattcacatgtccttcttattgatgtaattgtcatgaactttttcacttaaagctttaccattttcagtgagggtgactaaattttatatagtggtagagtattccttaaacaaaatgcttgggatcagaagtgttttggattttttaagattttggaatatttgcattatacttattggttgagcatccctaatagaaacattcaaaatccaaaattctccagtgaaattcactttgagtacaacctttcaggatcgtgtctgttctcaaaaaattttgggttttggaagattttggatttcagatttttggagtgtggatattcaactcacatattttttgtttgtttgtttttgagacagagtctcgctctttcgcccaggccggagtgcagtggcgctatctcggctcactgcaagctccgcctcttaggttcacgccattctcctgcctcagcctctcgagtagctgggactacaggcgcctgtcaccgcgcctggctaattttttgtatttttagtagagacggggtttcactgcgttagccaggatggtctcaatctctcaactcatataatttttatgtttgcatgctatttattaaatcagtctaccataactttactcttggacatctagattaatttttcacaattataagtagtatgcaagtgatcatctttattctgataatacttttctttgactgaagagaaattccaagaaatgggtatgaacacctttgtatgagcaaatcagtaaaactttagcaaatcacacatttttactattctgataagcttttctaggatctgctgatgtatatgtttttaacaataattacatagttcagttctgtattattaacttgaaatgatcttaaatttttatcacagaaaatattaaacacatgtacactgggcaatagagtctgtcgaacccctatgtgtccagcatcagtggacacccaggatggcagctctgattttgtcaaccctttaacatcttctattactttgaagcaaatctcagtgttatttcatctatacatattcagtgatttatttttttaacctctacatttacatccaaagtccttaccttgtctttctagctgcataacccacatgcgttaagcatcccctgtggacagtgggaaaccattgactgtttccgagcagaggaaggataaagtggtgagaactgtactttgtagaatgaacttgttagctgtctgcaggatgcttgatgtggaaacacctggaagtgaggagctggtcatccatgtccagccctccagctgtgatgctgctgctcagctcattcccattccctcctcccgctccctgcctgcatctgtctccttaccctcttatgaatagttggtgactgagccctgccatggctgaaagtcacagtcaaatagaattctcagttaaaagttccttaaacaataggaacatttgattttctttcatgagttccgaggcccgagcccagggactccagggctggttactttggcagctcccaggtgctggggttctgttttcctctctgtcctctacctcatctcctcttggttacaaaatggctgccacagcagtgcccttacaccctccacgtctgtgtccaaggcaggccagagggttggtgtttcctatgtcctctgggcagagctgggttactgtccagcaggtcaccagggagtttgggaaagtggatttgtggcattttcacactctggagtggagttgcagcaggagaggaaggctattaggtcaagagagcctgccttaggggctcttatttaatagcctgttttacatgtgaaaaagctttagtctctaaaagctttctccaaaaccacaggtaggccatggcagaatgaagcctccaacccaggttttcccacctgaggcagcggtgttcttttccccatctgtcaccttgagtctctgtgcaggaggcttgggtggagcaaatagaggcctggaaatgggtcagcagtaggaacagagaaggccagagaagtgggagatgtggagaaggaccctgaggtgacagcaagccttgaacaggctaacagggacatgggcaggggcagctttggggttttcgcgtgatgccagcaggacagtcatggggaggtccggccttcaagtttctgtcagatctcccgcgttgaggcaagtcatctgttagaggtggtcatcagggaggatggagcccagcttgtgtggggatggctataaagtggaagaggagccagggaagtacctcagtttggaagcctagtgggagagactttctagaagggcagctccatgctgtctcactgtaagaggctgaggaggtgagcatttggaaagtaccattgggcttgctggccacacagtcaagagtgatcatgtgtgtgtttgtgtgtgtgtacgtgtgtgtacacatatgtatcttaaacttactttgaaataattccagacttaatgaagttgcaaaaatagaccagaagagttctcatattccttttacccagcttcccgaagtgttaatgttaatgatctcacatatctgtagtagtgatcaaaaccagcaagttactgttggtaacatagcattaactaataatgaatctgcaggccttatttgaatattgccattgtcccactgggtccagaatccaatctagaatcccatgttcatttaggtgtgtctcagcctcctccagtcttacgatcttgatacttctgaagacacaggccagttattttttagaatgtcccttagtttgggaatttgatgtccttggtgtgccatgtcagggcacatggtattgatgtgtctcatgactactgatgctgaccttgatcactcacttggtcaagatggtatcagtcaggtttctctgctggaaagttactatttgtttgtttctcaagagaacatttcttaaatggacttcttaaaacacaggttctttttagtggctcatcatttgactgtcttcagtagcctctgttgatgtttttaaaaatcaaaagaacatccacttggttagaaaattcaaagacggaagattattaaaaaataaaattctcctcattgtatatcctcctgaaaaatttcctgtgcaaatagtggtgacctttttttttttttaatttttgatttttaaaatttcaatagcttttgggatacaagtgggattttttttgttatgtggatgaattacatagtggtgaattctgagatcttagtgtacccgtcacccgagtggtgtacatggtactcaatatgtacttgtttattccacaccttccacacccacagtgacccttttgacgtggcgtcagtggcatggt

SEQ ID NO: 1888143 - DNA, 4001 bp, Homo sapiens
acctcgtccttgaggatccactctgttgggaggacgctctgaccttgcgctccgaggcggcgctcacaggcgccaattcagaatctagtcttcctctccccttcctcgctccctccttccaccgccgcagtcattccccgcggagtttcgttgtgttgttacacaagccagcttttggtttgttagttgttcgcattcccccagggtttgcagctccccgatctggctcagctcttcttcccatagtttctttgcagctagcagctcctcatttctcttttcgtcaattttcttcttatttttaagtatgatgtggcggatcttttttgcaaaactacgggcatgtgtacgtgtggagcttggtactataacctgatgcataaagtgcgtttttagcccgagctgcttttttattttccccttcaaacgtaaatttaagaagaaaattaagagactcaatttgactttgattttgaaccacaggactcatggctcagtgctcttaaaactcttaaaaacacagtaaaagcgcaggtcctgagcagagccaggactcatgcaggagcgaaagcgggcctattaaggcctgaggctaggacgtcgtgaggaagacccgggatcccggccctgcggcccctgcgggctgctgctggtgggtaccagctttcgttgttaggcccaagtctggccagggctctcggggagtgccacctgtgttttctgccctctgttacttcccgcaagaaccgaaatgcgcacctgtatgcccaagttggacttaaatcagctttttcttaaggtttctcctggagtccttgaaatgcatgggcccggggaacatcccggcctattgcttgttttaactcccggaaacaaacccaccaaaaatcaaagccaagtatgagacatgaagtgggggcgactgtagctccaagagcggccctgtcaccgaacccctgggtgtttagcagtgtgaagtttcgggtgttgagttcacggctcaggtggcgtgcagcaagggagttctcatcagtaaccccccttgccgccaacccccagtccccagaagggcaggcaccccttcgcgcctcctttttgactcccgctttcggcaaagagtttacctctctttcttttcctgccttgggaaaactgggcgagggcccgaagcctctggggtaccctcagatccatcctctgccctgctaggagtccagccccaggcggaggagttttgccccaggtttctgagtgcgccctcagctaacaggctcccgcgaccctggaagcggaactttgttgcactccgcttccagaggacgctgaaatacggtgccaaacccagccaagcaaaaacgcagaatccgcgagctctttacctctgtgcgctcagcgctgactagtagctgtccccgggccatggagagggctaagctgcctccttgggaggtgggagagacgtttcttttccttctgcaatctcatcttagggccatctctcaccaagcctagcctgcagctcgggaacccgcgatacccggccgggggacgacagggggcgacaaactgtaaggttttccctatgcccgaccgtgcagaaggctgcagcgagggctgtgtgctcccgatcgcgcacagctggctgcgggaaaggggccaggattgagacgaaggctcgcggactctgctaccggggagaaccaccccctctcatcgtgcgcaatccccagactcacccctctacagtagcccccagccacgggcggccttcacggggacgggggcggagttttgtcctggactgcgactccttgccacttttccaagctcggcagcagaggtggggtggacgttcccctgaaagggtagttgggcgaaccagctctcacggtgtcacgaccggctttatttcctcgtctttagagtgtgcctgttgactcctcacctactggggggaagaagcggctttagctgcttttccggatcacgagtatccactggactgaggcagggatgtggcgttcctttatctcagagactccaaggtctggaaatcaacctttcttggtatctcgcgcccgacgaagctagcagattccgcaatggagagcactgggcagggtgcgtccccactccccgcacccccggagccccgagcatactgtgcgtgcttagtcctctcttcgctgccttcgcggaactcctggcttaggcgtgcccactttaatccaaaccattccctttccctgttccttactccaaacctacgctgtcatggacaggcctaatcttctacatagcttcccctgctcccactctcgcaccctcctgccagtgcactgaccctcaaacctcctccaggtctccaggacctcccagagccagagactgtactgtgttcatgccgccggagaggaagagttcacttcttttaaacctgatttttctttttccaggagtaattcttgtctgtggccccaccgcgtgctctctctagagagtccaggaattatgagccagtcactcctgacagatacatttagacaggtggattaggagccagggatgctctctggccctacagcggaggcaaaggggtcggggcctccgcagccatggctccccagggtgggctgatagggtccatgtgctcctcagccactgtcaccgcgctggcgccatactcaactctgggtggctaaggagagctagacccttggggtgggcaggagggaggggaagagggttctctcctccaggggagcgctgggagtctcagaaacctcggctgttcctactctctcccctatgccctcttcctggtctagcacattcagcccaatgcctttggtgcttactgggctcaacctcagagctctcagatcctgaccccctcaaatcagttcatgttcaaaaccacgagtttcctcctcttggccctcaccgcatggctcccggacacagttagctgcacaggttggggagttcagaactgctttggtgcagggtagaaacagagaaattgttgatgttcaatctcaggggtgaataattcagggctgcgcaaaacctcatttaaatgaaggagaaatgaccattctgtggtttaacagagacttcctgaagctgcaggtgctgggagaaagacgaggccaggccacctgggatagagtggtgcgagattccaccgccagggagaaaggaacttgtccttcagacctagagctggagctatgcatttggcctcccgccggtcgcgcttggggacaggagggcgccggatctatgcgccccttagcagcagatcgggatccttttgcctcctgccccttctgtcactgcttggagagggatgagttctggtggctgggcctggctgtaggagacaggatttggaccgtgcccctctcgcatcaccgaaatcacccccactattccaagagtggttggctattaaacgtgaagatttcctgagagaaggattgaggacctggccaggaatgggacacaagttccgccttgtgtcttcctgacaggagccctgcaccgcgctggacgctcaccttgacactcccagccagctggggtactgatcccacccttccccggccgctgccccgggagtggggaggtagagagagccacacccgaaacacctttccacgataaacttttattctctatcttattattaatggtggcggaaataaaactaaaaccaaaacgaaaacgagtactagtactaacacactaatcaatttgagatgacttccccctcattcccaaagctagaggaggaagggggctgaaaggggctcagagcagtggaaggtcccaggcccagctggggttgggacgtgtgtgtgtgtgtgtgtgtgtgtgtgtgtgtgtgtgtgtgtgtagaggggtgggttccgggggggtggtggaagagggccgaggggggaggatagaaggagggggtagagtttcagggcggggaggggggcgctggggcgcag

SEQ ID NO: 1888144 - DNA, 4001 bp, Homo sapiens
accagtttcgcccaccagccctggtctgcgggacgctgctccggtgtggaaggtggaactggcatcgagtgcatttcagtgagctcaccttcactccttattccacatgggtgttcaacggggagccctgagacattggaaggggccgtttgtgattgctcaattatagtggagacatcttcgcatttgggggaggaagagggaagctagaatttctgaaatgctcaaaattcagcctgaaatgcatgtcggtgaacaaccagttgctaattacctaccctaggccctaactctctgacacgtaatcatagagcattatcgcctggtttagtatgagcggaatatgcaggaacccagagtcagtcaacgtgtgttgttgtgcctagaaatttactgagcgtttttcaccagtatggaaaaccacggcaccatgacgccaagccggtagtgtctgagtcactggtcctgtgctccaggcttggcctggctctggggttgtcgggatcacattcttacaagacaaacacctggatactttattacgtcttctagagagcttgtgcccaagcatttacctatcgaatatgtgtgtgtgtgtgtgtgtgtgtgtgtgtgtgtgtgtttaccaaaagttacctttttcaacttctcttttgtttctcctttatattacagaaagaactttttgtaatgatgcatgtaagtagattatacaatctgtgaatttcatttcaagataggacaggaagcgttacaaaatattcgtggtctccaaagtgattctgacacctcatgatgactaagacctttggttgccgttgcctcaaataatttcctcctagagcagcagttcttcacctcggctacacattgaactatgtgggaagctattaaaaatacagatgcctgaaccccacagccttcattatcttgtgagcatctgggccaagttcagtgctggtgctcttgttcagatggatgtagctggtggtgcagagatccatgagcttgcttttatgggactttctgctgttgttgatctgggatgcagtcaggatactagggcttttttaaagctccccagttgactctaatgcagccaaatttgagaaccattctctgctcaataccttcaaaaatggaaaactaacaacctctcactcagtgccaccccaggtatgacgtgcagaacagcagcatcagcatacctgggagcttgttagaaattcagagtttaggatctatctcagaccagctaaatccagatcttgggaagtggggcccaggtacttgtattccactccacgcctccacaacattggcttacttttaatttagctttaaattacaattttaaaatggaattaaccagaaggcaagggtatacgggaaattttttttaacacttctcatgtaaactcaagtcttttattcctttttcaggggtaaagcaggcttttccatttacaaggttattcatgagttgcaaaaattccctcccttcctccatgcttttgtaattcctacattccgccatttagtcttggtggccacaatcaaacagaaatcatgagggccctttcctcttgcatccgtagtggcaacctttgcagcagacagtaactgctccagatctgtcaaataaacgcaagtatctgtatttctaaatcacctctcagtaatacttttgcatactggagttttcactttggcatgccctaatccttacacaagcacgaattcctctaaatcccagcctgaatttgtttaacttaccagagaaggcttgcccattgaagattggttcttcagccactgcttttcattctcataccaaacaagtgcatttttaagaactcgcgagagtcttgctactcttcaacagagaaagtcatctccaaattaatccacagtcaggagcacctcgtgctgcttttatatatcattaaagtcctgtaaaagcaagctcacggatctctgcaccaccagctaaatctatctgaacgagagcaccagccctgaacttggcccagatgctcacaagatgatgaagggcacccctcctccagcctgttcttgtcctctctcccagggaggcttagtcctttggcacaaaagcagtggtggccattcattccttgccctagtgaagccaacttcctccacattcattctgcccatcagcatctgatgcccccacaatggcaaacactgcaggggaccaaagtctgactccaaaaggaggcagaatgccaggtcttctgcagtgatgccctcgaatggccatctctcactgcctgggattagcctacattgagatcaatgattagcaggtaacttgtgaagccgactcctaaaagtcccattcctccatcttagctcatttgggaaaacagtttttccaacacttcttacgtaaattcaaatgttagattctttttttggatttcacaaataggactaataattgatccactcatgtaaatatgaatacagtgaattgcatatagtaggcactggattatttgttaaagtgttgaattaggccagacacagtggctcgcacctgtaatcccagcactttgggaggccaaggagggcagatcacttgaggtcaggaattcaaaaccagcttggccaacatggcgaaacactgtctctactaaaaatagaaaaaaaaaaaatcgctaggcgtggtggtggcacacatctgtaattccagctactagggagactgaggcatgagaatctcttgaacccaggaggcagaggttgcagtgagccgagatcgcaccactgcactccagcctgggtgacagactcagactctatctcaaaaaagaaaaaatgttgaattaatacatgtatgtgaatacactatatgtatgtgtacatgtgcatctatctatatagctgtatctccatctgtatgttcattgatctatgtgtctgtatatctacagatagactgccccacctgacccaacaaccagtccaataaatgagcccttattctgcactgccaaccagacttcacagcattcctaacatgtttcactgagtcctcacacaaagccaagaaataggtattattcctgaggtctcataaaaccatctgagaaatgtgtagcagagaatcaaagccatgtatggcaaaaaataaaaaattaaaaaaaaaaggcactggtgcaaagatttccagaagtactggaggagccatgggccacctgagaactatggacttcacaagatcagatgcaagggagagaaattacctggtgtaggggaggattagaccttggccacctggattcagtttccagtttgccagggcctcagcaaattcttccttttgtgcacctgtttcctggtaaacttcctgcagaagcagagaagctggtagggcttggaggaaactgaaaaacagggacaatgaaaacagtcctttgtatgacacatttggcccttgtcaagaaatacaaacggggaacctagcttaggaaaagcaagacgtcttcattcatttcctcaaggaagtggcccttgcctatgactgctacgagtcagtttccaaaaagctcaatattaagctctgattgctccctagcagaaatggctgctttcatttattcttgcccatctggcacaaaagcaatatgcagagctcaaaagaggtacgcagaggtggcccggtaaacactggcctccatttcatttcagtgggggtgggtcatggttctgcgggaacaaacgctgaatccttgctccgggtgcatgaaaggccgcatccaattttgcctcccgttgctttcccagtatccagcatgcctggccccacaatagatgctcaataaacacttgagtgaataaattattaacatataatcatgaacgttgttaccaaatattaaacaccttttatagaccaagctcagggcaaattgatttacatatcattgtttcatttactcctcctgacatctgaaggaggtagagggacc

SEQ ID NO: 1888145 - DNA, 4001 bp, Homo sapiens
ctcactgcagactgcagccttgaccacctggcctcaagcgatcctcccacttcagcctcctatgtagctaggactacaggcacacaccaccacgtctggctaatttattttattatttgtaaagacgagatctccctgtgttgcccaggctggtctcgaactcctggggcctgtgtcccctcctggggctcaagggatcctcctgccttggcctcccaaagtgctggaattacaggcatgagccagcacgcccggcctcattgttttttaacgtgtgaaatctctaaatagaacactggcatttaataaaaaaaaaatatttttgacaccatgcagtccacatctctgggccagatgtgggtgagccacagagtctgcgacctctgacctgtcccttctcctccaaggtggcttcctcttccacgggctctgttaaatgctccatgtgggcaacaggcccgcagcacagactgaaagggctttccttttgttctttctgccagaaaacgagcctccatctccactggtctctgggattattgattacaacatgcccctcacctccacctacctgaagcagatgaagcttcgagtgatgaattcccaggagcaggtaaggcggccgtctcccctcaccccacctggaggcgtcctgacttgcctggcggtggttgattctttccaagacttggggccacagcttgtgtaaacacacgggaaatcaaagaggcccttatctggttatctgggttgtccaggcggagaggcgggaggcaagaatgtgtttctcgtgagagggtctcctgtgcagacagccctgcaggtcttcagggagaaaactttccccttgggtgggctcgtgggaggagggggaggaggggacgtggaagggagggagccgcagccctggcccctggagttgttctttctctgctctgccctttatcgctggcctcttgccaccttcccccagggaggcaagagagagtagccgcctgcctgtggcctctgtcactcttggggcccagaggactaggggatagtccttggagggtggacctggggcctcctggccgtccaagcctccccagctggggtttgccaagggccgtgagacaccatggaaacaggctatgaaaagaaactccctctcgcctgccttcccacacagtccacctcctaaccctttgcaaagcacgtagcctgactgtctttcaaagaaggactaggtgagttcccctccacctccaccccccaaccactgcctaaaaccagggtaatcacttcttgccttcagcttggagtgttctcatctcttatggcatccaaacccatcatgtccttgtggccctagcaggggattggattctttctctcccattgaaagatgggtcagaactcgagtctgtcttccagccctggatgcagctgtcctgcgctgccggtctccagccctgggtgcggccgtcctgtgcactggtctccttgacaaccccagcatgcgtgctccgagggggtggtggctccttggccagatccatggtgatgtagcaggacacgtgcaggtggcatcttggcccgtgttacccagtttgaggacttcagctgggtggcttgaacctgcagagctgcgtattcctttcaagaggcagggcggccagccctcctgtccccacactgtgcccagaccctagaggctgtgtgacgtaggctttgctctgagcggtagaactgtttgctagaactgtgtctcccacgtcttctcatctgagcgtgcctgttctgggatggttgcatctccaaaaacttcacatcatcacaaataattccagtggggaaaatgggcttgggttgggtttccaacgcacaaaggcaaagtagtttgagctgcaggagtgtcggtaatgagggtgttgcttttgttgttggttatagaatcccagcaccactgtgcagcctctgcattaggtctcctctcactgccactgaagagcaatctgtggcctttctttcctgtagccatcctcactgtctccggcacctggcttcgtaaacactgttatcaccgtgctcatctgtgcccatgaagaatgaagcacaaaaccgcacaaacagccggaagcacagccccctggttttgtttcatacagaatggcactaaatccaggtcaccactagaaccagtagtggtcagtgtcgtgcaagttgcgatctctcactaacaaatcagatatttgatctggttaaaaatcctaactgtatcttcacttgcgtcaatggaaggaggggagttaagactatgggttaggtgctttaacgaggattcagtcattccacaaatatttatggagctctgttctgtgagccaggctctgaggatttacagaaacagcagtacccctagattttctttcttttctttttttttttttttttttttttgaggcagagtctcactctgccacccaggctggagtgcagtggcccaatctcggctcactgtagcttctgcctcctgggttcaagtgattctcctgcctcagcctcccgagtagctggggttacaggcacctgccaccacacctgctaattttttgtattttttgtagagacagggtttcctcatgttggccaggctggtctcgaactcctgggctcaagcaatctgcctgcctaggcctcccaaagtgctgagattccggctggcatccctgtattttcttctgatctaggggagacagacaccagccagaggatcccacacaaatgcccagctcacagcaggcagtgataaacaatggaggaagtgatcagtggggcattgccatggtgcagaaggacacgtggcactgggggtacttagggtgggcttggagggtggactgaggcaggggtcagggaagctgtgcctcagaaagggagcttcagctgagagtggaatctgaggggaagagagttccaggccaagggaacagcttatgcaaaggccttgtggctcaagggaggaccaagccttcaagagatttgaggggctggtgtggctgcagcagagaatgtgaggagttctgttgccgaagcaaaagggggaaagcacagtgttgtgtgcataagcacctgatgagtatcaggggatgaaccgaagttcatgacctgagatgcaggaattgccctggtgaggctctggtagctcccaaaggaagaaaggactgtggagggcatttgtctccagggtgttctgggagtccagctggggcagggccaagatcgaggtggcctctgcttacagtggggctggatgtgacttcctcagcttcattagtagtttccaggtgggggcctctgaatgtagccagcttcttctgagtgcggcaggagatggaagttcaggcctgcctttcaccacctggcaggtgaagcagcctcccgcctcatgcctagagcccttcatctgtcagtcttcagcactccatgcaaagcaatgagctctcaaggcctcagcctcttaggcagtgccgttatccctgttttatggctgggcacgtggcgcaagatgaaatcacatggctcaccagattatttatctgcagcatcaaggaagggccaaggacccagcagtctttgattcttcagcttgagttagaactaaaaatacatatacttgaattactagcttatttcctgtgcagcaaaggcaggccagggtgggcgaatgactccccaccatccaaacacagccgcaggacaggttcggctgctgtcaaatccgatgtcccaagacaaggctttgagagtggtttcatttcatcactctgaccacaaaatgccaaaagaggacatctgtagtgtttgcaaatttctaatgcaggttacatggaaaataaatccaattctaaagtaaccggtaaccaggataaatattttgttttattttattttatttatttattttgagatgtagtctcacaccgtcaccctggctggaatgcagtggtgcgatctcg

SEQ ID NO: 1888146 - DNA, 4001 bp, Homo sapiens
ccctttaggttgataccactgttccctcctatgggcgatgtcatttatcttcattgggctctactatcttcagaggttcttcttttgtggaattgctttctgatttttcaaagttccatggcatcagtttcttctagtggttaagagtggccagcaagtcaccttctcatgaaggctgtttgtacaccctcctgggggccagagcaaactctgccaagacaccagccatgtttttgaggcttctctcccaagcagactctgcaacctctctgcaagaatgtgcagactatagcatgtttgtggcagcctcacatactgatcctagagcacttatatcttcctcagtgtcaacttcaaaacaacctttctgtgaagctttgttagatctaataggatgcatgtctcatcgacaaagtgattcagaaaatgcaagcagtcatcttcatcacagtcctatggacttccaggctgaggtgacacgcagggcaggactgacaggtaggccaaagttctgggtagagaaggtggcaccaggcaaaaggtttggaaattgagtggagggcctaggaccattgcagccaggaactgagaaagctggggttgggactcggggagagggaagatgtaggccatagactgtagtctgaccgtgagactcaggggaggatgcggttgagagcatggagagggtgtccttgggagaggacctaggaaataagcctccatgaaagggccctggagcaggagctgaagcctaattgacatatcatcaccccatcccttcatgcccagcctctctctgctgggatcactccctggcaaccagctttttatcaatcccctctacctggctggcaaatcctgagcttcactccaggtggtcacaatctgacccttgtgacctcatgcttccccacccccatttgtgaagttccatcacaggaagttcttctccagtggcccctgatccagggagacccaccctgcaacagcccttgtctccctccgcccttggttccttctcacccatctcaccaccatctgcccaggggagccacatgtcccaaattttggagagaaaataattgaggctcatttccaggacagaggggcaagctgggtctaaagagccaagcagaaaggcttcccaaaatcgctaggttgggaggggtcagagacgtgtggctgccccagctgttctgactctgccccagcttttggctccacccccttaaagcaccttcagaggttcccatggcgacagtaaacaagtctccactgccttggccatgtgctgtgttcaccccactcctgatcttgttggctgctcaggggctgacagcccagatgtgcagctgtgatgagcagaaacagggaggaatggagcccccaggtgagcggcgaggcttggatttagggaagagcagcctggggatgtggatatggatggaagaggctctgagatttgggatctgaacttgggcatcaaggcagcagttctttctttataggaacttcctattaaaacacattttttaaaaaaaaaatttaaataaagaaaggaaagggccttataggaaaggccacagtagctcaaaaattatcagtataagttaaggtttctgtgtctgtttacttttccgattttaataaaataaaatatctgactcactagagaaaatacataaaacgtgtactcgaagcagaaagagaattaaagaatcccagcatggccattactcatcttaagaaacagagcagtatttaccttagcctccttctgtgggccaccacccccttcaccaaacaaccacgtcctcggtagccactctcctgaattatatgttcattagtcaactgcctttctttgtagcttgacttaaactttctgtactattaaactatatattgaatagttttgcatgttcgtaagttttaaatacagcttgacactctattatcctgttgatcttgattttgtggtgccatatcttgctcctgctgacccacttcctgaatgtctgtcattctcacctgtgtctctccctttctactcttcttccagccattgtcatcacttcctcaagctgtctaaattctgcccagcagtctgtgaaaatgttgtgctgatgacatatgtaaggactctaactcccctcaaacaatctgctcacctgaaaggctcactcctgttgtaataaatgacacataaggtcacaattcaaccggtacccatcttggataccacttcttatgtaaacatcaaatatacaccctcttcccacacactaatgtatcctgtatatttgaaataaaagttagagatatacatacagagatttaaaatctaaaactgtcccctccccagtaagtcatgtatccgttaaaagaatatctggaaacctccaaaaggaagccaagcatagactatttggaagaacttgaaggagcgagagctgaccccatctttgtacactggcagcacaaggagtaagtgttaccctccctcataagtaagtgctacgcttccttataatttgctagtgcttaaggttttcagtccgaaaacttctccagcttggtgatctctgtctacctggtggctccatctagagggtcaagtaaaaaaaaatgaaacccaattgttggcatttttcaagagttatgcaagtagtgagtggggtctttcttctctctttatgcctttgtaatttactctttacatttactattacacttatcatgatctgttgtttattcgtgttatttaggccaatgcttctaaagctaactgctttaggatcatttttgaaatttccattccttttcaaataaatatttttgtaaaagaaattgttttaaaaaagttcctggaaaaataaaatgcaaaatttatacacattagaagtaaaaaaatgtttattaataaatttagcaagtcagaacagctatatagaaaaagaaaagaatttcagaaactgtacttggtgtttgttgatagtgtgcacatgggggataagtgtggaaaagagcaactcaaggtgtgtttttcctctgttctctcaacagcaacaatcaacacggaagacttctgtgaccaaatgtgtgcacgtttctctccatacaccaagcaagcaatctattctgcagcagacaccaactggaagtcctccaattcaattcaattctgacactgtctacctggaaatggcctcagcaaccacaggttgagagctcagtcccacaagaacacctcctccttccaaccagttgaaactccacacctccagaacttctcactgactggcttcgagttgaggtttccacagtcctctgtttgagtttgattaatttgctagagaagttcacagaacacaaggaaacacttacttatgttgatcaatttatcacaaaggatgttttaaaggatccaaatgggggccaggcacagtggctcatgcctgtaatcccagcactttgggaggctgaggcaggcggatcatgaggtcaggagatcaagaccaccctggctaacacggtgaaaccccgtctctacttaaaaaaaaaaaaaaaaattagccgggtgtggtggtgggcacctgtagtcccagctactcaggaggctgaggcaggagaatggcatgaacccaggaggcagagcttgcagtgagcggagattgcgcctctgcactccagcctgggcaacagaccaagactctgtctcaaaaaaaataaatacataaaataaaaaataaaaaataaataaataaataaataaataaaggatccaaatgaaaagccagatgaagagatatatagtgtgaggcctggaagagcacaggagcttctgtccctgtggagttggggtgtgtcatcctcctggcacatgacaggttcttcttctgcttcctgtcagcctccacatgttcagctctccagaagctctatacatcctgtcctttcaggccttttatgaagactccattggataggcaagataa

SEQ ID NO: 1888147 - DNA, 4001 bp, Homo sapiens
agccttctttctggaccttatgtttctgggcctttctggttcatagacagccccttctcgctgtgtccttccatggtggaaggggcaaggcagctagctctctggggcctcttgggcactaagctgggcatggtggctcacgcctgtaatcccagcactttaggagggtgaggtgggcagatcacctgaggtcaggagttcgagaccagcctggccaacatggcgaaatgcagtctctactaaaaatacaaaaattggccaggtgtggtggcgggtgcctaaaatcccagctgctcgggaggctgaggcaggaaaattgcttgaacctgggaggtagaggttgcagtgagctgagatcatgccactgcactccagcttgggtgggcaacagagtgagactccatctcaaatatatatgtgtgtgcgtgtgtgtgtatatatatgtatatatgtgtgtatatatatgtgtgtgtatatatatgtgtgtgtatatatgcctatacatattagtgcctatatatgtatatatataggtgtatatatgtatatatataggtgtatatatgtatatatataggtatatatatgtaggtgtatatatatatatagagagaggcactaatcccattcgtgagggctctgtcctctcatgacccaatcactttccaaaggccccacctcctaatgccatcatactgaggattaggtctggacatacgaatttgggaggggacacacacatatagaccctagcggtcatctagtttcttagtctcactccaaagctgaggctcagtaggaaataccgacttggccaaggtcattatctgagagtcaagaacagaactcgcacacagccatcatcacctcaaagccttgaattaggccgtcatgatggggcataatgtgggagaattcaagggcgctgggacagatgcttactcctcatcaccaaatctaagcagcaggcactatcatcatcatcatcatcatcatcatcatcatcatcatcctcctcccaccccattttacagatgaagaaatcgaagcttaagagagtctgtgactccctgggaagtgtaggaggaggagactcgaacttgggcctgccagcgaggtccgcgggcgcttaacccggctgctgcggctcgaggcctcgctctgcgggtctgtacaatggggctgtccgggccgggtgcgccgtgggaagagcgaggagcggggaggaaaacttggcggggcggactcgggttcctcgggttccagctggctgctgagggggtggacggagggaagggggggcggtgggggcggggcgcgcgggctgggcacaaagggctcaggcacaaaggggccgctgtcccgccgcgccccgccccgccccgcctctgctgccgccccccgtctggtggcccgacccgcgccgcccgcggctcccttatgtctctcgccgtctccagcctcagtccctctctgtctctctctcagtctctctccctgtcctccccggccgctcctccgagatgacgccggggtcggtgccccgggcctgccctatcccctggctccagggctaggcgggaccgagggctgccccagacagacggacccgcggacccacagaccccgcgcccaggagaggagccgcgccgcccgccgctggcagcccgtcaccatggtaacgcgccaaggcctggaccacctcgctctgccccctttcagtgggcacagccctccccattccctgcagaacagccccgggtggccctggccttttacactgagacgaccctcagtgccttggcagggttgtgcttacctgcttccaccccagcaggggttcaagggcaggagcccatctctggccgcgtcctctcctggcttctccatgtgtgtgtatggatggagtaagattgtacttgtaaactttaatattccccaacccctagacctgagcctgaatctcagccctgaggctgagggctgaaacggggtggttttgcatgtttgttttggaactgactgtgatatgcacattgtcccggcagggagtttggatggggaagagtggtggtgggggttaaagtcccctcccaggccagccaggcagtgcagggcgaggagggttaagggtccagggtgaaaaggagagaactgcttaccaaaacttgggatgcttttgctgttttagactcagctatggaaagtcagatatacacattgaaacccagggtgcttccatgggaattggctggggagagggaagaggaagggacttttggagctggaaccttgaaaaaagttgagacattctgggagaatgtgtgtgtgtgtgtgtgtgtgtgtgtgtgtgtggtggtggtggtggcagggatgcgtttgtgccagtatctggcaacagggaatgaaagaaaagtctgtttttggaggatttcagcccagctccagacagatacaagagccccaggcagattcacaggggctgtaaggattttgaaaaaagctgtgaagacaggccaaggctttaaccctgtgactgtgaccaaccatgttgaatttgtgtgggttttcactcacagcaaatgcatctccacaagcagaagaattccatatagaggtgttcatactctctctctctctctctcacacacacacacacacacacgcaggcactcacacacacgtacacatgcacacacacgtacacatgcacacacacatacacatgcacgcacagagcacacctgaatgctcccactgactcacacagctgaacacatgttcacaccctctcatacacccatgccttctgcacctgctcccccatactgctaaactatgggcatacattggcatacacaccacagacatattgcaaaaccgggcacctacatccatgcactgcggggacaggtgtacacacacatggctcttggagctgtttgaaaatactctcataagccagtggttattcacctctccctacaggcaaggccctgtgctaggtgatttacatccaggagtcagtaactcataccaactctaagattagacctgcggctatctccaacagatggggacctcaggctctgggaacttaagtagctgcccaaggtcaccccacccagaaagtgcaagttaggacagtctgaattctgagcctgcactcggcggtcatggtcactccagggccacagcgtgcacctggtgtttgccaagcctctcctgctttcacacctaacctagtcattagaaacccctcattgaaccccagatcctcagatcaagggtcaggcactggtctgccccctgtcaaagggtgagcaactctttccagattgggaacaatgtgcagatttccttcccttgcctgttttttaaagaataaaggttgttgccagcctacctccctggcctcacttctgtgctccagccactccagccttgcttgcgagcctcttatggttcacgctccctgctgccccagggcctttgcacatgctgttcctgcttggaggaataccttcacctaatgaattcttatttacccggtaaatcttcacccaaatgtcacctcttcaggaaagccttccctgatttccctgactcttactctagcatgtcatgtatctttcctttatgataacccatcatagctgtaatttttgtggggcatttgattaacagctgtctagtgtttgggggcacccccatgtcagagaatcttatggcaaaggggcttagggttgatcctgtcccatggttcccaaatgttagtatcactgaaacaacttttacacatccacttactggataaaatatataagaaaatgataaaatctactacttattatttgctcaatatttttctttaaatcaacttactttgtacactgaaaaatatatttaaatagaaaattttatatcacaaccatgaaaaaatcagtatccattgtcataaatagaaagtaactaagccgggcgcagtggctcacgcctgt

SEQ ID NO: 1888148 - DNA, 4001 bp, Homo sapiens
ccttgcgtggacaggcctctgtgggagcctgagtcactctgccccaccccaggcctggaacttcctgtggcacagtcagggccacctcactgtcaagttgcaggcatccccgctcatctgggcccagggtcagagctcagtgaaaggcaggtgatctgggccaaatcaggcaaaggccaggtacctggttctgtcctgcggccctgagcctctttgctcctgtgggactcagtttacccatctatcagaggcagggtttggactgtatactctgagaacccttcatcaccaagctcttgtgacccattacattactatctgtattcagagtggacgtgagccctgggggcttggactccctgtgcttcaactccagtctcccttggacacctggacgaagtgtggaaaaaaaaaaaaatccagaggccgggcatggtggctcatgcctgtaatcccagcactttgggagtccaaggcgggagaatcacttgagcccaggagtgattacgttactatctgtattcagagaggacgtgagccctgggggcttggactccctgtgcttcaactccagtctcccttggacacctggacgaagtgtggaaaaaaaaaaaaaaatccagaggccgggcatagtggctcatgcctgtaatcccagcactttgggagcccaaggcgggagaatcacttgagtccagcctgggcaacaaagagagactctgtctctacaaaaaataattaaaaaaaaaatagctgcgtgtggtggtgcatgcctgtggtcccagctactgaggaggctgaggtgggaggatcacttgagcctgggaggtagagactccagtgagcagcaattgcaccacagcactcagcctgggagacagagcgagaccctgtctcaaaatttttaaaaatgcagaggatctcctggcctttgattcatggggcagcctactttttcctttggcaggtgtctggaatggaaatcaaaaaagagcagctgccccctgggaccgtgattgcatccccccaggagttgggcattgtgggagacttaccccacaccccacccagcatgcccctcctaaaggaccccagtgacacggataggctgaagacccagggtctgtttctgcaaaagtggggatgggccgcagtaggctgttctcactccttggctgttccactctcccaggagcccttggggcaagaggctgggacgtgcctggtgcagtgagctgtcacacagtagggacacctccaggcctctgacctccaagaccacagacctctggacccctgcagctgccctcctctcctcacttcttctctaccccacagtcctgctcgtttaaaactcgccagtagctcccatagcagctggaatgccatccaaagtatttcccagggtcttcaagactcctgccctccaacccctcctccctcacttcagtctcaccacactggacaccttccagcttctagaaaatgccaatctccttccaccttggggcttttgcccttgctcttccctcatcctggaatgcaggaacagcatgccttggcacctgtcatttaagtcactgctcagatgctacctccttagaggggccttccctgatccccctaagaaaagcagccccttctttgcattatttgctatcacagctctctctttccttcgtggcccattccccgggctgttgtgatcaatagctggtttgttcaatagccatcttccatacccattggtgcactcccgtagggcagggaccttggggatcccatgaccatatcccaagcccctgctgcacaatggctgctaaacaaatgtttgttgaatgaatgaagcacaaaaagtgccaacaatgcctgtcttcctccttgaatacttcgaggccccatgagggagaaaatggcacttactgggcacccgtcacagctcaggcactctcatcctgttgaatctctacatctgtgacatcctgtcccgctatacagatgatgaagtaggggctcagtgacctgcctgaggttacccagcaaagggtggaatgatggcttcattccattgtgaagtagccaagtgggacctgtgagcatgaagaatgccacgccaaataatcatcaggattcacttccaaatctgactccacccgaagcccatgttcttttcattatactatacattctgctgtgccagaactcagcccaagattgacaaccaggtttttagcttctgaaaggcaggcaaagacccagcctgggtggagaggtggtccggcttagtggttattgaagtgggtcctggaactggacagagagaccagggctcacacaaggaccccaccacccaggcacagggcatatttgccacagttatcattaccattgccaggctagagcatctctgctctcaggaagagtgtgctggaaggataaccgtcaagggacacatggaaaaagtcagggtctgagcttcttaatcacagaagcccctgcgcccctggggctggcctttgggtagtgccttccccgctctgagtggtcacctcttaaaaacgggcatgcataccagcatagatccaaaaagagctcttgagaagataaagaggaaaaatgactgtggagttgttggtgtatataaagtaacatgaaatgtaaattatctaaaaataatctcccatgtgaaatgcagagagaggttggggcttgggagacctctagggttctttcagcatttactggcacctactgtgtgccaggtgttgtgctagggcctgtgcatatgaggatgggtcagatatggccctgagcatctggagctccctgtctactgggggaagtgagccaggtatacacagcgtggggctctctccgagcgcggtgaaaggggaagagtttgtgtgtgatatggcagcagcagccagatgcacatgagctgaaacccacccctccttcctgcatgaccttgagcaggtcaggccacctctccaagccccaggtcttcgtctgtaaaatggagccattccctctgcctctcagagttgccaggacatggcacgtagtaggtcctggggtgggggactttgggatgggagtagacagtagttcctacgcaggaaacggtcctgcactagacaaagtctgggcctcaggacttggatggtgacttgcctgcaggagtgtcatggggacatggggtggacccccggggacagctgggagagaagtgcagcaattcctcatgacctgttaaggaagtggggggtaggggcacagaaatcctggggaattggcctgtgcctttatttatgttggtaatttcattaagggggaggggaccagctagctctacccaaggtcagatctgcccaggtaggaggggggcggtggggctacctgagtttactcagcaagagattctaggtcaaggcgcactcaggaaggcagggtgtctcaggatgagtttgtggatgtgttgagagttttctgaagcggaggtgggattgggctgaggccacaggcgacttcccagggggcctgggcctgtcccagagcagtggggcaggcaagcagaggcaaagctggccaaacttcggggaattcagggtgaggcaaaaggagaggaagtttgggggccccgaagggcggcgatgtggggttcccccaggggaacactgctcttctggcttcggctcacgggagaggtcaagtcacttgcgggagcgagggagggggagcctgccctacaccttcccggcctggctaagtggggcggggcggccgggaggtcggcgtctgggctggggtctgcgccctactccccgcgggaccgccgcgtccgggaggagcggggcctgcgaagctccgggcccggcccggccagacggaacgcggttcctgggctgggcactgcgcgcctgtggttcctgccctcccggcggctgcgggcgcggctgcccccgcgcccccaggggccgggccgggcgggggctgggccc

SEQ ID NO: 1888149 - DNA, 4001 bp, Homo sapiens
gactataacccagagtataaaataaatattcatgattccatattgatataaaaataataaaataaatgaataaatggggtaggagacaaaggtctctgcagaaattcccaaatcatttatgcacaaattctgccctccaggaggtaaagtataactccccgctcctgaagactagactgcatgtagtgactttcttccaaaaagcaaggtatgaaaagaggggaaaaggaaacttacagtggagaagccggacaaacaccacctcagccaggtaatcaaggtcaatgccaatagtcatgagtcatgctgatacaagctgaacattctctaatccaaatgctccaacatctgaaacattttgagtgccaacatggtgccacaagcagaaaattctacacctgacctcatgtggcagattgaagtcaaaacacagtcaaaactttgtttcatgcccaaaattattttaaaattttataaaattacctttaaactatgggtatatagtgtatatgaaacataaatacatttcctgttgagacttgggtctcactcccaagattatgtatatgcaaatatttctatatctgagcaaattcaaaatttgaaacacttctggtcttcagcatttcagataagggagagtcaacctgtagaatgtgcctttgatatgatgtgtaagaatggctctttacctctgtggtcttcctttcaaaaacccatcagctcaggataattatgagtaaaacattagacaaattccaagtgagggacattctacaaaattctccatcagcactcctcaaactatcaacgtcatcagaaacaaggaaagtcagaaactgtcacagccacgaggaacctagggagacttgaggactaaacatgcgtggtagcctggatgggatactgagacaggaaaatgacattaggtgaaaactaagaaaatcggaatgaaatatgaactttagttagtaataatgtattaatcctggttcattaattgtgataagtgtaccacattacgatgttaatgataggggaaactggatgtgggggatatatgggaactctctgtactacctttgaaatttttctgaaatttaaaactatgttaaaaggaaacattttaaaaatatgtgctaagacagacccccaaaatgccactttttaaaacaaatttatatgattcttctcacaattctccaccccttgagaactgaaatcagcatagttcccagtgtcttaaaacaacactggggccagtcatttttttgttccttattaaacaatgttggaaccaagcaaaaatcacttacctgcttgcttcaggaagacttgcttaccaaaaatgaggcagtaaatccactaaaatagctagcttataaaatccagtatctttcttatctagatttgcttcaggatccttggccttgcggggcttaccaattgagaattgttagggtagaaaccctgcccagtcccaagctactccccaccttgcaaaagctaccttagaagtcccccagtgcagaccctgactttgtcaacctgaggcactatcaagactctaccaaggtggttttctcttatactacagtaaatctaataaacttagttttgttccattaacatgtttttctggggtcttttgggaagttgacagtcaatagtaataggggttgaaacatgagaacttcatcttctcttttaagagtatcttggtatcttccaactagcgcaatctcatgtcagcttaagagccagttgaagaaaagttcaactcctatcagggcggtgtggtttctaatccttctactgctgcccatcatggtgctgtgagtgatttggtgcaggagaggaaggggcttccatactctggtttcctactcctctctgctgtgtggtggctccaggcttgcatctgctgacaaagtcccacacccgtgtctttcattaagccagctgagtggttctccctctctagcccaacggaatgtcctgagtaccagctttaactgccaatttggtctgtggctcagatattaaccttggctacagggtgtttaccctgaccacagttgatgtggcccaccaggcccagcagctggcacccatagctgcccgtcgtgtttgctgtgagcaggcaggccctcctgcaggccttccactccatccaacagccaaagtagttctggaggctgatggaggccttatttcagcctaatcaggccatcacgccattgtcaatcaactgtagcatcccttgtaaactcagggccaccctctgagtgctctcaaatcagcatttccagtttctggttttctcaacacctccccttgctcaagatttccatcctgatgaaggaggtcaagtcataggtccctgaacccctgcttccacttgccttactcttttccctccacaggggcctttctccagagacatgagacagtttccctttcatgcctgctcaggatttcctctgtctcatggtgtgctccttctggggtgaaagtcatggtatctgtggcagacatggagatgcaacctcagatctccaagaaaagatctgttacccagcttcgaggaggaaactcccctaggtctggcactgcttttgagccatgatactcttcttcggtggccctcaaacaatgagcaaaatattggaacaaggcagggccatctcctcccaacatgggaccactctatgggcggtctttgtggcagagctcctggttggtctctgggggctttctcggagcaatgctgtgctctaagagtccatctttttaatcctcccttctccccatcttgtcctgctagtcttagccccgcagcatggtctgaaggctctccctgtcaactcctgcttttttccactttgccatttgcagttgctcacaataaatctcttgctcttttaccttcttcttggcatctgcttcctggaggactcaaacagctcagttcctggtcagcagagctgtgatggtatatggccaaatgtgaacataatttatcaaagaacaggtaaaaaatccaccaggctcatattttcacattatatttacactcaagtgcatgtagttagccctcttgaaaaaaaaaagaatctatgctggctaccttccttgtacaggaaaatctgtttgtatgttatttatatttttcttcttagtaatttgagatatgttagaatctttaatgatttagaattttattgacaaaattaatgaccttgtgctaagtgaatctggatcacttacctctgaatgcagcactcacctttctccacctactcaggccttttaaactgcatcatcggcttcctttctggcttccagttaggctcagccaatggaaatcaccagcagaagatgtgaggtgagagagactgaagttggggaggtgctctttcctgctgtctccccgctgagccaccacggtgtctactgaagcccgcagcacctatcagtggatgctacttgctctgggctctggtggctccttccttccctggcccatcaggctcaggttcccgaacagctccccactgcaactggccctgggggactgcaccatcactcccagcacttcccagaccctgtacagagttgagtgtgcctgccagcgccctgagagactgaaacagaagccaaacacaatttttttcacttatccaaattcatgtagtacaaggtcattaattttgtcactcaaattctagatcattaggtttaaagattctaacatgtttcaaatactaaaaaataaaaatataaatactgtacaagaagattctatctctagaaatgtgttgagataactactgaaataaaaatctgcttgagctttattatggaattatttccaccagtttgccatgagaagcaatgtagaatctgtcaaaagcaataatcagtcatagctgagtttgttacaattcaacatactccatgaaagaaaaggtcccatctggatcaaaagtcttttggga

SEQ ID NO: 1888150 - DNA, 4001 bp, Homo sapiens
tttggatcaatgtcacatagctatataagttgctaacatttgaggaaactaggtaaagggtatttgggaactttgtactatgcctgcaactcatctataaatctaaaattatttcaaaatatgaagtttaaaaaatagttaacactttgcaataatagcacagaaaaaaacaactagttatttggctgaatctgtttcctttttaccttttcgatggtacttagaacatcacaaggtactgtaggtggatcccaagtgttctgcccctgtgttgaggtcagagccctccctggagttgcccccatgatccccttagcaaggaactgctggggatacccaggagctctggcactggtccctactgtggccatgaaccccagcatggagagaagaaatcagtgggtgacaccttcctggactttccctgtgcctgtccagccactgtcctcgacagttttgctctctgactacaactggatgtggggatgttgttgatgcacttgaagggttggatgcctcgcccatcctttctcaccctgcagcacagtgctgatgcagctaagaccatggccctgccttgcatgcccacaaagccacacccacactgttccagaaggtctcccttagtctggcaccaatgcaaacagctcagcactgtcatcacggcagcccgtccccagagagcagagcctgaccccagccagatgcaggctgtcaaccctggagggaccccagggggcaggagtaaggctggggaggcagagctgacaaagctggggtgggatattgagtcagcccctctgtgtgcctttgggagtgtgtctgagaatggtcccggggaggaaggggagcattccctcattggcccccatgcatcactggtccaggcccctacgcgctggctcaccaccggcaatgcacactccacgaccagggagccccacgcaggaaggcagaggccacgccaggccacattacccctgggcaaagctctcagaatcctgccagcatgcaaggagaaactgagaggatgggcagtgggggaggcagggtccagggcagctgccccatcctcccaaccgtgcaattgcgagtctctgaggcatactctgcccaggaacccaaccaagcccacatgagggcaggtgggagtgccaaggggctaacaccaccggggcagactcagccgcttagtgctagtggatcaagaccccagcttccccacctgccagccaagacaatgctgaggcgtgatccgcacaaggtcctggggggtccccagcaggtgtgagcccctgttgcccacagtggaaacctgtgtcaatgcacactcccggtctggcttccctccctctcacatcccctccccgcagctgcctcccaggaccacattcaccacttgcacccagtcctacccatcgggactgctttgcagagaatccatttaaaactgaccaagtgggcgttggaaccctgcactgtctgattcaggcccaaaacgtttaaacacaatgctaataccctcagttgttgggaatgttgggttacttgtgggttccatttggatactggcccctgtgacggctacaggacatgggacgccacccatccactgatgccacctttctacctcctgccccaacaacgcctcatgggcaccagagactccgggcacatttcatgcttctccagatccagggaccacggaggagggagactgtcttcacctctctgctctgcagctttagatcctgcatgctactcaccgtccctgtggctccagaccccatccatgggtttatctcccccaaggaaaaatcatcacggggttcttccatttacacgcactggctgcagccacagcctgggggaccagggctggacggcgccacaggtagaagagggcccggattcccgagtcacctcccaagtcaccgtgggaggctaatcaggccgcgctgacctttgcctccagcagggcctccgcttcactcccttcaggggtctggacatcatctctgggcctgggcacaccctgggacagtcagatgcggcggcttccatgcgcctccctccctcaggcctcacccccttcattctctcactctaaaacctcccggacaaaccactaaaaacgatgcggctgtcgtggtggtgggtcatttggttttgggtcgcgtgacctcagtgagtgtgtccccatggggaagccgagagtgctgacgtccccctggatgcgggagagtccactccgggatcgctgttcctggaaaaccgcgtgcgggtgcagccaagcccctcagttggggagggaaggcactggaggacgaggcccggaggtgagtccgcaaagccaggctgccaggctaaccacgcccagcttcccccagccaccgaccaggctgcggggacgctttcagaacatcatgcgggtgcgccggctggccctgggtgtctgggccggggcccctccaagcccacctgggagagcactcccgcctccccccaccccggggcgcccaccaccccggcctccgccgccgccctgcgacagcgcccccagggcccggcgtcctgggcctctgactctgcccggtttgctaacccggaccctcgccgcgtcttccggctccagtatcctcgggaacctcctccctttcatcactcgcctcgacaagaccttctgaggccacacatctcgaggcaacagctctgtgccccgcctttgtttggctctcaaaattgtgctgtgccctctcatctccaacagcgttacgctgattttcgagcttttcctggctccccctggctctttgctgtcgtcactcggttctccgcccatccccgtgcgcacgtgttcgctgtgctagccccgtgcgagctgagctgccgttagagtcggtagattacagcgaagctgcagtcagcagctcgtctgcctggccctgcacaccgtgagactcgaggcagtgcccgggacgggaccacctggggaagagaggagggaaaagccaaaccccgcagaggaaggacgagagctggcagccaggtcggctgcgaaaggggagagaggtgggcagtccaggtctgggatgggccagcctaagctcgaatcgctgtgtcagtgggttggtcacttagcccttttaagcctcagtttcctcatctctaaaatgtggataatgacagaaccctcacagggcatccagagatggaggctgtgcgatgagccgagcccaggcctgtggagttttctgtgctcagtgctgttgctgttgtcatcattagccaccgtttttcaaatctcggaagcctcttagaaaaccagctgttcttgatggccacttgtgaaaggagaagcagatttcttaatcagaatgattcaaagaactttctcccagcaacagttgttaaatcaaggccttggaattttctctgaaagagaattctgctgggtgctgtgcctcacacctgtaatcccagcactttgggaagccgaggtgggaggattacttgaggccaggaattcaagacctgcctgggcaacatagtgagacccgtatctacaaaaaataaaaataaattagctgagtaagggagagcacacctgtagccccagctactcaggaggctaaggcgagaggattgcttaagcctaggaggtcaaggctgcagtgcgctatgattgcaccaccgcactgcagctcggcaacagagtgagaccccgtctctaaagaaaatagtaagtacaaataaataaaagaggattcagtatcatcaggcttgagtggttcctgagagagaaaagacctagatcattccttaagttccccctggagccccaatatcttgattctgtgactcttcacatctccctaattaaattgtctggtttaatcctctccttgagccctctcctcggcctctgtcctccccagccttgcatccattccatgcccaccttccatgctggggatgacttacaaactgcaggcttgcag

SEQ ID NO: 1888151 - DNA, 4001 bp, Homo sapiens
cagggggcaggagtaaggctggggaggcagagctgacaaagctggggtgggatattgagtcagcccctctgtgtgcctttgggagtgtgtctgagaatggtcccggggaggaaggggagcattccctcattggcccccatgcatcactggtccaggcccctacgcgctggctcaccaccggcaatgcacactccacgaccagggagccccacgcaggaaggcagaggccacgccaggccacattacccctgggcaaagctctcagaatcctgccagcatgcaaggagaaactgagaggatgggcagtgggggaggcagggtccagggcagctgccccatcctcccaaccgtgcaattgcgagtctctgaggcatactctgcccaggaacccaaccaagcccacatgagggcaggtgggagtgccaaggggctaacaccaccggggcagactcagccgcttagtgctagtggatcaagaccccagcttccccacctgccagccaagacaatgctgaggcgtgatccgcacaaggtcctggggggtccccagcaggtgtgagcccctgttgcccacagtggaaacctgtgtcaatgcacactcccggtctggcttccctccctctcacatcccctccccgcagctgcctcccaggaccacattcaccacttgcacccagtcctacccatcgggactgctttgcagagaatccatttaaaactgaccaagtgggcgttggaaccctgcactgtctgattcaggcccaaaacgtttaaacacaatgctaataccctcagttgttgggaatgttgggttacttgtgggttccatttggatactggcccctgtgacggctacaggacatgggacgccacccatccactgatgccacctttctacctcctgccccaacaacgcctcatgggcaccagagactccgggcacatttcatgcttctccagatccagggaccacggaggagggagactgtcttcacctctctgctctgcagctttagatcctgcatgctactcaccgtccctgtggctccagaccccatccatgggtttatctcccccaaggaaaaatcatcacggggttcttccatttacacgcactggctgcagccacagcctgggggaccagggctggacggcgccacaggtagaagagggcccggattcccgagtcacctcccaagtcaccgtgggaggctaatcaggccgcgctgacctttgcctccagcagggcctccgcttcactcccttcaggggtctggacatcatctctgggcctgggcacaccctgggacagtcagatgcggcggcttccatgcgcctccctccctcaggcctcacccccttcattctctcactctaaaacctcccggacaaaccactaaaaacgatgcggctgtcgtggtggtgggtcatttggttttgggtcgcgtgacctcagtgagtgtgtccccatggggaagccgagagtgctgacgtccccctggatgcgggagagtccactccgggatcgctgttcctggaaaaccgcgtgcgggtgcagccaagcccctcagttggggagggaaggcactggaggacgaggcccggaggtgagtccgcaaagccaggctgccaggctaaccacgcccagcttcccccagccaccgaccaggctgcggggacgctttcagaacatcatgcgggtgcgccggctggccctgggtgtctgggccggggcccctccaagcccacctgggagagcactcccgcctccccccaccccggggcgcccaccaccccggcctccgccgccgccctgcgacagcgcccccagggcccggcgtcctgggcctctgactctgcccggtttgctaacccggaccctcgccgcgtcttccggctccagtatcctcgggaacctcctccctttcatcactcgcctcgacaagaccttctgaggccacacatctcgaggcaacagctctgtgccccgcctttgtttggctctcaaaattgtgctgtgccctctcatctccaacagcgttacgctgattttcgagcttttcctggctccccctggctctttgctgtcgtcactcggttctccgcccatccccgtgcgcacgtgttcgctgtgctagccccgtgcgagctgagctgccgttagagtcggtagattacagcgaagctgcagtcagcagctcgtctgcctggccctgcacaccgtgagactcgaggcagtgcccgggacgggaccacctggggaagagaggagggaaaagccaaaccccgcagaggaaggacgagagctggcagccaggtcggctgcgaaaggggagagaggtgggcagtccaggtctgggatgggccagcctaagctcgaatcgctgtgtcagtgggttggtcacttagcccttttaagcctcagtttcctcatctctaaaatgtggataatgacagaaccctcacagggcatccagagatggaggctgtgcgatgagccgagcccaggcctgtggagttttctgtgctcagtgctgttgctgttgtcatcattagccaccgtttttcaaatctcggaagcctcttagaaaaccagctgttcttgatggccacttgtgaaaggagaagcagatttcttaatcagaatgattcaaagaactttctcccagcaacagttgttaaatcaaggccttggaattttctctgaaagagaattctgctgggtgctgtgcctcacacctgtaatcccagcactttgggaagccgaggtgggaggattacttgaggccaggaattcaagacctgcctgggcaacatagtgagacccgtatctacaaaaaataaaaataaattagctgagtaagggagagcacacctgtagccccagctactcaggaggctaaggcgagaggattgcttaagcctaggaggtcaaggctgcagtgcgctatgattgcaccaccgcactgcagctcggcaacagagtgagaccccgtctctaaagaaaatagtaagtacaaataaataaaagaggattcagtatcatcaggcttgagtggttcctgagagagaaaagacctagatcattccttaagttccccctggagccccaatatcttgattctgtgactcttcacatctccctaattaaattgtctggtttaatcctctccttgagccctctcctcggcctctgtcctccccagccttgcatccattccatgcccaccttccatgctggggatgacttacaaactgcaggcttgcagattcacaatcactcaacaatatgctgcacagacagactgccctcctccatggacaccctcctttgtgcgaaggccaactgcttatgggcagttggaatgtcttctaagcagacaaaaggcctgctcaagtgtgcaactatttgggggcaggggccactccctccgcgggtggttaagggctgtgctgcttggagccagctgctgagtcctggagaagaatagagcaggcatgtggacgcgacaaaagctgcctggccctgtgccccaggccagcccaggacgcagcacatcctcaacatatgggtccctgggggggtcccctcatttaacaatcatgatttccctcttcaggagacaacaaggtttggaaaccttaaatgggctgtgtgactaaattaagttcccaaggcagccagaaccaagacgctaattgccttggcttatggttcttaccctccacgagacagattggctcatttttcaggctactaattattaatttgaagccatgaatagaaagagatgggaaggacctgtcacctcctgcttggtgaatgctaaagctttgtcatttgcaggcacaggagagtgccgacgggcctttgagtgagccaggcaacaagtcaggggtcccatatgtacaaactgcatcttggcattgcttctgctctgtgcaacgtggtgggagcccacttacaatcaactgccaacatcagagctcatgggacacaa

SEQ ID NO: 1888152 - DNA, 4001 bp, Homo sapiens
cctctgtgtgcctttgggagtgtgtctgagaatggtcccggggaggaaggggagcattccctcattggcccccatgcatcactggtccaggcccctacgcgctggctcaccaccggcaatgcacactccacgaccagggagccccacgcaggaaggcagaggccacgccaggccacattacccctgggcaaagctctcagaatcctgccagcatgcaaggagaaactgagaggatgggcagtgggggaggcagggtccagggcagctgccccatcctcccaaccgtgcaattgcgagtctctgaggcatactctgcccaggaacccaaccaagcccacatgagggcaggtgggagtgccaaggggctaacaccaccggggcagactcagccgcttagtgctagtggatcaagaccccagcttccccacctgccagccaagacaatgctgaggcgtgatccgcacaaggtcctggggggtccccagcaggtgtgagcccctgttgcccacagtggaaacctgtgtcaatgcacactcccggtctggcttccctccctctcacatcccctccccgcagctgcctcccaggaccacattcaccacttgcacccagtcctacccatcgggactgctttgcagagaatccatttaaaactgaccaagtgggcgttggaaccctgcactgtctgattcaggcccaaaacgtttaaacacaatgctaataccctcagttgttgggaatgttgggttacttgtgggttccatttggatactggcccctgtgacggctacaggacatgggacgccacccatccactgatgccacctttctacctcctgccccaacaacgcctcatgggcaccagagactccgggcacatttcatgcttctccagatccagggaccacggaggagggagactgtcttcacctctctgctctgcagctttagatcctgcatgctactcaccgtccctgtggctccagaccccatccatgggtttatctcccccaaggaaaaatcatcacggggttcttccatttacacgcactggctgcagccacagcctgggggaccagggctggacggcgccacaggtagaagagggcccggattcccgagtcacctcccaagtcaccgtgggaggctaatcaggccgcgctgacctttgcctccagcagggcctccgcttcactcccttcaggggtctggacatcatctctgggcctgggcacaccctgggacagtcagatgcggcggcttccatgcgcctccctccctcaggcctcacccccttcattctctcactctaaaacctcccggacaaaccactaaaaacgatgcggctgtcgtggtggtgggtcatttggttttgggtcgcgtgacctcagtgagtgtgtccccatggggaagccgagagtgctgacgtccccctggatgcgggagagtccactccgggatcgctgttcctggaaaaccgcgtgcgggtgcagccaagcccctcagttggggagggaaggcactggaggacgaggcccggaggtgagtccgcaaagccaggctgccaggctaaccacgcccagcttcccccagccaccgaccaggctgcggggacgctttcagaacatcatgcgggtgcgccggctggccctgggtgtctgggccggggcccctccaagcccacctgggagagcactcccgcctccccccaccccggggcgcccaccaccccggcctccgccgccgccctgcgacagcgcccccagggcccggcgtcctgggcctctgactctgcccggtttgctaacccggaccctcgccgcgtcttccggctccagtatcctcgggaacctcctccctttcatcactcgcctcgacaagaccttctgaggccacacatctcgaggcaacagctctgtgccccgcctttgtttggctctcaaaattgtgctgtgccctctcatctccaacagcgttacgctgattttcgagcttttcctggctccccctggctctttgctgtcgtcactcggttctccgcccatccccgtgcgcacgtgttcgctgtgctagccccgtgcgagctgagctgccgttagagtcggtagattacagcgaagctgcagtcagcagctcgtctgcctggccctgcacaccgtgagactcgaggcagtgcccgggacgggaccacctggggaagagaggagggaaaagccaaaccccgcagaggaaggacgagagctggcagccaggtcggctgcgaaaggggagagaggtgggcagtccaggtctgggatgggccagcctaagctcgaatcgctgtgtcagtgggttggtcacttagcccttttaagcctcagtttcctcatctctaaaatgtggataatgacagaaccctcacagggcatccagagatggaggctgtgcgatgagccgagcccaggcctgtggagttttctgtgctcagtgctgttgctgttgtcatcattagccaccgtttttcaaatctcggaagcctcttagaaaaccagctgttcttgatggccacttgtgaaaggagaagcagatttcttaatcagaatgattcaaagaactttctcccagcaacagttgttaaatcaaggccttggaattttctctgaaagagaattctgctgggtgctgtgcctcacacctgtaatcccagcactttgggaagccgaggtgggaggattacttgaggccaggaattcaagacctgcctgggcaacatagtgagacccgtatctacaaaaaataaaaataaattagctgagtaagggagagcacacctgtagccccagctactcaggaggctaaggcgagaggattgcttaagcctaggaggtcaaggctgcagtgcgctatgattgcaccaccgcactgcagctcggcaacagagtgagaccccgtctctaaagaaaatagtaagtacaaataaataaaagaggattcagtatcatcaggcttgagtggttcctgagagagaaaagacctagatcattccttaagttccccctggagccccaatatcttgattctgtgactcttcacatctccctaattaaattgtctggtttaatcctctccttgagccctctcctcggcctctgtcctccccagccttgcatccattccatgcccaccttccatgctggggatgacttacaaactgcaggcttgcagattcacaatcactcaacaatatgctgcacagacagactgccctcctccatggacaccctcctttgtgcgaaggccaactgcttatgggcagttggaatgtcttctaagcagacaaaaggcctgctcaagtgtgcaactatttgggggcaggggccactccctccgcgggtggttaagggctgtgctgcttggagccagctgctgagtcctggagaagaatagagcaggcatgtggacgcgacaaaagctgcctggccctgtgccccaggccagcccaggacgcagcacatcctcaacatatgggtccctgggggggtcccctcatttaacaatcatgatttccctcttcaggagacaacaaggtttggaaaccttaaatgggctgtgtgactaaattaagttcccaaggcagccagaaccaagacgctaattgccttggcttatggttcttaccctccacgagacagattggctcatttttcaggctactaattattaatttgaagccatgaatagaaagagatgggaaggacctgtcacctcctgcttggtgaatgctaaagctttgtcatttgcaggcacaggagagtgccgacgggcctttgagtgagccaggcaacaagtcaggggtcccatatgtacaaactgcatcttggcattgcttctgctctgtgcaacgtggtgggagcccacttacaatcaactgccaacatcagagctcatgggacacaagggccatgttatctgaggcctcaaaaaattcagacttcggagagatctccaaagtttgtataaaa

SEQ ID NO: 1888153 - DNA, 4001 bp, Homo sapiens
tctgttaccccattgatgagataggataaaaatatgaatccttcaggagtatcataaacatgaagtgaaagaatgtatgagcaaacactttgtaaattcaataatggcatgtagatgttacatgctcttgctgttaaatacgatatatagcccacttctttctacccctttcctggtttctctctgaggcagagattctcagcctcagcactattgacatttggagctggataactctttgttgtagagagctgtcctgtgtattgtagaatgtttggcagcatccctggtctttacccactagattccagtaacagcctcctggtcatgaccactgaaaatatccctagatgttgtcatatgttcatgggggcaaaatagaccttgattgaggaccactgctctgagtgtagagaagttgatgaacatttcctggaaattctttggaccttgcctctttactaggggtggcatccctgtatgttaaaaatgctcacagtcattctttgcaaaaattaattccaggagccggggtggatatatcagctcagcctaagttccactgtggtaacaaacactgcccaaatctcagtggctatgtaaccctctcctaagaagagtcagcccaggtcacatagccaaatccaccctaagtgggatggaagacatagaatttttccctgcaaaagatagtgaatattttgaagaataatacaatctactaccaggagttagttggtagaacacaggtcctttgtagtctacagatattgccatttttctcacacattttcctggactgactttttccaggtaccagccagttacttcttccaggtactttaggccccagctaccagctggcaggggctcagtctccatgccttgggtctcttggacttctcttctgacctgaccaaagctccatgttggggtattaggcacatgtgcagctgatcatcaagggaccgctttgattctcctttgcttttgcacacatttatggctcatgtagaaacttctcagaaagagccttctaagggtttcaggcacagaggtggctaaatagatctgcaatctgtaaagatgttgcagcatgcttggttgaaaagtcaagcagtcagttagtcatttacttggagtgttaatataatgacagtcacttggttgagctgattttgtcacttaactgctggagactgtctactgcttaactaaccagcataaccttcctccctggtgacacagctggagtgtgtcagaaatcctatcacttcagtagtgggactatggaaatgaatcttatagtggggctgaaggtcacaatggatgacaacgaagggtttctaaacctggatgcataggctaaactggtctgttcgtgacatggtgttgcccagttattgaggcaaatgcaatcacattttaccatttataaaacactttcatatctacagtcttccctgaaagtgcttcttgctcttttatccacctggaaaactcctattcaccctttaagagccctcttagatgtagccttccctgatggcactctcctctccatcattatacagttgtttgctccatcctctgtgctgtcacaatagtatcctcctccttctggtctgtgaagttgccaggcaaaggagattgctctgctggtccttgtatcccaggaactcaccattgctcctggcgttggaaatacatgcaggaacatggctggtttactagacagtttacccaaatttttaccatgactctgtacgccattaaaaaaagagagatttagaaagatttactcacctgcctcaagtctcacagctgccaattaactctttgttgtagagagctgtctggtggttggtggaatttagcagtctcaggacacttggcttcccttttgttttccagtaaaatttgagtcttctgggcactgattttagattggtacaagagacagtgattggatgcagttttagctgttctaaagaactgagtgatataactttgtggcccagggcttactttattatgtcagaaagacgtgagtttgaatcccagcccctccacttactagctgtgtggctttaggtgagttacttaacctttctgtgtctcagtttcttcatttctaaaattggaatcacaataatgcctatctaatgagattatttttaaggattacatgaaatagcatatttaagtggttttagcatttttgccggttatgtagtacacactgaataattcctagtttttaatactgtttttatttctatttctcaaacagtatattctgttttatgttgatgtattggatccttccttctttcctttggtaaactttgttgcatgtcttctttgccatgtattgatgtcagaaagaatccttaaaatgacaatacccaattgcatgattaataccacttcttgagtgcttggttcatttgagcccaacatccattgatcaaaatcaataatcaatgacaggcattatttcatttaatcttcatcacaacgttattaggtagacctcatttcttcccattatatggaggagaatactgagactcagagtaattagctgagggtttaagggaagaatggattgaagctgggtgtgctcagacacctgcggagggagcagaggagtccagcagtgtgttgagccttggtcctgtcctggccctgtggtctgtaagaaggaagaaagccacctccatgggtgccagtagctgctttcttgacactttttttgctgctgaaggaaaagtaccagatactctccccagctgactctccagggtcagtggagattcttgagggtcagtggaccaaaacggacctccagggtcagggtcattattgagggtccgtggaccaaggtcaagaggccttgggagttgttctgcagggtgtggcatggttcctgcccaccagttcccttctgggaaaggagagggcaattctgaggaacaaagaagttcagaagccaccagagggagcagaatcctgttctgcctccttgatctaccagagaactgatcactaattaacaaagcccagcatcagattctcttcacgctgccaaagcacaagcaaaaacttaaaaattccctctgtcatccacatgggactgtccaatacataaataaggcagagactcgttttgagtgtctgcgatgtgcaccttcctgacccaattccatgaattctctcaataacgctaaaaggtgggaaatagtcatgtccccactgcacagattcaacagtatattcattcatgcatcaagcatgttttcagtgattctatgtgccagacatgtgctgggcactggaatacaaaggtgaacaagacagctggggcttggggcttagagaggtgaggtcacttgccaagtcacagagctaagtaagcagtggagctgggatgtgtccatcccctgcagagtctgagcgcccacctgttatgcagaagtagtagtctggctgagatccctgggctttcttcacctcagtttccacatgcagataccagcagtaagtcatatgtggtatgcttgccttcagcacacatttcctcagtggccacctgggcacagaccctacccagaaggagtttatgctctagcaaaagaggcgggcatgtacagagttggtcagccatgtgccaaggcagattgtgataaaatcaagagctgagaatagagtattaactctcactggggtacatgtctttagaggccaagtgacaagcctgaggcttctggtgaggtttgggcaggctgatgacctgaattcagcttttctagcgcgggtggaggtatttctgtttcttggttttgcaaatacgaaaagaccactgggtgtctataatttccacttgtttcaagagaggtcactgcatacctgattttaaaaatgccttctgagtttctgccagtgcgagtgaatgctcagctggtaaacagccccaatgctggatgagggcatagagt

SEQ ID NO: 1888154 - DNA, 4001 bp, Homo sapiens
ttattaacactacattcttggctcagtgctaagctctgtggcccattgtccagcacttgaccaggtccccggcaggcactgagccatttgatgcagaggaatgctgagcagcgtgaggccaggcaggcccaactggccaggtgacgcctggccagatggttcctccccccggcgcccccagaggccactattgaaaacctgaaagagacaaaaagcctgtggaatcctccaaggggaccagatgctgcttagggaaaacctctccacactgtggcatcagggaacgggtggtgcaagagaagcttcaagaatgatgaacagaacaagaaactgcctcacttgacaataaaataaatgcccaccacctcctgtttcctcgttaatgattattaaaatgatcctggtacaagattaatattaaaaactgatgcttagtaataaacttctcacagctatcttcaagatttccagggagtaatagctgaaagggaaaactgaacaagaggagtcttcctgtgtgttgtagtgcctgggtgtgtatttctttccactgctagtacttttgttggcaaatagtgcacgctgttggagcctatcccccagaccttaagtaggggcagtgggtcgtgtgggatggagccctatcaaatggggctggactctggttttgtctgctgtgaccccgggggtgcccgctgggatctgtgagcaggcagaggccggtgggagcaccctccgcctccctttgttccgccgggctccagcctgcagcagctgatccggttattatgctcctgaaaagaatttctaggtggccacagtgaccataaggagcagagaaaccacgagggctgcaagccacgaagagcaacacatcggctattgagcactaatcccacccataattagaggatcccttcagccttgtggtgctcacagaaatctgaactaaggcagagaggagccgtctgaggtctgtaggccaccgtttaccaaatgtgctgtcatcagcgcaattagcttatttggtgggatcggcgttttaaaaagaaaaacagaaagctgtatagaacatagacttggggcaaaaactgaatttaagatgtagttaaagtcacctttgatttctcagcttccttcccccaccccattcttaaaatcatgcattttaatgaaaatttgatctgcgtgggtctgatttgtttacttgggactcatccaaatgctgttttgtaagagcgatttcatatctaacagatttgcataacttgggctatacttctcagaaagaaaaactcatgttgggccctaaatgaacagatttatcgctctgagacttgtccaggctttacggtggcagttgctctctgcctactctgctctcccttgtcttcatcccaggcatcccaaggtttctgctatactaaagaaaagctgcgcccatcatctgaatctaaccttcgtgggtgctcaggaacctgtcacctgttctaaaattccacctgctattttaattcaccacatgccgcccgttggctaagtggaagaaaatgaacatctgatcacaaagtcactaattatgtttaattactggctaaaatattaactttcaaaaaggaagataacttttgaaagtgatatgaattcaccactgttgtaatctatttaaattcatgtgttacaaataaattacaagagagaggaagatgatgtatgaatctatataatggtcttcattttttttcgaacctattatcttgtttgattttcctaacaacatcatgaggtacataaaggcagattttctcagtttcctttcataaatgaggaaactgaggtgcacattttccacaaaccacaccaaacacttgggattataacctggatttttaataacttatttgtgtttatttatgagatgaaatcccaagcaagggttcaaggccttaccttagagacccacttgtccaagatccagtaatatctgctcatgtctggtcctgcagattaagaagagagttggagaattctaaatgctaattgtcttaggtaaaactgctgtttccatggtatctgggtgaataaaaatatggaggtgaacttccactactgacccggaaggattttcttcatgaaaagattgtcacaaatccttttggaggctaagaataaaaagtgaagatgtaaatgtgcctctctagaacactgtagtatcaacctgaattaatctctcaagcacatattgcaaacacagctaaccaggccaggaaaaatcatggataagggtcctcttcctaagcaagcatacctcgggccccaatagatgcaaatataagcatggaatttgcaagaacattggagatagaaggactgcaagttttacttgaagcttttttttattaaatagcttgaagcagatatgtaatgcgattggttagcaagcaggcaattttaagtacttattgagtatttcattctgattgagaacaaattggtgttttaacaggatatacccttgaattagaggtagcatataagtagtcaatttacattctgtttataattccaaaccagaaagaaacattgaataaagatacgtttaccacatttggcttcaccatgcaaaggtcccgttgaatagcaaaagatttgcacatatttaaattagatttcacacaatctgtaaaatgacaaagtattagggaggattagcctaattaaatgagattgtgagaaagcctcaaagagatccaaagtgcagataccttccaagtaggatcacagtgaaggcttccagaatctattttgcctctttcccagcaatcagggctcagattaccctgggcgacagtagcacacttgtgtatgcagtgacatctagtgacaaagaaaataaaaccggctccaaggacactttcttcaccagacagactccacaaaaatgacgcagtacctatcattactgtagattcgtgcatagtatcctatagagattgcaaaagagatacaccagtttctacaccagatatgttcaaagaggtaatacaagaagtatcagtaaggtttggcaaacagccgtggtatcagaatccaaacaggtaattaaaacagatttatttctgtcttatgtgcccatagtaaaaactgctgttaatgatttggacacagagttcgtgtggaatgttctgaagaaccactgacatcttccaagaaaagaatccattaagatgaatagaatttgctacttgaaattcatgtccaaaagtttagaaaatatacatatgcaagttactcaggcaagacaaagatttaaccaactctccaagttatcttaatcaagctgaaacccactttagattaattggagtaggccataataaaatatttcctgtttccttttgtcagattttaggattttaagcaaaatgaataaaatatatacaaaatcacaactttctctgtataacaggaacttggggtcttgtcttcgtagagttagaagaaagtgaaatctacagatgttaactagctacactggaggcaggttagtgctgtcccgctgaggactccagtttttaatcaccatcctcaccccacaggacctttcaggaggcagtgatagtgcagcctacacctggaggtctctcagattctggtgatcttcagtgaggccttggagtcggaattttgagcaaacgcccaggtgattcttatgcaattctgccatatcctaccttttcttatatgctccagtgcaaaagtaaaaataccacttgggatatggagagggtttaaactttgtaaaggtatccacagttgcctgggactcggactgtaagtaaaccatgaaccagtttatccatgtgtggctacaacattattaaaaacagtgtaattgccagtatattctcaaaatgggttgcaaagtggctgaaaaaaataactggttttggccgggctcagtgtctcatgcctgtaatcccagcactttgggagaatga

SEQ ID NO: 1888155 - DNA, 4001 bp, Homo sapiens
atttcaaaagtgctgagatgcagatttcccttaggggccattcgaacccgtaataaggctacaggtaataaagacctccaggtttctgatgtctcttggcatagtttagcaagagtcctttttagagtttgattagctctttctactttccccaaagactgtggcctccgtgccgagtcaaggcggcactgaattcctagggctgaagatgtgtttcgggtaactgtcgctgtgaaaggtgagccattatcgctctgtaagctcttaggcagcccaactctaggaattatttcctttagtaggagtttagaaacctcaattgccttttcaaaccgggcagtagcgcacgcctgtaatcccagcactttgggaggccgaggcgggtggatcacgaggtcaggagatcgagaccatcctggctaatacggtgaaaccccgtctctaataaaaatacaaaaaattagccgggcgtggtagcgggcgcctgtagtcccagctactcgggcggctgaggcaggagaatggcgggaacccgggaggtggagcttgcagtgagccgagatcgcaccactgcactccagcctgggcgacagagcgagactccgtctcaaaaaaaaaaaaaaaaaaagaaaagaaaaaaaaaccacataaaatagtaaatgtttgcaagaatacgaagagattggagcccttgtccgttgctgttggaatgtacaatggtgcagctgctgtgggaagcagcgtgtgggaacctctgaagaccacgtgagaactccctgaaagaactgaaagcaggggctgaacaggtgcgctcatcgctcccacgggccaaacgctggaaataaacaagatggacgcgaacgtgcggagaccgcatgaggtcatttcctgaggtacttggagcagtcaaatgcagaggtgggcggcggagtcgtggtttccagcgggtgggggaggaggggagccggggttactggggacagagtttcagtttgggaagatacaaacattctggagttggatgggggcgtcggctgcacaacaccgcggttgtgtacaatgcccctgggctgtgcacctgaaaatggtcacaacgatcaacttcatgtgatacacattttgacagagcacatatacacacgaaagaaaaggtggagtcttcaaatcccagggcctgggcgttgtccctagaagccaaacagtgtgggtcccagggtcggggcaggggcctgcggtaggatttctttcctcctccctgttttgatctctagaagaccctacgtcctgtggaaggggagcactgaggaggcgccgtctctgggagaggcagggtgggttgttccagttactagcaccattgccctgcaggcaagaagctggctggcccaagaccacccagcgggggctccctcccgctccccccacccagcctgacctcctggtgcgcccactgtgccccaccagacctcccttccccaatcccagcagcatggacagcagtgacgcccacagggtgctcactcgggccacagcacaccccggtctttgggcacccccagggccagggcgcggtgggagccaggggccgctgcaggggcggctgccggccacaggtgctgtctcctgggagggcgggggaaccaccggttcagaacagcccgggacaagtgagtccgcagttacagacccactccgcagggccgtcgctagaccacacgtgttgtggacagaccccactttacagctgtggaaactgaggccagaaaggctgagcagctggcctggtcaacgcctccgccgcttcgcagcctccacagcctctgcccagaggaggttcgagaagctggccaaggtgcggggctgcttcatcggctgggacccccgctcagccctcaaccccccaggctcacctgctgctgtgcaaactggcagcgtccaaccccagctcggaggggcgctcgatggcggagacggcaggttcctccagctcccctatcatgtgggcgcctgtgaaacagcccccagcgtccacctgcgcagaatccgggagggcctgggaacccgcagtttcgcccctcccgggccctctgagaaacacgggttctgagcctctgggtgcaactcccagacagccagcaggtggcagcgtcgcaccgaaaacgccgcctctgaagctggcggggctgaagcccggaattcgtggctggtcccgcaggggccgcagcaggggcctcacccgggtgctgtttcgtgcgcctcacccctcaccccctgcccatccctgcctccaaccctctgagccaaggtcgatcgattctactgaagattaactgggcctgggaactggcccagagccctggctccctgctggggagttcggacctcccaaagccccggcccagccccaaccccagccccatggcgtcagcgtctctggctttaatggggaccctgctccagccgatgctttgaaagccactctcacccacacccgtgatgtcaattaccgcgtacccctcagaggcctccccaccagcgctggctgcacctcccctcgggggcctcctgcattctccagctccatagctttccctcctggtcaaccccatcctcctgctcccccagctccggggacctgtggagccaccttcccccatggcccccaccagccctgcagttcaggcccaggaggaggccccgcagccccggaccgcaccggcagcagtgccagagtggctctccgaatggccacggcgcctttcttcccataaagaccaaactccccgcgtgattcaaactgtcccacaggcctggtcccgcccctctatctcctggccccacccgggcccctcactgcccttccctgtgccaggcctcctccggccacctgaatgctcccccgaccccggcccgtggccacaatgacacccactcacccttcagacccaggcccaaacacagcggcctcctccacaccaggtatcctcaattcccggtctgtgcatcagccccgaaggcggggtggggtcccaggacagcgcctcagacagacgcttccatcctcggggcccctgcgctcctggcgggcgtgtgctgggggtgaggccggtgctgcaggacgcgcagccagacaggccgccagcccggcagaggctgcctcagacccattcccctccgccaggacaaaggcctgagtttcccacggagacttatccatgcatctgtctcctcacaccccgcacctggcagggaaccaccggacaggccggtcactgctgcgttcccagaaccttccagacagcacatccgccccacacacgtgcagctcccactcccctcccggggctgcgcacactgccccatcgctgtggctcctcctggggcggagcctggagaacagggagggtatgcggcccttcccaggtcacacagaagggcccgacgggccgctccacctcgtgccataggccagggtggcccagtctcccacccaagccaggaccggagaagccactatccctcagcacactctagcctcagcactcggccgggcctccaggcaggttcccacctgggagaagggctggggttctggccttcatgcggggttggaagaggactgaaaaggcgagtccgaggctggccacattcccatccagtgtggctggaccccaggggttcggaggctccgggaaagcccaccaagcctcacgcgtttcgctgatagatgcccaggaagcggctggcagggaagaggcggtcctgcagctcacagagctcccctcccacccccggggagccccaggccgcgctgccctccaccttcccgccctccccggcctgcaacgctcgtggcgtttttcaacaggttctagaaactccctctcactctgcccctcaagcctggccacagggcgccccgagcagggagtgtgcgggctccgggtacacgctgcgccgcggctgcaccagagcgcccacgaccctgaccccgacccgaa

SEQ ID NO: 1888156 - DNA, 4001 bp, Homo sapiens
gggaggagaggggagcaggttgtgtctgatgtgggtgtgtctgtgtgcaatggctgcttgtatccttgtgtgttgtgtacctgctcagcaaactgagtcctgtggccaagaatgatcctgggcaaaactgaacacatttaacccaagtttgatttcaactcaacactttcccattgtgcctccttctcatcccaaatgtgccaaatacttctaatcttagtattcgttctttgctttgtctgtcaggtcctgttctctacgagtgaatatcctaaggaccataataaagccagttccctttttggggactgacatttgttgagaactccccctatgaatgctgtcttgctgcaaaacttcacctctggataaagtggctgtgctccttctggatgtctgcatcagggctgctgaggcacagctgagaatgcaccacacagctgactatgctgctgtgcatatctcattactaaatgcccgtccctttcaaggatgccaggcgttagggctgcattgcaactttgatggacactggggattaatgtctgtgtgtccttgttccattaaaaagtttgaagtttgctgggtgcggtggctcacacctgtaatcccagcacttcgggaggccaaggcgggcaggttacgaggtcaggagatcgagaccatcttgaccaacacggtgaaaccctgtttctactaaaatacaaagaagtagccaggcgtggtggtgggtggctgtagtcccagctactcgggaggctgaggcagaagaatggcttgaacctgggaggaggaggttgcagttagccgagatggagccactgcactccagcctggcaacacagcaagactctgtctcaaaaaataaaaaaagtttgaagttttattttatgagttactggtataatgataaatatattaatatcatatagttcaattttttttcttctgactgaaattgacactctttggtgggcctgtaagtttcctggccctggtcactgtgcccaccctgcccatggctaaggggtcctagcagcaagcatgtatgtggctggcccctacaccctcccactctgccagagattttttccaaaaggaatctccctgcacggagggcggagctcgagatctccatgtcgcggggtggctccgaggtcaccactgcccagcatgtctctggctgctgacaggactctgtgctttcttaactccttgatggagttcctggagttggagggaagcgcttcccaccagaaacccacttgtgtcggtttttcttccatttgaaacaaatgatcaaagtgatagcgttttctatgttacgtgtctgtctctggtcacttaaaaacaaaacagagcagggtgtcccctgacagcccaggggaagaacaggaaggcagccctggggttacctgtcaaggttcagatcatgacctccagcatcggccacggctgggtgacatcgtcactccccaggggacaggcgatcccctcctcaccccacagctcagaccccaggatcggccccaatccctgtgccctgagctctttctacttcccctttccatcccaggcttgtcccgagccagctctgaaggaggccggccctgggggacagggaggagtccagcctgggacccggcctgagctgggaggaggcgctcgtcctgcctcggcccctgtgatgaatcccctcttacccggcaggtggtgactcccctatctgcggccgaccccgagtccccaccgctctgtccttctccagggcctggcgcagaagcaccctttgtccctgggtggcctgatcctgctgaccacgggtcacctccctgaccacgaatactctgccaactgtccccgagtgaccaaggcagctcagtctagagtctagaggcctgagtacccaggatgacctaatagtcccgactattaggaccccgggactggggctttgtcagtttaatggattccacctctaggaatcaactgccgcgagattctaattggctgagctgcgtgtccacgtgaccgattgaaccgcccacctgggtcttccagctgcctatcaaacgcacagcccggtagggcccgggggaggaacagccaagagggaggccgggccaggggctggtggcttcctccgcgagctctgccagtttctggcctcaggtacccatcgagttcttgcagtgccctgcagtcttcagagtcagatctgtctctggaagtttcttgatgtgagacccacagatgggctccatagagaccactgagttcctgaaagcgtattcatctttctgtaaggagaggtcatagtacttacctagctctcaaaaatgactatcttagaattcaaagatattaggagtcacttctccacggagaccctccagaaggtcaggaaggtcccagaataaaactcactgaatcccatttcactcttgctcctagaagtccaaggtatcatggaggcaccttggcgggatgccaaggactgagctgggggtgaggttgtcagggaggagggtcgaggccctgggtgccctctgagttccaactggggctctgagtccttcactcagttgtcccttgaagagcagttgccatatgcaaggcgcactggtgtaaggtggaagtctccctttacttctggtctaggacacccagaacagtggagaattcctgcttcagctcagcaccaaaggcccacatttttacctgagattcctggcacctgccacttggagctggaaggggctgtgcacctgagtgtatacagggacattggagtctgtggacattcacacccggacacggtttatgccacaatgtgttcatgtccctagtgactgtgtgttgatcattgagaacacgtggtgtctgcacacgaaggtggagccactggctgcctgcgaccctccttaccggaaagcttcacctggctttgtgctgcatgctgactgtgatcattaatgtgccaggaagggcagatgcaggatgatccgtaacaactaggtcctctgaaaacactcagccctggagaatctcaccaggtagccaggcagaagccccatgtgagaacccctcccatgcgggccactggtgctgatggccatggtactgatgacccactggtgctgatggccatggtgctgatggccactggtgctgatgatcactggtgctgatggccactggtgctgatgatcactggtgctgatggccactggtgctgatggtcactggtgctgacagtcactggtgctgacgaccactggtgttgatagccactgttgctgttcttaccatgtgctgtcatcctggctgcacatgagactcattggtagtttcatcaaagttactgcctcttggacctcacttccccagctcttgctactgttttgtggggctgagtgaatatcagcagttttaaagccctcagattattgtgatgagcagctagctgtctgccccaatccttcattcttctagcagccacctcctaaccacttgccacctctctcacccaagcacctatagccactatgctgaccagctgtcctgttgcccagggatgagggaggtcccttggaaacaccagctcagttctgggaaatcgggacccacactctaacctggccttccagtttcctaccaaggatggagctttcaatctagctcacaagttctttgccctccccatagtgagggcagaaagcatgactggaaattgtgatgtccaactccatagaggctcctttgctacatgacatttattcttgatgccaggttcttttggctaagctgtggggcacgggtaggctgcagcccatggcagctgtgctgcctaaatagctctccagtagttgaagtgcaataaatttatccaagtccttctcatgttaccttcagcatttagtgttatggaggaggttttcttccccggtgtagacatgtgcttcagaagacgcccaggggttgattcctggagtgattta

SEQ ID NO: 1888157 - DNA, 4001 bp, Homo sapiens
ccattgtagattgtagggctgctgactggggaaggaaggagagcccccctctcgttttacaggagagggtgggagatgaggtccacagaaggaagtggattgctcaaggtcagttaacaaattaacgcgagatgtgggcacaggaccagtttcacctgagagcatcgcatgcccttcccacatcatcccattgcctgggtgactcctactgtgaggaagtgaacaatatctgttaagactcttctgctgctacagcggctcaggcctgtaatcccagcactttgggaggctgaggtgggcggatcacaaggtcaggagctcaagaccagtctggccaacatggtgaaaccccgtctctactaaaaatacaaaaattagctgggcatggtggcgtgtgcctgtaatcccagctactcaggagtctgaggcaggagaattgctcgaatcaggacctgaaaggcggaggttgcagtgagctgaaattgcaccactgcactccagcctgggctacagagcaagactccatcaaaaaaaaaaaaaaaaaaaaaaaaaaagactcttctgttacaggtgataaaatcccatgcaaactggctactggcttctgtttaaaaaggaagttatttgcttgcatatcagcaaagttagggagaggagctctgccttcagaaccagccttgttctggtagcattgcagggacgctgctctgcctcagctccttgtcaccatgtcacaacatggaagtggacagagagaggcagcccctactcaattcaaccaaaacactcaaaacactcagagctcagtcccattgctcatgattggcttcattaacccacatgccctaccctgaatcagtggctgcaaagagggcagtgcgggcctttgattaacaggcctgggtcaccttctggccatatggagggtccatgagtcaaggtctattcagggaaacagaacccacctaggtcttccttgccttccagcttttgggttggtcaagctggggtggagaaggccttttgtttccaacctccccacctcattggcctctctgctcttccatggctggtgtcataacctctagaactaaagaagaaatgagaggagggtgacattgccaggacacagacgccaaggccatcctgctgaaggtggagtcaagtcaggggtgtgctggctggagcggggaagaaagggggaggggctgtgccacgggagtggtgagggaaacacatcagtgcacgagacccccatcccaggccacgggagagaggagcaaacaccctggcttctgccctcctccctccttccgtcagtgttccacgtcttcccagaggcctgtcctggcagcacccacccacccacccacccacacagagggcttgcccagggcgagaactgcacgcagaggtctggtagccgctgtaggacccaaggctctccttgctcctccatggctctgagctcccctctctaggcatactcaggtcagaaaagcagtgagagctaaacctgctgccctgtggtagctccccatcccggatgggctggctgtagccccgagctttattcctcccttaatccctgcagccaagagcaaggctgtcaccacaggaagctgtccctgtcccaagaaaagagacagactcagcggttcagagcagggctctgcagcctcatacctgggtttgtctcagatctgtcactttctcatcaagtgaacatgagtaagatattaaacagcactgggcctcagcttccccgcgggtaaaatgggcggcagaatacagcaccgggcctcggctttcccgcgggtaaaacgggcggcaggatacggcatcgggcctcggcgtctccgcgggtaaaacgggcggcaggatacggcgccgggcctcggcttcctcgcgggtaaaacgggcggcaggatacggcgccgggcctcgactttcccgcgggtaaaacggccacaggatacggcgccgggcctcggcttccccgcgggcaaaacgggcggcacgatacggcgccgggcctcggcttcctcgcgggtaaaacgggcggcaggatacggcgccgggcctcggcttccccgcgggcaaaacgggcggcaggatgcggcgccgggcctcggcttccccgcgggcaaaacgggcggcagggtacggcatcgggcctcggcttccccgcgggcaaaacgggcggcaggatgcggcgccgggcctcggcgtccccgcgggcaaaatgggaggcagaatatctgcggcgctgctgcaaggcccgatgagataaccaatatcagctccgaccttggcaccctagcaaagagggtgcccacagcaaggaagggccattctcatctgaacacacttggtccaggaggaagcatggagccatccagggaagtcctaaaaaccaggtgtgccctcatttattcaatctcatcataaaatcccattaaatcagtcaacaaatatcaactgaggacctacctactaggtgctacagcctgccccaggctacacactaggttacgtaagtgaccaccaggacaacagaaataacactccagcatcacagctcttcatgactgatccctttttatgagtcaaaacaagcctggggggatggttgaggtactgtgaaaatgcattattactgccccaggcatccaattacatatataagttgcatgttctaattaaattttcctaatgtaatgtcggctttgcccgctgctattaattattgaagccacgttcagcttaggtggattttcctctcccgcctcaccttccattcactcttcactcctggctgcccttcggctggctgcaaactccctgaggatgggtcctctttgagcaaaggcacccaccgtgaggctcccctgttggacagaggaggagtcacccataggaggagaagcaagcatcaccaggctgcttcgtaacgaacacgttaagcacaatgatggtaatggaaggtactccaaaacatcagtgcacttccctgcactctctcccaagaggcttgtttgctcccttctcaccatcacccactccctgacctaaaaaggtggtaactactccctcagaaggttgaagactgtggtcagatcccaagacgcaagcatgcaggtggatctggcagagggacgttcccaagcccctgaaatcagactttaaaatgtgctgtggaggaaggaaaggtggggaccggagaaagaacatggaaccaggcctggagctttttctgctggtggccatcctgggagctgccccaaagcagcaagcctagcccttcgcaaaggctcatcctgcagcaatgcacctgccatgccccagactctgccatggctctcacccacaaccagccctccttttgtggtaagcatccaagagctgcataagaccgatatgttcctgagccctggaccgtgcttgaggtgtgccaacaagcatagctggaatgaattcctattcacaacattaggaagaaagacatgccacattctttattttctttaagccaaagttcatctgcaaataaccgccactatccaagagacagcaaattcaactgcattcattattactcccccgaccccatggtatctttaagggcctggactcacacgtagtggacaccccacagagatggggccacgagggcgggacctcagcccaagtcttctactctacatgctggtcccctgagctcaagctgtcactcagctccagggaaagggctcagggcgcccctagctgcagtccattctagtacagagtgacccacaggaccctctcagctgctctccaggccatgggaaatagtgcctaactgcccaaccacccacagcagcttctcatcaggcatgctgcagcctagccccattcctgtcctcagcaagagaggacgcccactgccatggtgtctgccaattcttacttttgcaaaagacaagtcactaaaacctccgttttctagacacagaggc

SEQ ID NO: 1888158 - DNA, 4001 bp, Homo sapiens
tcgcagggaagagtgtcacagggagtgggaagagcagggaggggagggaaagccgtgaggctggagtgtggcaggcgccagaggtgaagagcctgccaggccgtgaggacttcgggtttgttgagtgtagtcaggtactgctgtttcctggagtgtctacatgtgggcgtctcaggggctccctcttcgtctctgaaatgcttcaggcccctgaagggctacggttcctgaagggagcagttcctccaggccagacacagccattcaggccttcccagctactgctatggaggtttggggtggcctttccttttaatgtcagtctggtgagctcccaccaactgggccgtctcatccgtacatcctgatggtcacctgtgcttgataccacttgcgatgaaaggattccaaagcccttctcctgaaatttctacagaacatctctctgtaacacacgcacagagggcagccagggagatttaccagtgagaaccctgcttccttccctccctcccttccttccttcctcccccccttccttccttccttccttcttccctccctctctctgtgctccctccctccctcccttccttcctccctccctccctctcctcctccctcccttccccctccctccctttctctctctctttttcttccttccttccttcttccctccctctctctgtgctccctctctccctccctccttccttccttcatttctttttccctccctccctccttccttcctccctcccctccctctctgcttcccttccttccctccctcctttccttccttcccttccttccttcccccctccctccctccctctctctctctcttccttccttctttcccttcctgcctcctttacttcttccttttcctccttctttccttccttttctccctctcttcttcccctccctccatcctttctttcttcccctttgatcttttttgtctctcagcaacaatggacctccagtcggccctgcttttttcccaggaatgtttatggcactctttcccacttgtttttatttccaaacgtgtaacaggccacccatcaaaggatggaatagggaagaaagtgagaagagagaggtcgagggagcagtcatcgggtagctgctcctggcctttgagtaagccgtttgcccactcgatttgtcagtttgtttggccctcgatggggaggcatccatccttgaccctcggagagtcctgagagacaggaggagaggggttctccatggcagtgaggggttccctagcagggaccctagagagaaacggctccagaccaggctttcccggctcggtgctgctgacagtcgggctggtctgctgtggggccgtcctgtgcactgtaggatgtctagtgacaccccaaccttaaactgtgacaaacaaaattgaacccagacttggccaggtgttccctggacacaaaatcaccactggctgagaaccacaggtctccgtgtccagaggccctgcagggtgccccatggccagtggctgtgtggacttggtggcccataagaggctctcggtgacgcggggctgcagcacatcacacgacatggagcagatccgccagcgaggccccgacccaggagagactctgccccacagcagcaggtgtgaggcagccccccactcctgggccaggagcgtcatcgcccagaaggcccgtgtgggtgtcctggagtgggtgtggcctcctctgattactcagaaaggcagcagaggtgcagagaagcctctggggcctgctgctctgtgtcctgtggcagcatcagcccctgcggcggagggagagatgccgggacaggcagtagtgtgagtgtttccagccatcaggttctgtaggggagcacgcagtcccaggggaggcccacttgggtcccagcggaccgttaagaaagctctcctctatggctgcccgaactgtggtgggtatggcctgaccttgacttcctgtacactttcatttttcatttttttttcctggttcttggctctggaaaaagtgggaaaacatatacagtgaccatactgttgacgtctcagtcagagaagaggaacgatttcacagtagctgggggaaagcgctggataccacgtgcactcataaatcacgcccacgtttatgcatctgcggatgtggggccgcagatatttttcctttctgaagaagagaatttaagctctagaaactctgacaaggccccagtaaatgggggcttttctcctgcctgctaagggcagctttcagaagagacgtttgtcaaatggaacccgagtcaccttttcctgctctgctggatgggcaggagccgggcacaccagggcaggagtctcccctctgaagacctgacccctggggaaggcaagcaagattttcttgcaaaaagttcatggaattagagacaagcaaggtgtcttcctggggacgctcgtggtaccgtagcagcaagggccgtggcaggcacagcatagggacttgacaggcatcgaacgagtgacttcgtgttcccaaattggcaggatggttgacttctgtgtgcggaacatttcccatcgcccatctggcagccacgtgcttctgccccgtcactgtcactccctctctgagtcgagctcgcagtcactaggctgcgaaatgactgctgaatacactatcgatcaaacagcacatgttttgaacatctatcatgtatatgccactgggttaagacctagaaagtatatggggctttggggaggggaaggaggttcttttaggaaggagggcaaatgcatggcacacctaaccccaccctcccctcccatgctcctagcagacactgctaaaccatcaccacatgtggcgcttcagaatgctggttgacagagagctctgggctgctcctccttgggaagggctttctgtgatatggctctgggaggtaaggggccacccacttgactagccagatgtgccacagggatcctggtgatcaatggtgtaaaagacatcacagagcaatcacccacatgtcaccctattctgctattctgagtattagagacctttaggaggtcattacagcagtggcggtgagagaattagaggcctttgggaagacacccacccctcataatacaaagaatcttaagaggcaaagtcacagatgatgacggccagttgagaccatgacagtaggcccaggctttctgtggtatggcggctcacctccacaaaggcaaccctgaaagacttcctggaggtggtgatgtgccattgcgttagcagtttcccctctcctaggtgagacagtgccaaattcctactccttaccggagccttccagaccttaccgttttccagccaaagtggccttgggcgcatgcctagaactggccaagcccttccccacctcaaggactctgttctctggctgcctcggccaggaatggtcttaccgtagctcatttgatggctggctccttcctgtccttcaagtccccaagtcccttcctcagagaagccttccagccacactctctcctgtaagtctctgtcctggtaccttgttcatttccttcatatgtgtctcttctactaggatgtgagccagcctggcctgctcaccatggtgggcctaatatctagtgttaggcgtatttaggtcctccacaaatatttgtccaaagaatgaagaatgagtgcacctgcagtggtctccacgggaagtaccggccacaaggccagggctctcaggtcactatagagcagtactttgcgttaaaagtattttaccgaatcctggttgctgctctgaagttgcccataactcttcccctgtggaaagccgcacagcaacttgtgtccccggcatgagctcatcggtcctctgcgaagttacttctgcatctcccccgaccccaatcagtgggggctccgctttccctaggtaagcacgggaggcaaggactggtg

SEQ ID NO: 1888159 - DNA, 4001 bp, Homo sapiens; identical to SEQ ID NO: 1561897

SEQ ID NO: 1888160 - DNA, 4001 bp, Homo sapiens
ccattctttcatgcagctaatagtttgtgttgcttgctttcaccttcaacattcacacatttgggttggcttggtggctccacattcattacaggctagttcctggggaacctgggaaatgtagttttagctttttgtcttctatagtatagcaatcaaagtaagctagaagggtgttggaatagatgctggttgaactgcttgttagtatctgctcctgatggaattgaactgaaagatgttacaggtgtttactcctcagtggtccatgttggaatgtcactttctgttttcagaagcttattactatatgtaaaaaacaacaacgacaaaaactattgcttttttcttctgcacttgatcaaaattctgtttaggtatccacattttaccattatatgtattcaacagtgcagaatgctggtgaccagttttacttgttaaccaaggcatggctgagtcctcagagacttttaatttgactccattcttaggatgatgtgctgcatttctgcaatggcacccactggcgtgcaaaagaaaaactggattttccaggttaagcagaaacatggacgccatactaaactctgaacagacacattcatgcatcttcttgtccaccagctgcaggaactcaggggttttactacttcatccttttatgcccaacaccccatcagctccagaggcagcttggctgcatgccaatgtcagtgtagaattattctatcctcacgggttcatatcgtttgtcaagtcaccaaacactcagaaatattgatgagtcatctacctagatgtttttgttcatttgtaagactaacttgtacagagttttgagttttcttaagattttagagatataaataaaccatcaattaaggatttagaattcactaaaaataaaagctttaaaaggttgtgatttgaaagatatgcttagtgctggaaggtgtttaagggtcaactattctgacttagaggaagataaagcaagtagtaggtaagggatttgccaaaaaattacatagctggttaatatcaatgctgagattgaaactcaagtccactgcctgctggacggggaatgtttcaaaggtgcttgataccaaagcataggtcctaagtcctcatcatcctgtatgaagcatgcacatgatgccacatggtagctgaggccatgctctgaaggatgtctacatgaaacaaccatgaaaaatcatataatatgggttacattcccaacccacatcttctcaaattcactagaaggtgtccattttgttgacaaaactgaatttgaagtatatgcaataaatgacaccaacattatttttatggctaaaagtacttgaagagcacgcttcctgtttttaatcactagcgttcctttagctgcagtcagccatatttgttgcttacattataagcatatgtttgtttggtttgctctaattctttgccctcttaagggaaaagcaagggaggtttatgaagggccttaaaatgagagaaactaattaattgctgactttttatatttatcagcaaaggaaaacatttctctactctcataacgcttctgacaccaaatgtgcggattttctacacattacaattctcataccaactaggtgtcctataatttaattcagttctggctctggagttagcacagaccccacagtttaaggaatcagtcccacagactgctccacttcagatggtgatcataagcctgggctccctatacttcttactgacaggctataaatcagaggtttctcacgattccctcaagttcaataatttgttagaatggctcacaggactcaggaagacacttgactcaccattgtcagttgattataaagcacacaactcagaaacagccaaatgaaagaacggggtatgtgggaagggccgtggggaatccacgtcctcgctgggctcgccaccctccccgcacctccatgtgttcaccaacctagcagctcttggaacccctttatttggagtttttgtgggggttccattacataggtgtgattgatgacatcattggccactggtgactggactcatctccaacccctctccccatcctggaggagggagagtggagctgaaaattccaaccttttagtcacatggttggttcctctggcaaggggctcccatcctctgagtcaccttattaacgtaaactcgggtatgcttgaaaggggcttattaagagtaacagaagatgctcttctcacccctatcactcggataattccaagagtttcagaagctcttctgtcatgaacagaaaaattctcctgtcaccccatcacttagaaatttacatgagtttgctgggcgcggtatctcacgcctgtaatcccagcactttgggaggccgacacaggcggatcatgaggtcaggagatcgagaccatcctggctaacacggtgaaaccccgtctctactaaaaatacaaaaaaattagccgggcgtggtggcgggagcctgtagtcccagctactcatgaggctgaggcaggagaatggtgtgaacccgggaggcggagcttgcagtgagccgagattgcgccactgcactccagcctgggtgagagagtgagactccgtctcaaaaaaaaaaaaagaaatgtacatgagttttgtgtcaggaaccagggcagaggccaaatgtatattggtattaagtcacaatcaatacgtactttttaaaaatgtaaatttatgtataaatgaaaataactacatttcttgctttcacaaaccttgttgtcaatgtggaatgatttctcaccagtttaaacacagttgagttcttacataaggaaaaatgggaagcagaggttaaaacatgtatattaactgtggtgttctgagtgtagactctggagttcaactatccaggtttgacttcttccatttctgagctatgaggtctcaggcaagctacttgccttctctttactttagcatttcatctataaatttagtatgtcacaggcacctaacttttagcattgttgggagattgagatggtgcatgtcaaatgcctgccatgacaccttctcagagctggtactcaataacagtattaaacattttgtctgggcacagtggctcatgcctgtaatcccagcactttgccaggctgacgccagaggatcacttcaggccaggagttcaagccagcctgggaaacatagggagagcgtgtcttaaaaaaaaaaaaaaaaaaaaaaaagtctatctcctgttcccatgttttcattcattttttaagtaatttttttttaattatggcaatttttttaagtaaaaaaaaaaaaaaacaaaagccaggcacagtggctcacatctgtagtcctagcttcccaggaggctgaggcaggaggatcacttgagcctaggaattcaaggccagcctgggcaacatagtgagaccccatccttaaaaatatatttttttaatgtatggagtacctaccaagtcccaggcactactgtaggcactgaaggcacagaattgatagatgaggtccttattctagtagaactatgaaaattttcttattcagaataaaatttaggaagcaaccagaaaacacatatagacactgtcatgccaggcccctattgattccaacagggatggctcggtaagagacccggagccagtgaatgagacatagggtttatagaagacttatatacagagcattctcggaatgggaggctggataggaaaaccactaccatttgtaaaaagcatgcatattatatagcatgttcacttagcaatcttcaccaagcaaccttcctttaacccaaaacaaaaggcccctgatccctgtatagtctgcattccaaatgataggccaggggttcagatgttcttcatagatgaggagtgaatctccagcttgaccactcctggattcttctcagggtatgcttgagttattgctgttag

SEQ ID NO: 1888161 - DNA, 4001 bp, Homo sapiens
tcaaggaactcactgctttgtagttcaagttccaaaaattcctagcagttcaccctcttcttttgatctttgagagacttccttgccatcttcgtagcactgtatctagaaatttttagttataagggagagaacccggaaggaatgaggctactccattttggtggaactgaaagtaatatttcattttagtatttaaaaatgcctatttgtgtcctttgaccttcactgatacactctgatgtttctaccaatatcttagagggtttgactatttgggtgaaggtaccagattattccttttgttgttcatatgcaggcaaacattcatttatatttatctaaaagtaattgtaaacatttgaaaataattatatggttaagtcacttcaattagttaaaatagttggatgagaacacaatagaatatttcaagcaacagctgagtagaagattttaatctcattacaactgatgtcagcattctacctgaggcaaaactaattgcagcagcttcctcccacagccccacctcaccacatactcatcccagataaccatgcaaaagaaaatgtactaataaaggaagagttttcatttgcgcctttacagtcatgtataagctagagcacaacgtcccccatgtacctaacagaaagtgtccatgccctttcccacgcctctccttagtgccaatatctgggatggaatgctggctggatgtgctattttatgagaacaaaaggaatataggtgtcttcaaggaggatgaacctaatttagagtctcaggtcaaccttgagtaagctactcaacatctcagaacctcagtttccttgtctataacatatgggctccgtttgcttttaattctcttgaagaattaaatgaaagtatgtacctctcagagccagtacctggctcagaaaatgctaaataagtacatatttgactccctgagttggcaatgacaaaacagtggaacttggaggagctcacataactcaggaacaccagaattggtttaaattagaattctcccaaattctactagaattttaaaagaatatattctactactagaatttgggggaattctaatttaaacttatatattctttaagtttttgggggtacatagtgtatatgtttgtggagtacatgagatgttttgatacgggcatatgcaatgtaaaataatcacatcatggagaatggggtatccctcccctcaagcatttattctttgtgttacaaaccctaacccaattacactcttgtagttttttaaaatatacaattaagtcattgttgactacagtcaccttgctgtactatcaaacagtatgtcttattcattctttctgtttttttttataccactaaccatccctaccccctacctctaacctatatatttgaaggaagtatgtctccccaaaatattaaaacaaacaaaaaaccttggtctcaaaacacacatgcatttaatatgagtaaatataaaaatttaaactctcctgataaatctttccttataggtgatcagatttcaagtatactttttctaaaaatatattcagggacaaatgttaagaacttttattttaattctgtactattttccccctgagagttgtttaaggactaaaaggaattttagaataatgtgtacaaaatgtaaagattctctcatacatatctcttaggcataagtggcagaattcagataattcaatacacactcatccctcccttttccccagtgctctctgaaaactggagggtagtttggggttaagtggagttcctgaagaccaaactactgtcataagttctactgttttggcctacagagccatgggagcactcaaaacaatgattccagtttatcaaatataatgttctccaaaagagtaagtcagattctccaggttggaattctggaattcccaccacagatgggttgcacagccctggcaaatcgcttagctgtctgagcttcagtctcccagcaaagtggcgacagcagcacagcacaccacattctgtaagaattttctcatctagcctgaccacgcccttcagagtcaaaggaaacgtcagcagtcattattgacctcatttaacgacagagaaatgagggttctgaaaatattcgtgtttcccaaagggtgatatacaaatcatggatgattcataggcaacctttgagaaaggagaactactgattttgaggaatgaagagaaaaactggcaaaagatagggacatgggggaaaaactgaattccccaataacagcagctagcaaatattaagctggcaaatgaagggattaaaaatgagcaaaacagctgtagaagacctgggaaatggcccattcaagaaagttgagttctatgaacagctgattcataatgccattgagggccaggaatttcaacactgaatagtaacttaaactctgtgataaatggaaaaccatgctcagaattttgaaatgtcttagaccatggaaggaaataagtgttgaaggaaagttccctgatttcttacttcaaattggaccaggtcctacctcatgtaagaccaactttgatggtcattatccagcttcccatgactctaaattccacttctgtagttttggagtaggtgcagtcatgcactacataacattttgatcattgatggactgcatatacaaggtgatcccataagattatagtggagctgaaaagttcccattgcatagaaatgccatagccatcatgacatcatagcacaatgaatgatactgatgtaaacaaacctactgtgctgccagtcatacaaaagtatagtacatacaattatttacagtacataataattgataatgaaagactatgttactgctttctgtatctaccatactattgattgctgtttcagagtataattcttctacttactaaaaaaaaaaaaaaaaaaaagttaactagaaaacagcctcaggcaggtcctttaggaggtattccagaagaagacactattatcataggagatgacagttccatgcatgtattggccctgaagacattccactgggaaaagatgtggaggtggaagacagtgatattgatgaccctggtcctgtgtatgcctggactagtgtgagtgtttctgtattagtttttaacaaaaaaaaattaagtaaaaaaaaagaaattttaatatagaaaaaagcttataaaataaggatataaagaaaaaaattttgtacaactgtacaatgtatttgtgttttaatctaagtattattacaaaatagtaaaaaagttaaaaataattaaaagtatataacataaaaaagttacaataagctatagttaatttattattggggaaagaaaaaatatttttaatacatttaacgtagcctaagttcactgtgtttataaaagtctacagtagtatacagcaatgtcctagtccttcacattcactcaccactaactcactgactcatccaaagcaactttcagtcctgcaagctccattcatggtaagtgccctatacacaattaccatttcttaatcttttgtgtcaaatttttactgtaccttttctatgtttagatatgcttagacacacaatacttaccattttgttacaattgcctacagtattcactacagtaacatgctgtacaagtttgtagcctaggagcagcaggctataccatatagcctaggtacatagtaggctatcccatctaggcttttgtcggttcactctatgatgttcacacaacaacataattgcctaatgatctgtttttttcagaacatatccttgtctttaagtgatgtatgacagtgtttttaataagactctctactgatgctgaagcccaacaaagtctgaaatccttgtacaccaaaaggcttttttgttcttccatgtgcactttactcttcttgtagctaaatctattttgggatggagggtggtcat

SEQ ID NO: 1888162 - DNA, 4001 bp, Homo sapiens; identical to SEQ ID NO: 1561911

SEQ ID NO: 1888163 - DNA, 4001 bp, Homo sapiens
aattttttccccatttgggaaaaaagttcagtgacagatattcccagtcccttcagacatatgaggtgcctgtgtgtttaatctacttggatagaaattattacagaattcataaaacaggaaatgaacattataaaccagttactaactgtagaatattttggtttcctctgccccctgccctgctctaaactctacttcactgggtttctgcattttctccatcctttatcccagattaacctgttcatttattgacttctgtcaagttctagaaaatgagatcaaagactgatagctggatgttctcccgtcttaaaatgttagggaaacagtttgttaaaagcatgttactctttagtcataagtattgagcagtcattgtctttcaggccaaaatgccagccactttattttcctactttttaaagacaattagccatcagcagtttgtagtagagctggctttttaaatacaaaacagtttattatattttaattggcggactctattgtatcttggagtttttttctctaattttatattgaagtgaaaaataggaagaacataaaatttgctacatagataattttggggatgttctattttaaacattgataacagtataattccatattttgaaatatacaaaaaatatatacaactaaaatggtatctaaaacagaaacctatgaatgctagctccaaacaataaggcaaataagtgaagagctcaggtaatggtgttattcttgagggcacaaagcctggataaaactagattaccataaatagtagtacggaagttgaagaaatcaacacagtaactagaattaatttagaaaaaattaataaaaggttggacaaataccataagtaatagaaataaaacctatcagagcaacaaagggaaaaaacacaaaaacaagtttgtgtcctcagtgccaaggattagaggcagatgaagtacaggctgaatatagggaatagaaagaagtcccaagacacaatgagtgtcttaggaagcggagagtgaataaaggcaatctcatgaaaggaagggagagactggaatcctgcccactccctcttgccagggttatccagaattaatgtttacctatgagaactgtgtttttaaatagtttttaaattttttaaaatttttacattgctgttgcagaagtttccatttttctctcaatgtcaggatttcaatgtaagaaatagattttttttggataaatacccgctgcttcatctacaatgttgctcactttcagttggcctttccctttcctaactacccgaattaagactttaaactcaactgtaaggtagttcagccatcatagatggggttagtggggcgatagtggagaggcggcaataatcattcaaattcagttcaacactgaattcaacaagaaaaaattctgtaacattgcaaatattgatgtatcaatatgtttagtatactaatctgaatatattaatcagctaattaatggtgagctgattcataactgtctcggatattataggcaagtttcttaacctctctaaacctaagtttccttatctgtaaaagtaataatggaaccctcatcttgcagtcgttgggaggattaaacgggatgatgcactatagcctggttatatagtataattgaaacttttgtactagcaatgtaaaaatttaaaataaaaactatttaaaaagacaattctcataggtaaacattgattctggataatatagtattactgttttcagcaaaacaatcagccattgctattactaacatttactaatgcttatatttttagcatatgcatctttattcaatgctcaaagaggagagaattacagagccaatatttattaatcatttcttctgcactagatactgtaaaccacccacaagaaccgtagggcgccgcacgcaccttggagggggcccttctgccggccacccgcctcagagggtttcaggccagggcctgaggtggctccggccccctcgcggctacgtcggctgcgcggtcatcctatcttgttcgtttctcccctttccccgcccacccccgggccttggctcccggctgcgggccaggagaagagagcgccgcgtacccgctgcttcccaaaacccactgagcctgatgcgcgcgcctccgctgtgccaggggcgccgggaagcccgacgacgacggtgtcgtaaaagcgtcgcgaaggcgtccgcccttggcggcttcctgccacctgtataagtggagtgtgctggggtgtgtaaagtagtatggaggcagcggtagcccagtgtctgagtggttgccgggtctccatggagaagcggctcgccagtgtcccaggctgctgagctctcgccgcccgagaccccgcggcgcggccgcagggccatgctagccttgcgcgtggcgcgcggctcgtggggggccctgcgcggcgccgcttgggctccgggaacgcggccgagtaagcgacgcgcctgctgggccctgctgccgcccgtgccctgctgcttgggctgcctggccgaacgctggaggctgcgtccggccgctcttggcttgcggctgcccgggatcggccagcggaaccactgttcgggcgcggggaaggcggctcccaggccagcggccggagcgggcgccgctgccgaagccccgggcggccagtggggcccggcgagcacccccagcctggtacgtaccgatgaggcggcggcgggccggccctgggctggggtcgccgcccctgcactcaggtaacaagctctgggtggtgcagctcggacgcttccgtttcctaacttttagactcttccctgaaaagaagttactggcaggtcattcggtcgggatgaatttcagggtcaccagcggggtccacctacggtctctgtggtcaagttagaaatcctctcatcccccttctatctgcacccgttgctggaagggccgcctctgcatattgcattgataaaggtagccttcgcttgtcttactaaaagcctatttttaattcttttgaagtgaatccccagtgtttagggcaagtctttgggaatatttagaaaggtatacaggcccttctgtttgcttgtgcaagttccgttcaccatcatttgacctttggtaaccttacacattataggatgaaggtaattaaataatttaggtcgtaattaaaagatcttttaacctttaattatagaaaaagatttaaactattcttgaggtaacggagggaagtatttgtccacttacctgttgatatgctacccagacagaagacacccgagcatgagtgtgggagagcttttgatgtcatgttagcaagactcatgcaattattacatcttcaattgttatgtcttcagtggcccctgtactgctttcatcagttgtacagcatgggttgaggtggccagatcctggcaggggtctcaactccactgatagctaaagcatgttggggtttgaatgctggatactttgaagttgccatatcctgactgaagtccttcccagaacggcagtagttggtcgagtatgccacaggttatctggttgagtaatctgagattagctctcctaacattaactttgaaacttttacggatttaatgattacaaattaatgagacaccttaactgaaatattctatgtggagctaaaaagaactcccttcactgttccagcaacattgagttctgtttgttaattcgccaaatgaaatgatgtttctgtttacaactttgtctttaattttgccctgtggataatttctgaagttaatttggggaccttttttctgatcttttgcttactgcttttttgcaaccgtgtgcagccttctcccctcccactcttccctttgagttgctgtaacctttgatcagtatttgacttattctctaccatagtatggtcaacagacttatcttttttctttggactctgaaacactct

SEQ ID NO: 1888164 - DNA, 4001 bp, Homo sapiens
gatgagatggccccggagccagacatccttggcatccctgcctgactcacccagaagacatcgtagatgaagagtccgcccagcaggatgcagccagtgctgacattgttgaggtgcaggagctctactccattaagggagaaggccaggccaaaaaggttgttggcaatccagtgctgaggaaagcggggagtgagaccagcttgctgtgacccaccctgccctgtcaaccccatcctccccttctgcccaggtcctgactactcaccttcctcagcaggtaccagacgccaacgatgctgctcaggcccaggcacaccaggtccttggtgtcaaattcataattgatgatctctgagcagagaggccaggtaagtccactccctgaggcagggctacccctcccacctgtcagcccctggacggaggagggcatggctgtgggcactgtgagaggttcacaggctggcggggctaagccttggctgccccagattagtatgagtttcagaaggggagagctcactggagccaccccaacccctccaatttcctacaggagggaatggaggcccagagagagacttacaagcctggcacagtgtcagcgggaagtggtctttggtgttagaagcacaggctttgttacttgtagctgggtgaccttggggaaggcagtgccctctctgagcttcagttttcttatctgtaaaaaggggataacagcaccccttcttagggctgctgtgggggaataagtaagacagtccttacaatgcattcagcacagtgcctggcacatagtgggtgctcagtcagtgccagctgcctctgagcccaggtctttagaaaggtcgagttaattctggaatctttctactttgccaccaaaggatgaagaaggttagcggcagcctcagttcactagcaggcgatgaagaagggaagagatgcaggtctcaaggaaaggccggagtccccgaggctgcttttgtggggggccctgtggtagacatcttgatgttagaccattctcaattgcttccaagcttcctaagaagacaactagaggctgtggagtttgccgggagtcacagagtccagacactcctttcacattccagagtgttagcagactgcttgctgcttgtcccctaatttgttttttcatctgtggtaagagcaccctgatttgttttctataaagtatctgttaaacttatttagcataaccacagaggcattgtattcacgctgtcacacacagacacaaacacacatacgacacaatcaatatccacatttagccccccaaatgcattccttctgaggctcatttatatgtcttcatgtgccacagcccatcatttaaataatggatattttcaatgccaattcctttgttgactttctcaatatcttctgcagacatcttcatgaccccaacacacagagcatgctgttttccttccgctgtgactgctacaatcgtatctactgcagcagggtacagcttagctccaggagaagttaaacctggacacataatatttgcgccactgagtacaaatttgatagctcctttatcaacctgctggtgtggcaggataaaagggtatttgtgaagcaaccttagagttggacaaaaaggcccctttctttgtctaaaaaacaataattccccacttacggtaaggatttctgtatgttcgtggcatcggactattttgacaggatctttcttaggcatgatttgattaagccatggttcaatacctggaaattgctctaccagttggctcttaatgcccttaataactgacgttttcaactggatgcagttggacacactttccttttcatcaaacttcttgaacatgatccagggtgaagcgggcgacaacagggaaacaaacggaattggcaaggctccggtggagtcccctgcaggaaggccggcgcgggcgccacgcggcctgccagacggtcagagccgttgtcgctaaccggaagatgacacagccagcgcgctttacggcccggtgaaatctgacaacttccgctctctgaacgccacgtcacgactgcgcttggcccgctgttccttcgactgctgattcctctccaatgaggatcgctgaaacagtagggcttgacaagctagaaatgatacgaatgctttctccttgccggaacagaagactgcagatgcgcaccctgatgagttagttctaactggacacgagaccgactcacggccattttccagcttctcttatagctaaatggacagggaatatggatgcctctccttccttctggctggacagtggagtgatgacactatcctgacccgagggccagtgctgtatatggcggagcatgagatagagagggcctgggaccttgaagactgtggtataagcctagcctttttactgttttatttatttatttttttagacggggtcttgctctgtcgcccaggctggagtgcactgaccgtggcttactgcagcctcgaactccagggctcaagtgaccctcctgcatcagcctcccaaagtgttgggattacaggcatgagccaccgcgcctggccaagcttagtcttttttttttttttttgagacagggtctcactctgtcgccctggctggagtgcagtggcgcgatttcggctcactgcaacctccgccttcccaggttaaagcgattctcctgcctcagcctcccgagtagctaggattacaggtacacgccaccatgcctggctaattttttttgtgtttttagtagagacggggtttcgccgtgatggccaggctggtctggaactcctgatctcaagtcatccgcctgcctcagcctcccaaagtgctgggaggcgtgagccatctcacctggcccaagctcagtctttaaaaaaaaaaaatcaacaattgtttaacagaggttccttagagatgcacaaagcaatcacataaaattgctgccgattagggacaaggcagcatgtgctaggcaccagtaagagagagtgctacggccgggcgcggtggctcacgcctgtaatcctagcactttgggaggcgaatcaagaggtcaggggatggagaccatcctaacacggtgaaaccccgtctctactaaaaatacaaaaaaattagccgggcgtagtggcgggcgcctgtagtcccagctactcgggaggctgaggcaggagaatggcgtgaacccagggggtggagcttgcagtgagccaagattgtgccgctgcactccagcctgggcgacagagcgagaccctgtctcgaaaaaaaaaaaaaaaaaaaaaagtgctagatttcacatgctcagtattgtatacaagagaaatacctgctgggcgtggtggctcactcacgcctgtaattctagcgctttgggaggctgaggtgggcagatcacttgaggtcaggagtttgagaccagcctggctagcatggcaaaactccatctctactaaaaatacaaaaaaattagctgggtgtggtagcacacgcctgtaatctcaattactcagttggctgaggtttcagtgagctgagatcgcaccactgcactccaccctgggtgacagaacaagactctgtctcaaaaaacaaaaaacaaagaaatacctgctgtttggtcaagcattgataatcttgttacagcatttgaatccataccctaactaacctacaaatcccaggatctccacacttccccatagtttgcatttttttacaatttttttgtagagatgaggtctcactatgttgcctaggctggtctcaaattcctggcctcaagtgatcatcctgtcttggcctcccaaattgctgtgattacaggcatgagacactgtttctggccagtttttatttttgaaaaaagagctgtggaacccccttttcaaaccttaggtgaggcagtgatcacactaaaaatatatacgaataaaataatcatgaagg

SEQ ID NO: 1888165 - DNA, 4001 bp, Homo sapiens
acatgcatcttaaataactggcacaagaattacaacaatatataaaaactggcactgaaaaaaatgaaaaaaccagaacccagagtaatgacacagtcagtgcaatagaaaaaatatagaggatagttcagacaaaaatatggcatcagaaatataggggaatgttcaagggtttttctctaaaattccttaagcttacaattaaattaacccaaaatttaccttgcattagtatcagggaagaaacagctttcaaatgttacgaaattaaactaccaaaaaagttcaggcacagtggttcacacctgtaatcctggaactttgggaggctgaggctggcagatcacttaaggtcaggagtttgagaccagaccagcttggccaacatggtgaaaccccatttctactgaaagtacaaaaattagcagggtgtgggggcgcacacttgtaatcccagctacttaagagactgaggtgggaggactgcttgaacccaggaggcggaggctgcagtgagccccaagactgtgccacgcactccaacctaggtgacagagcgagactccgtctcaaaaaaacaaaaaacaaaagaaacactgcagcccatttcacctccaccctctacctcaagttccatgacagtgtgacccacaagccctctgtgtacataatataccacaacgaacaagtcagcttacctcgtgttccgaaaaaagtgctttcaactgccccttggaccaataatccaaagcatatgccaaaagccgcatggcgatcgtattaattctcaagaaatttccaacaaataccacctggttaatgttctgagcacaccaaaaaaaggcaattagttttcatcttaatttctattttctcataaaagctaccccaaatacagcaccatgtgcatagctcttagcaacaatttgactgctgatcaaatttagtccagttggtccagggctacttaaacttgatccccagacaactctggacccactgcaaagcatgctagataatgtcacaggagaagaaaacagattaggaaaaacatttgtattaaatctgaccaacaataactagttttgaatacaatgttttatacagataagttaaaataaacaaaaaaaaacagtatgactccaatccaaaaggacagtgacacaaacaggcaaagtatacaagcaatataacaggcagcgaaaaattcaaaccactagtcatcaaacaaaagtaaaattttagacctattaacctcgcaaaaaaaagcaactgaaattccaccaccaccatcagtagttgtagtaaaattaatccactcattcaccgctaaagatgatctaaattggtgcagcccttgtgcaaagcatcatgacgataaatgtcaaaattcatgagcatgatcatttctgtagaccagaaatctcactcctaagccccatatcaagaataaaattcaaccaaagaataacttcatgcttaaaaatgcttactgccgagttatgagcaagcaaccaaatgccaagctctgttatttgatataaaagaacttgatcaaataaatatacaaccatgaaatgtatatttaagtataaaatacaaattgtggtatgcacaccaactaaaatttctgaaaatacgtaagcacaggaaagggaacatacaataaagaaaaaagaagttatgatattccaacaaatgtttaattacttgatgctgatacagtatttttttaatttaaaatgagacaaatcctttgtgtcttttgaggtttccttttaagctacatgcctattattatctaaagaataacttcttaaaaataaaaataaaagaataatttaacaactatacacacagggacaagccataagctgcaccaactggatcctagatcctcttttcccaagggcagcccattcttggttctttcatagccctgtacaatgctgcttgacctgaatgctacaaggcagcactgtaaagaagctgaaagcacaaagacgcagctctgctgaggtgggggagccaaggagggcacccctcggcctgctcagtcttctcccagcttccgtgacttcctctggattcctccctagggcctctagagctcagcagtgagtgtggagtctacattcagcatcgttatccatcatcacccccaacagtccccaatatctggaacactggctaccttccactcttcctctactttctcctcaaaagatgtcattttacctctagacaagtagcaatgtttatcttcagtttaaaaaaaaaaaaaagaagattaatctgtatttgaagagttttaacttcgtgctaaaacaaaccccaccccaaatgactacatttaggcactgttctgagaaaacagacgtgatggggcccacttaagttcagtattttccttagagcaattaaagaaatccatgtccccttacttcattaagggcacacattcttgctattgagccaatgttgttggtgatggtgatcaaagtcgctctggccaggtcctctttactgacagcctctcgcttctccttgctcatcatgtttccaaagctgtgatgggggaaaaaaaatcccattgctaaaccaacagcaacaaagcccaacagaacttgaatgttactttattgaaataaaattagcttttagggcaacattgttgaaatcttcaaaccttttattttgcaatggagcatctgttcaaagagaaatgcaaacttcaaacagagccctccaacattctaaatgagcagacagctttccctgcggtttctactgaaatctagcttggataccagatattcacatattcagttagaatctcatcagatgcactggaaggcaccattgctcctgcaaccagacagttccaggacaacacctctaacagcaattcatctcaactgcacagctgttccactcagatggccacatgcacatctggtaaactgctctatcagagcagagtaaagcacagacagctgagtcccagagtgagctgcttaagaatttcaggtttccctagaagataaagtacttcaaagtacatgctcagcagaactgctacaataattttccaatcagaaaaggaagtgatgaccaacgagcaaatgttacaaacagaaaatcaacagcattgaccaagtgcctaaaacttagtaaacaagcatgtatacatatgatttttctattagtaaaagccatgtgccccaatatacgaaaaacaattgtacttctaaacgatctcaaaatggagacaatgatttcatttataatagcattagagaataaaacacttacggatatatctaacaaaagtattaacacctgtacaataaaatctacaaaacactgctgaaagaaagcaaagatctaaatcaatgggaagacattccatctttttggatcagaagactttgtattaggatggccaaaagattcaatgtaatctctattaaaatcccagttgtcttatttacagaccttgccaagttaaccctacaattcatattctcaaggtacccagaatagccaaaataatctcgaaaaaagaacaagttggatgactcacactttcttacttcagaacttaatacaacgctacagtatcaaggcagtatggtactggtataaaaacagacatatatatcaatggaacataacttaagagtccaggagtaaacccaaacatctatggtcaactaatttttgacaaaggggccaagagaatttaacagggaaagaatcatcttttcaacaaatggtactaggacaactggatatccacacgcaaaaagaaatgaacttggagctctacctcacaccatacacaaaaacttactcaaaatggatcaaatataagagctaaatataagagctaaaactggcgggcgtggtggctcacgcctgtaatcccagcactttgggaggccaaggtgggcggatcacgaggtcaagagatcgagaccatcctggacaatatggtg

SEQ ID NO: 1888166 - DNA, 4001 bp, Homo sapiens
gggattacaggcgtgagccaccacgcccgccagttttagctcttatatttagctcttatatttgatccattttgagtaagtttttgtgtatggtgtgaggtagagctccaagttcatttctttttgcgtgtggatatccagttgtcctagtaccatttgttgaaaagatgattctttccctgttaaattctcttggcccctttgtcaaaaattagttgaccatagatgtttgggtttactcctggactcttaagttatgttccattgatatatatgtctgtttttataccagtaccatactgccttgatactgtagcgttgtattaagttctgaagtaagaaagtgtgagtcatccaacttgttcttttttcgagattattttggctattctgggtaccttgagaatatgaattgtagggttaacttggcaaggtctgtaaataagacaactgggattttaatagagattacattgaatcttttggccatcctaatacaaagtcttctgatccaaaaagatggaatgtcttcccattgatttagatctttgctttctttcagcagtgttttgtagattttattgtacaggtgttaatacttttgttagatatatccgtaagtgttttattctctaatgctattataaatgaaatcattgtctccattttgagatcgtttagaagtacaattgtttttcgtatattggggcacatggcttttactaatagaaaaatcatatgtatacatgcttgtttactaagttttaggcacttggtcaatgctgttgattttctgtttgtaacatttgctcgttggtcatcacttccttttctgattggaaaattattgtagcagttctgctgagcatgtactttgaagtactttatcttctagggaaacctgaaattcttaagcagctcactctgggactcagctgtctgtgctttactctgctctgatagagcagtttaccagatgtgcatgtggccatctgagtggaacagctgtgcagttgagatgaattgctgttagaggtgttgtcctggaactgtctggttgcaggagcaatggtgccttccagtgcatctgatgagattctaactgaatatgtgaatatctggtatccaagctagatttcagtagaaaccgcagggaaagctgtctgctcatttagaatgttggagggctctgtttgaagtttgcatttctctttgaacagatgctccattgcaaaataaaaggtttgaagatttcaacaatgttgccctaaaagctaattttatttcaataaagtaacattcaagttctgttgggctttgttgctgttggtttagcaatgggattttttttcccccatcacagctttggaaacatgatgagcaaggagaagcgagaggctgtcagtaaagaggacctggccagagcgactttgatcaccatcaccaacaacattggctcaatagcaagaatgtgtgcccttaatgaagtaaggggacatggatttctttaattgctctaaggaaaatactgaacttaagtgggccccatcacgtctgttttctcagaacagtgcctaaatgtagtcatttggggtggggtttgttttagcacgaagttaaaactcttcaaatacagattaatcttcttttttttttttttaaactgaagataaacattgctacttgtctagaggtaaaatgacatcttttgaggagaaagtagaggaagagtggaaggtagccagtgttccagatattggggactgttgggggtgatgatggataacgatgctgaatgtagactccacactcactgctgagctctagaggccctagggaggaatccagaggaagtcacggaagctgggagaagactgagcaggccgaggggtgccctccttggctcccccacctcagcagagctgcgtctttgtgctttcagcttctttacagtgctgccttgtagcattcaggtcaagcagcattgtacagggctatgaaagaaccaagaatgggctgcccttgggaaaagaggatctaggatccagttggtgcagcttatggcttgtccctgtgtgtatagttgttaaattattcttttatttttatttttaagaagttattctttagataataataggcatgtagcttaaaaggaaacctcaaaagacacaaaggatttgtctcattttaaattaaaaaaatactgtatcagcatcaagtaattaaacatttgttggaatatcataacttcttttttctttattgtatgttccctttcctgtgcttacgtattttcagaaattttagttggtgtgcataccacaatttgtattttatacttaaatatacatttcatggttgtatatttatttgatcaagttcttttatatcaaataacagagcttggcatttggttgcttgctcataactcggcagtaagcatttttaagcatgaagttattctttggttgaattttattcttgatatggggcttaggagtgagatttctggtctacagaaatgatcatgctcatgaattttgacatttatcgtcatgatgctttgcacaagggctgcaccaatttagatcatctttagcggtgaatgagtggattaattttactacaactactgatggtggtggtggaatttcagttgcttttttttgcgaggttaataggtctaaaattttacttttgtttgatgactagtggtttgaatttttcgctgcctgttatattgcttgtatactttgcctgtttgtgtcactgtccttttggattggagtcatactgtttttttttgtttattttaacttatctgtataaaacattgtattcaaaactagttattgttggtcagatttaatacaaatgtttttcctaatctgttttcttctcctgtgacattatctagcatgctttgcagtgggtccagagttgtctggggatcaagtttaagtagccctggaccaactggactaaatttgatcagcagtcaaattgttgctaagagctatgcacatggtgctgtatttggggtagcttttatgagaaaatagaaattaagatgaaaactaattgcctttttttggtgtgctcagaacattaaccaggtggtatttgttggaaatttcttgagaattaatacgatcgccatgcggcttttggcatatgctttggattattggtccaaggggcagttgaaagcacttttttcggaacacgaggtaagctgacttgttcgttgtggtatattatgtacacagagggcttgtgggtcacactgtcatggaacttgaggtagagggtggaggtgaaatgggctgcagtgtttcttttgttttttgtttttttgagacggagtctcgctctgtcacctaggttggagtgcgtggcacagtcttggggctcactgcagcctccgcctcctgggttcaagcagtcctcccacctcagtctcttaagtagctgggattacaagtgtgcgcccccacaccctgctaatttttgtactttcagtagaaatggggtttcaccatgttggccaagctggtctggtctcaaactcctgaccttaagtgatctgccagcctcagcctcccaaagttccaggattacaggtgtgaaccactgtgcctgaacttttttggtagtttaatttcgtaacatttgaaagctgtttcttccctgatactaatgcaaggtaaattttgggttaatttaattgtaagcttaaggaattttagagaaaaacccttgaacattcccctatatttctgatgccatatttttgtctgaactatcctctatattttttctattgcactgactgtgtcattactctgggttctggttttttcatttttttcagtgccagtttttatatattgttgtaattcttgtgccagttatttaagatgcatgttgtaaaaatgaatagatgagtaaacctctcagactagaaccatactatcataagaacttaagtacaattg

SEQ ID NO: 1888167 - DNA, 4001 bp, Homo sapiens
cagatcagagactggaggtgatttaccgccaagcaggccgcagctctctccctgtgaactctccagttttactgctcagtcaaacctaattccaaaacactaatgcttttatttaaacaccacatcctgcaataaagctttaatgtacaacagccgcatctaggggaaaagaacggtgtgtctgtggccaccggcagcctcggtggccacacgcccggctacttccctccctgtggccggagctgggagcaggcagggaagagatgacgtcagcggatgctgggcactgaccctccgggtccagaggccgagaggaggctgtgcccgaggtcaacacccgcccccttgctgctacgccagatggggctgaggctgggagaacgaagtttccagaaggaagacctgaaggccaggagccctgactgccaggccctcccctccagtcacctcgaggctccctgaggggtgggagccacctgaaagctcagaacggcccccaatccctttatccagcgctccctatgctggccccagctgctcaggtgacctggctgcccccagacccaaggcctccagccgctgcaggagggggctgcctgcctgtcccttcccgcctcattcctgccgaaggccagggtgcgggaggtagggcacaggggcaccgctgtggctggagcagtgccaaggcagagaggacacacaccccagaaattaatcctgaggcctgtggcagggtgggggtgcccaggcagggacctggcctcatcccaggtggcaaacgcctccaatctgagactcagaaacgagccgggcaaacgcccctcacacagcagcccagccgctgcctaagaccccagaacccgccgcccatcctctccttgaaggaccagcactggggaaaagggtttcacggacggatccggacctgccctcatcccctgggccccaggacatcctcccagtcctttctcgggtcaggactgggatggcggcagagcagatggctctcaggcccccgacaggtggggcaaggggccctgggccacacgctgctttctgccaaagcctcacctgcattcacagcaaaacatgcctcaggttggattcggcggaacagagagaaagctgaaccggggctttggtgggggtacaggttggggcggcatgaaccagacatttggcaaaatcgaacggctcccaggcccctggggtgggctgtgggttcagggctgcacagactcagctcctctgaccctgtcccaggtgccctcggcagaggagtggggcctaagggcagtggtggccctgaccctgcccgcgtccccagcatctcgtgtgggctgcgccttccttggaggctacatgcctccgagttcctctgccttgccctacagccgggagggctggatgcaggtgcaggaggtgccttccctccgcagactctaccatgtgctgcccagcctctccctcctttctgcatccagccacctgcccttttccaaactcgctcttgtcttgtgcctctgagcagtttctgccctggccacacgtggccctttctgccggctgatggcctcttccaggatggccatcagtggagcccccagagccgccgccaccactccgtgctttccagccacggccccgaccccccagccctcaccagccccgcgctggaccccgcgcctgccggaggccgcctcccctctgccgcagtcagcaagctgaatatttaatgtctggtgagcacttccacctgctgacacaggcaaagtgacagaacaatgctggcggggacacgaccgtccaccaacgcccaggcagcctgccgccccagcctcacccccaccacagccgcctggctggctgtcggccgcggcggcccccgtggtgtggagtgcccctcagtgcggcgagagaggtcccggcctgagatacatacttctttacattccatagcttagcaggtccatatgggcatataaagaagtatgtttcccaagcaggcagtctgcatgcagttccaagaccccgggacgccgccccggtagaagctgaccccactgcgatgtagagaaggcagctcagaggcagtgtaacttcttccctggagtctactgccggagccctctctgtgtgagcaggacagccttcctgccactgctgcctggtgtccagccacccccaggggcccaggactccctgcccccttctgacctcggcgcccctccatccctgaatccatctctctctgtctgtctcacacactcacacgatccagaaaggcagaagtggacagtgagccccagaaagtctcgagcgcctgtccctggccccagcagtagctcggttttgcgtccatggaagagacaggctgcccctccaccctcaccccagagcagggaggcatcatccatgtcccaaactttcaaagccaacactttcctgtccccctgggtcacctcatcccagccaagcccagagagggctgggtggagagaggaaccttggggggcgccctgcccagcaccccactcgcaggaccagcctcctccttctccgggagctggacaactccttgctcctgaggccagacgaggaactgcagaccagagacccgagaggtgtcctgggggcttacctgggcatctgctggtttcctgggcaggtccctggtgaaggctgcctcccgggaccccgtatccatgaggaagggctcagcacctctctccgaagatgcaggcgagaaagacgatgcttggaggagtccaggttcccagagggtggtcaggatctcctgagaggccgtccactaggggggcaactccctaggtgcctcagcctggccacagcagacacccagtgggcgagggagcgtcgctcccccggttctctccctccttctctcgctcttcttcaccctctcccccgtccccgcctcgcagcgtcaccaccctgaaccgccgcgcagtgcggcccacctgaagcggcagctgcgcagagccagcagcttacatgggcaccgggggtcagcagccaccgtcacctgcccagcgccactgccgtggcacccccgggaggctggtcccacacctggctctttgtggccagccgcccagcctccaccagcccctgatcaataccaatttacagtcaaatgcagggggccgccttcctgttaatgaatttcccggtgctcaccagctcctaatgagcctgttaaagagggtttaagtaaacttagcgagtggcaaactaagcactttggaatacttaattgtatcgatatgtttttcattgcgtttaaaaatgtctctgagtgggaagcagaggctgcctccttccctgccaacttctatgaccagccgtgaagccagactctgaaaaatgtggagaaagagccagaaggagaccaatgggacctcaaggttaggccctcaccagcaggaagggaagccgccccgaacctgctgggagcggggagaggaggaggaggaggaggaggaggcctgcagggtttcgaggcctcgcagtggcccagggcgagcctggcacgtgcggtggtgagaggtggaaagaaggctttgcaggtgcctgggggggacgggggccagggaggcgccagttgggggtgcaggccgggcacagacacaggaggcttgctaagcggtggggtccagctgggccctggcccctgtcctgccactgaccctggcgtggggtgggacagcagccccgggacatgaaaggacctcccgttgtcctcatcaggaagagaggtccaacatgactctgttgctcctccaggcagcccgtccatgcgaggggacagcccggagcgagttggttctctcttaccacccagggcagggcaatgtctccgcagagcctgcagtgtgcagaggccactgagcatgctgtggctgtgtggcagtgggtctgcagctgggcatggctgggttggagtttcacgtgggggtgggtgggggcggggggtgggg

SEQ ID NO: 1888168 - DNA, 4001 bp, Homo sapiens
gaagctcttcctaggagaccccacagagactgactgtctagggacagtgccaagggcagtttgcccatgcgctcccaccagctctcaagtgtccccctccccaggctactgacatggaaggtccattctggctaggagccaagtcccctccccaggaaggaaagtggtacaagaacaaagccccagcccccatctctggccccagaggagggagcagccaggggccaccttccctccgagggaagggccaggctggaggtcagagctccaagaggaagctccagctaggctagggccacatcttgtaccccgaaggaacaccccactcccaccagtccctttggtgttgtcctggaacgatcctggggccccttccccttctctaggaccagaagtgcccctgggggatgctgcctgtcccctcacagcgggaggaaggaagaaggggacgccaagccccggggtcagtgttgtggtcaggccggggcttgctggggctgcctatgccacttctgtgccctccagggggaacctgcccctgaggagactggtggaccgtgttctgactctgcctggctgactggggtgggggtgggaagatggaggcaccagtggctcctgcttgtgtctgcagcaggcgacttgggtggaggggctggaggtctgtgctgaggacagccgcagaggcaggttccctttgtggccctgcagcggcggtggtgggggtggagatgccactgcctgaaactcaaatggttccttttatcctgatcttctgctccctgccttgggcctggagctgggagaacttcaggtgactcagactcctgcctcggattgaagccggggaggagaggctcagcctctacctggttaagaggaaagaggcaaagctgcaaagccaggtctggcactcgccccaggggaagggggcttttggggagggggtcgtcctctgactgttaccggggcatcacagcccagccggggcctgggatgggcgcgggggaggcggcgcagaggcggtgccgggcgtcagcaggtggcgctggcttccggggacagaaaaaaaacccctgcagcaaacccgagtgggtgtcactgcggctgcagatggcggcgggggagggatttgtcattttctccctgggctgcggagtctcacgtgcctggtcctgcacagcccagagccggctttgggggcgggatgcggtccggcgtgtccaccgccctcgtttggaccctggacgcggacgcagacccccgtccccatgcaagcctggtcctgggctgcgggggctgctctggggccacagcgagcgccgcctccgccccgccccgcggcgcagcggcccgaggaagggcagacttagcggtgacctcagaccctgccccacctcctcccacgttgccgtggcaactgtccagggcgcccgctgtgggggcgagggccgcacttggccgccctcccgtcccgcgggggccgccccgccgccagcaccgcggacagcgccgcaccctagcccgccgccccacgcacccgcccgccgctccccgtggaccctccctttgtctcccgggccccgccgccctctgcgggcgcctgggcgctccgcgctgcggacacacgtggccgggggccggctggccgcagcctggccccggccgcaggctcccccctcggccgccctcggccgcccccacccgccccgcgacgccagaggcgtgcgggcccctttgtgtcccgcggccagatccccggcccggcagctgggccgcactctgggcgggcgcattgttcgccggatttgtccgcggcgcgaatggccgccgggggccgggctcgccttcctcccgcgggaggggcgctgggccggacgggctcgcgggccatttccatgagaaaggagcggcggaggcgcctctcttggcattcaccgcgtgccttaattgtatagacattaaatcaaggtccgctgtgaacacgcagaggggccctcagggctggggcgggcggcgagcgtcggggccagggtcgggaccggctcgggcttgcgtggggtcctcgcccgaggggcgcgaacgctcaggcgtcttcgccgcgtggcgggcagggcgggggcgctgcgctcagccgactgtgctgtcccagtccgcccccgactcggaggagcccacacttctcccctttccgcggcagagagtgggcccccaagtgcgtccctccgggcgttcctggagctggggcgcccgggaatcgcgaagacggattccgggggtgggggtggtgagcgcgtgcgcacccggccgcctcccgcggggctccgaggggcgcagaaccgctccgactgggcggcgcgagctcctccgcagctgccttcccctgccgtcgccctgcccgtgccgacccaggagcgcgcaccgaatgcggttaaaagaacgaatctcgatgctcaaagatgaaaactcgtctctttttacaacccagcgagctcgtcctctccgcgcgcagcgggcccgcgagaaggcgctcgagctgttcgtggagagaaagacggggagacccagagaggccgcttgcccggctcgccccggcccggccccgagcgtaattaccagtcccggcgggagccgctgctgccgcctccgctccctgcgcctcccgcgccgccgccagttcccgcctgctcttcggctcccgggggccccgcgcgctgctgccctgggcggagaagggcgcgggaaccccgagaagggagccaggcaagtccccgagcgccgcaggccggctgcgagccgagtgtccacggggtccacgctgcaggcgcccagctcctgctagcccggcccggccccgatgcaactgtccccgcgcccgccgccgccgccgccgtcgccgttgcctccgcgcgtatccgcgctccgctccggcaccggccgattatcactggggcgcgcggtgacgtcacccggacaccggccccgccgctgcctccccgaggtgtccttgagaactgcggggcacgcgcgccgcgcacacgcgcacacacgcactgcgcgcctcgtgcctcccgcgcattcgcaccgcgtcccgccccgcgcgctcctcggctcacgcggactcagccatcgagcgccctcgaccgtgccctgcgcccggcggccacacggagacccaaggaaacgcctgtctcccacacactccagcccctcacatggccctcctgcacccacgcgcgcagcccctccagctgcacattgacacctctagccacaccccgccacgcgcacgcctcgccacgcgcacgcctcgccggcacgcagcccagcggcacccgcagacacgcacccgcactcgggccctgaccgcgggttcgcgtctcctgtctggcgcctgcagaacgcactctgccgcgcagctcacaccgcggtcctccaagcctctcagtcctgagaaaggcaagggtcccgccggcctcctgcggatggccctgctgggctccgtacagtggggtgggaattaaaggtcgtccttccccgcccccatcggagcttgcggttctcacagtttcagaccgggatgggagctcttgcccgtagggaccacggaatcacaggcgacactccacggcccgactgcagtcactgccagctcgatagggtccttggggcgcccccgatctggccctctagggccagggatcagtggcttccccaagcctcaccgtccggagcctcccccgctggcctttgtttagactgcaaggagcgcaggccggcgcggccggcaggcctctgtccccatctccttcctcctagggccaacccagcccctgcgccatctgccctcggagcagagcctgggcctccctgggagcaggtcctgcttccttccttttccaccctctccagcactgcccagcccatggacagccggttaggaagggcggcaggaactcgggttggttctgcccgcaccgactccgccggtcctcaaccat

SEQ ID NO: 1888169 - DNA, 4001 bp, Homo sapiens
gaccggagtcctggtggggggacactccttgtaatcagactcccagggtgaggccctgtggtgggggtgagggtcaggtgatctgcgaagcacccccctcccagcttcaagtggggagcttacaggcctagaggtcagggcctggcaaacgacctgaaaaatccagcttgaggccctttccagggagccccagaggccttctcttgggtcatttcccaggatgggggtcgctgtcactcctctgtcccaggaggattcagagaggtcagttcacaggcctatgctgggcagagccactcatccacggcactggccactcagccaggtattgacagacccacccgcagggcagacaaaagaggcatggcccagccagctgcgggaccctgcaccccccactcactcacacatgtgcacatgcacacacatgcacacgtgcaaacacacacacacgcacacacacacagccctcctcggctcacagggggctgcaggacgctgtccaaggtactgacctccctgctgctgggcccctcgctgctgagccaggcaggggaagtcagctgggccaactgggagggtcgggcagggacagcacctgaaatccctgctcagccccctgtgccgttcctgcccctgagaccacggccagccacccaagggctacccctcagcagcctgaggacacagcgccggctcttcatctcaagcacacggaggtgcaagagggagggtctgcggcctcggcagagacagccggatgcactgagaccctggcctggggcaggcaggggctccctcagggggctcagaaggggtcaatgctgcagaccacaggccggcccagcctcaggcacggtccacctggcacagcacacttcacagtgttgaatatactgttgtatttgtttcctgaggtaacaaagtcccacaaactcggtggcttaaaagaaagacatttatgctctcccagtcctggaggccaaaagtctgagatcagtatccctgggccgaaatcaaggggtcggcaaggctgagctccctccggggaattaggggacgagccctcactgcctcttccagcctccagttccttggctcacgcccacatcactcccgtctccacctccatcttcacttcatcttagtgtaacctccctccatctccctcttacatatggacacttcccattggatttcgggcctatgactagtcctgaaagatctcatcttgagaccttcaacttgatcatatctgcagagactctatttccaaataaggtcaccttcacgggctgtttttcttttagggcggtgggggtggggggggggggatttttcagctgaccacaattgtcaacattaaaaaatcaagatattgtaggggtcccacctagatattgaggaggtggacaacaggaggactgggtctctccttcatccctcagctgccaggatggagggtttggggggggtcatttcttacacagctcccagtaggagatgctgtgtagccttgggagtgtcacttagctacctctgggcttccttgtctgttgctgggaccgtgtatcagctagttgctgagtaacaaacacaaacacgatctcagcagcacagagtcagcatttggttggctggtccaggccaggccgctggggcagctgagctctgccccccactccctcatcctccccctgaccagcaggctagccaccctcactgatggcagcaacacaggacagcagcctggtcaccgcagctctcagttcagagcaccacatgccccgtgaacatcccctcagtcaaagcaagtcacatggctgaacccacagtcaaggggcagggaattagactccacccccttagtgggggagcttcagaggcacagggcaagcgtggttggcaggggtgaaggatggggccagtgatgccaggggcccacaggggtgcatgggggtcagaacccatcattcactccccaagcacaagcccagggccagctggcccacaggtccccctggtgcccagcatccccccgtccccctcccatggggtggggctcgcatccaatgcctggttccaagtgtcctcctcatcttacctgcatggtgaccatccaggacgctctccctgagcccgctgcttactgagtgccacggaggcctgcagggggagtgggcacacacaggagagacgcatgatttgcaatctcgttaatgagccgtagcacaatcacagacctgccctgacaaggagctgcactcgtggtaacataaaactgtcagccagctgggcgcggtggttcacgcctgtaatcccagtactttgggaggctgaggcgggaggatcacccgaggtcgggagtttgagactggcctggccatcgtggcgaaaccccgtctctactaaaaatacaaaaatcagccaggtggtggtgcatgcctgtaataccaggtactcaggaggctgaggcaggagaattgcttgaacccaggaggcagagtttgcagcaagtcaagatcatgccactgcactccagcctggtgacagagcgagactctgtctcaaaaaaaacaaatttttttaataaaaaaaaaacctgtcagccaacgaagctcattacaagctgctcctcagacttcctgtcagctgggactgcatccgcctgttcagcccttccaggcctggagctggagcccaggagggaggccaaggggtcccactgcagctggggtgctgactgttagctaccagcccttccgtgggcctgtcaggttcagtctcggatgctgtggggccctgggacccctcatgggaagctgacttggaccgttcaagagccctatctagccctcagcaggacaagatcctctcagcaacatccccaacacacactcaaccagacagcctgcaaagagccagttctgtatttggacagctcggctccccatggtacccttgtactccatggtaaaccaaaacaagcttctttgtaacttccacctactaaaaccattccattaccaccaactaagacggattctccacctgcccatcccaaacctacccccaggtgtcccgtgtctccttgtctcctgcatctgctgcccacgtgcaggctgagtgtgaaataacaaaggacatcctcctggtggcgcggggcagagagccaactcacagaggggaggacatccacgctggccacgagccagctccccacaatgaccagcccagccaccccgatggtgggggagaatgggtcctccctctgcgatctgagagttccactcagtagccctcaaaccctactccacacacacctgttcgccctgaatctaatgtgctcactttgagctatcttcctgtatgccttttcccaggctgataccctcttttctttgcttttgcaaactagctgaatttcttagccagagccatcaggcaagagaaagaaataaaggacattcaaattggaaaagaggaattcaaactacctgtttgccaatggtatgatcttatacctagaaagccctaaagactcctccaaaagactcctagattcgataaatgaattcagtaaagcctcggtcacaacatcaatgtagcactgctatacaccaacgatgaccaagctgagaatcaaatcaagaactcaatcccttttacaatagctgcaaaaaaataaaatacctaggaatatatgtacccaagggggtgaaagatctctacaaggagaactacaaacactgctgaaggaaatcacagatgacacaaatggaaatatatcccatgctcacttattggaagaatcaatattgtgaaaatgaccaaactgcccaaagcaatctacagattcagtgcaattcctatcaaaataccaacattcctttttcacagaattagaaaaacaatgctaaaattcatttggaaccaaaaaagagcctcaataggcaaagcaatcttaagcaaaaagaacaaatctggaggcatcacattac

SEQ ID NO: 1888170 - DNA, 4001 bp, Homo sapiens
gaatctaatgcctgatgatctgaggtggaagtctcatctcaaaaccattcccacccacccctgcccatccctgtttcacacaccagctaattccactttgggctttggctcagataatatccagttgtactacattattatgttttaatacaatttccaacttgtccttactacattgtattattattcaatactagaacataatcaatgctcaataaatgtccactgggtaaatgaataaataagggaatgaatccccctttacaaacatcaaagattactatttggtttggtatatcttggtagtctgaaacctgtttactcctcatagtctttttctttgagatgaactttcgctcttgttgcccaggctagagcacaatggtgcaatctcggctcaccgcaacctccgcctcccgggttcaagtgattctcctgcctcagcctcccgagtagctgggattacaggcatgcgccaccacgcctagctaattttatatttttagtagagatggggtttctccctgttggtcaggatggtattgaactcccaacctcaggtgatctgcccacctcagcctcccaaagtgctgggattacaggcgtgagccaccgcacccggccgactcctcatagtcttaaaaaatattgtctagtttgctaatggatgttatgtcattaaactttgtaacactagggctgacttgattcattcattcaatggacacttacttgatacctaccatgtgtgtaagactgtgctaaatcccaggaataagtctcctatccacacaaagcttaaattttggagggaatgttaataggaaaacaaaataataaatggaaagtgctatgaaagaaacagaagacggccgggtgcggtggcgcatgcctgtaatgccagcattttgggaggctgaggcgggcggatcacgaggtcaggagatcaagaccatcctggctaacacggtgaaaccccgtctctactaaaaatacaaaaaaattagccgggcgtggtggcgggcacctgtggttccagctattggggaggctgaggcagaagaatggcgtgaacccggatggtggagcttgcagtgagccgagattgcgccgctgcactccagcctgggcgacaaagcaagaccccgtctcaaaaagaaaagaaacagaagactatcctagaaagtatagggtattactttagatagcatggtcagggaagacctagttgaggaagtatcatttaagctgggacctgaaggacaggaaggtaccagctaggccaagagctgggggaaaagtggtctaggtagctggcatagtgtatgcaaacgccctgaggcagaaaagagcttgatgtgcataatatttagattgtttcatttgtatttcaaatattgttgcagtgaacattcaagcacaatgcctgttgtgggattatttccctaggatggaatcccacaccactgcttctttgcatcgttttctctgtctagtgcctggagatgttccttttcccctctctagatagtttgcctttcagaatccgtgtccttccttccccttttactctccactttctctatttctcaaattagctattaagatcttttttgtgttcttacaggagaaagataaaatatagcttttaagcgttcctttctcaggttacctttggctgtggattaacctgaagccttgctgtttcactcgagctatccactcattcacccattcactcagcacttattgagcacctattttgtaccaggccttgtgctgagcgctatagtcagatgaccaaattacagtctctacgctcaagctcacaatctcatgcagcgcttcctaaaacgtgttcccaattatcagaatcaccctgggtactttctaaaatgcagattcctggactccacccccggtttagggattctctgggggtggaaaccaagagtctgcatttaccagttttgtttttaattcctactaaaaattgagaaccactgagtgcaagagtgaggcaggtaaatggagtttacaactctaagaaagtgcattaacaatttatacacaaggccgggcgcggtggctcacgcctgtaatcccagccctttgggaggccgaggcgggaggatcacgaggtcaagagagatcgagaccatcctggccaacatggtgaaatcctgtctctactaaaaatacaaaaattagccgggcgtggtggcgggcgcctgtagtcccagctactcgggaggctgaggcaggagaattacttgaacctgggaggcagaggttgcagtgagccgagatcgtgccaatgcactccagcctggcgacagagcaagactccatttcaaaaaaaaaaaaaaaaatttatacacaaaatgctacaggaataacgcatgggtcctattgggaagaaaaagttctctagaagtcaggcttaagcagaactgcagctccgggacggattaagtcaggtaaaggtaacactctgtgcagagacatgcagacaaaaccgagtgttgagtaagtaactcgcctgtaagtgttatgctgcctgaagcttctcggagcgtctgagcagcaaggtgaacaaccctcagaaaccggtcgcgctgccagtattatcgctaaccagtggcagcgagcccctttgtttctcggcagttgtaattgtagtctggtttgtaggtggagctgtgcgcaggcgcacctagaaccaggtgaccttgcacatgcgctgtatgtaacactgaagccaaaagcgaaatgattgagggcaatttttcttttctgcttccgaaatgtccctttcgcgaatccagagaccctgaccgtccccatttctggctagggatcttataattcttaaaataataccccctttccttcagggcctctctagtaagtcggctgccaatacccaacatggcgggaggccctgcgccggctcagtctgcctataggtgcaggacttggaggggcgggcccctcccaaagggcgggagtttgggggggcggggcctggccctctgcctcggggtgggctccgcccccgtcccccgcagggccttagcagcggctgccgcagctcaatcgcggagcaactagccgggcgtctgcgggagccgagcgtggtgaggtggggcctcaggggcaggtgggaggtgctcgggttaaccgtccgaggcccggagacccgcccgtctagggcgcctgagggaatcccgttcgggcagcggcctcttgttacccgggaggaacccgaggcccagagaggggctgggacgcgtcgttagggcccggggcccgcttgcctcagcttcttgctgccgccagcacgctaagctccagtcggcgccgaaggagagcttcccgaccctcgtgtccagtagccgcaatcccaggctgggagggtgaggcgccgcgctctgccgcccccccgcccctcgctccctgtgtcctggcggatttgcacgtaatctatccgaaagcccagtcccacccgccacccgactctggagctcccattcttcaggaccctgctgaagtatcgcttctcagccgccttctccaggcgcagctgcattcgcttctcggtttttgcactcgctgtgcaccgagttactttcccggcccctcgttgacaccgtaagctcgttcgttagatgttatgccttgcctttttcatctctagatcccagggcctagcacgtgatgataatagtcatggcttactgtacggaatgatcacaaattgtcaggtgctactgaatgcattacacataagggcccatttatttatttatttagagacggagtttcgcgcttgttgcccaggctggagtgcaatggcgcgatctcggctcacctcaacctccgcctcccgggttcaagcgattctcctgcctcagcctcccaagtagctgggattgcaggcatgcgccaccacacccggctaattttatgtttttagtagagacggggtttctccatgt

SEQ ID NO: 1888171 - DNA, 4001 bp, Homo sapiens
caccagattgtggaagtgcagacgaactcctaagaagagggcaagacggtgagcaacaaggggctctgagctagctcccgcacccacgggcaccagcccagcctgaaggccttcccagaaatcacaacaagcaaccaagtttccagaacctcctcccccaaaatgtccaggataacaggaatataacagatgatggtctcacctcgcaggatctcagctatgactcctccagtctggcagttgtaccctaactcctcctgtattgcggcaccaatcttgggatccccaactcccaagagtactttcttctttttggacggcaggtgggtctccaagagcaggcggaggtcctcatgaacaacccctcaggggaaagaacacagttcccactaacaggctgaaggacgatcaactctaacatccctcagctgactaccctggtcccaccgagcacgctgggatggcatacctagatccctccccatcaggcattgctcagagacatggagacatcagtgattgcactcaggggattgacagatttgattcgcaagtcatcactgcaaagcctggcccagccatgggaacaactgcattcaggtctgatagcacaagtgggcaataaataatagcttgtaacacaccctcgagtatttcgtagaatttgccttctggaaccaaacctttttttctcagcctgtgtttacccaactgccctttccaatcgaacagaaagcagagaaccagacacttgattgtgtttaggcaaaacctcaggcacaagtaggtgttaagccgaccccctttaagaaacccccctttgtcggccgggcaccgtcgctcgcgcctgcaacctcagcaccttgggaggtcgaggcgggcggatcacgaggtcaggagatggagactagcctggccaacatggtgaaaccccgtctctaccaaaaatacaaaattagccgggtgtggtggctggcacaggcctgtaatcccagttactcgggaggctgaggcaggagaatcgcctgaaccagggaggcagaggttgcagtgagcccagatcttgccactgcactccagcctgggggacagactccatctcaaaaaaaataaaaataaaaaatagtttgtcactacagtgcccacaaggaaacgttaacacacattccacatcgtctgcttaaacagtttggtctagcacagttcccagaccttgagctctgtgaagacaattatttcaaattacacattgtatggctcaaatactgcctcacgcctatcagactcagagccagccaaggacggcaaatactatcacaagctgcccgagaggataccgaaaggaaccacatctctctgtgacacttggcggtggccgacttaccttcagacacggcgttggcattttccaaggcaacctgggatgaggcaaagggacaaaaggccaccagacgaacgatgctgtggaatttgcccaggttgagcacagactcctccacctggggggagaaagaggctaagtggtttccttccctccctcctgcctctgcggcgcagtcaagcagcggttctcagccttggaagctcttaaaatatgctgatacctgggccccacatcccagcttctgctttaatcgttcgggggcggcgtccgggaggcttatttctaattgctagagcgattctacccatgggtcaaggtaaagacccccggatctagagctttccaggcccgtccccccgccccgaaccgctcggccggccacgtgggagcgcgctgtgcatgctgggacccgcgcgatgagggtctgcggggccgccaaaggagcccacggatctcacccacctgcggctgcagcagactgatctcctccacttccttcagcgccagcagcgcgtagccgaccgcgtgctcaaacagcacgtgcaacagcacctggaacgggagccggggcgcgagcgtcaacgcaacctcagcgtctgccggaacccgttcccagggcaggcgcaggcgcaggcgcaggcccaggcccaggcccaggccctgtctgcggcccgaacgcaggccgaaacccccaccgtcgcgtcgcccgcgccccgcaaccactcctcaccatggcgccagctcccgggttcggctcgcaatgcggctagcgcgctccggcgcgcggaaccaggctccagaggccacgcccccgcccccccgaccaatcggaggccggggacgacaccatctccggcctttggaggggccgcccagggtggtatcgcccggagcgcgggctgggtggtgccgagcgcgggcgagcgggccttttccggcctctgcagctgcgcgggcgggcgtggttgccggggacgcgcggcccccggtcgggcactgcaggcggcgaaacgacttgggaaggccctttcggggtaatagtccggttcctgatgttcttgtcatatgagttacgggcagcagagctgggtgaagtcggggcgggaggtccgcgtggggcgcggcgtccatcccagacagagaccgctgcctagccggcttcccgcttcgtccgtggcctcgggccccagaccctgcgccccacgtccccgggacccaggcgttcccgtcccctactcggggacgagcctccccggcgccgggtgggcggtgcatcctttcctcccacccgtaacgggagcggtgcctggcgcgctctggcgcagaccctgctgggaatgtagctcgcgcagttttcttcgtactattaatttatttcttttttttgtttttggttttttttttttaaatgactgtagcaggcagtaacgtgcgaaagaaagacgctccagcgtcttcctaggccagtttcttgttgctgtgctgcacgggacccagctccttttgctgggccacgtgttgctcctccgcttgggcggccctgaattctgggcgctggtgatcgctgagtgaatcgcagctgcttccctgtccttgagggcgtcttttgggcactcaggcgactctttagaaatgagttttgctttaataattaatattaacgttataaatccaaaacctagttatacttaagtagcgtatcccctggtatgttttaaagagtcattcgaaggggatttttaaaaataatgtatagctataaactgcatttatacatttaattgttattttgttaagcgattgagttacttgacaaaatccaagtacatagttcactcacaaatctaatatgtcaaacctaaatgtggttggtaaatcttactctcataatttcaatatggtttacagatgtggttgaattctgttacacatgtctacttacgagtcagaatcgttattccatttaatattttaaaatggaattgccaagttaatccatacattagcatgttaaattattttaaccgtcgtgaatacatcaaaatagacgattccaaaatgtaatggaaaatactaatgctaatacttcaatttacttcattatttctgcccttaatcctgaatcttcctggagttacaggtgcttatccactaaaccaggggttttcaagcaagaagtcagaatgcattaatggacagcatttaaaaaaataggattgggtgggctataatccagcactttaggaggccgaggcaggcggatcacttaagatcaggagttcgagaccagcctggccaacatggtgaaaccccgtctctaccaaaaaataaaaaaattagctggacgtggtggagcatgtctgtaatcccagctactcgggaggctgaggaaggagaatcgcttgaacccgggaggcagaggctgcactctagcctgggcaacagagcaaggctctgtcaaaaaaaaaaaaaaaaaaaaaaaaaagaaaaaggattaaagcgaatagaaataagagtgtgttgcttagagtaaggtgctgttcattgtaaaacttttgtctcagctctacatacatatatagaaatatgtacacaaatatttttcatatatacatat

SEQ ID NO: 1888172 - DNA, 4001 bp, Homo sapiens
gataatgaaataaaaattccatttaagccaggtgaagtggctcacacctgtaatcctagcactttgggaggccaaggcaggaggatcacctgagcccaggcattcaagaccagtctgggcaacacagcaagaccccatctctacaaaaaatttaaaaattaactgggcatggtggcacacacctgtagtcccagctacttgagaggctgaggtaagaggattgcttgagcccaggagtttgaggttacggagagctatgatcgtaccactgcacttcaccctgggtgacagagtaagaccttgtcactttaagaataaataaataaaatctttttaaaattaagaaacaattaaaactccatttaagaaataaagaaacaggatgggtgtggtggctcatgcctataatcctagccttttgggaggccgaggtgagtggatcacctgaggtcaggagttggagaccagcctggccaacatggtgaaaccccctctctactaaataaaaaatacaaaaattatcctggcatgattgtgcgcgcctgtaatcctagctactcaggaggctgaggcaggagaatcacttgaacctgggaggcagagtttgcagtgaatggagatcgtgacactggactccagcctgggtgacagagcgagaatccatcccgaaaaaaaagaaaagaaaagaaaagaaataaataaagaaagaggaaagatcccaagcctttgaaaagaagagtgactacccagcaacgtctcaaaaaccaacatcttgtttcaatgagaaccagcagtgtcatgggagcaggactcgacatgggcatcttgctgtgtggctccagtgcggtcactgtgccctggcctcagtgtgcccatctatgacatgggagcagctaaaacatacaagtatttatactcttgcctgctttagagttacttctagaatggaaagaatgggaaacgaagtccacggggtgagactcactgtacccatgtgagaagaggggcaggtgctggagctgggtgatatcttggcagcaccttctcccaccatctgctgctggtcacccgcccaactgtccactaagggtgaggcatgctgagcttggcaggcctttccctccccaagtccctggcacacacatgaggctgggtccttgcctctcctaccctgcccaccccgaggccctctctgctggagccaggatacagagacggccgcttgtttgcttgcttatttcattcattcattcattcattcattcattgaaacagagtctggctctatcgtccaggctggtgtgcagtggtacgatctcacctcactgcatcctccgcctcctgggttcaagctattctcctgcctcagcctcccgagtagctgggactacaggcacccgccaccacgcctggctaatttttgtatttttagtacagatggggtttcaccatgttggccaggctggtctcaaactcctgatctcgagtgatccacccgccttggcctcccaaagtgctgagactacaagcgtgagccactgtgctgagccactggatgctattttggtagaaaaactcatctcccctcctcgctttcccagtccctcagtcaagctggtggcctgttctgcacattggtgctttggaggagggattctgggaaacactggctgggaggagaatcccacagtagcaaggcctccttgcttttgtctccaaatctaattcattaaggacatgtggggttttctcaaggcagcagcggagagacttcccagatgaaaggaagatcctcctgctgaaaggatgaagtccctgagcaatgggatcctagcagtgtcaccagataaaatacaggacacctaattaaaattaaaatttccaatcaacaaggaacaattattttagcataagtatgtcccaaagattacatgggatatacttatacctaaacaaatttgtgatttgtctgaaaaaccaatttaatgggaggccgggcacagtggctcatgcctgtaatcccagaactttgggaggcagaggcaagcgaatcacttgaggtcaggagtttgagaccagcttggccaacgtgaaaccttgtctctactaaaaatgtgaaaaaacagctgggcgtggtggcgggtgcctgttatcccagctactcaggaggctgaggcaggacaatcgcttgaatctgggaggcagaggttgcagggagccgatatcacaccattgcactccagcctgggcaacagagtgagactccatctcaaaaacaaaacaaaacaaaacaaacaaatttaatggggcatgctatttgtgagtgtgtgtgtgtgtgtgtgtgtgtgtgtgtgtgtgtgttgctaagtcggtctctgctaagggagaggcaaaaaaccagagcaggtgagccttgggcaacacagggcccagggccagcctgaaagacactgccttggctggcacagtgcctcacacctgtaatcccagcactttgggaggccgacacaggaggattgctggagcccaggagttcaagaccagcctaggcaacatgatgagaccctgtatctacaaaaaatttaaaaaattagctgggcatggtggtgcatgcctatagtctcagttacttgggaggctgaggtaaaaggatcgtttgagcccaggaggtggaggttgcagtgagccgggattgtgccactgcactccagcctggacaacaaagggaaatcctgtctcaaaaaaaaaaaaaaaaaaaaaagacactgccctgatgatggcaggaaacgctgcctgtcagctgggcattgaaggaacacgcaggcttcatcaaggacagcggcagaggccactgtgacatacccaagatgtgacacctgacccactttcctggcattacagaagccatcccaagtccaggtcacctgatggccaaggtctataaaataggaccacctaaaagaaatgcacctccatacactgcccaccttagcattacttctagaaccgagagacagtgtgacatgggcctaaaacgtgtgaactgctgtacgtgccaaagtgaagttaactcagtgcaacgtgaagaggctattccataaacctctagttctgagaaagagtcacaccgtgacataggctagaaggaacgcagggttcatcttttactcctggccaaggctatctgggtgggaagcaggcagggaggggtctcaccagcctggaattcctcctggtgtctttgtggcgtccagacaggtggtccagctcagcctgctgcacacacagatactccctgcaaggaaagcaaggaagagtttcaaatggaagaggaagaagaaagggaaaggaagtaggccaaatggacaatgtccccacgtggagagcagacacggggctcagcggggctcagaggcaggtaggaagccaggctccctcacactgggggctgtgtgcccagcaccacacaaaattggttacagggaagttcctagttaattcccccaccaggcccacaagtagcttctactgttattatatgcattttctttctttctttacttatttattgtttgagacaaggtcccccctctctcgcccaggctggagtgcagtggtgtgatcacagctcactgcaacctctacttcctgggttcaaatgattcttatatctcagcctcttgagcagctgggactacaggtgtgtgccaccacacctggctgatttttgtatttttagtagagatggggtttcactatgttggccaggctggtctcgaactccttgacctcaggtgatctgtctgccttggcctccgaaagtgctgggattacaggggtgagctaccgcatccaacctagtatatgcattttaaagatagacaaaccaacccttgaaagcagcaagtaccccagccccggtcacacagcagagaagaggctgaacccacgtctgaaaccacacagtggccttctgagcccaaaatcttcatccccatgtt

SEQ ID NO: 1888173 - DNA, 4001 bp, Homo sapiens
cctgttcacggccggcgtggtgaccaacaggaaccccaggctgcactggaagggactccagtggctccagccttccctggcgggtgctgggtcaacaacagacactgttcttggcatgatgtttgcacaaatccctcccacaggcccgggagtggttccctgagtcctcacccgggtgatgtatttgacagaggacctcaagctgttgcaccccagccacctcaccgccctccaggtaggagggaaggttgagggcaggccgaccaggtcctcggctgcgtggatgtccaaagtctcccctccaggacaggaccaggcctcacccaatggacagatgtccctggcaggagaccccggcaccacacagcttggggttggtggggttggggtcaggccaccctgaaaggcacggccacacccaggccatccggctgccccctgtaaagggctcagcagtggaagcccccggaggctcccaggaggcggcgcctggccaggacccccagcaggggctgaccactctgccctccactcagagaggcttgaataaaggctgaggccatgcagcccttcgggagcagagcccatggatcccgcacactctggtcttcaaactccagccccagccctgtgctgaagactgggctgccgtccactaccccagcctctcggccactcccactatctggggacatagcgactctgtgtgaagaggggtggtaacacggtgccaaggttagggttaagctgaccctaggaattagaggcactaaagctgggcagggtgtgaggagggagccgtggcttcctgagccagggccactgtcttcagacctggtcttctatccgtccatcagtccagggggtgtctgcccttctgcctaccatgccccttccctctgctcatccctcccagggtcctgaccctcgcctcacctgccctggggccggcagctggtggcccctgaggggaggccccacgtctgcaactctgggcagaagtcaggggtcactcctgacaggccctggaaccccaggcctagagatgcccagcaggagcccccgtgcctgcccaggcctccaatctgctggcgcccagcagcctgagccccttcatgccagcccctgccaagggaagggcacatggtcggggacccccacaatgggtcctgggtgccacctggcctgcagacccccttgcagatctctgctcactgcagctgtgcccgttgatggcccagcttccctgcacatgggcgtcactgcctcccgcaagagggtggggagatggggagcccctgggggccccagcaaccttcacaggcacctccccagccacgggccatgctgaggggctcctgtttggtagtctccctgccaggcccagcacccctcaggccatctggagagatgccaccggcccaggcctccccactgaggacacagacccccacaggtcaccagcgcagcatccgtgctcacccctgtgggtccctggaggtgccttagagtccaggccattttaaaggagaaatcgaagaagggtccttgggaagaggacagggcggggccagcccaggcccccggcaggcccaacccacagggcccagctcctaagcccacattttcaagcaaagctcttgtgtgagcaatgaacattggtttcatggtgccctggcaaggaggaacaagcaggagcacccagctgtggggatgaccccgttcctcagccacccactttcagggggaagggtctcgggctctgcactgaagtgttccgggggcgggggcggcactcagggcttcacttacttggagctgaccacgtgccgagccgggctctccccgcgccacctgctgggtcctctccacggctgcgggacctgcggccgggccgcacggcgccatcaatgcacagctacagctggttgaaggggaccaaatccattggacagtcgatttggttccattttaccagctctagcaaagcatttggctcccagatccgaggaacagcgacgtcggtgaagaaggcggctccaccaagcagtcccgatggagatggggcttcgcggccagcatcaggcccttaccccaactcccggagggcccccaccccgtggagtttccctcaagctctgcagggactggtgtgaagggccacacgccccaacacacacacacactcagacatacacagacacacacacccgctcacacgcaactcaccaccctctcgctctgcccgggctcccccatcggggacccgcaggggtctggggagggtcgggggtgccaggcggcctccatgctctggaactgacactcactgctctctgcctgtcaccgcccgattcctccacagccctcgcttcaccaagtgcccactgcccccagcactagcctcagctgtgggatacagctcagaccatcgggccccgccccagggggctcacatctgtgggcacagtgatcttgcaggtttgaggcccttattcccctgcaaactcctcccagaccatgctcatagctggagcagaggcaggacagacctcccagtgagccttgggccctggctaaccatggggcagcccacccaggaccccgtcctgcctggcttgccatggcctgggtgggacgggatggactctgacaccacatggtatctctgggtaggcaggacgggaagattccagggacgtccacattgcatggtggtgggaggacagcctgagggggccttcgtggcctgaccctgggccccatgccccagacctgcagccctgcccgcatcttgctgaggggcatttccatgcccaagggaactgtgaggatggagtgtcaggacggaggtccgaacgtgacatcactcttgcctggctcccgcgtcccccacaccaatgtcaccttcagtgccttgagagcaagttcccttttataaaatgagtctccctgcagcccccgttcatcaggagccgtgacaggtgagggagagtgtctccggcagtgctggggatgtggcacccatgtgtgtgagcttctatccgggagcacaggccgtcctgggcagcacaggtgaacgcacctgctcctcgcccaccaggttggcagagtgggcgctgcgcactagggcctgtgccacctgcctgcccgttgcacacctggggctgccctgcctgcctgtcctctggcctttctgtccccctcctgacattgcagggacagaagctcaggcccctcaggcaaaagggacggtcgcacagcaccatgcccacgctccaagtcccctctgggagtgactgagctggacgaccccccaccccagcctctgccaggcctgctctgacccgtccgtagctgccttccctgactgtccctgccacggtgccctccagaaagatctgtgccgtgtaggaggaccacctcctcaaagtcccctataagtcggggctgggccccagccttctcagcctcgcgccccaaaacagagaggcttccgggccatcagcccacactctgcaaacctctctcctccttactccagtagcacagagggtgcagggcagacctcaaggctcccagagtccacccctccctggccctggagtgaggacggctcaaagacctcgaagccggcacacacttgtccatttatcgcctgtcaatattcctaatggagcagaagatttgacaagatcaagccggggattcgagtcccagccgcgattctatcccatcaggagctgggaggtctggcatttgccaatcaacatagcaaacaaactggtcatttcacccgaaaggcagcagagcactggggcaggctgcaaaacccccacggggaggccactgcggccttggatgaggcatcaagcttggcgttgcagccgccacggtggtgggcgtgagctgtgaatagacaccgagcggccaagtgccaggtgcggccctgagcaccgacagccaccgtcttctcccatacaccccactgtacctcaagg

SEQ ID NO: 1888174 - DNA, 4001 bp, Homo sapiens
agggtcccactccaatgtccaggctggagtgcagtggtgccatcacagctcactgtagcctcgacctcctcctgggctcaagtgatcctcccacctcagcctcccgagtagctgggactacagatgcatgccacatgcctggctaatttttgcatttttttgtagagacggggtttccctatgttacccagactggtctcgaactcctgggctcaagcgattggcctgtgtcaacctcccaaaatgctaggatgatgggagtgagccactgcgcccaggcttcccttccttttcttatatataaatttgggctgaccgtaaaacaatgagatttgatcatctggttgtaaagcccctacaaatatacaataggagatgtaggtcagtacaaactgggcagcaggcagttcctaaagccaccttgttgaccatgcctggtggaacccgtgaggcttgccagggaggggctgcagaggtcttccattaccgtgggctgaatgaccacacagtgagatccccacttccttcagatcagtgttgctcaagttttagccccaagagagcttaagagattcctgggctgcgtccccagagatcctgactcagtggttctgggcgggggcctgggattctgcatttctagcaagttcccccaggtgatgctgatgccgctggtctgacgaccacagtttcaggtcttgggccactgggcatccaaatcacttgcaggtgcttgtgaaaaggcagattcctgggcactacccccgagacattctgattctcaggttcagggtggctcctgggaatctgccatatcaaccagccctggaaggaacctctgaagaccaccctttgggaagcactgcctagaccattagcacctgtaatgctgaggtgaggaatgcggaggtgaagggatttgcttcaaggtcactctgcaagtcagggacaactccctggtgcctgggccctaaatcttggagcaccctgggctcctctttccttcccagtccacattcagcatgtcagcaaatcctgttggctcttctttcaaaacacatttaggttttcttgaagactctagcaaacagacttgggtgtgggagagtcaatgcaactagactggtaaaatgtgggtcattgttgaaactgtgagttcattttattactcacaattttttatttatatttgaattcttccataacaaaaagttttaagtgtttgatctaacaaattcacttctgggaatttatcttaaacaactttttttttttgcttcccgtccaacaactttattaatgaacattttaaataaagaaaaactcttacaaataaaaatattttttcaaataacaatagtgaaaaattgggggcacatgaagtctccttttttttgagatggagtctcgctctgttgcccaggctggaatgcagtggcaccatctcggctcactgcaacctccacctcccaggttcaagccattctcctgcctcagcctcccaagcagctgggaatacaggcatgtgccaccacgcctggctattattattatttttttgtatttttagtagagataattcaccatgttggccaggctggtcttgaactcctcacctcaagtgatctgcccacctcggcctcgcaaagtgctgggattacaggcatgagccaccacacttggcctaaattctcataataggaaaacaataaactatggaacactcctcgacagaattttttataattaagagcatttatccaggctacataccaacagggaaaacatgatacactattaagtaaaacactaggacattaaattgtatatattacatgattaaaactatgtaaatatttgtatctttgaaaaagactgaaaaataattacatatgttcagaatctaatcatttcccacctccttcaatgcaatggcctttgtctcttgggagaggagggcactggagtcctagtctaggggagcccagcaccccagtctctcgcctgcaaccctgttaacagccctgcactggtctctctgctttcaccctttctctctccaacctcctcagcactggccagctagagaggtccttcagaatgtgaatcagctcatgcccctcttctgctcagaaccctaggaggcttcctgtatctctccaactaaaagcttcctgccatggccgtccaggctgcagaatgtcagctcgcctgctctgacctgctgctcggttccctgcctatgcctgcctctccagccatgctggcctcctggctgctcttcaggaacacactccagtctcggggcctttgcacgtgctgttttctctgccaggaatgtgctccctccctccttcatgacagctcttcagagaggtcttacctgggctcatctaaaatagatccactccctctttttgctcccaaaccctttatatttctttatagcacttattaacatgtcccacagtacatttattacatcttctactttctagaatgcaaattccttgagaacaaagactttacgcttgattctctcctgtatccccagtacctagcatagagcctgacacatagtaggtgatgaacaaacacctgctgaatgcaagactgttgtactgagcaaccatccaacgggggctgtaagcggcatgtaggctttgtttcttgggtaacctcccctccttaatccttctggcataggcagactcacagcaggtacccagtagaaggtaaggtggctgatcatttttccataggaggtctccatggcacacagggtagaaagtgcattctgtgaattagaggcagcagagcatggcagctaatggaaactggctctgggaggtcaaattctggcttaacaccaccagctgggcagccttgggaaaattatgacaattctcagggcattaatttttccttgtgcagaaagagaaggataatgacagctcctatttcccagggctggggaataaataagagaatgcccccataaagcaattagcaagcacagtgcctggcatggaggtgacgagcaacgagaagcagtcaaattaatcaacagccacatttgtgcctttgtctctttcaagtttacaacgtgctcttatatacatgctttagctgatctgggcctttgaacaacctgtcggtttttatcaccattttataggtaagaaaattgggtcagaggaaaaagtgctagctcacagaacacaactgaattttgctagaacttctggtgccctttctttcagaacacaagtgattattactgctgatatgaatcaaggtgatttggagctgggcatgcagtctcagctaccagagaggctgaggcagaaggatcgcttgagcctgggagatcaaggctgcagtaagccatgatcatgccactgcactccagcctgggagacagagcaaggccctgtcttggggggaaaaaaaattaggcgggccccactggagccccagactctaaagtgtgtgcctagtgtaaggctgtggatggcaaatgaattccaaaatgaaatcagccagccagctacaggcttacaacctagtggtggcagggagtgtacgggctccctcatctgcagctccttctctggatgaggcttgagagcaagtctggacaggcaaaccatctctcagtccacccaggacttaaaacacttcattgttttcccaaaagggaaaaatagcaaagccctttctgtacagtttctcctgcttagagttgggtggcagctctatacagcaaatgctgactttgctgtttgagatctttgatacagtgtgacctctgagctctgaaccaggctgcccctgacaaaaaaagtgtttcctcccacaggtaaacaaggaagaaggcactgcaaggagctctgggcctggctcagtggaggctctgccacctttccaggatcaaaggccaagggaggtgacatggcaaggaaaagatctacaggggtcagacaaggaattttagaacc

SEQ ID NO: 1888175 - DNA, 4001 bp, Homo sapiens
ctgcctcttgtgagacccagagcaccagggggccctgtcccctccctaggtccaggccaggtggccaccaagctatgggttctaggggccccatctagcagagctaggagctgcagggcccagttctaccccttccttcatctggcacaagtgcaagactgggaatgcttggtcctgcaggggagaaggcagggccctcagctccctccctccctccccatgggagtctccacaaatgcatgcctcagccaggacacctctcctgtgctgtaaccaatcacaccttcatttttctaaagctttatttattttataaaatgcatagaataaattatactagtaacattttaaaaattaacatctttgtattcagcagtcctgggtcaggaggcaggaggagggtggtggggacgggatggctcactgggcagctaacccgtgtaggccacttcctcctcgtcactgccatcggggaccgcgtctgtcccaaagtagcggtcgccaaagttccctggaaaaaggggggggggggtccagtgtggtggggcctcccagggccacccaccctgccctcatgtgcggctgaagggcccgggcagcctcaccaatgcctgggatgatgcggaaaaggtcattgacccgcttgtccaccgccgtggtgatgattctcactcgcggaaatgcataggccactgagtgcacgcccatctctgccatgagcagcgacagcaaaaagatcttgtcctcaggcacgtcgtggtcctaccgagtgtattgggcaggtaaatcccacctctgcctgaacctgccccgcctacccagggctcactcaccaggagcacgcgcactgccatcatggccgccgcgcccgtggacacggtgcagtccatgaggatcacgtggtcatcgctgatgtccttgggcagcctcaggtagtggagctgcgggcagcaggggtcaggctgcaggtggggctccctgcgtccccttgctgtgagctccctctgccccctacccccgggctcatcaccccggctgcccccaggcacctcgggctccccggtaagctggttggtctggatgaggatggtgccgatgcgcacgtctttgcacacagcgcgcagcgcgggctccatggtttcaccggcgcgcagaatggacacaccggtgatctgcggggaggggaggctaagcgcccacatcccgccccagcagcctgtcccgcgcccaggtgtgcccaggcaggtacctgcttccccgcatagcacttgcccgcatagtcctgcccctgcggggtctgtacgacgcagtcctgtggggtgcagggtgaggactccggtgagcgcagggagctcgcaccggctccaagacccaccctccacctcgcgggctacgggctacgaacctgaaagggcaggaaggagagcgcgtgctcgatgagcagccgcatcagtctcttggagtagaagatgaactcgtcgcgactggtctccttgtccctgtggggccaacagttgagcgggagcacgcgcccggggccgccccgtccccaggtgggccctcacctgatgatggtgtgcatgccccgtacctgcggcgtgctcttcaggacgctcagcgtccggggcagcgggtggcactggtgtgccgaggccagcgcagccctggggacaaaccgatggggaacactcaagaagggggtcttttcccagagccctccctccccacaggacggctgtgcgtcactgtgaggggaacacacgggccaggcacagcacgaggtgcagagcgggcctgacttctgcctggggctgagctggggggagacgtcgccctacctgagctgtcaggcaaaggcgaaagatggcggcgaacaacggggcaagctcaccatcaggcagaaagctagcggggtaggctgtgagggcccctcccagtgcgggacccctcctgcgctaagaggaagcagaagtgggccgggcacagggcgggctcacacgtgctgataggtgtcataccccagaatgggtagcttgtccccagcctctccccgggggaactaaagctttgtggggtcaggccccgccctggctcctccccgaggtggtgcgcggcccctcaagagaggggggtggggggcaaagctggctcagtgtctcttggctgtcccgtcccgccccgctgcccaagcctggggatggccggggcagcagcaggtctaggagcgggcaggaaaagggcggggtggaggcaagaaagaggtgggacagggaggaggcaaagccggaaaggggcatgacaggggcagggaatggggcggggcaggaaagggggtgatgcaggggcaggaagaggaaagcgacaggccacagaattgggtgtggcaggggaaggaaagaggcagggcacggaattgggtgtggcagggcagaaaagaggcgtgacagcggcagggaaaggggcggggccgggaatggggtgtggcagggcagaaaagaggcgtgacagcggcagggaaaggggcggggccgggaatggggtgtggcagggcagaaaagaggcgtgacagcggcagggaaaggggcggggccgggaatggggtgtggcagggcagaaaagaggcgtgacagcggcagggaaaggggcggggccgggaatggggtgtggcagggcagaaaagaggcgtgacagcggcagggaaaggggcggggccgggaatggggtgtggcagggcagaaaagaggcgtgacagcggcagggaaaggggcggggccggaaatggggtgtggcagggcagaaaagaggcgtgacagcggcagggaaaggggcggggcaggagcaggaaagagggcctagcgggagcagcggggcaaggggctacgggaaggcgggtcacacagcagcaccacggagcacactgctcacatatcccaacgtagcttcctctgcttgccaggtgaagagcatgttcagggagggaacaaggcaggaaacgggggtttacagagagaaggaagagaacaaagagaaggctgcttagttggggagcagggcgttccccgcaggcctgaggaggagtgtgggcggtcaggcccccagccctgcctgaccctccctcctgcccccgaccaaggcttcctggggctgaaggaagtgagtgcagccacaggccaacacttccttggctgaccagacgacggaaaatgtgtctggctgcgttcaggtgtttttccaagtttgaaaccctggaaagtttttcctctcagaacaaaagcttcaggaggaacctgacgggacaagacctgcgggttcctaggccgaggagagggccaagcggagactcatgcaggcaccggaagctggacggctggtggacgggccctggaggcatttccaacatttggcaaactctttggagggctctgaatgtgagggctctccctccaggtggctcagtcaggagcctcccaacccacagaaggcagggagaagggcaggtcccttgtggctgacccccctgcatgcctgcccttggggagggacagtgggatgcggccccggcccagcccaagcttcttgctgcagttgcccagttcctgctggcagagctgtgcgggctgcgaggacagagctggggcaagcaggacccgggtgggtgggaggacaggcgcgaggccctccacctgcaaccagggaaagctgactggtccgtgaggctgggcacaggaggtacagcaggctccctggctgctgggacatgtctgtagtcactgccccagaggcctggcagtgctggctcaggaggacagctgtgctctctggggtcaaatcccatagacagactcaggagtcaggggagcctccagcaaagtctggccaggacagggtcaggactccgtgacgctgggcaagctacttcacgtctctgtgcctcagtgtcctcatctgccagcaaggggaggcagaagcagggctgggaccactccacaccaccccttctg

SEQ ID NO: 1888176 - DNA, 4001 bp, Homo sapiens
ggtctgtctctcccctccagaagcaagctccatgcagaaagggctcttccctcttctgtgactgccgtgttccacccacatggctgggccctcgggagggctcggtgtctaatgatcccatggggaaaggggagctggaatggggcagaagccaccagaaggaaggtcagccttggaaaggaatcacagtgggttttcccgagacagaggggcgagtggcaggtggggtgacagaagggaggccaaccctgcagcagggctgggggcagtgagggctgcagggcctgggggcagggctcccatgaactgtgctacggcacagcccaggcatggggacacccaaaagagagggctggggtgccagccttagcgggaacaagcagggagccccccacacccccacctcaagctatgtctcaaggcctgagcccctggggcgtgcgcttgcgtgtgagtgaaggcctctctgctctcttcctggccttccccagcgcccctggcctcttgccccattcacacaaggccttttccgcctggtacctcagctgtggggcctggctggtgtaactcatggggccccagtggggggcagaggggccactggtttcctggcctgctgtctccaccagggtctggatccaggcacttctgctgacagcgcccagcgcggggccaccatgtgcccagcggcctcctgcagagaggcccctggggaagctccccactggccccctttcccctgcctaaggggaggccacagccacgggaagggctcaagaatggacttcaggggtccctgagaccccagaactttcaactctgagtgacgttcttgcactgggaagggccactgttcctgcaggtccggactctattttggagactccgccagctctagcaggagggaggctcacccttgcttctgccctcaggacagatgtggggacactttgcaccccaagtcctcctagccatgcccggcacctcccaccaagtcttgtccacacagggagcgtcaggccaccctgcctgtcacaccccagttgccttcctgtcttttcatctttttgctctgtccatccactcatccattggtccgtccagcaataacctgagacctgctccgtcctaagtgtatgagagagttctgccctttggggtttagtctggtgggggagacaggtgttaagacagtgagcccgcaactccccgctgcgctaatgccatgaaggcagggccagccgcagcaagaggaatcacagtgggggcaactggttccacgcaggagttgagggtgccatgtttccagcatgacccccaagcagccaccatgagtcagaagcaacccaagaccgtcagacactgcgcacttgcttcgaggactctagcaagcagagctgggctctatgaagagtaaatacaagagcaaacatccaccactctttctacacaagtttattaggcacctgctgggtatcacgtgtggagacaagctggacaacgtaacaatccgcaaggcagctacggccttgccctggagctcccagtctagcaggggtggaaaacaggtaagccccccagcggaagccccagacctggcatgctgtgaggtcggggaaggagcgggggctttcccgaggaggcgtcagtgagggtggagagagcctccggaaggggagcgggcaccggcgaggatggcaccgcatcctgcaggtgctcgtggctgagggtgggaggtaggtaaaactcccggcagtggggacccacgggagactgtggcagaggcgcggcacggcgagttcaccattccccagtgcccggccgccccaggggactcagcagctgacatgacaggggcccctcttgtatcgactgtcctgtctccactcctggcacacagctgcgggtgcagcgctcttcagagcccttcaggagagcctccacccaaccctctgaattaggcacaacaggattgagggggggccctctggaagggtcctttctcctcacctcccacatgaggctgggcctgatttcacaatttcactcaggatcttccctcctcaatcctcccagccctgtcccatctcagtggcctgtggtggaccccagatccacagacacaggccctctccgcacaagggctcacgtggtccccagccaaggcccctacagcactttctacggagccctcttcccaaacatgcacatccagcttgcctctcagccaccccgcctccatctcagctccaaggaggccttggcagcaggctcggggcgccatggaacggttcactgcgtctctgccctggcctcacgtgctgccggctggccttgccattcatcttctgaaggctattctctgatggctctgctggccaccttgatctgagtggcaggtctgtgctaacagtgttttgtgtggggccctgggagaagagtccatgaaccactgcctaactcaagtgctgccacggtgaagcacccctgcctagttctgaacagacgcagcacatcaaaggggagccggcagctcactcctgagcaaagcagcaggctagttcctcacagtcaaggaaaaccactgggagaacctccctgcttctgctgaagacctgagctgcttctcccgggtcccccagtgctgacaggcctctagcatcaggtccatgtggctgattctggagatctttaggaggatgggactggctgttgagaactgtcagtatgagtctgtctggctactctgcctgggaacattcactgagacataaagaagatattaaatagctggaaaattaggaacccagctagggctggaggggaggtcttagaggatcattctgtaagtgctgccggggaaggaacaacggtgagggctcaggctggctctctctagggtcctccacaggaggaagaagaccacaaatctaaccagcctagcagccccagatacacagagcacatgtggacaaagctgtggctgcctgcattccatgggatcatcttgtatgcagcagtaagaagggtctgttctatgactgctctgctgccttttttttttttttaacagcagctggtttggagtctcccacgtattgcctgaggtggtttggtggtaaccagctaacaaaaatcctttcattttaggtgcctgtgggtggtgtggtcgccaccaagaatgagtcaagccatttctaaagaatccacagtaggctctgtctgacagggtgcatctgggagggcctgccgggcctttattcaacactagatacgccccatctccaattctaatggacatgtgcagaaaatgtgatacagaaacctgcagagcagccagttcccagcggacgtcagagatcagctcttacctcaaggatcttgctcaccaaactctctttgcttatcaaacctttctttcagagggcaaaggttaactcccatctagaagaggttgaagtactatggttttcaaaccaggaacgtggcactaatgaggcggagctctggagaggcacagctgcagaaggttccagggacccttggaagcagacagggacccttgggagcagacaggtttggaataaaaacaaagagaaaaacagggcaaaggattaacaacagaaatgaaaccaggcgcacacacactcacctgcggcatgatcgcctgcggtcacactccaacttgatatcttgcttccaacggccagaacggccatcagtggaacttactttcacgggcaatctttaggctgttgtttattgttgatttaagagagaagcagttatggttttgaaaacatggccctttttctgatggggggagagcaggtttcaatgaaatgggtgtggagtcccaatctccaaggcctttgtgtctgatctgagagaagccatctgccagagtcaaattcttcagggccctcaagaacagagggcaagaagccaggcttagataagccttttctgaagccctctggctggccagagaaaggaggcag

SEQ ID NO: 1888177 - DNA, 4001 bp, Homo sapiens
tctccaccagggtctggatccaggcacttctgctgacagcgcccagcgcggggccaccatgtgcccagcggcctcctgcagagaggcccctggggaagctccccactggccccctttcccctgcctaaggggaggccacagccacgggaagggctcaagaatggacttcaggggtccctgagaccccagaactttcaactctgagtgacgttcttgcactgggaagggccactgttcctgcaggtccggactctattttggagactccgccagctctagcaggagggaggctcacccttgcttctgccctcaggacagatgtggggacactttgcaccccaagtcctcctagccatgcccggcacctcccaccaagtcttgtccacacagggagcgtcaggccaccctgcctgtcacaccccagttgccttcctgtcttttcatctttttgctctgtccatccactcatccattggtccgtccagcaataacctgagacctgctccgtcctaagtgtatgagagagttctgccctttggggtttagtctggtgggggagacaggtgttaagacagtgagcccgcaactccccgctgcgctaatgccatgaaggcagggccagccgcagcaagaggaatcacagtgggggcaactggttccacgcaggagttgagggtgccatgtttccagcatgacccccaagcagccaccatgagtcagaagcaacccaagaccgtcagacactgcgcacttgcttcgaggactctagcaagcagagctgggctctatgaagagtaaatacaagagcaaacatccaccactctttctacacaagtttattaggcacctgctgggtatcacgtgtggagacaagctggacaacgtaacaatccgcaaggcagctacggccttgccctggagctcccagtctagcaggggtggaaaacaggtaagccccccagcggaagccccagacctggcatgctgtgaggtcggggaaggagcgggggctttcccgaggaggcgtcagtgagggtggagagagcctccggaaggggagcgggcaccggcgaggatggcaccgcatcctgcaggtgctcgtggctgagggtgggaggtaggtaaaactcccggcagtggggacccacgggagactgtggcagaggcgcggcacggcgagttcaccattccccagtgcccggccgccccaggggactcagcagctgacatgacaggggcccctcttgtatcgactgtcctgtctccactcctggcacacagctgcgggtgcagcgctcttcagagcccttcaggagagcctccacccaaccctctgaattaggcacaacaggattgagggggggccctctggaagggtcctttctcctcacctcccacatgaggctgggcctgatttcacaatttcactcaggatcttccctcctcaatcctcccagccctgtcccatctcagtggcctgtggtggaccccagatccacagacacaggccctctccgcacaagggctcacgtggtccccagccaaggcccctacagcactttctacggagccctcttcccaaacatgcacatccagcttgcctctcagccaccccgcctccatctcagctccaaggaggccttggcagcaggctcggggcgccatggaacggttcactgcgtctctgccctggcctcacgtgctgccggctggccttgccattcatcttctgaaggctattctctgatggctctgctggccaccttgatctgagtggcaggtctgtgctaacagtgttttgtgtggggccctgggagaagagtccatgaaccactgcctaactcaagtgctgccacggtgaagcacccctgcctagttctgaacagacgcagcacatcaaaggggagccggcagctcactcctgagcaaagcagcaggctagttcctcacagtcaaggaaaaccactgggagaacctccctgcttctgctgaagacctgagctgcttctcccgggtcccccagtgctgacaggcctctagcatcaggtccatgtggctgattctggagatctttaggaggatgggactggctgttgagaactgtcagtatgagtctgtctggctactctgcctgggaacattcactgagacataaagaagatattaaatagctggaaaattaggaacccagctagggctggaggggaggtcttagaggatcattctgtaagtgctgccggggaaggaacaacggtgagggctcaggctggctctctctagggtcctccacaggaggaagaagaccacaaatctaaccagcctagcagccccagatacacagagcacatgtggacaaagctgtggctgcctgcattccatgggatcatcttgtatgcagcagtaagaagggtctgttctatgactgctctgctgccttttttttttttttaacagcagctggtttggagtctcccacgtattgcctgaggtggtttggtggtaaccagctaacaaaaatcctttcattttaggtgcctgtgggtggtgtggtcgccaccaagaatgagtcaagccatttctaaagaatccacagtaggctctgtctgacagggtgcatctgggagggcctgccgggcctttattcaacactagatacgccccatctccaattctaatggacatgtgcagaaaatgtgatacagaaacctgcagagcagccagttcccagcggacgtcagagatcagctcttacctcaaggatcttgctcaccaaactctctttgcttatcaaacctttctttcagagggcaaaggttaactcccatctagaagaggttgaagtactatggttttcaaaccaggaacgtggcactaatgaggcggagctctggagaggcacagctgcagaaggttccagggacccttggaagcagacagggacccttgggagcagacaggtttggaataaaaacaaagagaaaaacagggcaaaggattaacaacagaaatgaaaccaggcgcacacacactcacctgcggcatgatcgcctgcggtcacactccaacttgatatcttgcttccaacggccagaacggccatcagtggaacttactttcacgggcaatctttaggctgttgtttattgttgatttaagagagaagcagttatggttttgaaaacatggccctttttctgatggggggagagcaggtttcaatgaaatgggtgtggagtcccaatctccaaggcctttgtgtctgatctgagagaagccatctgccagagtcaaattcttcagggccctcaagaacagagggcaagaagccaggcttagataagccttttctgaagccctctggctggccagagaaaggaggcagggctatggtgctccactgatcctgtagggccggggcaaggaatgggaacccaagcagaaaccaggcaaccaaccaggattgtttccatcatgaaacaatagagcaggcaaacccatctacctctggtcccaacctttgtcacggacaaaaaacccagacccacacaggtgaccacgacctcagtgtgaggtagaacagctgggacccggactcaggtccaacaggtgcccagggcaaaggggtcctcgcaccccgccccaggtgaccctcccagaaaaggggtgctgaatgctcatccgtactgcctctgcggccgtgccatctagtggggaggggcttgggcactctgtgccccaccagagcccccaggttctcaatctccagagttcagacgcccgctccagtgggggcaccaggaatggcaaagagatgccttcacggtgttgatggtgtgcgccagccacccatgcacatgacctggtgtttctgtcgtggaactggagatgcggccttaggtgctgaccgctgagccacacaggtggggctcactttctcacctatcaagaaatatacatgggaaacccacagagccctgcctcctggcccagctgccaagacg

SEQ ID NO: 1888178 - DNA, 4001 bp, Homo sapiens
atattaaaaatcaatataaatccaaattacatatataaaataaaaatataatttatataaataaaaagttgaaataaagactaaataggcatattctgttgcacagtgaaaaataaaatttataaagttaatggctgggcgtggtggctcacacctgtaatctcagcactttgggaggtcaaggcaggtggtccatttgaggtcaagagtttgagaccagcctggctaacatggcgaaaacctgtctctactaaaaatacaaaaattagccaggtgcagtggcatgcgcctgtagtcccggctacatggaaggctgagctgagatcgcaccactgcactccagcctgggcaacagagcaagactccatcttgaaaagcaaaaaacaaacaaaacaaaaaacaaaaaaagttaacagtgacatttactgaagtcagccaatgaataaaaggactagagtagtattgtttttatatagcaaatcaaaagtaaaataaagtatgtctgtcatgctcctgaatttccttgggtccgaacttaagagaacccagataattataccactaggctctggaagtactagaaagccacagttgagagggacgctattcccttgtttatttatgtatttatttagagacagagtctcactctgtcacccaggctggtgtgccgtggcacaatctcggctcactgcaacctctgcctcccgggttcatgcgattctcgtgcctcagcctcccaagtagctagcattacaggtgtatgccaccatgccacgctgatatttgtattttagtagagatagggttaggccatgttggccaggctgatcttgaactcctggcctctagtgatccgcctacctcggcctcccaaagtgctgggattactggcaggagccactgtgcccagcccattcccttgttttaaaacagacactcatgacttggaaatggatttacatactgaatgaacagtgacacactcctgttccctgaccccacgaagtggcaaagtaggactacaaggcccaatccagaggctctggtcatttatccagcttatgaatatttactgaatacttgtactgtgccaggtgttatgataggtgtttgggggaacaacattaattctaaaagggaaacacacaggtgacttcaatacccatctggttggcattaagatagaggtaagtaaagccaccctgaactcccagattgggtactcggagaacaggctgcggcccaacctgggggggttcagtgacttcctggagacaatggcagagttgagtcctaatgcgttagtcatctgtaaagaataagaagaaccttctaagcaggggaacaacatgagtcctgtggcacgaaacagcatgatgtggccagaaaccaaaaacaatctgctcctcctgaaacctaacttttgaagtagagtggtggagatgaggctggtgaacaatgcagggactcagtgtgggaaacccaggagtttgaacttgaatctccagtataaacaaattgtaggtggtagagtgccttggtcagacctgcatttaagacagatcaggggccaggctcggtggctcatgactgtaatcccaaatcaggctggcttctctgagacagatggagtcatggaaaccagttaagatgctactgcagctgtccaggtaaaagccatgagcctgaacatgatgcagtaccagggatagaaatggagggggtgtggacagcaaatttaagaactgtttttaagagctaaaatcagaaacattacatgatttattaataatcactccctttcttaatatcctttgatagctctactactgcctgcatacaacctatagccaataggactcgcagtgggtgggtggtggcagaggtggtaaaagagaggtgctgaagatgattttcagtcagaaggaaagagctgagagggcgatcagaggaagaaaagaactttttccactgctacaacctcccagaatcccttcctctgtctttcctagagctgaagaccttcaccacagtgaaataactagaaatcagcaacattcctttgtccttgggctagaacaggggtgagcaatctgctccacagcttgtttttataaccaaagttttgttggaacatggctgtagccatttgtttatgtatcatcatccatggctgcttcttgctaaaatgacagtgtagttgtgacagaaatcatatggctcacaaagcctaaaacatatactgtctggcactttatagaaaaagtttgccaactcctgagctagaaaattgatgggaaaggtttaagaaaagattcatcggaccccaaatctccacatccagagcccttggaaatccaacaaggctagtagacttaaaaaacaaatcagtcattcagatgaggccttggcgtagaactctttaacctaactgctactaaagccaaactgaaatgctcttaggaaaaggatgttttggtgatgagggaaagtaagggagatttagagcatcggcaccacttggtgggtttttagacagtcttgcttgtttgtttctggacagatggagaatggcttcactgataaattccattgcaatgtcactgggggctaaggctgcacttcctccccaaagcccaacattcttcattcaactggactcattcttgcttcctgaaatgctcagagtgacaatgtggagaatgaaaccctgatgactgggctctgtgacaactcataggaaaatcggggggtggaatattttatgggaaatggcccaacaccagcagtaggaagcaaacagaaggtgagaacagactagacctatgtatggcagtggcaattaataaatacaacagttataccataatacatttatttcatttgtcttataacgcataattatttcttcttttttcaattcaggtagtttgagctgtttcctggtttagagtcttatcagtcaaacctaacacactttctcgttttatgactgctgtattagggttctccagagaaaaagaaccaataggatacacctccctcttgaaagattcatcagaagctatttgctctgtgattatggaggctgaggagtcccatcatctgccctctgcaagctggagacccaggaaagctggtgttgcagatcaaagggctgagagcagagagctgatggtgtagataccagtccaagtctgaaggtctgagaaccaggagtgctgagggcacaagattcatagcccagctcaagattgaattcaaagagtgaattcaatcttcctctgccactttgttctatttaggccctgaatggattggatgatgctcacccaactggacccatatctactttactccgttcaccaattcaaaatgctaacctctttcagaaacacccacacagacactccaataaaatatttaactagatatgtaggaatcctgtatcttagtcaagttgacatgaaattaaccatcacaactacataataaaaaccagtgataatcagcatatcagtaattatgcaaaatagttagattcaccttaccatagacaacaacctattgatggctactgcccgctgctgggcttctatatgaggcatttcattctgaattacttggtctgtgattccatgagggaactggtgacataattctataatcctagaaacaaaggtattaatgttatccttcatggttacctgtttcaagagacagtgggggtaaaaatacaagtagaatagtttgaaactgtgcctttttcacatttggcagacaatctgggtttctgtgatggttttggatcaaagcatgttagaaattgaagaagatgatttctaaatacatgtttacagtattattgttatttaagaatatttcttttcctcactaataagaactttaaattagagcaaaagtctaatgaaatcacagaaaaaatattaaagctgagacttcagttttctcgggtgtaataagcatgacaaagttaa

SEQ ID NO: 1888179 - DNA, 4001 bp, Homo sapiens
ggttgattctgggcttgtgttctacctgcctccctactaaaatgttagcctattactcttgttgtagtggtggtggttgctcttattaaaatgagcatatgatgatagcactggcctcgttaacaagttctgacgattaaatgaattgatattgtaaagagtttagcatggtgcccagcacacaataagctctctgtatttcttaaataaaattaacagtacagccccggaaaggcagagtccagtgcccaagaaacttggtcctcgggtttctcggcatcttccaccccagctcctggcttcgtcctgtccaggaggggttaaggagttaatgatttccaaaggagcagggttttgtgtgttacatgcacacacaccggtggcctctgtcccccctccctctgcgaggcccggagcctcttatgcaagccgccggcgcccgccggttcccaggcccggctgcagctgggggcggaggggcagggcgggggcggcgcgctgtttgtctagcgcggctgtgccaaaggctgcgggccccagacagccaggcgcctccgtacacctggggatgctcaggttaaatagctccgcattcctcgggcccagctgatggaaacgctcccaggccgccgcggagccggcctccagatgggctgggtctgggccaaaggggaacagagggaaacgtggaatccagagtgtgcctgaatggcgggggaggtggcccaggcccccgccgcagccccttcctcccctggaaaaaggccctgcatgtcggagtacgcgagggggaacccgctcagaccccgtgggtgggcttgcaggcgggggcccacacgtgagagtgcgtgcgtgcacacgtgtgcctccgaggacactccaaggactcacaggcgacaataataatttataactatgaaacattctgtgccaagcactgtgctaaacgttttacacacttactttatttcatttattctgtactacattccgtgaggttagtactgtaatacagcagccggtggggaggaggtagcaaagaacataattcgcctgcaagtactgggttcttcgataaaatccataaactgtggagggggtgtacctggcttaatgttagtgctcaaatcataatctttcatttgattttttgttcatcccctctctgagcttgttccttctgctgtaaaactgggatcacagtcttgcctttagccccacagggatccatgaaatcgtttttgtaaagggttcagttgagcagagccaggcttctggtgctaagggctattgattttattctattgtttattgacaaaatatattaatagcccttacctgtctgggacaagttctttgtcattcctgggactcagtttctccatatgtaatacaggggggtttacctggcagcaatccttgagggttggtgcccccaggacctaacgatagcccagggagttgccacgtgaacttttgaggaagggtttgcccaaacacagctgtccccaccttcactccagacccgcagaggcccaggaatgccaaccaatctatagaacagttatacacacagaaacccacagtgtggttctgtggcccccagacacacaaacccatccatcatgccagacccatgcagagatgcctacaatgcatttaggcagaacacacaagcccaaacagctggaggttccacacttatctgcagaacacatgtgctctcatttgcccttctgcacacacccccaagcatactcctacttacaccccctcccccaagcctatatgtgaacagttggcccatccccactgtgggagtagtgggggaagatcagcttactcctgttacatacacaggcgtagacactcatacatgctcccctgagtagaaatccacatacatgtccaggaagattcttagacccttgccaatgacatatttttcctgctcaggagctgggtaatgagactcgtccactcctcagatcctacgcaggagccccggggttggtgggggagatttgtttgaactgccgacagagccaggccagagtgaggaggccgagtctggacccagagcaggtgtctcggcagctgtgcccagcctggccctgccaacttgctcacccacttggatgagccaggagccccagggctgcctgctggaacccagaggtaggctgttgggggaggcacctccaactggggaatggggtgatagaatcactgcctctcacaagctatggccctaagcaagtccctttccactgggtctcactttatccacatcttggcaaggaagtgggtggtccagcggccaggttctccaacttaaatggcttgctcaatactcccaatacagagggggccctggcaggttcatctgcattttaacaacctccccaggtgatctagatggcccaatgatcactgtgagaaaccccagaggtctggagtatttagttttataacactggggagcagggaaatgggcagggatggtgggggaagaatagactttaaagacaccggaaacactcattcaggccggtaagagcaacaatccagatgtagccctccaattctcctcccagaaccagctgtgaagagggtcaggggtcaacccccagcccaggcccctcccctcaacccaagaagtcactacaactttaccaccatctaaattatttgtttaataacaaaaaaacagccccacagaactattgtaaaacaatattttcagtcggtgatcattgtaatatacaatacaaagcaatttcctcagaaatctgagaagcaccaaacgtgaccattttttaaaatgtctgcttttcaaaaaatagaaacacacgagtggaatcccaccccctaaagtctctggtgactagtaggtgtgcagagaggagcgccctctcctcgccagtgcctcagcctcagccccaggctggatgcagttaagggcgcagtggccgccgatcggtcttgttctccctcagatccggcgaggcgcgttgggggagacccacagagcacgtaattcctcttgccccctggatggctggggtccgccggtccctgggggaggcgcttcagcgacacaagatgcgatcgtccgcaggaacgcatgccgcctgtgaaaacgagaagaaatgagaccggcgggttggaagggacgccgctccgagcgcagcgaacgcccccttccccaggaagcacgacgggggagcgctttttccaggctccttaggcacccccgcatagccaggtacccgcaaggatgggacggaagtggtgcaagcgcccacgccctctctggcctccgtttccccgtcggtataaggatgatctagtggtcggatctggatctcacctcggccgtcagggcgctgatctcgccgttgagggtgctgagcggagcccggaccggcagccctcggcccccgggggttccaacttcggattccgagttcagctccaactgaaggtccctgatgtagtcgatgacgtgctggagaatctccaccttgctcaccttgcggttctggggcagggtgggcaccagctccttgaggcgtgagtaacagccgttcatgtcgtagagcagcacgtttacctgctgctcgtccagcagggcaggcaggcgcgccccggcgcccccggcgcagcgcgagatggccacgctctgctcagacagacagcgcaccacctcgcccgcaccgctcgctgtcttgccggccttcagcgcgcagctggggcccgcggcggcggtggcggtgctgccactggcgactttcatgattcttggcgactggctgaaacagaatgggcaaagcgaaaaaaatgaggtggaagcccgaagcagatacggaaaatggaacagttaagaacgtggaatgagagtgcggagccacagcttgtcttttataaacacgccacggcccccggaggggcgggctcagaacgttcaaaagcagccaatgggcggcatgggggcgtga

SEQ ID NO: 1888180 - DNA, 4001 bp, Homo sapiens
actcccagagtgcttaaaagctggctgactcctaactccgtaaggaacttggtaggatccagcctcaaactctttcctgcacagttccatcagcaacaaaaagatttcagtgtaaatagaaaccactcagtcaacagagccctgtgtggctggatcagcccctcaaggcaaagcaggcagaggccaggccttctccctgcaccccactttgcaggacagctcgggggagctgtgcaggcattccaccaagcagatgctgggcctgaactgctgagacgcagaggggaaggcttaaggtgaccctgattctgatttttcctcatgctcttttcctttccttgtctttcctgaaaatttctaagctgtagaccagcagttgttgaccagtggcaatattgccccccagggcaaatttggcaaggtctggagacatttttggttgtcacaacttgggccgcactactggtgtcacgtgggtggaggtcagggatgctgctgaacatcctgcagtgcccaggacagcgcccctgccaagtcattatctgggccaaactgtcaataatgctgaggctaaaaatgtggtatagaccaggggtcttcaatcccggaccacagaccggtactaggcgcacagcagtaagtgggtggcgggcgagagagcaaagcttcatctgtgttgacagccactccccatcacttgcattaccgcctgagcgctgcctcctgtcagatgagcctgccattacattctcacaggagcatgaaccctactgtaaactgcgcttgccagggatctaggttgtgcacgccttaggagagtctaatgcctgatcatccgttactgtctcccgtcaacccccagatgggactacctagttgcaggaaaacaagctcagggctcccagtgattctacatgatggtgagttgtataattattttattgtatattacaatgtaataatcataaaaataaggtacacaataaatgtaatgtgcttgaatcatcctgaaaccatcagcccatctccccaacccttgaaaagaactgtcttccatgcaactggtccctggtgccaaaaaggttggggactgctggtgcagagtcttcttgcctagagcagactttaccttcatcatctctgatccctcaagcaacgctactcctcagctcactcctcaactcactgccacctgggtacgtgtgattcaaatcaccagaggccccccaatcactggactctcaggctgacctcgggctctgtgaccttcatagcactgcctctgctgacccttcccaagtctccttcccctggtctccagggcaccagactcccctggttctcctcctcctgctgtgacagctcctcctctgccacctttaagggatgtggctctcagttctctaagcctccccttctcccactggaggccatcctgggaggtcggagccaattcccaggacttcacctcagatctcattgctgacagctcccatgacaacatctgcagccaggatctggtttcttagtctagaccacgtggccacatacccaccaatctcttgcctttccacagaggtgagatcatggttcatccaagaaggcccatgggtacatgagactcaacgcttccacttccaaaatgaaacccgtcctccctgcccaacctcatccccacacagacctcctctcctgtgtgctaaatctcagctggccaagtgcaccacgtgaacaaaacaatctcgacactcaacctcttccccttccccatccacagcagctccagaaaaacagcagcagcccctgccccttaccgagcacttccggtgctaagcccacttgctctaattcattcagaccttacctttgtgggtaggcactgtcactgtccctgcttttcaggggatagatgatggagagtttccgcaggtgacactgccagtgagcagcagagctgcccgggtggcacgcagccctcctggtggctggccctgccacctgcgttcttaatgcctctctacaccactacgtcccatcaaacctcagtgacatctgccttctaaaccactcccgacccatccctgcatctcccttccccactgccacagccttacttaataccttttttgttatttttcgcaaaggcgtcatcaaacccttttaaaataaattctgcctcttgttatgcttccaactgtgagaatgcagttgtcacaccccggtcacatgtccagcccatcccagaaggatgatttgtgcgagactggaagaagcactctttgcctaagacagtctgcttccccctgccagaagttgtcttactaacgtgtaaactggtgatgtatccaatttgaatggcagccctcagaggaggtgcccttgtacagtgcacaatccctccaactggacaactcacctgttatattctcggattgttctaaggacaataaacaaatagacaaacatcaacacccctttgaagtaacctactgaaatcatgtctgttaaggaaaaggaaaattggttctagtatccaaaataagtgtcccaagttatttgagctaatttccttctaacaacacatttgtttcattaattattgcttaatctgatattttcctacttcagatcagcatcttttctaccacatacccactgaaaaagacaccgatagtacaccaaaggaagaatacacgtggtgaataaacaaaacattatgcgtctcagagcaaggaaatgcaaagtagaaagaagtaccaattccacaatgattcctttttaatttaaaaaaatggcatttctgggatgggggtgaaactatgactgacatgatggcaacttcaatttgtagatttctggaaggtaatttagcaatatgtatttaaagtcctcagaatgactatccaaaattccactgctgggaataaaccctaaataaactaaaaagatatacatatagattcatgtacaagattaattaatcctagaagtataagctgattcactgcagaactacttataataaaaatacaagtagccaatattaattggcttatgctgtacttggcactattataattacgtgacatgtattagctcatttaacctccatgacaactttatggggtaagaaattttaacggataggtaatatgcctcggatcaccaagcaagcagataacaaacccagaatttgaacccaagatatccagggccagagtatgcatgctttatcactgtgctgtttggcctcccttcttgataatagcaaaaagttttaaaaatttccttccttatgtaaaaaagtaattttaaaaaaaggattgagggtgggagataatctcattttctgtcaaaatgacctagaagagttaaaatgtagaatggcacattcatgcaatggcgaatggtatggccatcacaatccctgaagacacgctgagtaaaaagagcagggtataaaactgcacggtgggatctaccccccaaaaccaaagttgtatataataaagagatggtcacttttgcatgattctgggggacagagaaagagctcaaaaatccactgacctgtggtcttctcagtaaacacaactttggactcggatgtaaagttctgccccgtgaggatcatttgctggccgccatagaccaggcagctgtctgtgtcttgtctttcaaccatgggcagctcgtgagcagatcgctgggctgcaggcaaaagagagagaagtcactgtgataaggggagatgtctgttcaaaagaggaggtctgatttcatggtactgagatatgacatgctctgcccacctgtgtcacctgttgttatctaaaatgtggaaccatcacccctgacaatcaatgacgtacaaatgttatgccttgtgaaagtgctctaagtcatttgagctaatttccctctaacaacacatttcgttttcatgaatcaagggacagaggcctgttctccttacaggaagccagaggctgcctgttgtc

SEQ ID NO: 1888181 - DNA, 4001 bp, Homo sapiens
ctctgtggaagatgccgagcttgggggacagtcaggggtacaatctcaggtggggcctgcggcctgcccgttccaacagtccttaaaatactggaggataagcgcgaggggaaggaggtgaggggcctggaaggggggtgtctgcgggagtgggggaagtttggggagcagcctggagccagctggacctgggcaggtgctgccctgccagcctggagaggtggtgacctgtgtcgggttgggtgggtggggaggcagctcgtggtctggaacaggctgctgggtacctccagggaaaacccactttatttctattcagaagcatccaaacaggtacagttaagccatcccccacgccaagcaagggcctccttctccaccctgggcggtggtcggggaatcagggctggtcagtgctggatggacaccagctctgccatcctcagcaggcccagaacacagtccagaacaggcagagaggggcagggagcccactctgcagcccacctggccggccatggcacctagagggagaggaggggtgggtgagtcaatggcaaccgacggggcccacctagccaggggcctcagatcccagagttccctgcccgaccactttgtcccctgccagatcttcagacacatcccgggggtaactacagaggctctggggagccccgaggcggtcacagcacctgtccctcggccagtatggggtatcccacccacttctctaagaacaggttcacacacccccttcccgtgcaggtgttcccaccatgccttggccccgggttgaagccaggccagtgtctcgcttgtgtaagcccaacctggcccaccctgtttccccaaacgcctccaaagccggctttccttgaccactgaggaaaatcaaggctgagaggagccagcaggcgtcagttaatgcaggcaggcagagctatggtggccgccagggcacggtgcccgaaggaccaggccccaacctaagcgtcaagggaggtagtaagattgatgggcgctatcagcgggacctgggagccgggtaaaaacaagctgacgctgccacccgggaagggcctgcatgggttcaggagggccgggcacagccggctcagggccccctccgcaggagggctggctgcgcgtggtgctggggcgctcacctggcctaggacaggaaggtgcgcacgcggctgcggacgggggctctgcagatggggcacagctgcaggccgggggcacactcagcacagaccaggtggccgcacggcacaaagacgatggacacggcgcggtccaggcacaccttgcacgtcctctcctcctgcagccgccgcagctgcgcctccacatccctggctcctgggggctcaagaacccaccacgccctctgggcctcggctggactgacccctcctaggaggacaggcctgcgaaatgtccccacaccctggcccccaccctctatgggccatggaaggtcggggtccctcagccctcccctgccccagccctcacccagggggtcccgggcctgcacctggctcctgggcactttcagactggacctctctcctgggtgtgggcagctcagggtacccagaggcagggactgtggacagttaggatagacttgaggcctaactcccaaggagaaagctgggccggcccagatacaggtctgcagcctgtggggtccagttctggccgggagtggaggggctgcagagtatccccgctcccgacacttcttcccacccctcccacagcataacaggatccagaggcttcctggaggcgccaccagagagcctgtcccttgtccaatgccctctgcacatcctgcccatctggcagtagctgcagatgctgtgtgctgggcactgttgggggtggtatggcgacaggcaatgggctgtgcccaaggggtaagctgggagagaagcagaatggggcctggcactgggggaggcccctgccgccccgcccccaccctcacatggcacagccccctgaagccaacccaggcagcagcgtcacaccctgtcacgtgcccgtcactctccctgctgtctgggagggtggggacacccagtggccttggccaagcacaggctgcaggcgcacaaggagtcagcaggggtggtgtcagctctcaccggagggggccacaggggctgcgtcttccggttcttcccacgggtcctggaaggagccagagaccatcaggccttggggaaataggaggggcaggaccccactgccacccggagccccgaggagaggtggcgctcacccaggagcccagcagctgggagtgagtctcctgcacactgtggacaaagtctcttccttttgaccggagcaggaactgacagctgcagatgccccagagatgtaggttggggttcagggcccccactgtctgcttcaagcccttggatccccgggggtcagggttgggccccctcctcccgccaccctgcagtgcccgtgggcatgggcgaggagggctgctgtggagacgcctccatggggcttcagggtagtcccatgggagaggcatttctgcccccagcagcccttccgaaaaggggccctcacaggaaaagtgggtacctgccggccagaagcacctcccacagaagggcctccccagtgccctgtggggccagggaggcaaagcaggcctggtgttgggtcgacagagccgttgggggcccaccccctacccatgatcagacccggggccccgcaggggcagccggtacctggggaaccacttggcatgctccgtccaggggtcgtccccgcgcttccagctctgcaggcccccatagcagaagaagcacctcaccttgtcctgatggcctggggtgcggagagatgctggccccagccaagtcccacccagtccccgggcccccggtgtgtccttccaaggctatgagagcttcagctggaggggagctcccaggtggcaagaaggaggagggggtgggcagggggcttggtgggggatgtcacttgtacctcattagcatcaaaggtgaaaaggggacaagggtgactggggtgccggccaggatgggcgagaatgttcaggaaaggactgagctggcatttgcattgttcccagagtgagcagtgggggccccccagggcttggtacatctatagccctggggcttcaggagccagaagggcccctccccaggtctctgcttccccaagatggattcccagtgagaagaagaagggaggctgccctagaaggccagtctggggccaggcttgcttttaggaactcatgcctccctttgggggtgggggacccgtcatctctctacctcctggcgaccccgtcccctcatcggcatccatgcgatacgtcacctgccactgacatcacaggtttgggctgcatcgggcactggacctctaccagccccaaagaccccggctctgcacctgccatgcctcttgcctggcctttgcctcctgagccttggacttccagggaggtgggtgagctgggcctgccccttcacgccacggcttctgactgtcccagccactgtccccccgaccagctgtcttaagttggtccagccttaccaggatggtgccccgccagagcccactgctgacaatgaccatggctgtgccagtatttgtaaagccctcggtgggccctgctgccctgtccttcagccaggaagtggcagagctgggacctgaactcaggtctgaccacatggtctgcagctgtagggcagaggagcaggcccgggccaagactaggataggtactccggggacttgattcagttggggaagaccagacagtagctgcaggttggggcctggagaaattccccacaggctgagcatccaggaccttctggctgaccactgcctgccttggtcaccctgatcctgttctttaaacatctcctctccctgtgcagaacagcagcggggaaggtgagggc

SEQ ID NO: 1888182 - DNA, 4001 bp, Homo sapiens
ttcaatctcatcctctttgtctgtttggtttccttataaatgagcaggttgactgcaaggaaagtgaccatacagatactctccaaacagagagagttttgcattaaagggggatggtattatactagggggataggttcaaaccaggactcccctaggtccccagcttcccaagtatggccagacatttggtcaccctggccatatggtggacacctctgcctcgctaaaggtgttccccctgcttgaaatgctctcctgcctacatctgcttagtaaaccctgtgctcttcaagtattggctcctggagggacacctgctgtgcctcatgatctgtgatcatcatttactgagcacttactatgtgccaggcactatccccagggcttgccattgaacaaactccaatgccatgctgtttcccactcagtttccttggggaaacacctctctctgtgggacaagaccatggggtggaggctgggcatggtggctcatgcctgtaatcctagcactgtgggagacaggcgggtggattgtttgaggtcaggagtttgagaccagcctggccaacatgatgaaaccctgtctctactaaaatacacaaattagctgggcgtggtggcagctgcctgtaatcccagctactcgggaggctgaggcaggagaactgcttgaacccagcaagtggaggttgtagtgagccgagatcgcgccactgtgctccagcctgcatgacagagcaagactctgtctcaaaaaaaacaaaaaaacaaaaaaacaaaagactacggggtggggacaatgaaaaccaatcagagggacccaaggtccccctggccacagtgattgcttcaaggatgaacatgtggtctaaggtgggccaatgggaaccagcccggggacgttggctggcacttttggaagaggtgctgtctcttccctggggctgctgaatggtggattaagccgggagctgctgaggaaagcagggctgcgagctggagagggggatgccatgagcatgcgatctgatcccctggatccagtcaggactgaagctgagccatccctgactgtgctgggccgaataacgaacccccaaagatgcgcacattcttatctcggaacctgcaaatctattactttaaatggcaatcaggactttagttcagttagagatcttgaggtgggaagtttttccttggctgtcggggtgggccctaaatggaatcacatgggtccctgtaagagagacagtgatctgatgacagaaaggagagggtgactggagtcatgtgctttgaagatggaagaagagaccacagtcaacatacacaagtggccactgaaagaaaaactaaaacaaacaaaaaaccaaagggccaggtgtggtggcttacacctgtaatctcagcattttgggaggctgaggcgggtggatcacttgaggccaggagtttgagaccagcctggccaacatggagaaaccccacctctactaaaaatacaaaaaattagctgggcatggtggtgcacatctgtggtcccagctacttgggaggctgaggcacgagaatagcttgaacctgggaggcaggaggctgcagtgagctgagatcacaccactgcacgccagcctgggcgacagagcgagactctgtctcaaaaaaaaaaaaaaaaaaagtaaaaaaaccgattctcctctcagagcctgacctccagaactgtaagaggacacgtgtgtgttgttcgaagccagtaactgggggaaatttgttacagcagccctggcgaacaaatacacccacttttcagattaagtgagtggagctgggtttctggcactttgcagccaagagtcgtaagggatgccatgtcccatgtggagcctacacgatgcacacctgccaaccccgcctgcatcatgaaatgccctcgtgacacgctgatggggcaaacatatcatgagtgcacttcatgatgctggcggagtgacatgataatatgttgatggggcaaaaaatgtgcgggggtgccagcccctgcggtactggttcagggtgcaggctctggaatctgactgcctgggcctggatcctggatccaaccgcttcccagtgtgtgaccttgagtgaggggcatgaccctcatgaaccccagaggcctgactgataaatggacctgataactgaacccacctccagatgaggtgaggagaagcgagatgctgcatgagagcaccgagaacagtgtcgggtgcacagtggctactgcatacatgttagtttctaccactgtgttaagatcttacacattttcccacagtttagttgcaaggtgatttctcgaggcagctgcctccttacaaaggctgctggaggaggagaagcacgtgggactctgagcttgactactgagaaaaaattggttgtaacatctctggaaccttgatgggagtagagaaattggaagaaagggtatttgcaacattttgaacagatctctttttagacaattggacaagcaaaaagcttttttttttttttttttttttttttttttttttttttagacagtcttgctctgtcacccaagctggagtgcagtggcacaatctcagttcactgccaccacctcccaggtttaggtgattctcaagcctcagcctctcgagtagttgggactacaggtgtgtgccaccatgcctagctaatttttgtattttgagtagagatgaggttttgctatgttggccaggctggtctcaaactcctggcctcaagagatcctctagtcttggcctcccgaagtgctaagattgcaggcatgagccaccgtgcctggccaaaaggcttgaatttatctttgagaatataagctttgcagggggatggtgggaagcccctgcctcattcattttttttctttttttgaaaaatagagatagggtctcaatatgttgcccaggctggtcttgaatttctgggctcaagtgatcctcccgctgtggcctcccaaagtggtagaattacaggcctcctcattaatttttaaaagatacgtaaggtagtcttgttgttatggtgatgtttagggaggcaagagaggggtcagtggcatctggggcagcctgggttgccctgtggggagctgggctggaatctgagagaggggttggcaagggggtagtgtggctgctggtccctctccagccccttgaaagggcctcagattagaaagggttttgatgaaaggtgaggcttgtttccagagtccttgacacacatgggcccaggcacagcaactttgtggcaggtgacaaagtgcaactgccgttctcgcctctgcataggaccttgcacctctgtgacccacgggcagcaccctgggtttggacagtggtgtgctcttaaggcctggagaccaacggcagcagggaagtacccccaggtggcttcctaggggtcagctctgggcaaatgggagtaagcagatggccaagaacacagtggatgctaaagggtgaccctgaatgagaaactcactgggaagtgggggagtggaaggacactgagtgaccactcttgagccagcagacatctggttacacctaagcttttactgctcagtatttcgaatttcctttctttccatttacccaggactctgattaatgcttggtggtctcaggtataatctaccccctctccccaagaaggagtgatcttttttgcagtagtcaagcacgatgataccctccacattgaaagaatctagagccatgttgtctaatatggtagcaattagttgcctgtggctagttatagttatattgaaattcagtaaagttaaataacattaaaggttcagttctttagtcctacttcaagtgctcaagagctacatgtagccagtggttattgcagtgaacgctgcagatattttatcattgcagaaatctctactggacagcgctgctctagaggggtgagggagc

SEQ ID NO: 1888183 - DNA, 4001 bp, Homo sapiens
gagatctctggatcatggtgtctatctctaaactgctctgttgagccccaagctcttcaaagtgtggattagttccaatttcttgcagtgccccagtgagctatagaatagctgagaggccaggggtgagtactagttattggtctctgttaaattgtcaacagcttgaacctcagcttcttttaccccaattctggtgccatttgctactacagttatagtcatgacctctttcttcattcattcctttcaaatcatcataatatcctatagatttccttctaattgcaaatatttgcagaggaatagacccacaattcctctatttgcaatagaatgccccacttttgacttttgcccccaaagaaagggagaatcacaaggtacaaaaattaggacctggaagggcttggggaaagggattaatggggcccatctttagagtccaggaatagaaaggagattgtgggttgtggacttagggaagactctcccagggcaggtaggtcttagctttgaactgaaatacttgggggtaggggaggaaataggaagtcaacataatgatgcttattcttctctaacagtagaaagtggggcatcctggtgctctggcctcctgatcgagagacaccaaggaagaaaaaagctgaatctttgaacgccattctgaaatccccacccttcttaccatgaaagaagtcactcccagaacttacttgtgaattgggtcccagctctctgatccagtaccttcagtttaatgcatggtcttcatcctttaccaaaacttacctttcactcattcttcctgtacacaaataacccatgttaggttaaccccagggtaaactatgttgttaatgagaagctctacaacttgctcaagaccacacaatgaatcagtgcagaacgaacatacaaacctctttcttgttcaccacatacaccattgatacccttgatatggacacaaccatagtcaatgggggcttggcatctgaactacaaggatggtgaatgaccaatgggtgcagggttctaccaaactctgttcttgatcaaaaaatatccatgccctgcttccctgctcagaactcagaggaaggcagcagctgaggacaaaacctgatgccaccaccctggaaccatgcaaggcagatgagggtggcaggtttcctggcagttccctgggctttctgagttctgaacattactccagcctgttggtgaggcccttctcttacttgttctgtgttccagagtatatcttggaacctccaccctgcatatcagcacctgaaaactgtactcacctgtgtacaatgcaggaagattgcgagaaaggatttcagtgctgttcctccttctgtgggatagtctgttcatcagaaacatttcaaaagcgcaacaggtaagagatatctcatatccaggtctgatcctagagctgctggtgggagcccagcagaagagtcccttaccagcaactgtgctggatctctccttttttttttttttccttggtggccatgttgccaacatgccccttctcttgaccaaggataatttccataaaagtcctgattagaaaagccctcctcccctcccaatcaccacatcccatcaccatatccgtgaatttctgactctgcctctctgaacacacccacaaatgcctttatccacagaccttcccccgacccagaatccacccttatcccagggacactgtacctgcaggtgtaaccaaaatcccaaagcaaaatttgtcctacacttttgcttgccctcctttcacaagacaccatcctttggccaccagtgttcttgggctctggagatccagcccaaaggaagttttgattaattgtccagacattaacactagccgcaagcctgctaaatggagtgtgctcccagggcagagaaaggacatagggtgctgatgagacatatggtttctaatcccatcttgcaactatgtctttctatgaccttgagtaagacaattccctcttttttactttctttttctcatgagtaaaataagtactcttgttttttcctgctttgcaaggcccatatgaaatttcaaaagactcacagtggaagactcaaccaatgagccctttgagggaagcctggcagtcttgttccctgctgtattccctaccatgagcagaatacccagcatgagataatgtgcagagtgattaagcatgggctcaaagccaaacacctgggctcaaatcctggcttcttagctaagtgaccttaagtgatcttagacaagctaattaacctctctctgggcatcaacttcctcatccttaagactggaacaataatagtgaggttaaaatagacaatccatgtaagctttaaaacattacttgccaacataattgctgtgaattttggggattaggcaaccacttctctttgaagagactagcccttgcaattaaattccacatctttcaatgctctacattggaatgcagaagcataaatataactctttggtgtcattgagttttttgaggttctgccttccctatggcaagagaaatgagcttcatggtctaatattaatggtggaagtaattgaaagaaaaatatatatctctaaaagtaaaacttcactagttaatatttgaaaatatttttcttctacagaatcaaacacaagggctcagaagtcatcatgcctgccaactgaggcatatttcctagatcattttgtaagtacagggatttggtctcgccttcctcatgtgagattcccagggatgctcactttcttcctgtagcctcaccaggggcactacattcccacaagctcagaatggcctctcattacctgattgcctcctcctccatcattcccctccaagggctatctttgcactccctgggggaggcacggtgcagtccagcatgaattctgcaacacagagcaatgtaaggaaccaagtcatggcccagggggaacccagggcactcagatctgaggctttgtcaaggaacaagctcttctagcctccgggttgacagcaccctgggcagggactcaagctgagcccttcacgctctgagactttggtctgctcactgtacctctctgagacagtcacctccctcatgtgaaatatgaagaaaacatccatgccttggggtattgggaggacaacacaaggccatgtagatggaagaacttggtctctgcaaaggtagaaactgccagcaactcacttacaaggtcactcattcaggttccagttttttctctgaaaaaagagggagtgggccgggtatggtgactcacacctgtaaccccagcactttcggaggccaaggtggacggatcacgaggtcaggagttcaagaccagcctgaccaacagagtgaaaccctgtctctactaaaaatacaaaaattagttgggtgtgatggtgcacacctggaatcccagctactcaggaggctgaagcaggagaattgcttgaacccaggaggcagaggttgcagtgagccaagagtgcaccattgcactccagcctgggcgacagagtgagactccgtctcaaaaaaaaaaaaagagggagtgggaatcatctttattattttactgatgcttcaagaatggtgaacaaaatggagtcctgtggaattccaccaccaaaaaaatgatagtattcataagttggtggatttcgtttcagagtatttgaaagaaaaagttagaagtttagggtcttctaatgggccttctgatgtctccagatgttccaaattagaatggtggtctttcagcttagtccttttattaaccctgtacaaaggagcgtgataaatagtagcaggtggaggccagtggagcagtttagacgcatgagcacttgcccaggctccggtgagcccaccatgctgcggatgagctcccactcatgcttcaaggtttctattaaattaaacactccatagaaacttcacca

SEQ ID NO: 1888184 - DNA, 4001 bp, Homo sapiens
tggctcatgcctataatcccagcactttgggaggccgaggcggatcacctgaggtcaggggttccagaccagcctggccaatatggtgaaaccctgtctctactaaaaatacaaaattagccaggtgtggtggcacatgcctgtaatcccagctacttgggaggctgaggcaggagaatcactcacacccaggaggtggaggttgcagtgagccgagatactgccattgcactccagcctgggcaacaagagcgaaattccatctaaaaaaaaaaaaaaaagaagggaccagggaacaaacacacccatcctagtgggcagtgtgacttgtgcaggtaggtcagggagtgaggagcgagactcatagggctgaagggttcattatccaatgtcctcattttatagatgggaaaactagagcccagaagagacagaaatgtccctaaattacacaagtgaaaatgactctggatgtctaataaaagacatttataacaactgaccacacgcaggaccaggccacacgcagtggaggtgggtagccatccactcaggagggctgccaacccctctcccatctgcctgtcacagacctgaactttcactgtgagagagctgttctctcaaacacagtgccctctggatgacacctatgaggaatcatagtgcctaaaatcttaggcttttgggataatggaatcactgactaatacaaccacagaaatgttggaaccttagactgtagttctcaatctttttcttgcctccaactgttcacacatgcatcaggttcccattcataatctttcccagtccacaaaatggaagttgaagtggatgagacaggcttaaccccattgaaaactgggtttgggagaggagggagtatttgcagcttaaaaagcccctcttgcccttggagaaccactgatatctagatgttagaattgcagcgttcagagcaggccttggggaccacccactcctgcatcgggatcagcaagcccagattttccaagacagctcatgagcccagactaaggtcccataaggatgagacatagaagatatttccaagggagggggcagagaaaacagggggccaggagcagatacaggggaaagagagtctaccaaagcctcccctcccctccttctcagtgggccctggagcaagctgggtcctacgttcctgcttctggggtgtgctggggtgatgggggtgaggggtgtttgtaccgaactagcaggactagaccaaggtttggctggtacggcacaactgtgggctagaagggaaggtctgggactagtcgcagagctgggaaaggttgagtttagaggagcaggaaatgaagagattcgaaaatgaactcgttacttttttattttttttgagagagtctcgctgtcttgcccagtctggagtgcagtggcatgatctcagctcactgcaaccgcctcctcttgggttcaagcaattctcctgcctcagccttccgagtagctaggactacaggcatgcaccaccacgcccagctaatttttttgtatttttagtagagacggggttttaccatgttggtcaggatggtctcgaactcttgacctcaaatgatttgcctgcctcggcctcccaaagtgctgggattacaggcctgattcactgcgcctggcctcaagttactttaaagcagttaaaagatttttgcttcccttgcttgggctgaaaacaattttaaatgtccctggtatctggagagcataaaataatagacagtgctgaagtgtggtccaaatagcagaagctctgggacttcagatcttccaaggatcagttgtggggccctaggcaagttgcttaaccattgtgggcctcagttccttcatccacaaaaagggaggaattgtaataggttcaatgggctgggctcatttcattttcacaacattttcccatatagggttgtcatgaaaatgaaatgaacccaacctactgaagtgtggaaaaagcacagcccagtgactgatacctgctggtagcaggaagcctggcaagaccttaataaatgttgtgctctggtcttctcctcctttgtccaggatgggtctggggtcttgttcccattttctagaatgtgaagactttggagatcacgtgatacccacgaatgaatactaagggaactggggcatttgtccctgggaccggaagctcaggcatcgggctcctctggctgtcccttttgtaaagttgggatagtgagtactcagatgtttgcaatatcattctctatgcttgtcctaacgttcgaaatattatattaaacacacacacacacacacacacacacacacacacaacgtggctgctttgtggtggcgcagacaggcaggcaggggtggtggttgctgggagcctgaggagccaagagtgggagcttatctctctgaatctttctcaagaccaagcccagccgctccctatggtcagatttccaggccctccctcttctcagccattagccagtcaccctggggcctgccactgagtcataaagtgtggctacagttgtaaatgactgtcggggagctgtgggtgcaggtggggcagtggtggtggggcggggagggccgaggctcaccttccttcttcatgccagcccggaagcatttcttgagcctgcagtagcggcactggttcctcttgtctttgtccaccacgcactgccggctaaatctggggagggctttggatggttggatggagaagacacaacttcctcctcttaggacagaactagggccctggctatccagttgaccccccaacctcagtgctctcatctcttcatcccgggagttctctcttgaacccaccaggagctggaaaggtgctatgaactctctaagagcccagtcctgtcctgctaaacatgggaaaactgaggctcagagaggcaacatgtggtcctgggtcgctctgctggttggtgttagagctgagttgggaaccttgacctctggagtaccagagccctgctatttccaccacatcctataaaagctcagaacccatagcaggctcctggttatggctcagagttaatactcggttcacataagcctctctctggagggggataggaagtagaggcagtgccacaccgtggtgatgggtggggccctgaatgttaaccctggctctgccagtgattcaagctggttgaccttgggcaaatgcctagccctccaagccacagcttcctcctctataaaatgggaataacaacagtaaccatctcacaggggtgttgacaggtgaaatgaagtcatgcgccgatggggcacagtctttgtacatgacaagtgctcgcaattgacagctgctatgattttattattgtcattacccagaacaggagatgctttcgaaagagggctctccaaggccttgggaagactttggggttggtggaagcccctggggtaggtggaacggcctggggtcaatctcctatttgtcccaaaaacagcaccagactggaagacgggctcatctactgaggcttcaggagaggccccatggaatgggaaaaacaacaatgggctcaaggggatgggtaaatacacacaaagacttagtattgtgcctggcatatgataagagctcaataaacggcagccagtagcttgatgatcagtaaatgtggttcctagaatagatgctcttcttggattcacaaagtcttttacaaaaccagaagagccttgaaggccctgaagggcagctgtctctgggacctacccactcagggagaagacagaccttggggccatgagcccaagtgtgcccatttcccagctgaagaaattgaggctcctcacctgcaggagtacatgtggttcttccgcacgctcctccggaagaagcccttgcagccgtcacagctcgaggcaccgtagtgtttgcccgtggcccggtccccgcagatggcaca

SEQ ID NO: 1888185 - DNA, 4001 bp, Homo sapiens
aagtaagaaattatcagggcttggcaagaatggtgtggtgaaaactcttccattggagtgtgcgttggttcaactgccttagagattcagttggcaaactccaatggaggtgaagatgtgtgtatcctacgtcctgcccagaagacaaacacaggaatcttcatcacagcattgctggcaactgcatctaccgatccacatactgcttacatcaaggagatctcacaatgctcactcacagatgccactagcaacaatacggcttcaaccagctgactactaggcactagagcaagcactttacataaataatcccatttcatctttattcccattttacaggtgagaaaatggaggctcagagaaggataaatcacttcctcaagatcaaacacttgggaagaggcaaagttctcattggcatctaggactacagggggaacgggggagagagaaaggagaaggggaaatggcagagcaaacaaaatgccagcatccacaagcctcagagtgctctcttctgtaaaaagctcaacaccgagctcaccatgtgacccagcaattccacgcctaggtgtctacccaggagaaataaaaacatgtatccacactgcaacttgtacctgaatgtccacagcagcattatttataataacccaaaactggaaacaacccgtgtccagcaactgatgaacagatgaactacatgtggtctctccatgcagtggaatagcatttgaccataacaaggaatgaaacacagatctatgctgcgtggcagtatcttgaaaacactacactcagtgagagaagtcaatcacaaaaggccacatactgtatgactccatttatgtgaaatgtccggaacagacatattcatagacagaaagtagatgagtggcttccaagggctgggggaagggagaatgaggtgagactactaataagtacagagtttcttttgggggagacaaaatgttccaaaattagattgtgaggatgattgcacaactttttcaatacaccaaaacccattgaattgtatactttaaaagaatgaattttatgatgcgtgaattagatctcaataaagatgattttaaaatgttttctgaggggctgggtgcagtggctcatgcctgtaatcccagcactttgggagggtgagctgggtggatcacctgaggccagaagttcaagaccagcctggccaacatggtgaaaccctgtctctactaaaaatacaaaaattagccaggtgtggtggtgcacgtctggattcccagctactcgggaggctcaggtacgagtattgcttgaaccccggagatggaggttacagtgagacgagatcacgccactgcactccagcctgggggacagagcaacactccatctcaataaataaataaataaatgttttctgaggatccctggttttcagagtgttcagggagttggtgggggtgggggacgtgtcatgaaaatataagtttagtgaatgcaggctaagcaagtccagcaacagttttgatacaggtcttctcagagactttaatttgtggatataactagtgatactcccaaaaggagtatgtactaataccagataatgcttattgagtattcgcagtgttctagtcatctattagcttatttatatgtatattaactaatttactcctcacattagccctctgagatggaccctattattccactttagaaatggaaaaactggggcacagagaggttgagaatcctgcccaagatcacacagctaacaagaggcaaagccaagatctgaacttaaatagccttgctctgggattcacgctagactgcttatcttggtacagtgtacaacatttccaaaacaggtttgaccatagcttacttgaataggaacaatctcaaaggatctgccttctctccatccttgaggtctgcctcctggatctagaagcatctctcactgagacaagtgcaacatcttccccatctccttacctccactctccctccccacactgcactctccttttttaacacacacgacatccttcccttgcttcagaccctctgatggcctcccaccactcttagaccagcgtttctcaacctcagcactatcaatatctgggactgatgagttctctgtggtaggggctgtcctgtgctttgcaggacataggcagcatccctggccccttcccactagatgccaggagcaactgcccccaaatgggtggcaaccaaaaatgtctcccaacattgccaaatgtcctttgaggggcaaaatcgcccccactggaatcactgccttagaacagagtcctgtttcctcactgtggccgatagacgtccccgctcatctctccatcaacgttggcctgctctctgccctttaagttctcccagtgaatctctccgcagggcctttgcatagctcctcgctccctctgcctggagctcgtcccctcagatcttcttcatagctaaggctttagctccaaggccctcacctgagacaggtttcttctgccctcctctctcccaccttcattgcactttcctgcccagtcacccactttcctaccacacagattgtttttccctctaacacactgtgattgaacttaaattgtgtattttttttccttctttgtttttctttagacatggggtctccttctgtcacccaagctggaatgcagtgacttgatcatagctcactgcagcctcaacctcccgggctccagtgatcctcctgcctcagcctcccaagtagctaggactactggcatgagccacaatgtccagctaattttttaaaaaaatgttttgcagagatggggtctcaatgtgttgcccagcctggtctcaaactcctgggctcaagtgatcttcctgcctcagcctcccaaaacgatgggattacaggcatgagccactgttcctggactttttttttttttaatctgccttccccagcaatgtgtgtgcaggaacttggtgatgccaagcttggttgaatctccagtactaagaagggccctgggaaccatgaaggtgcttaaaccatttgttggatgaatcataagcctgccaatgtgtaaattgggcagcccttctggtgtgtgcctaggagtggaagagacagagatgtggaaaggaaaacaccttttggggtttcatcgccttgggtttgaacactggacatgccttctggtcctttgcaaaagtgcctctttctcccaaaaccagttgccaagaagtcttaaaaaatggaaaacaaacaataaaaaagaaaacgaagaagcgaagggagagaaggaaaattacttcagttttaaaagtctccttaaatcagagcaagtctctgtttaatgttgactgattttcaaataaagcagagatgaggttttggagctagctggaaaacacttgtgatggggtgtctctaggtcagggcctcaggattccaaccaagggggagggtggaggagagcaattagcagctcagcgagggtgtgaggaggaaagaaataaagagcagagaggatgagtcaggctgggctgtggcacaaagccaccctgcgtgctaacaagcagaaagcgaaccaggtcggggaacctcccctgcaaatccccagggcgactcagtgcagcagagggaagctgctttttctaaagccctcctcagctttctccatctgggtctgtagtctgtgaagggattttgcaggctgcagagattttgctcagcatgacttatcctcccgggcttggctgctacttcagtgaatgagaggctgagattgaggctagctctgaagttctcaacctggaagccccagccagaggagttctggaaggttacaatggaggttctaaatattttaaacctaggccgggcacggtggctcatgcctgtaatcctagcactttgggaggccaaggtgggcggatcacctgaggtcaggagttcaagaccagcc

SEQ ID NO: 1888186 - DNA, 4001 bp, Homo sapiens
cagcacatcatccagtcctcggggaggtgagggttggcatgtggcgggcaccggtgtgcagggcagccccatcctggggctggagcttccctagacccaggcaccacgcacaggcatcccctgctcagctcctgaacccggcccctcctgcctggccacgtccgctatcgcaccctcctgcatcagggccgagggcccaccctgcgctcctttttcttccagggtgttccaggatggtcaagttccagcactgagaacagctcaggtgtgggtgtggctattgtggaggccgtgtctggtgaacctggtgaacttggtggtgggacggtgctgatgcaggggagccacagagggttacgaccgacgcgggtctgacagcacaggcccaggcaggcgtggactcgggagccgagggtggtcggatggcagcgtgagcgccagtatcatttccagcatttccatctttaccactccagtcactctcttcaaaaagaaagaactagagcaaaaccaaagttaaatatctcaacgagaagggacacctcacgtcgctgacagctcggcacgtggctggtcccaggccccagagatactgcgtagtgaactggccgctggaacgcagtcacaggcctctgtgctgcagcccacctcccagcaagccacgcagagccccggccttgagtccaagaatgcccaggggagtgtgggacgggacggcccccacacaggctggacagcaagccgcccccacgcaccgaagactccccacgcgcaggcggcgcacacccgggtctccctagggtcctgcctcccgagacgctgtcctcacactgcagttgctgattcttgggtcaaatggaaggaggaggaacgacgagggcagagtgcaaacacgaagtcgcccgggggcgctggggacgggggcgcagtgggccctaccagttctggttgtcccagccatcatcagtgggcacggccggcggcactgccttcttggtgccctccccgccctccccgccgtcgctgttgctgttcctgttggtggaggccgagccccacacctcccagctgtccgagctcctcctctcggtggaggtgtccgcgcacgtccagctgtcgctgctcggggacttgcgggtcttggtgggctcagcacttccaaaggtctcccagaagctctggtctatgttgctgttttggaagtggtccagaccgctgttctgataactgtggccctccgaggggcttttaaagagacagaagggggactctaaatgactgttactcagtccaccactgggaattctgtgcccccgagagctctgcacctggacagtgaccgccttcccaggccagcgctcagggtccacagcagccccaccaggtgggatctgtttctcccgcttcagagcagaggaaactgctggggagctggagaaccagggcccactctttatcaaccaccccaactggaggacagttttacagaaaacttccttttctaccagctccaaactgctgcaataaaacagtggtttagtcaagtggggaggggcaggggcgcttggcctcaagccgggacacaggccctcccgagcgacgccctcagctacgctggccccagatctggccctgccctctgtcctcagctgcaatcacaccactgaaaaaccacatacacagagggagagaagggacatggcgtctgcagggaaaatttgggcccacctagtgggcagtgcatctgtgcccaccagggctggcctctcagtagacagcacaaggccaggcccgatgagatccccggtggttcccctgttggggtcagaggccgagaacagcagccagcttccagcagaagcgactggggtgccaagcactaagggcagagctggacatggggcccaggacaggtctctggggccctagccttcctgtcccctggcccccgacctgctccatccacccagagtctgggagacagaggaacagcagagcagcgccagctcctcctacgtgggggcatatgggtgagaccctccctcccaccctagcctggggagcccagctcctgcagggttccaaagagcacacagcagggcagagacaggcaggacaggcctctgcagctgcagagcactcggaaagcctccacagtgccccctccccagcaaagatgccagccacctcccggagaggctccacagtgccccctccccagcaaggatgccagccacctcccggagagcctccacagtgccccttccctccccagcaaggatgccagccacctcctggagagcctgtaggaggagtggccaaggcaggggagtgggatgcaaggcccaggaggggacacagcatacctgtccaaggggccctctgctttccccgaaaaaaaggtggtgacgtcccgccatcccttactaccgactccctggacctggaaggagacgggaagagaggttaggcaggccctgtcgcggcacaggcagcttcaggaggcccccacacgcaagccggcacgcgccgtcccgctgagaagacccaggcaaaatccagaaacaaggggtgcctcgcacacacgtacagacacagacgccccggccactctgcagcggtgccaggtgtgtgcgggacatggcagcgaggacagcctcgtgcacagacctcaagagctcccaccacatgcttgggggggaggagcgaggcctgctcttccctccccgtctgtccgcagagcgcctcatgccaggaaacaggacaaaatgcacgccccaaatggcccgcagagcagtgggactgatggcagcaaagacggcgctggcacttacttaccgaggaaaaggccagcagcagcaagataagagcagagggagaagtgacagttagtggctgaccgggccgcagtgggccaagttgtttccatatccctcgggctgtcaggctgggcagctctcctcccgtctcagaggacagcggccactgccaagctgggctgagggctgcacggggcacaccctgctctcacgcccagggccgtggaatatggagactggcttcgactgtgcccgcgtatctggcaggctccctaccttggacgccaactgagagaccccactggagacatcatcaaaaatctttccctccttcacctgcacggatgaagacagcggcattaatgggggcgggagagatgaaagcttaaagcttcaggagtgcaggaatcccccgggtgagggcatccgaaatatcaggggcatgtggatacccatcaggctgagccccagaaagttctacagtggccccaaagggattccagcatcaagaaaccatgtcactgtgaggcctggtgtctgcaaacgtggcccctgccggccactgctgacaaatagcaacgtgacctaaggacagcccacgctgccccaggtgggtcttccccacttgtcccagtcaggccccgaaggaggcagggagctggcggggctcttgaccccctaggatggcaggcatcattcccataccagagcctcctctgggcacagctccgcggccagctgtgggggtgaggcagaggaacggaggtgggctgggggtgctgggctctggggccagctgtaggggtgaggcagaggaacggaggtgggctgggggtgctgggctgggggcactgcaagggaggccctaggccaggggaagggaccagctggggggtccaagaggagcccaggccccgaggaggacgcctgtgctggagaggtggggtgtgaggcttggcctcgctgagtcccagctgctggacaaacaatccccctaacacccctgacacacccacgtcccctggagtgaagggctccaggcacaaccacccggagctgcccgttaccttctcctgcgcaggcttgaggacgttctcgttcaggctgtggcccagctcggacgcctgtaggaagggaagtcacgtgagccccacgacagctccaccacgggacacgggtcgg

SEQ ID NO: 1888187 - DNA, 4001 bp, Homo sapiens
ttgtcattcttgacagcagtcctctgtatggagtctatcgctggacctggaactcagggatcctaggcaggtcagctggaagggaagacacgcctctccataccaagcctgaggttcaccgcgaaagagaggccgccgctctgcccccagcccgccccaaccccgccccaacctgctcctccagcagagtccagtgttcgttctggctgaggagtggttccagcaaaacgggctcttccacgtccttcagctcccccagtggcgccagatctaggaaatgttgtgccttttgctgaaactctggggtttacaggagctcatctaacaggctggaggtgagtgcagacgagcttcccggctcctggagcggttgggaggcgcctggatggctggcatctgtgcttgacgcggaggcctccggaggtggaggtgccccgtctttgggttcccacgccgccctggcaacctggggctccagcaccaccacggactccggtgggacgtgggtggcacaagcacaccttgcccctgtgactcagcttgagggggcccaaactgaacacgcgcccagcaggccgtcgcgcagcagtttctggtcttcctgtcatttgttggggtgcggaggccaccagggagtctgaggatgggagagccccagttctggaggagccagggcagggaacacaaagccccacatgtccaggcaggttgggagagtccttcttcctgcgcagcctggctgggctggagcagggggatggcccttgctgcctggctcacgaaagccccctgtgggagagccccaggggcgcagggcatgtggggtgtgggaagcgcaattccccatgccctgttgtgggtgaactggatagaggagggaggagggtgacacccaccaggggtgccaattagtaaccacagtgacctcaaagaactcaaatgaaaggaagacttgcacgtctctcacttgaagtccagagctagaaatgatcaagcttagtgaagatgtagaattttcatagctagagagaaatcaacacttggcttcaaaacttcaaaggatgggctgactctctttgaggaccactgcagctggtgactttaagttacagccagtgctcattgaccactctgaaaatctcagggcccttaagaattatgcaaaatctattctttctgtgctctagaaatggaacatcactgtctgggtgacagcacaactgttaatagcatagtttactgaatattttaatcccactattgagacctactgctcagaaaaaaaaaaaagtgattcctttaaaaagattgttgcttggccaggcatagtggctcacacctgtaatccctgcactttgggaggccgaggatcacctgaggtcaggagttcaagaccagcctggccaaaatgatgaaacccaatctctaataaaaatacaaaaaaatagcggggcagggtggtaatacctgtaatttcagctactcgggaggctgaggcagaagaatggcttgaaccctggaggcggcggaggttgcagtgagccaagaccacaccactgcactccagcctgggcaacaaaagcgaaactacgtcaaaaaaaaaaaaaaaaaaaaaaggaaaggaaagaaaaagaaaaaggaaaaaaagattgctgcttattgacaattcacctagctacccagaagcttagatggagatgtacttggaaattaatgttattttcatggctgctaatacaatatttaccttcagcctgtggatcaaggagtggttttgactttcaagtgtttttattaattaataaatgcattttgtaaaggtatagctatcatagatagcgatgtctttgatgaatctggataaactgaattgaaaaccttttggaaaggattcaccattaatcctttcatgatatttgaacctcctcccgtgaatcacaaatgtccttaatagcaatccttaaatgccattaaggacatttgtgattgatgggaggaggttgaaatattaacattaacaggagtttggaagaagttgattccagccctcatggatgactttgagggctcaggatgtcagtggaggaagtccctgcagacgtggtagaaatcgcaagacaactagaattagaattagggccttaaggtgagatgaaattgctgtaaactcatgatgaaacttgaacaaatagggagttgcttcttgtggacgagcaaagaaaatattttcttgagatggaatctaatccaggtggagatgctataaacattgttgaaatgacaacaaaggatttagaatattccataaacctagttgataaagcagcagcagggtttgagagggtttactccaattttgaaagaagttctgctgttgataaaatgctgtcaaacagcatcacatgctacagggaaatcttttgtgaaaggaacaaacttcattgttttaagaaattgacacaggcacccaaccttcggcagcccccacactgattagccagcagtcatcaatatataggcaagaccctcaccagcaaaaagattatgacttggtgaggctcagatattcattagcattttttagcactgatgtattttaacttaaggtatgtacacagttttttagacgtgctattaattactaattaataattattaaatactcattagactacaatatagtttaagcataacttttataagcactgggaaacaaaatgtttatgcaactaacttgattgtaacatttgccttattgcagtagtctggaaccaaacccaccctatctctgaggtgtgcttgtaggtttttggttgtaacatttgccttattgcagtggtctggaaccaaacccacactatctctgaggtgtgcttgtaggtttttggttgtaacatttgctttattgcagttttctggaaccaaacccacaatacctctgagtatgcttgtaggtttttggtggttctttgtttggagatggggtttcgctctgtcacccaggccagagtgcagtggcatgatgatagctcactgcagcctcaaactgctgggtcaagtgatttttctaccacagcctactgagtggctgggactacaggcatgcagcactatgcttggctattttttttaatttttttttgtagagacgggatctcactatgtagcccagctggtcttgaactccgggactgaagcaatccagccacttcagcctccaaaagtgcagccattacaggcttgagccactgcacccagcttgtctgcagttcttaaaacaaaaacggccaggtgccatgtctgacgcctgtaatcccagcactttgggaggccaaggcaggtggatcacaaggtcaggagttcgagaccagcctggccaagatggtgaacccagtctctactaaaaatacaaaaattagcccggcgcagtggtgggcaactgtagtcccagctactcgggaggctgaggcaggataattgcttgaaccctggaggcggaggttgcagtaagccgagatcgtgccactgcactcccgccttgcgacagagcaagattccatcaaaaaaaaaaaaaaaagaacaaacgtaatttaaaagattaaaattaagatagatttttacaaatgtatatatctaccattacagtatcatacagaatggttttactgccgtgaagattctctgtgctctgtgtatcatctcttccttccccttggtccatggcaaccactgatctttctactgttcccatagtttcaccgtttccagaacgtcatataattggaatcgaacagtacgtagacttttcggattggcttcttcttttagcaatatgcatttaagtttcctccatgtatttttttgtggcttgatagatcatctcctgttagcggtgaataatatcccattgccattatacttttgtcaagactcagaaagtacaatgtgaagagtaaataagtatgaatgtgcactgtaaactttgagtgatactgaagggt

SEQ ID NO: 1888188 - DNA, 4001 bp, Homo sapiens
aagtataatggcaatgggatattattcaccgctaacaggagatgatctatcaagccacaaaaaaatacatggaggaaacttaaatgcatattgctaaaagaagaagccaatccgaaaagtctacgtactgttcgattccaattatatgacgttctggaaacggtgaaactatgggaacagtagaaagatcagtggttgccatggaccaaggggaaggaagagatgatacacagagcacagagaatcttcacggcagtaaaaccattctgtatgatactgtaatggtagatatatacatttgtaaaaatctatcttaattttaatcttttaaattacgtttgttcttttttttttttttttgatggaatcttgctctgtcgcaaggcgggagtgcagtggcacgatctcggcttactgcaacctccgcctccagggttcaagcaattatcctgcctcagcctcccgagtagctgggactacagttgcccaccactgcgccgggctaatttttgtatttttagtagagactgggttcaccatcttggccaggctggtctcgaactcctgaccttgtgatccacctgccttggcctcccaaagtgctgggattacaggcgtcagacatggcacctggccgtttttgttttaagaactgcagacaagctgggtgcagtggctcaagcctgtaatggctgcacttttggaggctgaagtggctggattgcttcagtcccggagttcaagaccagctgggctacatagtgagatcccgtctctacaaaaaaaaattaaaaaaaatagccaagcatagtgctgcatgcctgtagtcccagccactcagtaggctgtggtagaaaaatcacttgacccagcagtttgaggctgcagtgagctatcatcatgccactgcactctggcctgggtgacagagcgaaaccccatctccaaacaaagaaccaccaaaaacctacaagcatactcagaggtattgtgggtttggttccagaaaactgcaataaagcaaatgttacaaccaaaaacctacaagcacacctcagagatagtgtgggtttggttccagaccactgcaataaggcaaatgttacaaccaaaaacctacaagcacacctcagagatagggtgggtttggttccagactactgcaataaggcaaatgttacaatcaagttagttgcataaacattttgtttcccagtgcttataaaagttatgcttaaactatattgtagtctaatgagtatttaataattattaattagtaattaatagcacgtctaaaaaactgtgtacataccttaagttaaaatacatcagtgctaaaaaatgctaatgaatatctgagcctcaccaagtcataatctttttgctggtgagggtcttgcctatatattgatgactgctggctaatcagtgtgggggctgccgaaggttgggtgcctgtgtcaatttcttaaaacaatgaagtttgttcctttcacaaaagatttccctgtagcatgtgatgctgtttgacagcattttatcaacagcagaacttctttcaaaattggagtaaaccctctcaaaccctgctgctgctttatcaactaggtttatggaatattctaaatcctttgttgtcatttcaacaatgtttatagcatctccacctggattagattccatctcaagaaaatattttctttgctcgtccacaagaagcaactccctatttgttcaagtttcatcatgagtttacagcaatttcatctcaccttaaggccctaattctaattctagttgtcttgcgatttctaccacgtctgcagggacttcctccactgacatcctgagccctcaaagtcatccatgagggctggaatcaacttcttccaaactcctgttaatgttaatatttcaacctcctcccatcaatcacaaatgtccttaatggcatttaaggattgctattaaggacatttgtgattcacgggaggaggttcaaatatcatgaaaggattaatggtgaatcctttccaaaaggttttcaattcagtttatccagattcatcaaagacatcgctatctatgatagctatacctttacaaaatgcatttattaattaataaaaacacttgaaagtcaaaaccactccttgatccacaggctgaaggtaaatattgtattagcagccatgaaaataacattaatttccaagtacatctccatctaagcttctgggtagctaggtgaattgtcaataagcagcaatctttttttcctttttctttttctttcctttccttttttttttttttttttttttgacgtagtttcgcttttgttgcccaggctggagtgcagtggtgtggtcttggctcactgcaacctccgccgcctccagggttcaagccattcttctgcctcagcctcccgagtagctgaaattacaggtattaccaccctgccccgctatttttttgtatttttattagagattgggtttcatcattttggccaggctggtcttgaactcctgacctcaggtgatcctcggcctcccaaagtgcagggattacaggtgtgagccactatgcctggccaagcaacaatctttttaaaggaatcacttttttttttttctgagcagtaggtctcaatagtgggattaaaatattcagtaaactatgctattaacagttgtgctgtcacccagacagtgatgttccatttctagagcacagaaagaatagattttgcataattcttaagggccctgagattttcagagtggtcaatgagcactggctgtaacttaaagtcaccagctgcagtggtcctcaaagagagtcagcccatcctttgaagttttgaagccaagtgttgatttctctctagctatgaaaattctacatcttcactaagcttgatcatttctagctctggacttcaagtgagagacgtgcaagtcttcctttcatttgagttctttgaggtcactgtggttactaattggcacccctggtgggtgtcaccctcctccctcctctatccagttcacccacaacagggcatggggaattgcgcttcccacaccccacatgccctgcgcccctggggctctcccacagggggctttcgtgagccaggcagcaagggccatccccctgctccagcccagccaggctgcgcaggaagaaggactctcccaacctgcctggacatgtggggctttgtgttccctgccctggctcctccagaactggggctctcccatcctcagactccctggtggcctccgcaccccaacaaatgacaggaagaccagaaactgctgcgcgacggcctgctgggcgcgtgttcagtttgggccccctcaagctgagtcacaggggcaaggtgtgcttgtgccacccacgtcccaccggagtccgtggtggtgctggagccccaggttgccagggcggcgtgggaacccaaagacggggcacctccacctccggaggcctccgcgtcaagcacagatgccagccatccaggcgcctcccaaccgctccaggagccgggaagctcgtctgcactcacctccagcctgttagatgagctcctgtaaaccccagagtttcagcaaaaggcacaacatttcctagatctggcgccactgggggagctgaaggacgtggaagagcccgttttgctggaaccactcctcagccagaacgaacactggactctgctggaggagcaggttggggcggggttggggcgggctgggggcagagcggcggcctctctttcgcggtgaacctcaggcttggtatggagaggcgtgtcttcccttccagctgacctgcctaggatccctgagttccaggtccagcgatagactccatacagaggactgctgtcaagaatgacaataaagaattcctgagcatcccggggatcccagggccggtccaggtacccggaagtgggctgtctactgcgcatgcgcggg

SEQ ID NO: 1888189 - DNA, 4001 bp, Homo sapiens
aggtggcagcaggcagagtggtggctgccctggggggtgagaaactcgaggtgtcctcctcgtctcccacagtccccaacactccctgggcctcctggcttcttcatgtgaccgcctggcctttgagtgtctggttcttctaaggtagtgtttctctaccacagtgattttgcccccaggaggcatttgccaatgtccggagacatttcagtcgtcccaaatagtggggactgctactggcatctgggtggggggaggtcagggtcctgtattgtacagggcagccgccaacagagttacccagccccagtgtcaacagttctgcagctgagaaacccactgtagggaggcagaggtcttagtttgagttcccctgaaagcagagcgcgagtcaaggcttgggtgcagatagttttaggaaggtaacccagggagaggagaaagatgcatagagaaaggagagagctgaaggaagggtgcttcctgggctggttggctgtgggcctgtggggccccatccaccgggggcctttggagacctgcgctgggccatctccaggtgacccacagaggaacaggtggggcatttgccactgcttcctgcctgttggtgagggtgtctgttcctgcctggctgcttgccatgaggcccatctctagcccgcaggtctctagccctcggacaacggaggcaagtcaggggagagctgggtaaggggtcagccttggcacctgctgctcattccatgaactctgcaacctggcctgtgcctgccctggcaaaatcctaactcagatatcaacggttctttcatcttccaaccaagaaaacgtgattcaaaggagagaacattcctcatcggcctccagctttgcagagcagcgagggctagtgctcccgaggccttgctggggtcctttaaccacaaaacatggcctttgctgaccttgaatgcgagcagatagaggagagccaacctcacggattcagctggttggcacaaacaaaaggaaggctttgcaggggctccggctgaacaaatccagagctttctacttggaaattccaaaggtgctaagggagctgggcagcatcctgcctgtactgcccatgccagtgtgagctggagtccggcatatggggcacagccagcaggacgtcaccatccgcccatcacagcgccacaggcccttgcaccaaacagtgccaactgggacttcattgctgactcagtaacagggcctcctctagggctccacaagggctgaatgaagggaagccagcaccaggactggccagacttgcccgacagttcaactttttaccccagggtgtcccccgaaaacccagatcttctgaggtgggaaggatgtattggcaggagggcaatgcctggggccctgaaggaagatttaggtacatgaaggaagatttagggcctcggaggaagatttaggtccccaaaggaagatttagggcctccaagaagatttagggtcttgaaggaagatttagggccctgagggaagatttagggttctgaagaaagatttagggccccccaaaagatttagggtcctgaagggagattgagggtccagaaggaagattctctgggtggagatgctgacccccagggctggggcaggtgtcaggaatgtgttcaggtgtgagtccacatcgggtgtccacagtgaggcttccaagttcacagctggcagctggggctggaagcccacccctcaggaaaccacgccccctctgtccagcggcctacgatggtaatgaagacccatgggcttgtggattcaagcatccctcacttttcatgtgtcttgtgggcctttcctgcctgcccaggagaaaaggtggctctcaccatcaggctgctttagcttgtggatgtcccagaaacagttcagggttgctctgttcaaccacctttgtcttcagacacccaggataccaggagcttcaccgccgggctccccggggtctgtacagtgtgatgtcccttatccaagaagattataggcaaggggtgggcctgcccctggttgtgaatggtggtagctgtgcctctgggtgtggggatcacagtacacatggacttggggacccggtgagcctggccatgggcgacccaggaaagtgatttaaccaggctgggcctcactatgaaatgaaggcaataataataataatacctcccttataaggttgctgagaggattaaataaaataatgcacaagagtgctgagcacggacccggcatggactgaatcaattgtatccattagtgataaaatgatgcctttaagaagaatattgagacaggctggaatcgggcttcctgatggtcttagcccaacctcctgtctgacacttgaaagccttccctaaaaaccctttgcttgaatctttccaacaatgggcttttcactacctcacggggaaggcctatcatctacctacagtttcctctccctgcaccacttctttcctccctcattttctttctcccatatgtccttcctccttccttcctccttcttccttccttcctccttccccctccttcttctttcctccttccctccctccttcttccttccttcctcccttccttcccttcctccctttgttccttcccccttccctccctccttccttcctccttccctccctccttctttcttccttccctccctccttcttccttcctccttcccttcttccttcctttctccttccctccctccttctttcttccttccttcctcctttcttgttccctcttccttccttccctcctcccttccttcccttccttccttcccttcctcccttcctccttccctccctcacttcttcttccttccttccttgtttgcctctttcccataccttgtttcagacccaattccaggtgactgagtttctgtaaggatgattctgtccccatgtgggttccagtcatatccaaccctggaccacacagaccaaagctgcctcgccgtcagcagcacagctcttgagggctgcaaataagactgccccacgagctcccacactctgtgcggaggtcccctccagggattttccgaggctctgtccctttctggttgagggcgggctgcgagtggaacccccacctctctctgcgagctttctcttagctgacccttttccctcacatctcccctaggccccgatcacacgaatcagggtctggaaagagttccaatccattatctctccatcctaaaaggtgccaagagtggccctgcttcttgtggatgggtgactgttttgttaattatctcatctctatatttctccaagcccaagctgcaacctggatttaaaaacccccttcagcctcagaatggaaaggaaataaaatctagtaaaagccccaccacactgaggctcatggaacatttctcgtcccagcctctcctcggaaggcgcttggtcacccatataggtggacgcagcccatcactgtacagccatcctctagctcacatttgtgccatgtgctcacccatggcacaccctcagtcatgcatgtgaatacccttactcatgcgcagctgtgcatacacacacacttggcacgcccacctctgctcatgcacacgcatgcatgtacgcactggaacagacacgtggacgtgtaagcacaggtaacagccattcacagagcttgtatttggaatatccgattgaaagacccatggtttctctgctgaacaccatgggctgcagcagcctcggccaacacgttctggattgcctgcccgtgacagatggcagctggaaaccagcagggagagaaaccgcctctgctcctggataatgagctcagagcctctcagtgggagctgcactcacctctcggccactctataatccagcagaggacagagggcaagtggggacagttgttggaacctttggggaccctgtttcccagggcagatggatgtcagg

SEQ ID NO: 1888190 - DNA, 4001 bp, Homo sapiens
agggcggttccgtgagcatgcagggtcctaacctactgggtaaattcaatcctgcaggtgctttcacttcaccaatgtgagcagattgtaggtctagagctgggggagagaaataagggtgatttgaaaggacccaaaatgtcatttagataggggggtgggcgcagagaagctcagggagttatcccacaacatagtcattatggtgaataacaatgtattggatacttgaaaattgctaagagagtaggtaagtgttctcactagacacccacacacaaagatatatatgtaaagtaatgcccatgtcaatcaccttggtttgctcatcccacaatgttatgcatagatggaaatactttgtccactatcaatacatacaactgtatttgtctaaataaatacagtaatggtaaagagtccaggcttttctgacgttcagagagatctgggtttgaatcttgagcttacaatattcaagttgtgtaatcttgaacataacctctctgacctttcgttttttcccctgggatatggagacactgattcctgctgtatagcattgatgagaggaagaagtaagatgatgaaggaaagtgcttatcactttgctgatgggagtagggggaaacttactaaaagacagctactcttgcaattctaataatcatcaaaccagatttcttccaaagtatcagatgcttcctgggtgtgctgtgccctgctgaccttagaaaatatgaatatcatttcagattgctggtgacattgaagacaccacggtgcacagcacaggagcgccacacaatcttccagagtcatgcgtgggtctggctgaggcagccatacagaaggcaaacctccgctccagcacttctgcccaactcggccatgctggggcaggcagtgctgagacctcagagcagctgccatgacagcacctgaggagcacaggaggagtacctgggtgcgagtccagaggctgccccttaggccaggaccctctcgggcacgtttcctcattcgtgcagcagggagagctcaggggcccacatcacagggctgtcttaactagggtgctgggatgcatgtggagggctttgcactgtgttggtaaaagtacaagatcattcaaataagcactgccattgttgtaaaaatccttaaagttgctctgaagcctttcagaaatgctggcaaagcagcaagcccctaagcctctgaaattccttttctccattaaccagcttggaggggctgcaacatggatgatggaagagggagtgtcatgcagtcacagggccctttctcctgggcaggacggggagaatgccggggatgcctggctggccgtcacagcctgggatgctgcctctggaaaagatgcaagtcatgggcttcagatgctgagaacagctgactgtggcctcctttgaatcgctttggtcccaactccaacgtgagtgataagatgctctaaagctcttggcatccagggactctctcatcgacaaacaacggaacccccagctcaaagtgcctgaaacaccagggcagttatctgcctagtcctcctggaagtccagcaggtgggcacgcttcacatctgacatcatctgcccgtaccggctccacctcccacagggctgcatgtgcagcctccaccagcaagacactcagccacagcatctctgtgcctaaacaagcagcacagtcaaaagcagagagtgaacgtgaccttgtgccaaaactcaggcaccttcttgtctgatgaattctcactgctaacctttccttatcgctgtttgacctgcagagatcttttttgcattttctaaaccaaggccaccattggaactagcatggtcagcttccccggcagcacagagacctcaggcctggggaccaaacacacgacggagctgtgtcaggagagagagaaagggaagtggacgctggaaggcagccagcagcgtccggcaacctccttccacattctcatgacgagtttcgtgttcggattgcaggtagttcaaagcaaggggctgctttcttcaactaagtcattttaaattaagtccataaagtgaatataaatgttttatttcattgtgacaggctgtcagtaaacttaaggagtaaatttgatggcggattttttgttgttgttgttcttatatattttttggcatctcctcacagaagcataaacaattctctttgtactggccccatacagcctttttccaagggaaatctaacatctagaggcacacaggattttcagccctagcaaaacaactccagcatcctcaccgtacatcaaagagagacagcctggttctcatggccaggaaggttagtcacaatattacgaaaagtaacgattaagtgctacacagtagatggaggccctggaaattcatcacccaacaaacaaaacacttttaattgtcagacttttctctatgcttcctaaataggagttagtcctagagagctgtggtctggggagaggagtaggcagagatgggcagggtttaagaatcacagtggcttatgcctgtaagcccagtagtttgggaggccaaggtgggaggattgcttgagctcaggagttgaaggccagcctgggcaacatagggagacccctgtctctataaaaaaaagaaaaaaatttagccaggcctggtagcacatgcctgtagtcccagctagtccagagggtgaggtgggaggattgcttgagccctggaggttgaggctatctatagtgagctgttatggagtcactgctctctagcctgggagacagagtgagatcccatttcaaaagaaaaagaaggtgttttacagaggttcctcactttcttttagagaaacactgacatttcagaagttgttcagaaaacatttcagggaggagacacaggaaatgcccaggtatactgtaagagaggcttcccactgaaacttacatggcactacgtgaccaggctctgtggcctgattccatgtccagcaaggctgggtgctgactcatccctgccatggatgtataccttgaagagatgccatcagaaatctggccaccttttttaaaggagataccacttggcttggattataacccacagaacaggcttcagggctagtgccctcaaagccagtctctcagagccccaaggtgctcctccatccccagtgcccctcccatctgctcccacttagcacctcagttgcctctgccaactgtccatgccttcttcaaatgttctccgtccttggcatctacaccctggtacccgtctcagtgcctctgtgaacacagacacagctgaacagcatcatgttcatgctctaggctccccttgatgccagactctcggattccatctctgcctctctaatcagagaggctctctcctgcctctgcttagccttctcctcatcctcaggtgacaccagcccccttaccttccattgtttgcatgtctgctctcccattgatcacaacggccttgaaggtgcaagctcaatctgtttctcacaggcccagtgtgctggagtagagttaacccatatgtgtttgtggattctccatttgctttttttgccatattttatcatttaacaccttgttttcaaaacatgttttcagccaacatcttttcttctattagtaccgctttgccctcccccacctccccatgtgaacttggatttgcttttatgttctaatgaggtgcaaatgaatccattttatagattcaattccagctaatttgacttctgggtcagtttcagccattcggggtgttgacatgccctcccgcaaaaacaatgttggtttgtacaaatcataaaatggactttcactagaaggggcctgggataaaaagagttattcaaagtttccacaaatcacacagcctctggtgaggtctcgctttgttcatcacctcccactctattaccgtggagaactgaaagtccataaa

SEQ ID NO: 1888191 - DNA, 4001 bp, Homo sapiens
taggggcatttgaaacatcatgaataaacgttgctatttctgttcatgaattttaagctgtttgttcttgcaaggttcccagtcatcccttcccaaatagtgctccttaaaattttcatcaggattttgaataaacaggaaatatgtccatttctctcagtattgattactctctaggctgtctgacagactcacactaaattgccaatctgcttcttaggagtcaggagtgaaaacatcagagtgggtgagagcctggtgggaggcctgtgagctgggagttatctgaatagagatagcatactggctgtggggctagactcctcaccatcatcttggaacatggctgggaaataggtccaaagggtcatttggacagcagatcccagcagcctctgtatgagatctgtccaggagactaaccccattatatgggatggcaagagggggaggtgactggaaatgagaaatgggaccaggctgaccagctacactctcagatagagactaccctgacaagggcctaggcacagacacagaagtagttgggtgcagggctctcaattcatccttcaaccctgcctgatatcacatcctcataacccacattgctgtggccatctgctccctctagtttctggcagattaaggccaaaaacaacagcaaagcatttttggatcaaggtcctgcctggggacagagaagtaaataatacaagtccctgttcttaagtaaggcactagaccaagacggtttgagcctaactagaggctctcttgcatagcaaagtctctggcacatgggttatattcaagaattgtttgaaccgaactgaatcaaaggaacctacattctgcaagttaagagcacctgtttggtgtcaggagcccaagacttctagattcaatcctggttctgacatgtacaattcagggactctggacctcagtttgcccatctgtaaagtgcactttgtctaccccacaagttgctatgagtagccaatgaagtagtggctcagtaaatggcactctgtaaatggcatgagatggaacagcaggagctgatgggagcacgggcgcacatgatcttaaaagtttagagtccagcctgaagaagacctgaaataagctcctttctttctccccagtcagcttagatctgcttttcaaacacagcagacattctctgcatttctggtgactgtgaaaaggggaaggggataatttgccactaagtaggggatagaaagaaaggttgccatctttatacttttcaaaataagagcacgggatttggatttataatcctaacttttgttaatcaaaagctgtgaaactatgaacaagcctcaacctctctcagtttcctcatctgtacattgtggggaaatttcctaagtcataagattgcagttaaggttcaatgaattaatgatgtcaaaagtgttttgaaatccacaaaatgccaaacaaacgccaatcattacaaagttgtctgtcttctcatcagtttaccagctacataggacagtggttatttaccatttgacaggtgagatcatcaaagcccagagaaagtgcttaaagtaacacacagctcaattctgacttcttacagcagaggtaactgttcctttactacaggggttcttaattagcctgcttgcctcattaaactgacagatctctgagggaggggactacatacatcttacacatttttgtaccccagtgcccatcatggcacacctaaaagatgtgaagtgttactagaatgatgactaacatattggtagcagaaacatatctagaactcaggactcctaatcccagatccagggttctttacaaccatacagtggcccaaacctcatagactcggcttgccttaacatctcatctcttcctcaattctccactctagcaagattcaactttcccttcagagcctggctttcatagatgccaaagccaggctctgaagggaaagctgaatctggctttcatagatgccagttcctcagccataaccttcctcatctctccttgctgagctaattcctatccatctctcagacttggaggcctttctaatctctcctaatactgggtcaggtatttactttcctccatggctgttttgtttatcacagagtcctggcacacagaatgtgttaaaagtatctgttgaaggctgaatgaatgaaacactgggtgtagaaatccaaaggtgatgcagagaaaattttttttttttttttttgagacggagtctcgctgtctcccaggctagagtgcagtggtgcgatctcggctcactgcaagctctgcctccagggttcacgccattctcctgcctcagcttcccgagtagctgggactacaggcgcccgccaccacgcccggctaattttttgtatttttagtggagatggagtttcaccgtgttagccaggatggtcttgatctcctgacctcgtgatccacctgcctcagcctcccaaagtgctgggattacaggcgtgagccaccacgcccggccgcagagaaaatattcttgacctggaagtcatgcagcctgactgattctaattctaactccactactaatgcgtttcgtgatcttgagcaagtcccagttcttctttggaccatctataaatgagttacacagtatgatctcagaaggtccctccattgttaaaagcatatgagacttagactcatgtgaagtcctagggatgaggagattccaaagccagctatatgctccatagcataggagacccaacactctcatccccccaggagcacgagagacacacgactctgctgtcaggagcctcccagcccattggtttacttaattcctcttgatgaagtgccaagaataaatcgtaggtgagcagcagagcattttaacgagtccagagcctaatgaatcttttccttcctgtgtcaattagaatttcaaagctaggatccccaaggaccaatttattgggaacagagagaagaagccttttgttcatcagcagctgcctgagctacctgctctgctcctgtatctctgctgtgtaacaatcctgcttactcagatataacatctggcacaataaagcctggcctggaggctccttcttgcccaacatttctggggtctgaacttgaggaaggaaacaagggtccagggtatttctgagggcaaaggtggggttgggggttggtcagggaatcagagcagtgctgacgttgctgctatctcctagggatactggccttcaaagagctaacagccacagatcaccaggctactcacccaactaagtatctggtactgtgtggcacctatttacctgttattttaaatcctcacaacctcaaaagcagatatcaaccacatcattttagagaaaaggaaaaagaggatctgagagctaaaggatcagcctaaggaacacaattattacagtaaatggcagagaaggatttgaactcaggtctgtgcgactccgaagactaaagctctatcaaaccaatacaactctgccaggagctgatgtcttgaatggcagagatggcccatggtcagccatagacacattaggcatttgccaccaacacactgtcttttgcccgggcacatgcaagagtggctgcgcatcaccagtccttccattcaatggagctggcaatcctccatccctagaagataatccaagcagagtcaccatcaacactgccccctgctcctaccccagaaaccttttatttgtgaggaatttccaattcttgatctaatggctcccatgcacccagttctccacctcccatactgtccgctctaagtcacacagggccagcccaggtactactgctctgtattcaacaaagacacattttccaaggtcagcagattagcaagtcaggtttccaaatgtaactagtgttgaattttagggctctagtgtgaaaaacacattaagaatagaggtcaa

SEQ ID NO: 1888192 - DNA, 4001 bp, Homo sapiens
gttggattcgtgttgaagccctaacgtgcaatatgactgcatttggaaatgtggcctctaaggaatcaaggctaaatgaaatcagaagggtggaccttgatctgatagaattagtgtcattataaaaagagacaccaaagagctctctctgtctctctctcaaccgtgtgaggacacagcaagaaggcagctgttggctagccagaaagagtggtctcaccagaaatgcatcggccagaaccttgatcttggacttccagcctccagaactatgagaaaacaaaaatgactgttgtttaagccacctagtctgtggtgttttggttaccacagcccaagctgactaatacagatcatcttctagtaagtgggagaatgaggacttaaccctcgcaaactcaagtccagagtttagacttttaacttttctattttcatactttctactgtctcttctgctgtataagtgatgttatagttttatgaaatatttatatgtaatataatagaacatggaatagaaaatatttcctgcatattcattcttgcaatgagaaaattataactaggcaaggaatatatatggtacaatctaaagtgaggattaggccgggcgctgtggctcatgcctgtaatcccagcagtttgggaggctgaggtgggtggatcacttgaggtcaggtgtttgagaccatcctggccaacatggcgcaaccctgtctctactaaaaatacaaaaattagccagatgtggaggcacaatgcctgtaatcccagctacttgggaggctgaggcaggagaatcgcttgaacccaggaagcggaggttgcagtgagccgagatcacaccgctgcactccagcctgagcgacagaatgaaactctctcaataagtaaataaataaatcaaataaagtgaggattgaacaattgaagggtcactgataatcactgtaaggatttagcgccagggcttggcagtactcaggtgagtaaacgttagttattgctaatattattcatttatcttattattgttataattgagttagttctgtgttctgatccatgagtgaattggcctcctggaagctgccctcaaatccctcctcttttacacagtgattgatggtccatgtcgcctccttgtagttacagattaataataggccctcctcctggaaacaggccaaacgccaaaccccatgcaagctggcctggagaaagcacttctgaaacttcatcaccagcaggcagctagacgactgttgaatgggagggggggtggttttgaagggtggaatggtgacagaattagtcaccaagtaaacaagcaacaccttcgatcaatgcaatggaatgtaggtaacccaggggccctcctcactgctcagctgagggtgacgccaacatggccaggctggcacacccagcagaaccagccctctgcccccaacatcagtaaagaccttgcaggaggaaagaacaaccccgctttgcctgccccacagtcctgcagctccatgtgtgtgcccgcacagtgctaggaacacggcagctattatcaggagtgccaggtacagtgctacaggttgcctcctgtacaaggggacacagggaactgaaatccagtcctcactgaactgcccaagccctgattcctggtatgggactttgtgggtccaggggcaggggtgccttgatcaaaatcaccttggatgttttagggctgcttggtgattgatgttttgctttcggagtacttaattatgtttgcacaaacggatggtaatcctaaaaatcttagagctcgctctcatagtcttattattgcaccaaacattgttaagtgcatgataatcgcaggtaattttaattggaggcttactatgtgccaggcagcaccagggtgagcatagcaggacacaaaatataggaaggcaaccatctctggtgcagaatcggcagcagagagtgagcgcctccctgcattttatcccccaggtgctcactggcttcacccttgccctgaccctggtgccaggcacttcacacacattgtctccttttcccttgcagagtcccattattccctgattgcacagataaagaaaccaaggctgagcaatgccatcccctcatctcacgaacgtcacctccatgagggtaggcaccttactagtcctacttgcccaagagtagcagtcagaaagctacggggaggcacacctggggtttgaacctgggtccacgtgactcaggcactcaaatcctgaactgcttcagggcagggcacttggcttgaagagaagctgcagacacagagacaatcaagtcacatctaatactccagcaggacagatgagcctgcaaggtgcaaaggtacccccgcccccaacccaaagcctttttcaattcctctccctccacatctcttgtcatggtaaagcaggcagaatccatgggctttaacgggcccattgcttttcccaaagctcatgcctttttcctaaaaacaaaacccttctgggttccagaactctttggaaaaaaagaatcttctgtgatttgggacattggtttgttcccccaccctcacttaaatgagaaactactttagcatgccccgccccgtctgttgtctttatttaggaggaagcaccctctacataccctgagtatatacacccagggcctgaagctgctgtgatcagctcaggatccccaggaggctgaggcggatcaggccctggactccgggggaacaatgtaagggacaccaaaaagctcagccatggagatgaatagtattttaacatgaaatttgtgaaaatcaaaattaccgctgttcctgatcttatctttctgtaacatgttcatagtttgttcatcacgggtgtcttgccattaattctgacttttaaaaatgttgtgttaacataccgtttatctccatgactgagttttttggcatcccttacatttcgtgcccaaggtgagagtctcactggctgcaccctcatcccaggcccgactggactccagttccacagcatcctttccatgagacctggaaccagatgcagctccctcttcacccagcttcatgttcctagttgtaaaatggagacgatggtaacagcgaaaacaagaaccacagctaagagttactaagtgcacaggtatttacgggcagtagagtcctctcagccctttgatctcagtactgttattaggttcactttacagatgaggaaactgaggcccagagggctgagggaacctgctccagggcacccagccagcccagggtggagctggggctggcatctggcggtgtggctgcagcgcacccgcattctaatcgcaatgactcttccaggcaggaaactggttcagagggagatgtaaacagcaggggtcctgaagccaggatttgaatcagcagctgcctcatagggtggtcttgagcgttaaataagattcacaaaaggcactccacaagtcctttttcttgtcctcccacttctttaggcaatgcctgaggtgaaggctcagattccactcggctatggggcattcttgccctgacggatccccaaatcacacagcctatccctccatccagtgacttctccccatgtcctgtgcttgaaatgaccctcaatagttccaccaaataggagttatttatgtggctatgcgcctaacactgaccacattgtcatttgctccttgtaaaactaaaaactttgagatgagtgctatctttgggtccatttcacagatagtggaactgaggcttacacatatccaaggccacacagtgaacagaaggcagagctgggatcaaacttgaccctgtctgacccctggcctctatatgacaccgtctaccacaaacagcaaaccctccagccatgcctaaaggatctgaaagcagttacctgctgagcccctgtgggagtatcttcagtcccctcgtgtcacccggagctgct

SEQ ID NO: 1888193 - DNA, 4001 bp, Homo sapiens
cagcaggaaggcatagcggcccagcgtgggcacatgggtggtgaagaccacggtggcctgcagggataggccctagtgagcaggctgagctatgagcccctgctgccccctggacaacctgccctgggttgggacccggagtcctgccctgacacccccgtccctctagagactatggccctcacctggggctcacgcagcagggtgggctctgcatcagggtccacagcggtggggggccgaggtcggggtccagctggggacatggctggagtgagatcctgcgcgtgggtcagcgggaggccgggcggcagcgggatcacctggcagtccctgaggatgatgggctggggcggctttgggaagcgcgagggcagacaggcggcactggtgagagcacagtgggtgagtcagagccggccctgccgccgggccctcggccgcgcccctcccagccccattacctgccattacctgttggggccaaaggcgccgtggctgctgatgcagctgacccggggctccacgaactccgggctgaactcctcaatgggcaccagagtgaccccgtgctgcaggcagagggacgagatgctgcaacgcccgtggtgcggggaggatagggggtgcaggcggtacgatgggggggtgcaggcggtacgatgggggggtgcaggcggtacgatggggagtgcaggcggtacgatggggggggtgcaggcggtacgatgggggggtgtaggcggtacgatggggggtgcaggcggtacgatgggggggccggtcacacagctcagacccaggaaactgcaaacccaggcgtccgaccgagccctgctctttccaagatgcccttgctcctcctccagctgcacaaaccccaaccgcagaccagcgtgttggccagttcctgggcccacaggcctatgcggctcctcccatagccctcttcctccccctcgccctcccatccgtcactgttcccccactcttatctcgagtgctgcttggtgccaccaggccgggccaggcccagctctcccaggacctgacccaggcaggcactcagcaggcacaagccgcaaatgggtgctccctttccgtgcggccatgtgaggttggtgtctcggaacacggcaacttatccgctgacacaacggtgggagacgcggctgcacagaacatgttgtgtggcatttatagaaagtgccaggccaggtatggtggctcctgtctgtaatcccagcattttgggaggcccaagagggcggatcacctgaggtcaggagtttgagaatagcctggccaatatggtgaaaccctgtctctcctaaaaatacgaaaattagccaggcgtggtggtgagtgcctatagtctcaggtacttgggagactgaggcacgagaatcgcttgaacccaggaggtggaggttgcagtgagccaagatcttgccattgcgctccagcctgggcgacagagtgagactccatttcaaaaaaaaaaaaaaagaaaagaaagttccagaacaggcaaccaacgctgtctgtgccaggaggtggctgccctggggccagggagctgtgactgcaggtgctttcctgagcacatggaacagctcgggggtacgtcaaaagggactgaatccacaaaacgcttgcaggaggggttccagaagaaacatgctgggctgggcatgagcgagtgtggccgccttggggacctgggaccccaactgtcctctcccctctcatgcatgtttcaaatcttctgaaagaagctgaccccttggggtggggacctgaggggtccttaccaggaagaagcgtgcctgttcggctgtgagcctcacgctggcctccgagtccaggtggaagacagccaggtggtcctgggtatcccgggcagtgccccggcacagggtgctgtggggggagggtggtcagcaggtggggcagccccgggcgtgcccttactccagccccaccggctcccactcacctgtacaggcaggggtgcagggagagcagcccctgctggggggcccgctgtggggtgtgcacggccacgcccacctcctggcgggcatcctcattggcgtactccaccactagggcatagcggcctggctgtggcactgccacttgaagctggacgtccacctgcagggaaggcagggtgacgggaggcccgccacccctcgcccttcccacctccctcccctcccactccagcgcctccctgaccccagggcctgcccttcagccgagtcccaccctggcccggacatctccaggcaagtggtgggggctgagctgtatgtggaggccacagccaatcctacatacagacaggcactgaggtcacacatgcaggaggcaggaggcaggaggcaggggcgccctgcctgggtgctgggctccattgcctgaggcagcgccctgctcctataacctgccaccgccacaggacccccagcccccaggccaaggtcctgcaacacccattgctccgtggggtcccaggacacgcacatcactgcccgtgcaggtgatcagtggcgggtgcgacgggctgagctgctccgtggggcagggccggggcaggctgttgtcctggcgacacagggcctccagcccggcggccgaggggaagccatccagggggaggtgtgtgtagaggaggcagctggggggacacaggccgtggtcagccccaggtccacccaggtccccagagacagcctgagtgggggaagccaggcacagtgggggtccaggaagcccccaccccggtcccaccgcacgcatggccctcacttgtcgccagactgctgggcagagggacggtatgtgcaggcctcagtcacccgcagctgcaggagcgccgcctcgtagtatgcgctaggcagcagaaccacgtagtcctgcagggtggaggtggtgctgagagtggtgggccccaccccctgacccggcccccagccctcactctggcccctgcctcaccaggagcaccccttcggcctccacacgcagggcccaggtgccagggttcagcacaaagggctctccgaagcccctctggggcacggtgatgaaggcaggctccgtgctgggtgggaaggccacgggctgactctgtgctgtgcctgggcgggggcaggggtgagactcctgagcccagcccttggggccaccccaggctgcaccccctacagggttggggataggctggtcctaccacccacatgagccagaggaaggtggcggggcttgggagtggggtggggtggggtgggctgggctggtggggcaggggctgtggcccagggaccccactcacagttggcgcaggtggccgacctgccctcctctcgcacagagacccgcccgctcacactcatggccccccggttgacgtatcggaagacgagccagaaaaggtcaggggaggtcaggttcagcctggccacgatcctgggctgggtgggcatggagcgtcgggtcactctccctgaccactgccagcctgaggcctgggccttcaaggggcctgcccacccctccctgccagccacgcctggctccacttctaggctgagcctgggagggggagcacagcgcccacctggacaggtgccatctgcgcgtagcccctccagctgaagttctcgaactcgagggggttgaagccaaagcgcacggcgtgaccctcaggtgtggcagcctcctccagctccaggcgcaggtggtgcaggtccgggaggtagtggtccctcgcaggcctggccacagcaggggctggtcaggtgcagcttggccatcctacctagccctgcacagcggccccgggtctccagggagggtgaggcctcacgtgggcccatggtgagggacacggagaggcccggaggacaagctgcctgccccgctccccaccacccagtggggaaggggtacccactcgctgcaggtggggccctgggtgttggggcggcacc

SEQ ID NO: 1888194 - DNA, 4001 bp, Homo sapiens
tctcgctctgtcgcccaggctggagtgcagtggcacgatctctgctcactgcaagctctgcctcccgggttcaggccattctcctgcctcagcctcccgagtagctgggactacaggctcccgccaccacgcccggctaatttttttatatttttagtagagatggggtttcaccgtgttagccaggatggtctcgatctcctgacctcgtgatccgcctgcctcggcctcccaaagtgctgggattacaggcgttagccaccgcgcccagcccatttggggggaaattctaatgcaaaagagccagggctcccagcctgcccacttctaagtggacacatgcacagggctgtgtgggtcaggtgggctacagccacgctgtgaaggcccctcatgagggggactcattaaacaaagcatgcagtccaccagactgtgagatgtttcacagccaagaaaaacggatgacgatggcaggcatacgcctggggataaggaacgatctccaggccagactgttagaaaaaacaaggtcacagcaccatgcgtgtgtgtgcgtgtatggtatctgtgtgaacctctgtttacaaaggatagtgtggatgacaccatgacttctggagggagaaggaacgatggatgcttgttgcccattgagggaacggggaggagctggcagcactgcccaggtgcttgctatgtgccaggtgtctcatgaagcctcgtccacatgattctcgttcaactcccaaatctgcatcctttctgcccgctgccctgagctccagattgataatcccaatctcccccatgacttttctaggatgtctgctggaggcatttcaaacctgatacacgcaaaacagagctcaaaccagtatcccttcacctctcctccaaatcaaaaaaccctgtttttgtagctcagtaaatctaccactggtagctcccaggttgctcactcccaaaactagaaatcattcgtcttttctgcatccagaattccatgtccagcttatcagcgaggcctgtaggctccacctccactatttgccccaagcctattcacttctccccaagtccccggccaggtctgagccacccccatgtcttgctgggatacctggccaggcccctcacagtccctgcttccccctccagacaggggaccgtctgttgggctctgatatgtgtgtcctgcccagcccctcaggcctccacctggagcagcaggcagggggaaggggtcacccaccgctgccggaagtcggtgtagagcaacctgttggggaacccttggcggcagatccggatcccctccaggaccccattgcagcgcagctggtgtagcaccaagaaggcatccatgacccctggacgtgagaggggaaaaggtcagaggtcaacaggcacacccgcaggccccagagaaaaagcagcagtggagaccctgcgaggtgagggggaagatgtactcagcctcccggcctctgccctgtcaccttcccatgatgcctcccggccccagccaggccagccctgggtgactacctggggttttgttctcgttggggacaatgcagcggacgaagtggggctgtgtggcccgcaggttggtcatcagcttgttgaggttctcctggcagtggggaagagtgagggaaaggcacaaagggggcagagaaccagaattggatgccgcagtggtcaggaccgagacgggagcagggccctaagtgccctgcacttttgctctttcactctcattctggtgatgggagacccttcgctgtctcccatcaccaccaccaaagtcttcacttccctgccaaatccccgtccctcccagagccccagggctcccaccccttccccacaaaccctgcccaggcagcgtagggacgggaagcagcacagacttgctgtgatgttcacgtggagaggagttaaacatcactgcaagtcttaacagccgcccgcccaaggcacaggggacagggcagggggtgaaggacggggctggaggctgccaagagggagggtctgtctcccagatggggccttaccttgtgcagctgggacaccgtctggaacgatgctgccttcttacgcttctctttcaccccagacttggggggctcagctaatagagacaaggggcctggtcactccagggaatgtcgctctgtgggcccctgtcagagtggagatcttgtccctccatactcactggagcaggagcccgcataattctcatagagagtcgccaggagcctattctgtgacttctggaagatggggaccacggtctcattcaggggatccttgtttttctccagccagcccacaatgctgtaaggcacctggagagacaagtcaggtgctgagcccgggtgggagacctggagcagggcgggaggagcctggccgagggctggggttccagcaagcacctaccacgcctgcgtagtggaccacctcgaagtgggcctggtacttgcgcttcttgtcaggccgaggctgctggaaattgggtgacttccccgcgtggttgtcgtagagcttggcccggaagctggcgtctgaggccttggggaacatgcattcctcctccaggatggacaggatgcccagtggctgggaacagaacgagcttgaaaagccaccatcaagccagtccatcctggaaggactgaacccctggttccccaggccacctcccttctgggagccttcccagatccccagcttcagccatctccccggatggtcagacaccacacccactccaagaacccatctcctaacagagaaaagtttgtggcttggctccagtcccctcctgcaaaatctgcagcactgaggtgtcatcttcacttctaacaatggcaaacccaagctggcatctctgtacccactctcacccccgccacagccatggctgtcacacacaaacatggggtaagtcaaaaaaagccatcaagttcacattttggcttcctcactcactagctgtggggccctccgacatcactaagcctcagtcttctaacctgcagagtgggaagatgaatgtcttcagtgctgacataatatttaaaaagctgtcaatcacctaaacgcccagctgtaggggactgcagaaatgcatcgtatgaaactcatccactgcatgaactactcttgccatgagcagcattcaaaatacattttcagagaaaaagtaggatatgaaatgaaatctgtgtctataaaagaaaatggataggccaggcgcagtggcccacgcctgtaatcccagcactttaggaggccaaggtgggtagatcacttgaggtcaggagttcgagaccagcctggccaaaatggtgaagccatgtctctattaaaaatacaaaaattagctaggtgtggtggcgcatgcctgtaatcccagctacttgggaggttgaggcataagaattgcttgaaccctggaggcgaaggttgcagtgagctgagatggtgccattgtactccagcctgggcgacagagtgagactccatctcaaaaaaaaaaaaaaaaaaaaagggataaaggatttcgaggaaatgaacctaagtgtcatgtgactggctgtgataggaatggggagaaacattttttcccctgccaatttttcaaattttctttcttccattctttgtacaatgggtaaatatacataatgttccacaatcacaaaaacaaggaaacacaccctgccctgcacccagggcagttctagggatccagtgaaattgtggctgcaaatagggccttgtgagctgcagaattctgagcacccaggaggagctgttgtccacagtactgggatgcatgcattcacactgctcacacactcaccaaggctcactcatggtcaactccaacacacccactcacacacgtgccctttcacacacaagcacataaacgctgtcacaactacactcacatgcatgcttactgcaacgcacag

SEQ ID NO: 1888195 - DNA, 4001 bp, Homo sapiens
gaccatgagtgagccttggtgagtgtgtgagcagtgtgaatgcatgcatcccagtactgtggacaacagctcctcctgggtgctcagaattctgcagctcacaaggccctatttgcagccacaatttcactggatccctagaactgccctgggtgcagggcagggtgtgtttccttgtttttgtgattgtggaacattatgtatatttacccattgtacaaagaatggaagaaagaaaatttgaaaaattggcaggggaaaaaatgtttctccccattcctatcacagccagtcacatgacacttaggttcatttcctcgaaatcctttatccctttttttttttttttttttttgagatggagtctcactctgtcgcccaggctggagtacaatggcaccatctcagctcactgcaaccttcgcctccagggttcaagcaattcttatgcctcaacctcccaagtagctgggattacaggcatgcgccaccacacctagctaatttttgtatttttaatagagacatggcttcaccattttggccaggctggtctcgaactcctgacctcaagtgatctacccaccttggcctcctaaagtgctgggattacaggcgtgggccactgcgcctggcctatccattttcttttatagacacagatttcatttcatatcctactttttctctgaaaatgtattttgaatgctgctcatggcaagagtagttcatgcagtggatgagtttcatacgatgcatttctgcagtcccctacagctgggcgtttaggtgattgacagctttttaaatattatgtcagcactgaagacattcatcttcccactctgcaggttagaagactgaggcttagtgatgtcggagggccccacagctagtgagtgaggaagccaaaatgtgaacttgatggctttttttgacttaccccatgtttgtgtgtgacagccatggctgtggcgggggtgagagtgggtacagagatgccagcttgggtttgccattgttagaagtgaagatgacacctcagtgctgcagattttgcaggaggggactggagccaagccacaaacttttctctgttaggagatgggttcttggagtgggtgtggtgtctgaccatccggggagatggctgaagctggggatctgggaaggctcccagaagggaggtggcctggggaaccaggggttcagtccttccaggatggactggcttgatggtggcttttcaagctcgttctgttcccagccactgggcatcctgtccatcctggaggaggaatgcatgttccccaaggcctcagacgccagcttccgggccaagctctacgacaaccacgcggggaagtcacccaatttccagcagcctcggcctgacaagaagcgcaagtaccaggcccacttcgaggtggtccactacgcaggcgtggtaggtgcttgctggaaccccagccctcggccaggctcctcccgccctgctccaggtctcccacccgggctcagcacctgacttgtctctccaggtgccttacagcattgtgggctggctggagaaaaacaaggatcccctgaatgagaccgtggtccccatcttccagaagtcacagaataggctcctggcgactctctatgagaattatgcgggctcctgctccagtgagtatggagggacaagatctccactctgacaggggcccacagagcgacattccctggagtgaccaggccccttgtctctattagctgagccccccaagtctggggtgaaagagaagcgtaagaaggcagcatcgttccagacggtgtcccagctgcacaaggtaaggccccatctgggagacagaccctccctcttggcagcctccagccccgtccttcaccccctgccctgtcccctgtgccttgggcgggcggctgttaagacttgcagtgatgtttaactcctctccacgtgaacatcacagcaagtctgtgctgcttcccgtccctacgctgcctgggcagggtttgtggggaaggggtgggagccctggggctctgggagggacggggatttggcagggaagtgaagactttggtggtggtgatgggagacagcgaagggtctcccatcaccagaatgagagtgaaagagcaaaagtgcagggcacttagggccctgctcccgtctcggtcctgaccactgcggcatccaattctggttctctgccccctttgtgcctttccctcactcttccccactgccaggagaacctcaacaagctgatgaccaacctgcgggccacacagccccacttcgtccgctgcattgtccccaacgagaacaaaaccccaggtagtcacccagggctggcctggctggggccgggaggcatcatgggaaggtgacagggcagaggccgggaggctgagtacatcttccccctcacctcgcagggtctccactgctgctttttctctggggcctgcgggtgtgcctgttgacctctgaccttttcccctctcacgtccaggggtcatggatgccttcttggtgctacaccagctgcgctgcaatggggtcctggaggggatccggatctgccgccaagggttccccaacaggttgctctacaccgacttccggcagcggtgggtgaccccttccccctgcctgctgctccaggtggaggcctgaggggctgggcaggacacacatatcagagcccaacagacggtcccctgtctggagggggaagcagggactgtgaggggcctggccaggtatcccagcaagacatgggggtggctcagacctggccggggacttggggagaagtgaataggcttggggcaaatagtggaggtggagcctacaggcctcgctgataagctggacatggaattctggatgcagaaaagacgaatgatttctagttttgggagtgagcaacctgggagctaccagtggtagatttactgagctacaaaaacagggttttttgatttggaggagaggtgaagggatactggtttgagctctgttttgcgtgtatcaggtttgaaatgcctccagcagacatcctagaaaagtcatgggggagattgggattatcaatctggagctcagggcagcgggcagaaaggatgcagatttgggagttgaacgagaatcatgtggacgaggcttcatgagacacctggcacatagcaagcacctgggcagtgctgccagctcctccccgttccctcaatgggcaacaagcatccatcgttccttctccctccagaagtcatggtgtcatccacactatcctttgtaaacagaggttcacacagataccatacacgcacacacacgcatggtgctgtgaccttgttttttctaacagtctggcctggagatcgttccttatccccaggcgtatgcctgccatcgtcatccgtttttcttggctgtgaaacatctcacagtctggtggactgcatgctttgtttaatgagtccccctcatgaggggccttcacagcgtggctgtagcccacctgacccacacagccctgtgcatgtgtccacttagaagtgggcaggctgggagccctggctcttttgcattagaatttccccccaaatgggctgggcgcggtggctaacgcctgtaatcccagcactttgggaggccgaggcaggcggatcacgaggtcaggagatcgagaccatcctggctaacacggtgaaaccccatctctactaaaaatataaaaaaattagccgggcgtggtggcgggagcctgtagtcccagctactcgggaggctgaggcaggagaatggcctgaacccgggaggcagagcttgcagtgagcagagatcgtgccactgcactccagcctgggcgacagagcgagactccgtctcaaaaaaaaaaaaaaaaaagaattttcccccaaatgtttcttcagtgatagggtacagcatgtcaccttctactaatattttttgcctt

SEQ ID NO: 1888196 - DNA, 4001 bp, Homo sapiens
accctgcttcacacgccctcatgggacatgcaggggagcacaattcccggctcagggtcttgcttgtgacaccaggaacccctgagctaaactgcaagcctggcccctcttaccctgtgaatctctgggcaattatcccctctggtcttcaacttcctggcacacaaagtgtggccacaatagggtaaccatgcatgttgtttttcaaactggggtgcttttaagagcacaaagggacaatgtgtcattatgtcacggcaaaaggtggaaacaggttccagactaactgggtcctatgggttagtcctatgattatgatacgccctcttcctcagagggccctttcaagtatccaatgacataaagaaaggggtgtaaagcgtgtggtctctaataagtatctgtaacaccatgtatcaccagtgttggtgtcacatcattaaatatccaggaggcattttattgttttaattatgctcttacagcaaataaagaagaaaagctgaggaaagagggacctgttgacatgatgatgaagcctacgtgctcacagcgtcgtcaatacagagcctgtgtctgatccatgggcactgaacaggggaaagagacagccagccctgtaggacaaaacgctggaggatgtcacagttcttccacttcttccacatctgcctttccagtccagaggtctggatccttgttggcctctgcccacagagggacatgacaggcagcgtgtgcctgggctgttttcccaccaaagcctggtcatatattagccctgcactgtgaggaacagatggagtatgtggtgtcccaacccttcctcatctcgtttttaatttgccaaccagccccgttgggaggagccaagggatgcagtgactttgctgctcttcctcgggttctgcccagatatgtaatttctataaaaacacaaattctgctggtttgcttgatggcaaactttcagctttctttcaggaacttgttcttcaaagagattgtgtctcagtaaacctgttcctatgtctgttgctttatattgcacaaaatatagaactttcgcacatcataactggagagcatttttgtgacttttgtgccaaagaggcttcagtccttagcccacagatgcttcctgtgatcaggagatggtgtgctgttggaagtggcttcaatccaaggcttccaacaacgacaccgtctcaggttaaaaggctggtgctgtgttctggcaagcactgagagctgctggctggataggaaccctccccgcccttgtcttcctgcttgctaagcaactccaatttagtccaggacagtaatgcatccagccttgtaaccaagaggaaaaagaaaggcccagagcgctgatgtgagagctgctgacaccatgaaagcaattgcctggaaaacaagcaaatgagcaggcagactctgttaagtcattgtcaccagcacacttgaacccagggagcgcttggccaaacccaattgtgattaaaatgtacccagtgtctttgcacccagctgcgttagattttctgggattttctttatggtcccccaaaaactccccaaactctctaagcctctttttctccctctgtaacttaggcacaataataactcctggatgaagtgttcatgggccttcaacagtatatctgtgaaagcgttttgcgagccagatatttgttgtcactattcgttggtgcacagattccgcctcaacctgcagagggaggaccagtgtggtttatccatagaaagggaaggggctgcctgaattccagatggattaaactctctctttctgtttctcccagccttctcctacttccttccctgagctcctaactaaaagcgaaggctgggctgctaaacagctgtgtgtccccaggaggaaacccatggtgggcgtgtattaggtcgctgcaaaggtaattgaggttcttgcctttactttcaatggcagaaaccacaattacctttgcaccaaccgaatacgttgtttgactcacatttacggagaagccttcacacacagctcttcagcttggtgattcctgcttccggagagtgggctaattaaattaggaagggagcgggttgtcattagacagccagagacactatcacccatatctaattttgttcctggttttagatagagtcatctccttttgatgcatataatttaagaggttaataattttggcttcgagcatgaataataattcattattagcagaacaagagagagattcggctttctatagtaacactcggtctgaatttgtttttccttaagttaggaacaggaggaatgcgctttttggaagttcaaaaccgccagtttgatagtgttcccagcaagtctcatttcagttacaggattaacaaatcagacactcgcccttggtatctaattagctttgtcatttattgaatttcagagttccctagtcaaaataaaagacctttccctacttatattaaatgatcatgctaatctccattttaacacaattaaattttactcaaattgtttaattttttaaaaagtgagaaaaatgtcagggactgactagtgtttaaaacaaatgaccgttctccactatgaagccgttggctgtaaactaccatctctatgatttcccagaaggacaggggtacattagaatgaaacatctgcccagaagagtctctaattacaagaagtgtaacacaaaaaacctatttcccgaattaattcctgaaagttgaactaatactaaatgctaaatactgaaatactcaaaatactaaaaaatactaaaatccaaggtgaaaatagactgccagtgaataaacagacttgtgataaggagatccaaaaccagattgttcctttggagacaaacagatgtcagcttcttttgtttgtttcatttctctaggccaatgtgctgactgcttattattttcagtatgataaagttttattggaaagtagcctcacctatctgtttaggtgttgtctgtggttgctttgacactgtgactgaaactgtggccgtcaaagccatggcaaagctaaggagaaacgtcttacagcattagcctttagttccaaagtccatgttcaaattcatccactattcttttttaaaaaatagatctgtcccataacaaatacatacaaacaaacacacccccacctgcacacagcctgaaaactgagatgtaatcgtttaataatgataatggaatactgcaaaatttttcctaatttttctctgtgacaccacaaatatgcattgtaccactcgtgttcagtttatgtaatgtcaatgcccatttctgcttattgactcattttatcatacaaaactgacacaagcttctgattaatctgtctccaaaggatcaaaatgctttaataaatacattgttcctttaggtctgggaagaaatgaaactgttagcttaatgtactgtgacattgaatgaaaacctctggttgcatttaactggaaagccagctagataaatccggaggacccgttaagtaaatgacaccacactttcttaatggccaattggggcctaccttcctgaagcaaataaataagaaagatttgaaatggaatttgggggtttcgttcgttggttaaattctcaaaggggtggtgtaccttggatagaaattatgacaaaaatccgtggcttaaggtaatcctaatagggagagcagagagagaagaacaaaacaatctcggttttttatgggaagaggtgaagactcacaagatgggagagagcccttcatctagcggttctcgaacgtggtgtgccccagaatcatctggggatcttgttaaaaatgtgtgttcctggtctggatcccaggagactccagcacaggctatgctgcccgtgctttctttaacggctctctcctttccttcagaatcccttgaggcgggtgatttgctctgtcaggcacactgctg

SEQ ID NO: 1888197 - DNA, 4001 bp, Homo sapiens
gaagatatcagggttgagttattaattctccaccaatcaattttattaagttaaaaagcaaataatatttttgaaagtgtgcccttgaaataaagttctctagactaaaatttgagaggtcagagtgtagtgtgaagcaaaaattttctgatgtttacatatactaatgagtgaatggctgtcaaaatcgaaaacacttcttgtaaatttccagttcgaatttttaattctttatataaattttattatcctggctgacatgaagggaacttccaggtcacctactgaaagaaatctgattcaacaaaatgtgactaaccttaagtatgtctaataaaaccagacaaaaggccaaacctcatagaacatacataaaaagaacagggaggaaaacttcttaagttctgttacttcagctggaaggggttaagcacaagacattgcttggtcagaaacagagagctttttaagatacatattaatcttgcaggtaggaaagactaaaaagaaaaagaaaaaggaaaaggaaaataatgataacatatttcttgagtaatatttaccagtcatgctgctgtctctgtttatcccattatgaagtttacagtgaacaaatgctgcatcaaataaccatgatccaaagagattcaagatgctgttaacctttggtctccgaggggcaggcagtggccggggttctgaactagtctgatttggacttgacagaggagaggtggaggacgtctggtgctgaactttagaggcatgagcagtactaacctattagacgaacacaagaatacacccataccaatgaaaagtctgagaaaatagcaagactttataaaaagaatggcagattaaaaagccaaccttatatagcataacaatggtgatgtaaactcttactgtgcttgtcttcatggtggccttattcacagtaacagcccggtgcctccggttatgtgggggggtggtactgacagcagcactttgaggcatacttaatctattcacgggtgttgggggagcactgtctgatcggggtctagaaataccttaaaaaaaaaaaaaagacaaatgaaattattcttcataggtcaaaatatatgatcagaaaatttctcccagtaacctagtgaaggcttgggacacatagactatagcagagattgctagttgcctctcagtatctactcactatttcttcctgagtaacagaacacaaactttagatggacatggctacccagaaaaaaaatgactcaattttcaaactccctttgcacctagatgtggccatattttgaccataaagaagttggtgactgttgggtaggtcttctaagagatcttcttaaaggaccaattatatgcagactctccttccttcctaattcctggacaggatgtttggaactcactcaaccatcatggcccatgaggcactgtgcaaagaatggagagccaccagatggaagggccttggatccctgctggtgatggaaccattacactgcctagccctagatttaacatatgtgaaaataagctatcttgtttacaataggatttttggttgttacgtggcagccaaacttaatcagagctaacatattaactgtacattaataagtatacataaatattttagaaaatattataaatcactgcctttcaacaggttaaaaaattgacttttcatatatctaaaatgtgaaaaacagcttaaaagaatggctcactaaaggtataatttgctttttaatgatatacatgagaatggtcccaaatgcattttcatctgtattttcctggatagctagtatgcatgaacactcttttcttttgcaatcatttactcttatcctttgtccatttatctactaggcctaattcttgttcttagcactttgtttgatgtattaggtgggtgcaaaagtaactgcagttttggccgcattacttttaatggcaaaaaccgcaattacttttgcaccaatctaaatatttacatagaaacgataaccctctggctattttatttgttgcaaataatttttcctcgcttgttatttgtcatcaaatctgttcatcttttccttcggatgttttctaataactcctagggttagcctctagagttatctaaatgaagctcttcatacatctagcaacatacacaaaattcacctaagaatgcatccaccagacagctgattccacgcatggcacgaaaaaatatttgaggcagatgtttaaggcagggatactgattcaattcttgcggcattccgctcacattcaagaactgttcctgaaatttgggagtagagcttataatagctgggttactcaaatccacaggattactattaaaagagaggaaagaattaatcacaaatttagaaatttctatagcaataaaatacacgtaatctaatttaagaataggactgtgcctatttctctgattcagaaaagagactgatttgtatttaatgggccagcgattcaaatctcaacacttctttacagaagatctgcagtgtggttacatgaacattgcctactccaagcatgagaatcaaagtaagactagaaaaaattttaattttgagagtatacatagatgctttttctaatatgttaagaattaagcaatagatggacatggtggcacgtgcctatggtcccaactacttggaaggctgaggcagatcacttgagccaaggagttcaaggccgaggctgcagtgagctatgatcatgccaatgcattccagcctgagcaacagagcaacatgccatctcaggaaaaaaagaaaaaaagaaaaaaagaaaaagcaatggaatggtaaagctataaatatgtcaacaaaagctccaaggagaaaattttactttaatattaacattttcaattaaaaaaaaacaactatatttgaaaatcaggattagtgttaatagttttatgttgtgttcatgtgtatgtactaaagccataaatttcaaaacggtgtatttgtgtttgaattacattttatgtacaaacagtttgaaatatttccattaaaaaacagattatgatttttcactcaaatggtctgcttagcattccattaaaaagcctctccaattcaaagtaatactgataatctaaagccggtaaacagaatttccactagctacaaggcaaaagaactaggctgagaaataggaatcagtgatctatacatgctctgcctttcaaaacctctttttccacccaccaaaagacttaatttcaagtaactgtaattgcggaaaggagaacgtgtgtgcatgtaagaaaaatgggcttccagtggtagcacactgtttccatagaactggactagtccaccaagtaagacagaggaagggagattcgtctccagcagcagtgcctgctgggggctgtagttcaactattcagaaattagaagaacaaggagtaaagctgaaatggaactacacctaagtcccacagagcttggctaaattcatgtctactgtaaatcaaaaactggagagagaaagattcataccagcttctccagaggtaaaccaggaatgattttattggctcccaaatatttagagaacagactcaagaaagtaagtaaaacttgaaataagaatgggtaacaaaggatatgaaaaactaaaagcaactgcattcctgcagttcccaatgccccgtgtacctgacacatttggggaacctgttaaaaaatccagattagacctaaatttactgaaacaatctccagatggggcctaaagggcaggtgggcatacacaagtccaaagacaagcatttgacaacagtatggaaacaaaaatgaaaaatattttttggttttcctggaaaaagataaatcactaacacacaagacaaaatgttgatgcctatctccccatcatattcaaccttcatcctaggaaatctgccaacaatcacaaataatcacaatcat

SEQ ID NO: 1888198 - DNA, 4001 bp, Homo sapiens
gcagcagctcacgcctgtaatcccagcactttgggaggccaaggcaggtggatcatgaggtcaggagattgagaacatcctggctaacacagtgaaaccccgtctctactaaaaatacaaaaaattagccaggtgtggtggcgggcgtctgtagtcccagctactcaggaggctaaggcaagagaatggcgtgaacccgggaggcagagcttgcagtgagctgagattgtgccactgcactccagcctgggcgacaaagtgagactccgtctcaaaaaaaaaaaaaaaaaagtttccaaggtagctgagagtttctcataaatttgcattgtattatgtcacaagcttttcctgaaattatcgtatgatttttctcctttaaccaattttgtttgttttgacatggaatgtcactctgtcacccagggtggaatgcagtggcctgaaacctcatctctactaaaaatacaaaattagccaggcatggtggcgcatgcctataatcccagctaatcaggaggctgaggcaggagaattgcttgaaccagggaggccgaggttgcggtgagccgagattgggctattgcactccagcctgggcaacaagagtgaaactccgtctcaaaaaaaaaaaaaaaaaaaaaaaatgaaaaagaaaacatttccatcacttgtattttatgaatgaatttgaataggactgattaatttataacttataagtttgatgaaccttaccagtgacaccatctaggccagaattttcttcatgagaaatcttttttttctttttttttttttttgagacagggtcacactctgccacccaggctcaagtacagtggcgcgatctcggttcaccacagcttcctgggctcaagcaatcttcccatctcaccctcctaagtaactgggactacaggcatgcaccaccacacccagctaatattttgtattttttgtagacatgggtttcaccatgttgcctaggctggtcttgaactcttgagctcaagtgatctgcccaccttggcctcccaaagtgctgagattactggcatgagccactgggcctgcccttaaaaattatttaattatgcatttgatttatcagctatagggatatttagacttactatctgttcttgtgtccattttggtgacatatctttcaaagaatttgtccatttgatctaaaatgttaaagttattggcataaatataccctttattatccttttaatgtctataaaatatacagtgatgtccctctttttttctctataggtttaattactaagggttgttaatattattaatgtttaccaaaaatttatcttctagctttgggcgctccattgtttcttttccacttcactgagttctgcttttatttatttcctttcttgtacttactttaggtttaataacttgcctttttctagcatctgaatgtaaaagcagagatcactgattttatctttcctatattctcatctacttctttaaaacaaaagtttcccgctgaagactactttagttaaatcccacaaattgtgatatgtggtgttttaattattattcaaaataaaatatttcctgatttttcttgtaacttcttttttgagcaatggtaatgatgtggtgtaagtcctgctggactatttttaaataatggggacaaatacacttctatcttacataaaccactattattttagtgttttctattatatgcacccaaacttattgtaactaaaatgaatgatagaataatattatcggtaatttattcccatatctaaattacctctgtaatttcattaataccaaattggcctgattttccagtttctgctttaaatataaaagttgttaatgtgtagaagtataaaattagaaagtaatagggaaccatctttgctctaagaaagccacactataagaaaactacagagcaacattccttatgaacactgatggaaaaatactaaaaaaaaatcagcaaaaaaatctcagcagcatattaaaagcacactttaatccttttgactaagtaggatttattcctggaatgcaaaaaaggttcaacctatgaaaaatcaacataatataccacattaacagaatgagggggggaaaaaatcacatgatcatctcaattgataccaaaaaaggattttacaaaatttaatacactttcatgataaaacactccacaacagggataggaaacactaggaatagagggaaactacctcaatataataaaaggcacatataaaaatctaacagcaaacatcacattcaatggttagaagttttttctttaagatgaggaacaatataagaatgcctattttcaccacttgtagtcaacatagtatccagaagctctagccagaggaattaagcaagaaaaataaataaataaataaaagatacccaaattgggaagaagaaaacttatctgttttcagaagctaagatcttttacgaagaaaacactaaatattccacaacgaaaaaccctgccagagtaagtgaattcaggaaagtagcagcatacaaagtcaacacaaaatagttccatttctatatactaagaataaacaatataaaaagaaaattaagataacaattccatttacaatagcatcacaaagaataaaaaatacttaggaattaatcaagaaggcaaaagactcgtacactgaaaaccacaaaacactgctgaaagaaatcaaagaaaacacaaagatatccacattcatggattggaagacttaatattgttaagatgaccacactaccccagattgatacagatattgaatctgtattgatcaatatggattttattgattctgtacattcaataaaatcccctatcaaaatccaaatgacttctttttttcagaaataaaaaaatccatcctaaaattcatatggaatctcaaaggaccctgaatagtcaaaagcagcttgaaaaaaagaacaaagttggaggacacataccttcctgatttgaaaacttgctacaaagctatagcgtggtattggcaaatcagacatacagaccaacagaataaacagcccagaaataatcccttgcatatatggtaaaatgctattgacaatggtgccacagtcatgcaatggggaaaggacagtcttttcaacaaatggtgcttgggaaaattggacattcacattcaaaaagatgaagttggacccttacccaacaccatatacaaaatttaacttaaaatggataaaagatctaaatgtaagagctaaaattaaagaactctcaggccaggcgcggtggctcatgcctgtaatccctactctttgggaggctgagggggtgtggatcacgaggtcaggagtttgagaccagcctgaccaacatggtgaaaccccgtctctactaaaaatacgaaaattagccaggcgtgttggtgcgtagctaaaaccccagctactcaggaggctgaggcaaaagaatcgcttcaacccaggcggtagaggttgcagtgagctgagatcttgccactgcactccagcctgggcgacagagtgagactctatctacaaaaaaaaaaagaacttagggcaaagctttatgacactggatttggaaatgatttcttggatatgacaccaaaggtacaggtgacaaagaaaaaactgacaggctgggcgcggagcttcacatctgtaatcccaacacttcaggaggctgaggcgggcggatcacctgaggtcgggagttcgagatcagcctgaccaacaaggagaaaccctgtcttctactaaaaatacaaaattagctcagcgtggtggtgcatgcctataatcccagcgactcgggaggctgaagcaggagaatagcttgaacccaggaggcagaagttgtggtgagccgagatcgcaccattgcactcctgggcaaaaagagtgggcaaaaagagtgaagctccgtctcaaaaaaaaaa

SEQ ID NO: 1888199 - DNA, 4001 bp, Homo sapiens
aactgtgcagcgcagcggggtgcctggggcccttagaatctgcgagaggccacacccagctctcccagcaggcagaacaactctggggcacctgggatgggcaccgttagcagccctggcacagagccgacctccaccctttgtagcatcctgccaaggcaggcctcctccatggctggggtggcagggagtgttcgctgtcttcttagacctttgggatagaagccagaggcaaggcagggttcccattcagcggaacatcctagaggtaaagacaaggcccccaggccatgtgagtcaccaggtgggggctcccgcacatactccctcccctgccgctttgcagagaccactgagacccacagtcactaagcactagggccaccctggcccaggagagttggaagtgccaaggcaggatccaacccgctgacaggtccctttgctatttcaggtgaaaaaggacggttagcttttgagaagatggacaagctctgctcagaacaaagagaagtcttttgccaggaggcagatgttgaaatcacaatattttaaaaaatcctggctgatgagcacaaatctcacatcgttttttttgctgctgcccagcctggacatagcctgcactctgggtaatggtgctgtgcactcctccaggagtgtgagctgcccagagctctacctgagactccggccattgacccagccccagggcatgggctggtcttttgtacagaggcagaaaaaagcaaggcaaaggtacagcattccaggggctgcacggcctcaacagagcgctcaacttctggctgagggtctgtgtgaccttccccgagatgcagagctgagccaaactaggtggccacctacaaaagggccaaggccaggcaagttgaggccctaaataaaaggctccaaggcaagtgtgtagaactccaggcctcgctgccggtcagctgctcggcacttctgcgtcaagaggcactggggatgcagcaggctggcaggtggctggccctgctaatgcaagactgctcaggccatttcagcagcagccaggtgtcaccttggtgagctggggaaggtgggaaggcacaaagccagggtttctacaaccacactctcagcccgactgacttgctgcgagtgctggtggagctcacagacggcggctggtggatggtggactgtgaacctcactttccctatgttcagcagcacaaagggaagaagccaccacatcagcccaggagccctgagcagcacaggcagtagggccactcactttggccatccgcacccaaatgcaatcaatcaacccagcttcggaagctaccctaggatctcgtcaataaactgctaagaagccatcaactggcctaaagaaagagttcactgaagaacgcaattgctttaaagaaagaaaaattagtttcctatttaagtcttaaaaaaaagcaaaccatgtcctgagatgtctgtgttaatagtgcagagagaacctagggtttgaggttgctgtagcaatggcattggagaactttaacttgaacattctcatcgatacttcctggacatattttgtgtttttaacttacttagtatttatttgccttgttcatatgttcaattttctgaaatttcaattaaactattggtgtttcactttttacccaaaagagtagacagcagttgtttccccaaatacctgccagtgaggaggtcactcctgtggtcttgtggtgcgctgtggggacacttggagggtggcctcaggcagcagctccggtaaatgcagtctccaggcttctctgcatgctctcgaaggctccaggcgtgctctcccctatatgggcactctgtggcacggcctttgcccttttgtcccatctgatttctggcaaaccctctctttttaagcatcagcagtaccagcctagagcaggggtcctcaacccccaggccacagaccggtactggtctgaggcctgttaggaactggactgcatggcaggaggtgagtggcgagcgactgagcatgaccacctgagctccatctcctgttagatcagctgcagcatcaggttctcttaggagcgtgaaccctattgtgaactgaatgtgtgcaagagatcaggttgcaagctccttatgagaatctgatgcctgatgatctgaggtggaagtttctatcccaaaaccatccctcaccacccccaggcctgtgaaaaaattgtcttccatggaaccggttcctggtgccagaaaaggttggggaccgctgccctagagcatcctccctcttcttgaaagcttagatgcccttttttatacctgaaatggtggaagccacactgacttctgcagccccaggcccctgtgggtccacatgaccacagcctgtcctcttcccagtctcatgagcctgggcctgcagccagctttgaaacagtcgaggaaacttcgagggtactggggaactcttcgtactattttggcaacattttgcaagtccaaaattacttcaaaaagtcaaaaaaatcactttggggggaatttacattgtttaattttgtacacaaatgaaaaactatactaatctgtcttatttctaagtcaattctatatcaagtggactttacgtactgagatgtggtaaccattgtgtcttacaggtaattgggtaagggatatggttttgagattacaactcaaaacactgttcttcaaacaacactggtaagtttgttaagttatctgagggccctacacaggcaaagcgtcaatttgggaaggaaatgggctgaggcctaaggtgttcaacaagctcacagtcaaggaaagcgctccagcctgagggtgctggcaatgcagggatgctgaggttaattcttagaagtggaaaactctaaccccagctgattgacaacatctgtttcacatcagcagggatagaaagaaacaggagttactcatcctggtttagctctattaagcaaagaaaaaaatgggaagcaccccaaattcatgttctttagaaaaaaattttattgttgcagctaaaatgcaaacccatcatgaatatggcaagttggaaaactgtacagtctgacagttctgtgaggtcacagaagaccctgagacactcccccccacccacccggtcatgcagccacgtatccacacacacctgaaaaggtattataccaaaacaccttgctttttttgtttttatttttgtaaaaatggtttattccatggccattgtaaaaaataatgacctgatgagtaaatattggcttaaggcatatagcagagcagctcgctacctctctaacataatgtgtaacaaggtggagagccagctgctctccaaggataggaggttaaaccagtacgtccattttgaaatgctactatatatacacacccaaactactacatacatatacaggacttaaaaacaacaagcccagctcagaatgcttacagcctggcacctaagccttatccacacctcaccatagctctgcagggtgacacctcgaatgttcccaccacagaatttctctgtactggcttctaccacgagaaaggcaaaatgtgaaaatgctggcaagagagtagctcgggagctacagctgccgtgtttttcatgttaaaaagccacttaatgtggaggtcttcagttccctttgcaggaagagtcgtgagcaccatcaggccccacagggtttgagggtggggcagacgcgcctctctcggcaaggtgaaccgggacagagacggcggcaggctgcctaaaggaccgtcacccaggctgtttcaagaagtgtggtttccagcaggtgcctctcttccaaatcacggtctgctcaagaagagtgttgacttggaatggcggaggctgatcccaaaggtggggggcggggggtgtccctgcttccctaaatcatgtccagagcgtgaggtgtgaatatggcttcccatacccttggaat

SEQ ID NO: 1888200 - DNA, 4001 bp, Homo sapiens
cagcctcccaagtagctggaattacaggcatgcaccaccacacctggctaattttgtatttttagtagagacgggcttctccatgttggtcaggctggtctcaaactcctgacctcaggtgatctgcccacctcggcctcccaaagtgctgggattacaggcgtgagccactgcacccggccatgtggtctttcatgttagagaaccaacccagagattgaaaagagccatcaccatgtcccttgaggtaaactgccttgagatctcagaatgggggaaacattacagaagaaaccctctcttgatcaaagaggggtgaaagctgcatgtcgtaagcatgagtctaatgctgggagctgagggctttgacacacggttgcccccttctgattcatatggagcccccaggactcaggtcaagaagctgggtacaggtccagcacccccacttcctcaatctggaaccgtgtccaatttcttcttgcatctcaacttccccatcttaaactgggaataatacgtattccaggatagtttgaaaaattaaatgagaaatgaaaaagtataagctgatgaccactgttgtcctgtatcgtctcagctggcaggcacagcaatgtgtattaccctttcacacatttgactcttgaacaccgtgggggattaggggaccaactgctccaccgccccctgcacaagtgaaaatccacaagtaactgttgactccccaaaagtttaactactaatagcctactcttggctggaagtcatactaataaccaacagttgattaaaacattttgtatgttatatgtatcctgtgttcttgcaataaagctagaaaagagaaaatgttaagaaaataagagaaaatggattttctcaattcatattctctattcattttctctattcatatagattttctctattcatatagattttctctgttcatattccactattcattaagtggaagtggactgtcatagggtcttcatcctcatggtctttgcattgagtagactgaggaggaagtggaggtggtcttgctgtctctggggtggcggaggtagaagaccaccagcatgtagggggacccatgcagatcaagccccctgttgttcaaggctcaactgtaattgctttttgatccatctgatgaaaaaggctcagtttcagaataatgtatctttgacacctcactttactcatttatcttttcagtaaagagcacagtccttggactcagatcctttgataattaatatttcataaagatgcattccctttttattgtattaattattcctttatctcctattaatacaaatgacactggctttccatctgtgtaactggttccttttgaaataactatttcagcttaacaagtcaactaaggtgacaaaaactagatcataatagagacaatacttagacgtagcaaaattgcagggaagaaatgcagtgccagtggatgtggccaaaccctcagagaggaaagaggctgaggctggacaaaggctgatgttggcgacacgtgtggggcagcatcagacgtgtgagactgcgtgtttctcgtgtgtgtgtgtgtgtgtgtagagaaagaggaggagaggacccacaccagaaccagatgctgtatggggtggaaggggtggacaggccccgcatccaggcagccttctcccttcccctccacctgcatcagctgagcatgtgaagtccccctggcaggcccccgtgcagggactcaggatgcaaattgggcccgaggtggaggtggaggggtaggtaagatcacctcctgctttggctgttttcttcttcccgctggcagcagggcaggaccctgggctgctgttcagctacattctgacctgcatgcattggggtaaagataggccactgagcctgaggcctcagaggcagctgcttcctctcctgggatcacaggtgaaaagcaggtgtgctgactccactggcagactcctgatctccaggcttctgaactgtcctggctgtggtagtcagtgctgtcctggcaggtttgctacacagtgctcgagaaaacccggagccagccagagcccctcctcagcactttcaacaatgacctgtaagcatctgtttcccggtcctgaatcccttcctgcttgacccagcagaggggctctgtgtcatgagtgaactctgacagtcgccctacccctctacctggtgcgtggaaggcagaaggaaggacagaattgtcatgacaatgtcatctccaccggatcctgggtgatttgctcagggcttaggagcgtgtgatgacttacacctgacccatccctttaccgcctataggagatccctatcctgcgtcttttcaccttcttggcagtgtgcaccaggcaaaccctggccgattaaagcccccaggagtcctgccctcacctgcacacctgtccaactagaaaaggccaagtgcacatctccctccatccctgagggtggaagttgaagatgccatgacaaacattgggtcttctttttaaatgaatttcctagcctttaccaatcctccccgccccccacaacaaattttaaaaccccttttatttattttgagaagagagtctcactctgtcgcccaggctggagtgcaatggtgtgatctcagctcactgcaacctccgcctcgcaggttcatgtgattctcctgctttagcctcctgagtatctgggactacaggtgcccgccaccatgcccggctaatttttgtatttttagtaaagacagggttttgccatgctgcccaggctgatctccaactcctggcctcaagttatctaccctcctcagcctcccaaagtgctggaattacaggcgtgagcgatcacacctggcaaaacctcttttataagctaaagtgtgaaatcatatttcacaaagaaaatacacaggtaggcatagtttccataaagaaagagtgagggaggaagagagaaagaactatgaccagattgcaaagggctaacagaaacttgatttttgagacggagtctcactgtgtcgccaggctggagtgcagtggtgcagtctctgttcactgcaacctcagctttctgggttcaagcaattctcctgcctcagcctctcaagtagctgggactacaggcgctcaccaccatgccagctagtctttgtatttttagtagagacggggtttcaccatgttggccaagatggtctcaatctcttgacctcgtgatctgcccacctcggcctcccaaagtgctgggattacaggtgtgagccaccacgctcggccgggaacttaatttttttagcactatcagaataaccctggctccctgctccctctggtttgctttgattaacatttccaggacaagtctatggaaataaccaaccccaggccctgcttagcctatttattttctgtagcaactgtggcattggctctacagggtcagattcgtaattagaactccttgggtggcagtctctgttgctactgcaaatacatttatcaagcaacacgatgttatttatttcaactcccatttgtttcttgccacaatttctatctggaaggaaggcctggctgttcattttggtgggagaactcaatacaaagttaattactaaaaagaaagaatataaagaagcctggagactatccaggacatttcttccaaaacacattccaaggcaactggaaccaagcaagagaggctcacagtgctttgaataagggaaagagggcacgaggagggaccaggacaatctccagatcttgccaatcctcgttagggaccgatacacagaaaatgaacggcaggaacagggaactggctgcttctcacacactcatcattaaggcgctacaacaatttttttcttccgtttgttccttctctcttcacactctaggaactgcaggggcagagaaatttagctgttagttttcaatataattggacttcgt

SEQ ID NO: 1888201 - DNA, 4001 bp, Homo sapiens
atgcttattactatcaggtgcatttaccctacattcccccctcatgaacattaaaatgttgaggtttcttgatggaaattttttgtccattcgtaattttggtttaatcattgttagtttttgatcaagctctgtggggcctctgtggcatgtacagtgctgtgctggacaaggcaggggactaacagagtaacacacgtccccatcccctgcagagccggagccctgcccaggagagagagagggtgtagacagcctcatgacgatgcagaatggggaacaactgtgtcatagcaaaggaccacgcatgatgttaggggtgtttaaagggcagaaaagaagtctgttccaagagtcagggaccagggaggcttcacacaggagctggacaccagagcagcttctgctagggcctcctgggagacatagtgatctggcctctccaggagaatgcaatgtcccacctgacaaccatgcaaagaaatgaatggtgaaacagacagcaggtcccctttgcctattacactagcattaaaatgtagtggacatacctagtgctggcaacagtgtgatgaaattggcattctcatctatttctggaagcatctggcaaactgcctactgggaagataagcttttggaaatcatcagtcaacacgcgtgaagcgctattgtcgatgtttgtgtcatcggcccagcaatcagacatgtggaaatctgtcctaacggatgttgttgttagcaaaagaaaaacaatattctccactgggttcatttcccaacagctggaagcaatacaggcatcagagaatggccacctgaatgaatactaactgctcagtgttgagtagcccttaaaataatttttctgaagaaattcagccacctgcaaacaaaaatcttaaggtatgttaaattaaaaatcatgtctcagaattttactgaggacaattgcaaatactcaacaagtaataaaccttgggcaaagatactggaaggaattacaaaataatagtgctatcattaagatggtgtggttggttgtggtttttattacatattttccctgcttttcaaatgcgctaagatgttcttacagataacagttggagaatgcaaaatattagagagagagaaatgagaatgaaaggtcacctccttatcgttgaagtggtaataaaagtagtcacaggaccttctcattgccagcagcactagccctcatgtgaactttattttcattcttttctgttgctgaaaattggtatccaagggcagttaagtctcaggggcatggcttgacctcaggctgacctcagcccagcaccaggctggatttctgaagctaagcaacaggttctgaggtaggtcagagagggtggtcacagcctcacttaaaggagagcaaacttgctaaatagatggcgagaacaagccacctgcggtgcacaagccgcatcccaggctcgtggttagaccatcctttagcgaggaggtcaaagagcgaaggaaaaatccgcgaattcatccaagtgcagaaacccaagatgagtgtccttgggctgacctgcgctcattagaatactaaagaactgggtggagatttacgatgctaacgagacatgcgatgtgtgtactagcatgcacaaccacagcacatgtgccaccaggagacagcccagaacatgcttcacggcaacaccccttcccagcccttcatgaataatcatgtaagacccccataaagggggtttccccagtgtcggccagcactgcctcgcctttgagcggccgctccgatccgctggcagagtgcgctttcgctgtgcgatcaactcccttgcttacctttactttggacgtgctctcaagttcttttgtgtggcgaagtcaagaccctgaaccggtccaccagcaacagttctttcggagtccctcaaccacaggccctgaaagccgctgagttaagtctttaaactgcgggagagcctgggagcatctgaaacgcaaaaggactcccagtggatagggaggcagcaccctgaccggaaccggaagaggtttgccggtgagcctgagtctccacacacagtgatccgggcacccgggctgccgtgtggcaggtgaaaccgcgtgtggtgtggatgtttctccagctgtgttctgtcgagcccctaaaagtctggcctgcattggaagggcctccccagtgtcctcgtttctgttcaaacagaaaagttcttattttctgtatttgtggtttttgcttcctcatataatttcggttgcacaaagctaaaaaatatttgaaaacctctacttaatcgtataactaaatgcaacattatcttttgcttatttaataactattttaatatttattttctatttatattaatagtgataataaaaatatagcttggagtgagagaaaagctttcctctctgttaactatcactgtatcatttaactaccactagctattcctcacaacggtttctaaagtgtaagcacctgccacctcattagcctctaagctccacagtgccagggactctttgccttagtctctgctatgtgctcagaatacccagcacatactaggtttgaacaaaatgcattttggagagtggatgctgctgccacctggtgacagcatacccacatttcatgcttagcactttgattacttaatgaaattcatgaggaatggaatcagaaaacctaagacatgcatctgtgtgatagcaatctcactttcctcacttagctttttctgtttccctactctgcacagattggagacatctgagttttctctgcccccatcacctgcacctgccctggtggcatgcacttgcacctcctctgtctggtattaggttggtgcaaaagtaatttctgtttttgccattacaactgcataaactgcgattacttttgcaccaacctaataatagggcttgcccctccagaggatagaatctttgcttgtcaccttagaacttctcacacagagcactgcattcatcaaaccctggtctcagccatcctcggggcacatggaaggtcatgcccataaatcaatgcctcagccaacatctggtctccccttctgccattccctgtgtccctgccctggcaccaggcatttgcaggtgcagggggcaacatcatttagttagcttcatctgggcagggaggagcattattaaacatgagagatagctgttggctcatggaaaagattagttttaagctatttaaggcaaagcaataaaggatgtggtttcctcctctgacatgcttcctaatttgtagattcatatgacatcacactggattacaaagccacattactctgattggtaatattatgctatcctaattcagtttgtataattatttaattttttaggactgctctcaaatattaacattgtgttcggtagaggccagaaaaaattgggaacatgcatccacacacgtggagaagcttaattgctagaataatgcagggcaattattgtaatgagaacaaagcctcatgtctggcatacacatgtgactgtgtccagcccaacttccactgaagtgacagtcactggactcgaagctcctcaaggacaggggctgtgtcgccttcacagacatgactcattgccggtgctcaatcagggttgagctgacttgacttgaagccaaataaggacaaagaaaggtcaggcagtcctgaaaaagccaagggtctgagagacaacactcgctgttgtcctcgctgtttaattctctgaggtccattaggaagtaggtaggagccatgtcatcatggccacttgggccaatcgtctgcacagatggggaaggcatctgcccccacagtgaacactaggcttatctgcctcctaaatctctctccaggctaacttccatggttattcaaatccctctattaaatattcagacctccagcccctggacctctatggtcctcctgaca

SEQ ID NO: 1888202 - DNA, 4001 bp, Homo sapiens
gggaggctaagcgcccacatcccgccccagcagcctgtcccgcgcccaggtgtgcccaggcaggtacctgcttccccgcatagcacttgcccgcatagtcctgcccctgcggggtctgtacgacgcagtcctgtggggtgcagggtgaggactccggtgagcgcagggagctcgcaccggctccaagacccaccctccacctcgcgggctacgggctacgaacctgaaagggcaggaaggagagcgcgtgctcgatgagcagccgcatcagtctcttggagtagaagatgaactcgtcgcgactggtctccttgtccctgtggggccaacagttgagcgggagcacgcgcccggggccgccccgtccccaggtgggccctcacctgatgatggtgtgcatgccccgtacctgcggcgtgctcttcaggacgctcagcgtccggggcagcgggtggcactggtgtgccgaggccagcgcagccctggggacaaaccgatggggaacactcaagaagggggtcttttcccagagccctccctccccacaggacggctgtgcgtcactgtgaggggaacacacgggccaggcacagcacgaggtgcagagcgggcctgacttctgcctggggctgagctggggggagacgtcgccctacctgagctgtcaggcaaaggcgaaagatggcggcgaacaacggggcaagctcaccatcaggcagaaagctagcggggtaggctgtgagggcccctcccagtgcgggacccctcctgcgctaagaggaagcagaagtgggccgggcacagggcgggctcacacgtgctgataggtgtcataccccagaatgggtagcttgtccccagcctctccccgggggaactaaagctttgtggggtcaggccccgccctggctcctccccgaggtggtgcgcggcccctcaagagaggggggtggggggcaaagctggctcagtgtctcttggctgtcccgtcccgccccgctgcccaagcctggggatggccggggcagcagcaggtctaggagcgggcaggaaaagggcggggtggaggcaagaaagaggtgggacagggaggaggcaaagccggaaaggggcatgacaggggcagggaatggggcggggcaggaaagggggtgatgcaggggcaggaagaggaaagcgacaggccacagaattgggtgtggcaggggaaggaaagaggcagggcacggaattgggtgtggcagggcagaaaagaggcgtgacagcggcagggaaaggggcggggccgggaatggggtgtggcagggcagaaaagaggcgtgacagcggcagggaaaggggcggggccgggaatggggtgtggcagggcagaaaagaggcgtgacagcggcagggaaaggggcggggccgggaatggggtgtggcagggcagaaaagaggcgtgacagcggcagggaaaggggcggggccgggaatggggtgtggcagggcagaaaagaggcgtgacagcggcagggaaaggggcggggccgggaatggggtgtggcagggcagaaaagaggcgtgacagcggcagggaaaggggcggggccggaaatggggtgtggcagggcagaaaagaggcgtgacagcggcagggaaaggggcggggcaggagcaggaaagagggcctagcgggagcagcggggcaaggggctacgggaaggcgggtcacacagcagcaccacggagcacactgctcacatatcccaacgtagcttcctctgcttgccaggtgaagagcatgttcagggagggaacaaggcaggaaacgggggtttacagagagaaggaagagaacaaagagaaggctgcttagttggggagcagggcgttccccgcaggcctgaggaggagtgtgggcggtcaggcccccagccctgcctgaccctccctcctgcccccgaccaaggcttcctggggctgaaggaagtgagtgcagccacaggccaacacttccttggctgaccagacgacggaaaatgtgtctggctgcgttcaggtgtttttccaagtttgaaaccctggaaagtttttcctctcagaacaaaagcttcaggaggaacctgacgggacaagacctgcgggttcctaggccgaggagagggccaagcggagactcatgcaggcaccggaagctggacggctggtggacgggccctggaggcatttccaacatttggcaaactctttggagggctctgaatgtgagggctctccctccaggtggctcagtcaggagcctcccaacccacagaaggcagggagaagggcaggtcccttgtggctgacccccctgcatgcctgcccttggggagggacagtgggatgcggccccggcccagcccaagcttcttgctgcagttgcccagttcctgctggcagagctgtgcgggctgcgaggacagagctggggcaagcaggacccgggtgggtgggaggacaggcgcgaggccctccacctgcaaccagggaaagctgactggtccgtgaggctgggcacaggaggtacagcaggctccctggctgctgggacatgtctgtagtcactgccccagaggcctggcagtgctggctcaggaggacagctgtgctctctggggtcaaatcccatagacagactcaggagtcaggggagcctccagcaaagtctggccaggacagggtcaggactccgtgacgctgggcaagctacttcacgtctctgtgcctcagtgtcctcatctgccagcaaggggaggcagaagcagggctgggaccactccacaccaccccttctgtgactggggaagagccagctgcctggctggatcacagcccagaccccagagctccttggaggtgttggaagtgcctccatctgtgcagacagctgtgcaagtcttacctgacgctgagttcacgctgtggcagcaacacaggaagacacaagggaacggtggcgcgtcagtgaccagggcaggcggccaggccacccccacccaggaatggacatgctgcaggcccgcggggacacagccagccatggggggtggcaagcttctaatgcctgtaacctggggaccacctgggccagacctgcagttctgcgttggggcaatcagagccaggaccctgggctctgttctgcaggcctcaggccttcaacatcctggtagggagtgtgttcagagccactcaggctccaaggcccagccatagaatgcctcagggagcaggggacctctggtgggggtgtcgctcctggggtgaccccctgagaaagagaggagcctggcctggcgtgggactcagcagtgaaaccccacaatcctgggccagcaggtcatgcctgtcttcccaaaagctcaggctgggtgtgctgagcgggctgcaccctcggctgggtcctgagcacctgtacccccaccccagcttcctcagggaacccaggccctgcacagcacaacgggatggggtctgggctggacaatctgactggccaagcaggctcaggacactcagggctggcacctggcaggggacagtgaacgcagggggatgaggtgaccaggccactgggggtggtggcagcggagaagtgggtagaggggctgggggctaggccgtggggacgtgggaccccgctcacctcctccagctggctgtgcacgtgctgcacaatcaggtcgatggccaccgtgttgccgctccctggggcgggatgggggggcgggtgaccgggggctgggccgttggcctgcccgacacccacccaacaggcagcccagcaggctcacctctggggaccacgatgtctgccaggcgcatggtgggctggatgtactggtcgaaggagggcttgacaaacttgttgtactgcttgatgacaccctcgatgtcccggccgcgctcactgatgtcccggcgcagccgccgtaccaggcggatgtcggagtctgtgtccacaaagatcttcatgt

SEQ ID NO: 1888203 - DNA, 4001 bp, Homo sapiens
gctcgcatctcctcactcagctgccctgcaatcattaaactctttctctactgcaaactctgtttatcaatttatcagactgtgactgcacaacaggcatacaaacatgtgagtcctgtatcatttataaatatttaacttttatgtatatttaactgctataccataattgactagtttgtatgttaatattagtaggtaataataatatttatatttcctccataggtagcttctgggggcatttctgcctggtaaattttattctttaatgacaaatactaaagtaagtaactttaaaatattattgagaattttttttctattgatgggacactgaatttgtaggtggaaataaaaacctagctttttactaaacttaattttttatttaaacacaactcaaaatgtaaatataaaattaagaatttccaaaattaaacttagttttaggaactcacataagcaagtgtaatactgaagagcaaagaaactgtgctctataaaaaaaaattacaagtaattcttgaaatctaagggctaatttgtgaagtaaatttggaagctactttatgctgtagctccatcctagagaccgagagaactgcactaggaaaacctgttcaacctttttttaaccagaaattctttctttctccagaaatccttttcaggtaatgcctaatgatatctcattgaacatgtattagaaattgtagtttaatttttaattaaataattcagtgaaaatatattaattgtaaagataaattttaacacatatgggaatactagacttacggtggtcatcaacccaaaatgctacaaaattacatagaatggttagtttggcaaaaaataaatatcaccactagcaccaaaaacctaggtttcaaaaagaaataaaagaagcattccaaaatgttaaaaatttttcatttatctactttctaaatgttctttgaaacacttcttatgtcatcataattttgaagtttaaaagtaaagaaatagttattctagttaatatactaccttaaagttactctggctcacaaacagaacaaagcaaagcatgacttgacagcagtcgaattacgggaaattgaagctaaacgaaattggatacctcacctcatctaaactccttactttataagaaggaaaagcatcacaaaatgttgaggccatttaacttaaagtcatcaggtgagttagagataatttgagaccactgctttttttctctttgttactattctcttatgaagttttgcctgaaaacaggtctactaaaaatataagaatttgtaatgaagatgaacatatatcattgcctttctgcttaggattgttcaatattttcccattgataatatataaaatcctacctactttgacctcctctcccaccatttctttgctctctatctcctagaacttcattcttgactccaaagctgcaccctcctgcatcagtttcttttgtttgaaatcttcagctcttcataaatttcatccagcaaactcctatttatcctttaactccctattattttttcttacagtgccacattttccttcattagcacatatccaatttaaagttacatagtttgagtttttgcttgactttctgtttctgcactaaagcataagctccacaaaagcaagtatcatgtctgatttaacagggtatattctattcttttttttccacaaggcggtgcccggttcggtcccagacgcggccaccaaccgacgtaaagccggtgagccgctcggggaggagagaggatcggcgggcggcgggcggggaagggggcgcagacaggcaagggccggggaccgcgagggcaagggcacctgggagcccgcagaggggcggctgagggagaaacctcaggcatggccgggccaccaggaaaacacggccgcgggatcccaccgccacagacacgagggcggtcccgcggcgccccgcctgggacgccggaaggccctcggcacccaccaagacctgcctcacgagcccctggtcccgccaccggggccccgaagcgaccacagccacaaactcaacgccagggccacatcgctcgtgattctcgtccatcctccgacccggtcccgctccgggagaccggcgcgcccccaccgtgggacgctttcccagggccaggcggcccgaccacgtgccacgcaaacgccgtcgtccgcaccggtcgcgactcggcaagggagcgggcggagagctgactcgcggcggaggggggtcactcgccggacggaacgctgcgcgcagccatcgctcgctgtcagccgcgtcccaacccgctaggacgctgggccctgccggcgggatcctccccttactcggaaaggggaggcgccggccacagtaggcgacgagccgcgctcggccaccaccgcggtggccggcggaaccctcgctctccccccgtcaccccgtcgagggggaagctgaggagggttcctctgcaagcgagtcgctactgcagcgctaccataacggagagagagacagaggcggcaggccgggggatcccgtaccccaaggcacacctcttggatcgctagagaaggctttctcaccgaggatgggtcacactccccacccgccagccgcccctcgtggggcccgaggggcccgcagaggcgctcagggaggcctggggaagggagggggcctgtggtaccaggaaaaacctgcgtgcggcaaccttgagcgttcgcggtcagggcggggaccggcaggtgcgagcgtgagcgcaactccacaagcccccgcctcccacccccccccccaccccgtccacccgcctcttttcttcagaggcaaagcacctccgagtaaacccacacacgaccggtcggaggcagaacggtagcccctcggcggccggccggcgcacgcgtcaccagcccaagcccaccgcgatcgctcacagggcccgtgcgcacccgccagaggggagcaccggacgtgcgctcgccggaccaggcgggcgcccttccccgcgtgggaggggcgcgtctcgtctcactcaaccgcctcgaaccccacaccgacgagctccctcaggacccacgcgcggacaccgaggcgccgaccggaggagggggcgctgggggtgggaacgacacaccaccgctcggcctcgggaacctgagggacaacccggagcgctccaggagcaccgcaaaggcccagggggagccaacgctcgcgcaaactccccgggagggcagcacgacgggccggcgggacagcacccccaccgctgcggaggggggccgcccgcaagtcgacaaccacaggaggcgagagcgaggggtgcctgccgcgtcagaggaccccccgacccaccccgcgaggcagaaggcgggggcgggacagcgaggtcaggccgggttccgcaccccatgccttcccaacgcaccacccgcaggcgaggaagaggagagacaaggggcccccgcgggcgggacgagaagaagggtcccattcgccacgaatgtccgcccctcgcccgtcgcggctcggacacggccagggagagcatgacatcaccatattctattcttacaagagtgctgccacgtaagtgtcaatgaatgtttgtgaaataaatgagggactaaaggagtgatcgaacaaataaaaataagttatctgtgtgtattgtatgtgtgaataagattttgagtttggccaaggcagttaatcacatattaacaactctttagatacataaggtttatagcaatgaggtacaaaattggttcaacaccaaattctaagatgaaacaaggtttatgttcagaaatatagtgttactttttctaatatcatttgccctccaactatcagcatgacacatgcaaaccattgatacgtgttttttttttttgtattgaagattccacatgaagaaaaattattatatttccaataggaagtcctcttctaaatgaca

SEQ ID NO: 1888204 - DNA, 4001 bp, Homo sapiens
tgttctttgaaacacttcttatgtcatcataattttgaagtttaaaagtaaagaaatagttattctagttaatatactaccttaaagttactctggctcacaaacagaacaaagcaaagcatgacttgacagcagtcgaattacgggaaattgaagctaaacgaaattggatacctcacctcatctaaactccttactttataagaaggaaaagcatcacaaaatgttgaggccatttaacttaaagtcatcaggtgagttagagataatttgagaccactgctttttttctctttgttactattctcttatgaagttttgcctgaaaacaggtctactaaaaatataagaatttgtaatgaagatgaacatatatcattgcctttctgcttaggattgttcaatattttcccattgataatatataaaatcctacctactttgacctcctctcccaccatttctttgctctctatctcctagaacttcattcttgactccaaagctgcaccctcctgcatcagtttcttttgtttgaaatcttcagctcttcataaatttcatccagcaaactcctatttatcctttaactccctattattttttcttacagtgccacattttccttcattagcacatatccaatttaaagttacatagtttgagtttttgcttgactttctgtttctgcactaaagcataagctccacaaaagcaagtatcatgtctgatttaacagggtatattctattcttttttttccacaaggcggtgcccggttcggtcccagacgcggccaccaaccgacgtaaagccggtgagccgctcggggaggagagaggatcggcgggcggcgggcggggaagggggcgcagacaggcaagggccggggaccgcgagggcaagggcacctgggagcccgcagaggggcggctgagggagaaacctcaggcatggccgggccaccaggaaaacacggccgcgggatcccaccgccacagacacgagggcggtcccgcggcgccccgcctgggacgccggaaggccctcggcacccaccaagacctgcctcacgagcccctggtcccgccaccggggccccgaagcgaccacagccacaaactcaacgccagggccacatcgctcgtgattctcgtccatcctccgacccggtcccgctccgggagaccggcgcgcccccaccgtgggacgctttcccagggccaggcggcccgaccacgtgccacgcaaacgccgtcgtccgcaccggtcgcgactcggcaagggagcgggcggagagctgactcgcggcggaggggggtcactcgccggacggaacgctgcgcgcagccatcgctcgctgtcagccgcgtcccaacccgctaggacgctgggccctgccggcgggatcctccccttactcggaaaggggaggcgccggccacagtaggcgacgagccgcgctcggccaccaccgcggtggccggcggaaccctcgctctccccccgtcaccccgtcgagggggaagctgaggagggttcctctgcaagcgagtcgctactgcagcgctaccataacggagagagagacagaggcggcaggccgggggatcccgtaccccaaggcacacctcttggatcgctagagaaggctttctcaccgaggatgggtcacactccccacccgccagccgcccctcgtggggcccgaggggcccgcagaggcgctcagggaggcctggggaagggagggggcctgtggtaccaggaaaaacctgcgtgcggcaaccttgagcgttcgcggtcagggcggggaccggcaggtgcgagcgtgagcgcaactccacaagcccccgcctcccacccccccccccaccccgtccacccgcctcttttcttcagaggcaaagcacctccgagtaaacccacacacgaccggtcggaggcagaacggtagcccctcggcggccggccggcgcacgcgtcaccagcccaagcccaccgcgatcgctcacagggcccgtgcgcacccgccagaggggagcaccggacgtgcgctcgccggaccaggcgggcgcccttccccgcgtgggaggggcgcgtctcgtctcactcaaccgcctcgaaccccacaccgacgagctccctcaggacccacgcgcggacaccgaggcgccgaccggaggagggggcgctgggggtgggaacgacacaccaccgctcggcctcgggaacctgagggacaacccggagcgctccaggagcaccgcaaaggcccagggggagccaacgctcgcgcaaactccccgggagggcagcacgacgggccggcgggacagcacccccaccgctgcggaggggggccgcccgcaagtcgacaaccacaggaggcgagagcgaggggtgcctgccgcgtcagaggaccccccgacccaccccgcgaggcagaaggcgggggcgggacagcgaggtcaggccgggttccgcaccccatgccttcccaacgcaccacccgcaggcgaggaagaggagagacaaggggcccccgcgggcgggacgagaagaagggtcccattcgccacgaatgtccgcccctcgcccgtcgcggctcggacacggccagggagagcatgacatcaccatattctattcttacaagagtgctgccacgtaagtgtcaatgaatgtttgtgaaataaatgagggactaaaggagtgatcgaacaaataaaaataagttatctgtgtgtattgtatgtgtgaataagattttgagtttggccaaggcagttaatcacatattaacaactctttagatacataaggtttatagcaatgaggtacaaaattggttcaacaccaaattctaagatgaaacaaggtttatgttcagaaatatagtgttactttttctaatatcatttgccctccaactatcagcatgacacatgcaaaccattgatacgtgttttttttttttgtattgaagattccacatgaagaaaaattattatatttccaataggaagtcctcttctaaatgacaacaaatctgagggtgaacacatttgttaaaaagagagagattaaaaagttaagatgctgtttgtacagtatataactgaacaaagttgtatctagcaatttgacaagaaaggtaaaacagaatattaacctcagcacacaagtttagctaatgatctggaacggggagttgtgagtagagaggaggacaaagatgaaagacaaccatttatcccaagtttctttccaaagatgaaaaataaaaaaccctcttagtaatgttttttaaattctaactactttcaagaacacatcaataagatatagagagataacaatcaagttggacattaacttaaaagtcagatgactttttaagcataagtaacttagaactgtaaagtaaaaaacactaaatgtcaatgactttaaagtggatactgaagtaaaaaaaaaaccttctattaaaaactagactatatgcagtaacttatgtagaaagcttagcataaatatttatacaaaattgccctaccatattttattaaaatattacattataaattaagagaaaataattttaaaaatgagttatattttaggcaatttttctcaaaatgagtttcataaattgatatggttattagcatagtaatttcaataataggaacaaagaaaccaaatgaaaacctaatgtgtgtatgtgtgtgtgtgtgtgttttgtgtgtgtgtgtgtgtgtgtatacaattacctggaattccaacttcaatatgtttaaaaatacttcagtgaaaaacattagatttcttttaaggtagtttgtaagatatttattaggtttatttgtaggccttgcacactaagttaagcaacactatcataaaataaattatttaataatgaaacagaaactcaaagcttcatattataattaaataaactctaaagtatctaataacttcaactgtatgccctt

SEQ ID NO: 1888205 - DNA, 4001 bp, Homo sapiens
gaacctgtgcctccaggaagcacaccatctggtggaagtcaaaggacagcagccagctgataaggaacacgtgttaagtccaaggcaatctggaagcaaaggcgtggggcacggacacgtcaagggaaacttcccggaggcagcaacttctcatctggggtgtgtgtgtgtgtgtgtgtgtttgagacagagtctcactctgtcaccaggctggagtacagtggcgcaatcttggctcactgcaacctctgcctcccaggttcaagcgattctcctgcctcagcctaccgagtagctgggactacaggcgcgcgccactatgcccagctaatttttttttgtatttttagtagagacggggtttcaccatgttggccaggatggtctcgatctcttgaccttgtgatctgcccaccttggcttcccaaagtgctgggattacaggcatgagacaccgtgcccggccagcctcatctggttttatgagggaaccaggcagttgagaggtgtgcatggttggtggaatagggcattctaggccaaaccactatgatgggagaactgagtggggtaggaggtggggggaactgcaaataacacacagttgatgccaagtgtgccagaggaaaagacagaagatgagggcagtgggaggcaaccgcctaaaggcttgttttacagaaatccagggttatgtaaccagcaagggaggtgggcggggcgggcttcaatccaatgagcctggcttcaaagcctgggggtggtctgaggacagagcacagcaggagctcctgagaagcctgctaaaaagtcaaagtctgggccacacccagaccaactgaattagtaggatctggaccccaggaacatacattattttcacaagtgcccccagtgactctgatgcacactacagttagagacccaccacccagagccctcccacctctccactctacccttgctgatgtggactgactctcaatgcccccaagaagtaggatgattcatttccatggccatggattatgctttcagaaacactcccaaacaacccggggagttctgggaatcacaatcagatggggatggggaggacagggggagcagatcaggagaagaaatttccggccaggtgggaggaggtagggttttttgttttttgtggagggggttgcaggcatagggtaggaggtcctgttcaggcactcagcaaacaatccccagtccccagctcttcccaggactcaaggacaagaggcaaagaaccacggaaacagccgtttttattccacaaacagtaaactccatccactacacagtgacatacactgtgtagcacaccccatcaccttggccagtgctgccagccgacctttctgtggtgatggaaatctttttctgtgctgtccaatacagcagccaccgaccacttttgcttattgagcacctcaatatagaggtggccactacaggtgaggaaatgaatttctaagttaattcaaattcaaatgccacatttggctcgtggctcctgtactggacaacacagctgtaggccctgacctggtccagggcactttggttcaaaagccaactctgaggagagcaagtggcagaaacagcccttgggctcccctccccagagagaaacggcagctgcagctgctggaaagggcaagaatcagagtggggggacacctcgggcgcgccggataaggttggccagccgcttggccaggccacctgtgcggggctcctcgatgtggaaggttcgggtgaggagattgtagaaggagccatagcacacggccaccacagtgcacgtgaggcagatcacgttgtagggcatgctgaagtccggtgtcggcaggttcaccagcagcggctccgtgtagagccgcacaaagtagttagagccatcagagactgggaacctggggtcaggggaagagcggtgagacaggactggctgctcctccccatctcaccccatcctcattccggcagtattgggcaatgcaacacagtgtttccaatgttctcttaggctcaaaacctttcaacagaaggcatagctcaatctctaaacctgataaaggggagcggcgggcggggggcaaggggagggagagcattaggacaaatacctaatgcatgcggggcttaaaacctagatgatgggttgatgggtacggcaaaccaccgtggcacatatatacctatgtaacaaacctgtatgttctgcacatgtatcccagaacttaaagtaaaataaaaaataaataagaaagaaagaaagagaaagaaagaaagaaagaaagaaagaaagaaagaaagaaagaaagaaagaaagaaagaaagaaagagaaagaaagaaagagagagaaaggaaagaaagagagacgcctggtgttgaggtggaggaaaggggccccgcctttgcttggttgcttctttcttagcctggtttcagcctaaatgccacctcctaaatgaagccttcctagataacccagtaaatcaattcctacccaacctctaaccccattactctctagaccagaatcttccttctagactgtaagcaaagggaggccagggccaagtctgttttgtttaatcttgcacactcagtgctctcagaagcacttggcatttgataagtgcttgattaaatatttaagagcatcaagaagtaaatgtaggctgtaagtaaaagtattcttctagaagcactttaaaatcattttataaagtcttcacaaattccacagactgccaggatttttattaggattgaattaaatctacacatctctttggaagatgtaacatctaccctgaactcccctgcaggagcctggtcacctgtgttaaggcccagcaggcagctgaggatgtgttatcagtgagtgtggtcacacttacaggctgttgaagaggggactctcttcccagtccactggcttggctgctaccatgctgggcacaagggcgctgaggacagatgggctacagagaagcagagagatggcccgtgttcccatctggctgccctatcaaggggtaagcagcagaaagggtaggtcagggggatgagaggtggcctgtgggggtggagcccacctgacatagaagccatggttaggatctggcgtgtactcggtccacttcagcagcgcccgctcaaactggatggaaaccttggtgactgagttggccggcagctgaatcagcatctccaggaggtggggttgcagccggtcctgggcaggctggtagtggatgtaacctggagacatgcaaggtcacccacatctctttcctggggtcaggctacctgctgcccctgtccctgctgcttgccatggagcctcaatctgggtgcctagaagatgggcttgggagcatagaagccaggcaggcaagggaagaaagcaggggctaagaaaagggagaggatgtttccagggcagtgatcccaggatgcgatcaagagaggttgttaggagtgctgcagatggctaatcaatcttcacatcactacaactggggcaccagacaccaagtgcctgatgtgacgcaagaagaagttcacagaaccacctgggaatttttcttgccaaaaatgtgggacatgaatctaatcaggtttctaaatctaaccaccaacacacaagaaatataggagaggaggggtgtgttaaacactagcacaaggacaaacccagaatgtggaacattctacacaacaaatgacccagtttcttcaacaaataaatgacattaaaaaaaaaaaaaaaaggcatgggcactgctacagatgaagagagactgaagagtaccacaccaaagacaagacatttataataagggacattctgggtgtggagacagggagtatatgggaactctgtgctttgtgctcagtttttctgtaaacctaaaactgctctaagaatagtctagtaattttaaagaaaaagaaactttttttt

SEQ ID NO: 1888206 - DNA, 4001 bp, Homo sapiens
gggcaagatgaggggccacaaggagctgggagatccctgaacacctgggaggccagaagggtcatgtgcctgggaacagggccacccatgggaatgtgcctgggaacagggccacccatgggaatgtgcctgggaacagggccacccatgggaatgtgcctgggaacagggccaccctgctcctgggcctgatcttggcctgtccctgtcccaccgatggggtcacacgctgcaggtctggcgtgtcagcagtgtctctcgtcggctgacgcaggtgagagccccaaacccgtgtccacactccttcaggttctggagcctgatccccggttgtctcaagggaagcagcttctttgccttggctcctagcatcctgtcagtgctggacccaaatccatacccggctgacctctctccagggcacttggatggctggcagacatcgtgcacccaaacgtcctgacagaactaggcccctgggctcctcccaccccctttcccgactgccccctggccacccccagcttgcccgtgggtcagctgacgccaccttggatccagaagcgctgtcctctcatcagccagggcctgaagcctgaatagggccaggcttctgcaaggtgtgaaaacatccaccagctcccctacactcctaggaaatctgttaccatctgggagccccactcccaccctcacagggatgcccagagacgtccccgccaccgccccctgctcttcttcccccacgcatgctgtccgggaagctcttggccatcgccccagggccagcagttcccttattggggtctctgttcaaacgtccctccaccccacacactgtatggggtctgtgcctgtctttctttctttctttctttttttttttttgagacggagttttgctcttgttgcccaggctggagtgcaatgacgcgatctcggctcaacgcaacctccgcctcccaggttcaagccattctcctgcctcagcctcccgagtagctgggattacaggcatgcgccaccacgcctggctaattttgtatttttagtagagacagggtttctgcacattggtcaggctgatctcgaactcccgacctcaggtgatccgcccaccttgccctcccaaagtgctgggactacaggcatgagccactgcacctggcctgtgcctgtcttactccaccgcaggcccccagggcctagcctgggctggctcacagcagcatggataaagcacatgccgcgtgaacgggcacatgcatgtacacagcacacggacacacccttggcaagacaggtacgagagccatacatgagctccctggggccaaggcaccggccactcatcaccagggcccaacagaccctggacaggacagtgctgtgaggtggcaggggcatcctgcctgcggggatgcctcggaagccaccactgggtcccctcctgggtctgcttggccccatgccctcgaccccctcgccagctgggcaccccaggccctactcaccaggagcagctacagcagcagcaccagcacaggcagcaggggttgcggctgggggccgctggagaggctgtatcatgactggacattgaagggggccggtccgcctcctctggccctgtgatctggggaaaagtggggctacctcagctttcaggtcagaacccaccagactctccacctctcccccaccttcccatgggtagccctgttcccaggcacatgacccttctggcctcccgggtgttcagggatctcccagctccttgtggcccctcagcttgccccaccccatctcccccaggggagcagaggcagagggggaggtggcatacctgcttctcagcctcatgcggggtgggcatgggtgggcggaggaggttgcccaggctccgtggtaccagctctcagaccctcaccacagcctgggggtctggggagaggggccaaggttctgactgagaacctgaaaccccagcccctgcctaccccttaggaggggtcctgagagggtgtctccctagcggggcctgctcctgcctctggacccagctctgcctagggcttctaccccgaccccaagcttacagcagggctgggagggggtccaggatcattgaggagggagctgcagcagcttctggcccctcctcccaggctgggccccagatgaggcccccactggaggttccgagacacccccatccgctcactccctgggaagccggaagcctgggttcctctttcttggtttccggctcccagcccctcccaaaggggccccgagagtctggggctaccaactggtgcgtgcgggtggtggccagactggcttctagggtgtctggggtggggagtgggcagagtggcttcccaccaagagtccaggtctgtctgtgggtcccagaggtctcagccaggggcagcaggctagacctgcagcagtgaggatttaagtgggactcaggctggacttgctgagggtgtgggaaggggggcagggccccggtgaggagggacatgccccccaaacatggttctttggtcctgctacctcccacccaagacttccctccctccttgcccactgcctctaggctgtgaaactgctgtggaaccaaggccctaccacagggtgcgccagccagggaagtgggggtggcaggggtggggggcaccctgctccccagtcgaagcctcggagtccctgaggggggtgtggtgtggtgcatgtccctcccagcatttggttgcaccgtctgcaggggaggtgcaccaggagcgccaaagctgtgagtggccctcatgccacctaagatgccacttcgaatcccaagtctccttgggcgatggtacaggggggccaatcagtgccccggaggcagttgtgaacacctgcgcccacttctgcccagggcagggaggggcctccgtgcacatccgccaccctcctcatgtgccgccaccctccctggccaggaagctcacaacttgattctactttattttctcaatcttcatccccccgccacgcctcccctagctcgtggcctttgaatgcttgtttctggctggttggcttctcttggcctcctgggacggtgtgtgaatggccctcagaagagacagtgctggagttctgcactcttagggcccccaatacccccgaggcctgggcatgcagaggccactgccctggcccaagtctggggcaggtgcagcatcccctgggaccttggcccctcaccaccggcccagtttcctctgagactgggggtcccacgggctcctagcaagtagatgaggagaccgaaagtagccctgcagctgggctttctttcaggggtcaagtttctagggaaaggaaggggcgtggcaacctgaggtttggtagctgtacccagacggggctgtctgtggcttccccaggcagcagttcttcctcctctctgtccccacccagggtcctcccccacactctagcacccctgagactgtccccctgggctaccatctccaccccagctctgaactggaggaggggacgtgtttaggggtgcagggccggggtgctaggggctgcatttgctgcagagcagggagccagccccttctttcccagttgcaggccctggacctggtcacctgtccctggacctggcttcctgtacccttctcaggtcaactggggcaacccatgtccccaggctaccctccccccgtctctcctgggggatacagagtctcaactagggtcctcctgcttgtcaacctggcattggggacccccttccccagcctcccaggctttggcccccaagtctgggatgggataggctggataggcggcacgtctgctctctggggatagaggatcccttgggagtggctgccgctttgctccacagaaggaaaaagaacgtcccagagcctgcccagtccaaaaaaagaataagaaaatgtgacaatcccagaaaaaaatgtcataac

SEQ ID NO: 1888207 - DNA, 4001 bp, Homo sapiens
tggaaaccctgatggtgttctgggtctcatgaccatctgttctcataggaaaaggctccagacatgctgtgtggggatatttcacaaagagacatggtgaagtgcggcactgcctacatgctggggtccagtcctgttggcagcaccagaacatgggcgagcatgaggggcagacgtgggagtgggacacatgctgccaagcaccctagtgtggctatgtacaagctagggtggggagggggtgcggcagaaggcagctcctcacggcttgagtcccaatctttgccccagttggctgcggaactgaatgaactgcccactcaccccagcactgtaaatggttactctcctcatccttccgatgacaaatcaccaaaaggatgcgctttcatctaccagacctcccaggctcaggtgctgactgtggcctacaaggacagctatctaaaacatcaaaagcactttccagcttccttcacggacatgagactgcctgctccccagaaagatgggtttcagtaactcctcctttggcagaatttttaaagttctagtccttaacttctacctcctgcccccatttctacccacggggaagggccacagaaataaaagggcatgggaggggggatgttagttgccttttcctctttccagtgaaagtcatttccctcaatagagggatccctccatgtttccatgatttggaagagaaaggtggagcttattcgtgagcaacttggccagaactgcccacagcctactacccaggaggaggaagaggaggagagggagtgggaaaaaaagagggaggaggagggggaacagaggaaagggtgggaaggttgagaaaggggaaggaggagggggagggaaggttattcgtatcaacaactgtggctacaccaatcactgccacccttgtgggacccacagccactgagtctccgccaactcagctctccccctcccccgcccccatacaaaccaggacaagcttgtaaggagaaggagtaagacagccccaaggcacacgactctgatgtctgaattctggctggggagggggaggtgtctaaaatttcctttggcttgtattatcactatgtattagcctccagatgcttatctttaaaatgaggacgagaaaagtctctacttctagaagagctgggggactaaattacacgtgcagctttcggtcagcctgagccagcgctgtcactgagccttggatttgtaagtggctcaaaagtaaaaagacggaagaaggccgtgcagctctacttcccccaaggccaggaagggccaaagcaatgacttaggaagtgggatgtttccccaccctaggcaaaggggcgaattccgagttccccggaggaagcagcagctctgcagactcggaattacctcgtcctcatctccagtgaagggagggatggaagtgggggcaggggcacagaaatggtacaaatccttcctaatggtccctggccagagctctgcccattcctgaaagtgtgaccttgggaaagtgagaccttgggaaagtgacttcgcctcgccaagcctcagtttcctcatctgtgcagcgggcataagggcagcatctaaggtgcagaaatgcttctgacgggtcagataacacctagcccgcagccgacgctcacagccgccgattcagacccgcccgggttccgcaagccccaggctgcccctgagccaccgcccaggcctcagcctcgggccatgcggacctcgccgccgccacgccccggaccccaggccccgggcccccaggcctcgacggccagccgcacccgggctgcggactgcggcccgggccccctccccgctgggcccccgactcaccggtgtagtgcaccacgcaggtctggccgcgcttggggaaggtgcgccctgaggagacagagacgggcatgctgagccgatgcgcgcggcggcagaggtactccgagccgccgcgcgccactactcaccgtctcctggggagatggtttccacctgcactcccatggcggcggcggacgctgagcgggcgggcggcgcgacgggcggcgtggaccaacagcgacctggcggcggttccacggctctgcctagtacctcggcgcgtcgcctgcgcacgcgcacgccccctcacgcccagccctgcgtgcgcgccccacacggcgcgcgacgtcccggaaacccaggcctccggaagagggaccggaagcccagaagccccgagacctccggaagcccggaggcctccggatacagctgtgtttgccgggtgacttgcttcgttctcctgcccttcctctgtgcttccagccggttaagcatctccctgcccaaagaatgggagtaataatagggggtccgccagtcactgactgggtgactgtcatcaggtttccacttagaagcacacagttactcatcctgggaagagcatggttctgagaagacagcgcacaggtggtggtagtatgttagtattttataagtggctcaaggttgtaagttctgcttttcttcactggaggaggagttgtccaaattcattcactcacccatagcttacatgcatacattcttattgagcatgtgaaagttgataatacgaattgggtcactcttcttatgcccaacggaatcagaatccaggggccaggggaaaagcactggaggcacgcagcgcctgctccaagaaccaatatttccactaactgctgcggaaatggcctgctgtccccctgagaccagattcagctagtaactgctgaaacaacccgccataacctaatactagttttacttaccactgtcagtcaccaatcagagcttgccagctccctgaaactttactagtgccaatgcatttccctttctaataaaacgcccagccttctctttgtttttcggacataccaaagaccaccagatctgtgtgtatgctccgagttgcgattctcgcttccccaaataaaacattacatttagagattcatctccatattttattttgactttgacaagcaccttctgtatgtcatgtactgtgctaggtgctgaggatacagcggtgaaggagtcagacttagtccctgacctcacagaatctacgtatgatgtgggagagataatcaaataacctgtttaagtaaaaaaagatacggaataaatgtaaagtttcaaatctgtaatattatgagacagtaatacatgctgtgaggggcgtgttaatataacagagatgcctcacttagtctggaatgtggtcagatatttccctgagttagccaggtttagccaggtttagccaaggttagaaggccaattgtgtgtatgtgttggggtaaggggaggcagaaggagcagtacctgcagaggcactgtaacgcaagagaacactgtgacatggtctaggacataaggaggcacatgtgactaatctttctctgatctgtgtgtgtgtgtgcttctgcattagtcgattctcacactgctataaagaatacctgaggctgggcacggtggctcatgcctgtaatcccagcactttgggaagctgaggcgggcagatcacttgaggccaggcgttcaagaccagcctggccaacatggtgaaacccagtttctactaaaaatacaaaaaaattagccaggcatggtggcacaggcttgtaatcccagccacttgagaggctgaggcataagaattgcttaaaccaggaggcggaggttgtagtgagccaagattgcacctctgcattccagcctgggtgacagagtgagaaccagtctcaaaaaaaaaaaaaaaaaaaaaaaattcctgagactgggtaatttatggaggaaagaggtttaattgactcacagttctgcatggctgggaatcctcaggaaacttacaatcatggcagaaggggaagcaggcatatcttacacagcagcaggcatgagagagagtatgtgaagaggaactgtca

SEQ ID NO: 1888208 - DNA, 4001 bp, Homo sapiens
gcacatcagcccaccccagaacaggaatgctaaatggatttcacattctctcccctgggctacttgtagacacggctctcccactggcaggccggaatagattgtttccacgtgttgcggcccgctacacaggcaggatcatttcactatagaggtcctcctcaccaatacattacttctcaagtgtaacaaggggcagtggtagtaagtggggacaaaaggagcaagtctggagacagccaggtcccgggagaagggaggtaccttcacagggggtcgtgcggcagtggtctttcaggtgtgagcagttcttgccctcatagtcctcggggcacttgcagaaatagtcactggcacggttgtagcactgggcaccgttctggcagggattaggctcacaataatcgatgtccagctgcaaatatcaggaacagcgaaaagggggagggatcagagtaaaacaaaggtgtcacgataacttctctggggcagcaggcactggaatctgacagttccttcggtttctattaggagacaccctgtaagatacatctctatgctgtagggactgccaatgtccagtatttgaaacaacggggcagagtgggagagggagcacaagagggggtggagggaaccaaaaagaacacaaagacgaagacactaagaagaaaataattcgtcagtatctccttccaccagcatttgtctagcagagactctctcatcaataggatgttaatagatgttaggaaattccagacacaagagctgagggaaaagtaaagggaagcggaggaggcagcggctctgctctaaaaacttggccatctgaggttttgccaccactcacctgacagaggtttccagagaaaccagtgggacacagacactggaatctgttgatttcattctgacagtgacccccattcaaacaggggttgctggcacattcatcgatgtctctctcacagtgatcgcctgcatagccaggtggacagatacagcgataaccattaaccaaatcctagaagaggagaaggggagagagagacacatgctttttttctatgtattccacaaacacagggcttcagcggtttagcatgactgttgcggtttagctggttcactgaaatagccaaatgctaaacctctgaaagtggttagaggaatttctatgtgcatgccttcaaaatgactcccacgaggctggggtaacataagccctagcgaaacttccaagagactcttttttcacccaaatttttaaatctcacagggacagagctctcctagtgtcgcacaaatctaaagatttgttgtcaattgtcaaagttttgatttaagcaaagatttacatacccgacaggaggcgtcattctgacactggccaaggcagtcattaatatctaaaaaataaataagtcatcattttaaagaggtaatttacagtgaaattgggcttaattgaaaagccttctcagctcaggatagataagtttcaaatcagatttcctgtgtgctttccgtgagataaggttattacgctgggtggggaccctccctaattcttccagaatgagggagtgaaacttcacatcattgtttcagccacattatcagaatatggctggttttcgcagctaatgagcctgataaagtgtatgttttcactgctgccctgaccactccctctcaaaaaaccattcccactctaaggttttccttctactgctcaagtcctaggactggagccccagtacggaccagcaagtcggctacccaagtttcatgaaaatcaaaatggaaacaaagtcactcacttatgtcacaattctgacccatccagccgggaagacagtcgcagtagtagctggcaatgagattcttacaggatttggcgtttacacaaggtttggcctcacattcatttgcatctgaaaggagatggggatgagcatgagaaatgaagttcaacccccatctcccccaccttggaaaaaaaaagaacaggccagagtttgtctgagacatgagacattttaataagctagctaaataaaagatactagaggttccctctattttaagcatctgatccctctccctagctattatccaataagaaccctaattgataactttccagctgctagttaaccagcccccaacaaaacagcagaaagccaccaggcatttctgtgcaaaacccaggcagcctagttgctgggatttaaatgtggcaaaaagaatgcagacagctcattcctcatgagatcatccccttttggaacccagctgaacactcctcggacagacgattgacatggttcaaggaatcccacgactttcccacagggcctaaaagagctagtccatttgcattcaagttatttctcccaggcctgctagactcttgataataaattacttcttagcatgatggagtgtgaactcacactgccggccacacgctcgtcttctgtaatggctttgacaatcaaagccaaccttggtataaaaattacagtcacagggatgttcttacctaactggcacgttttcccagtccactgtggggggcacacacacttaaatccgttaaccaggtcctggcaggtgcccccgtgggaacagttattaggagaacagtcatcaatgtctggtcaacaagaaaaggagggggttgacaatttaattcaatccatctgacaattagatcctttaacatcacctcttacatgaggggctgtcattgaagagccagacacctgctacaaggaaagctacagcaggacaagtgggacggtgacgataaggccgaagccttgattttagctttaaatcccccactgccccagttcatgtaatccccaacctaagcagtgggggagaaagacagctggatactgacggagcatccgcccaggaggaacacaggacatctctatctgcctaatctttatttttaaagaaaagtttcatcatggctcagaagtagctaagaagtcaggaaaaatagttctttacaggtggaaaaccttattcctctcatttgcttacagagtttgcccaaaatagcacacctagaggctgcattctccacttctgctctgaccagagacaactcctaacaatttatgaagtattcacttttgtgtctttatgacaacctcggagatgggaattgctactgtgccatttaaagagggcccggggagcttctgtggcctgctggagttccgcaagtgacaggtgggggcctaggaccagcacaggcaatctgaccccagaaatccacatccataaccacacctggggtgctgatgacagcggttctcagacctggctgcactgcagaattccagaagtttatcaaagaccatggactccccgattctggagggaatctgggggacccagagatttacactgtaaagcagcccaggtgattctgatatacagccctgtctcacagccaaaggaactctgcaggccaggttcttctctggggccccctggccctatgacagaatccagtagtaagtgacaacctcccctgaaggcagcctctccatggctgcaagaagaataaccacaattggaaggtggccagctccaggaagcagatgcaaaggaacaagcgattccacgaggacgttccttccaagaacagatacatgcgctaccttagtgggacaggatgggggtgctgggagacttccaaacacacaagccaccagactgcttaccagacttaggcctgcacccgcccctctctcaccgagacattcacactggacaagcctaggtacctctccccagcgtggtatcttggcacaaggatccttagaatggacacaggctgaaaattggacttacttgtagagcatgtggggccggtccagcctggggaacactcacactcaaagcccagggaggtctccttacagctgcctctgttgtgacagggatcagagaggcaggcgtgctcagct

SEQ ID NO: 1888209 - DNA, 4001 bp, Homo sapiens
ggtcctaccagctaagcttgggctccatctcctcccacacgctgctcgctcctttcagccatctgcatgagagcctgctcaaaccccagtcacctgttctctccctcaaggacaggccctacaaaggctctgcttttgccattccagactccctgctgcccactgccatctaatgccagccatgctgctgatgcagctcaaaagtctcacaagggctattagctgctgctgaatccaaagggcacttgcaagttcttatcgttcctgtctttacctctgtagctctcaacacagcagaccctctccctcaccagtggcctgcagtctgtctgacctgcctttcctgggctcctttcctcgcccatgccttctcatatggagcttctcaatccatcccaagttctcttcctatgcgacaccacctcatcccttctatgcctcagcccccactccactcctgcttccagcccaggacttctcctcttacctctggtcttgtgtatccaattgcccactaagcagacccacttcaacgacccatcagtatctcaaactcaacacaacctaaacacaccacattgcatcttatgtgtctgtttcttctcaatccctagctaaggcaggggctgtggcctatctagcataggccatcggctgccccactgctctgagggggcctgtgctgggagctggaggcctcagctgcctgacgggcccacacactgccccccagaaggttccagcagaatctcaccctggcgtctgctgtctgggccacttcacggatctttttcacccagtcctgcagctcctcctgtgagtcggcagcaacatccagggaccagtgggccaccgacgccatgctgatggagaagacgaagagccggttgttcttgccctcaggacggatggctgggagggcgagagcagataacagctgggaatagacatctcaccccctccaccccactccacaccgcaggcactggctcaaatgagttctatctcatcccatttcctccttcccacaccccatgaggggaaggactactctgctggcccatttgacagatgacgacgctacaactcaaacaagtcactgctggttgtggtggagccagtgttccaactcagctctgactcatgcttcttcctcaggccgtgtctccctctccaccccatctccaagcctctgtcacatccctgtggtacaacccattaggcctggggatgtcagccaaccagcagcatcaactttgttctgctgattctgacgggttccccagtgcctggcataggtaaacatgcaggggtcaaagctgacagtgacaaagggagcccagggtgtcaaggggatgtccagagcatggggagagcttggagtgagggcagactttggggttcagccatcagcttcctccctaggagcaggaaagagatacaaagaagaatctcaccctagggaacagtgggcaagagaaacagatgggagctcaccaatctgacaagccggcacatccaagaccccccgcagcaagtcccctagggggctgttctcgtccaagtgctgtgggaagcaaagcccaccaatggtcagcatggctactgcatatgtgtgtgaggggatatccgtgtgcatgggacaaatacatcttgtgggtgtacctgtgactgccaaatgtagcacaggtatatgggagactacgtgcatggccacatgggctgtgcgaccagcccatgtgacaggtgtctgtgcatgcacgtgcgtgcttgggactgtgtgatgggggcatgccaaggagaatctgggaatagggaatgctgttactcaggtggttctggtcttacctccctctccggctccagggccacggggttgaccatctcttccacgtagtttgatgggaaccacagctgcttcttccctccgtagtcccctcgccacctgtgggagccacagggtgctgacctccagcaaccaccccgaactcccatgaggagggtatcctttggtaggggttcccatgcctaagccagggtgaggcaggcactgctggtgcacacaggagacaagcacatcacaaatgcatgtctttggggccccagctccactggggcccttggactctgggcctaccacaccactggcttaccagcctccctcttgcttctccacattctggatgatggcgctcttgatgaaggtcagctcgtcctccctctgggccttgtagtcaaagagggctttgactgcacactgcagaggtgagaagcaccagtcagagcagaaaggctctccctgccactgccaacctggggcttcatgtgcacacacacatgtgcttgggcttccctgcctggggtcaggccagtgggagatgacactgccatcaacaggccctagttatagttcttgttactgccctgcagggaagctccaggacagatatgatcagagaggcagggcctctgccagtgaaatacctcgggacccaggtggaaccttaagccccaccctgggccacagggagaaccttgaatccgctcccaggagtcagggctggcaggccaagaaggcagggtctgcagtggccctgagtgcctccccgggacctggaagcatatggggcctggatgggaccctaccactcatctgtgaagtggaaagaaaaacttccttccaggtcccctggctgtggaggggagggggtgagaaatagggcccaggcctttttagagaaaaaggcaaaacaaaaaagaacctgtgtaacagggctccatgaggccggggaatgagtggccagtgtgcctcccagctcctaccccgctgctgcccaggaaggaaacaggggtcacccacaggagcagtttaaagggtcactgctgacttaaggggtaggggctagggagtgggtcggccctgggagacctgcggtcgctcaccaaccacacatctctcacaacctcttgggcctcggaaaaccacaaccaccacttctccacaaagaccacagatggcccagaacacagaaatgaagccccaagcagctggggaccctccccagcttcctatgcccagaggcctgagctgtaccttgaaagttggcatagggtttgcctctacatagaagccagggttgcgtccctcatacagggccccgtagtcaggctcctggaaacaggacacaatgggatatgttaatgccccagagcccagaggtagaaagcagctactggtttctggagcagcttccctttcccccagtgcagcaaacttgcacctgatccacagggatccttcgacctcagtagagacggcttcagaggcctcaggcccggcctcactgttccctttcctttcttcacattcttacatgtaaggcccagcccaggattctaaaatctctcaggtcctaaatgcccaaactcccaagtatttctgagctatgtgcaggtgggcccttcacagactacccatattcagtgctttagttcagtggcttgttggttcactgctgagcccaaagtcaggaaaagccttcccactccccacattcctcctgccgctcctctccatcacttgagtcccaggtgccagtggacaacaggcctctctctccccagccagccctgtctactgacgacagcagtctctcaactgatcttctggtcctagaccccttccttctgtccagggcccttatcaccagctgtgctgccatgggtcctgactttttccctcactggtctcacctcctgtggctctgccctccataccatccaccaggcggaggctccacaaccactcttgggtagcctcatctcatctgccctaggacagagtccaggccaagcccaggtggatgagtttccactgtgtgcacctctcccagtgtgagccccagaacctcctcactccacatcttgactcatgaggaaccctctgcttatgtgcctgtccccatccttaaagatgctgctcagatgtcccctcctgcaga

SEQ ID NO: 1888210 - DNA, 4001 bp, Homo sapiens
tgttctttttcctgcctggtcggaaactccaccagccctggagttcctgcccctcccatctgatggggagggcagggggtgtggaggacacagccttgggaccctgcagctgaagggtggaagcccaggcagagctgacctgaggagggaggctcaaggcctctagccagaaggcgggttattgggggagcttgggaattggccaaggctgggaaagggccccccacatttgaagtcctggtttggaaaattccaagttccagccctacttctgccactgaccttgttgtgtgaccttggcaaggcaagtcagttccccctgtcacagcctgtttccccctcctctctataagttgggagtcaacactgcctccctccctaggctgctgtggtgagaaatgaaaaggtggatggaaagtgccttatagagagtattgtagccaagcaagttatgattttaaaaaattaatcattactattaagggaggcagtatgcgtgggctttgaagataggctgcttgaattcgaatcctggctttggcacttactagggttatgacctttgggaagtcccttaaccaccagtgcctcagttttcccgtctttaaaatgagcataatactagtttaacctcatagtgaccttgcggggattaaatgcacctagaagaacttctggcacatattaagtactcagtaaggctgggcgtggtggctcacacctgtaatcccagcactttgagaggctgaggcaggcagatcacctgaggtgaggagttcgagaccagcctcgccaacatggtgaaaccttgtctctactaaaaatacaaaaatcagccgggtgcggtggcacatgcctgtaatcccagctactctggaggctgaggcaggagaagcgcttgaacctgggtggtggaggttgcagtgagctgagatccagccattacactccagccttggtgactggctgagactccatctcaaaaaaaaaaaaaaaaaaaaaaaaaactgaaaaaaaataagtgctcagtaaacattaactgtttacctgcttagtggttgtcaaattaaagaacaaacagaggctctctaaaataaaagatgtttcacttaggaattaagcattgcagtgggaattacccatatgccatagtaagcgatgtgcattttcagggaggtggggggaagacaaagatttttaaaggaaaaaaataaggattacattattgtttctgaaataattattcttgattgcaaagatcaatagcaagggtgatgccagtctaaagttggacaggcagttgctgggcagatgtccttgcggaagtattttttgtgcaaggtttcaatggcctttgtgcaaggttgtgatttttgtagtcttttttgttatcagtcttgttgttatctgttttgttatcagtcttatttgttatgcaagcatgaaaaccctctatggccttccccagctctatttgtcaaggttttcttaacattagtgactccatttttattctgaccatgttcatagggtcttgagctgttttgctctcttgggagtatattagggaggcaaggtcccctttgtggctctgtgctgaacactttacatattttaacttactcacagtgttgagtaccatgatagtacctattatacagatttttgaaactgaggctgaagttcagagcctggttcaaggaggtcacacagtgagtaagaggaggacctgggatttctggctggtctggatctgagcctagcgttccttacctctaggacctatgcattctgcatgccccacccaggacagatggaaaggttctgtgtggcccatccacaccttgccaagacacctgggttctggagacctaagctctggaactgatttgctgtatatgacctggtccaggttgctcattgtaacctctcttggcgtcagctttcttatctcccatccaagtactaaccaggcccgaccctgcttagcttccgagatcagacgagatcggtcagctttcttatctttccaatgggaataataatttcccaaagccctgctctgctcatcagagctgtggccagaaagacacaggccatggatggaagagcagttagaaactgtaaagtaccaatgcactggattctactgaaaggctttttctgaaagcctggtgttcaagatcagtgccctgaagggagggtcagagctccccaacgcgcttctgggtgtgagagctacaggagactcctagccactagcccttcctcttccttcccctcccttggaggggaaatggcccaggttgcttagtgctggctctcacagccactccctcctgctcccctgcatcctgccgggtcaccccccagctcaggaagtgagatctccactcagcctgccaggcgaacaggaagaggccagggtgtgctagccaattcctgactctgctctggatgtgaaagctccaacttaaccccttgagccagcccagaattcccacccttggagcagcagccgggcatgagacatgtggtctcttgctctggcatctccatgactggcttttgcaagccttttcctctctctgggcctcaatttccctgtctataaaatggaagcttatattattcctggactagctccaaacatcactgaactgctgggaatctcaaataggacaataagtgttttgcatgccactaaaattagaaaactatctctgtattccctgcagtgctccctgcagagccataacagatgaagtgcttagtaaatgtcagcggaagtggttggagatggtggatataggctcaaatgtatatgaccttgaacacattacctcatctcttagcgcctcagagccctcacgtgtcaaaagcaggataatggcagtacctgccttggaaggctgctgcagggattgaatgggaacagaagtgcacaatgataacatattattaaaattagcttgtgaatcaaagaagagatgagcaaaacaaagtccctgctctcaaagacttaacaattgtggcagataggattcatctcttttgaaccacctccagttgattggcaggggctgcctggagggctgcgtagaggattataaaaaccggatctactcccagcaggaagaagggattgattatcaatgcctgccatgggcaggagtggggatattagcagcaggtggtcagtgcacatgctgaccatgatctggttagagacaaagacacacaagccaagaactctggtatcaggccagcgacttgtttgggaaaggcagaatcaggagccattccccaggccggtggcattcaagccaaaccttgaagggtgaatggaaggaaagttactctgggcagagggaacagcttgagcaaacacagtgccagagttctgcctgcaaggaacagacaaccccgccaaaggtggcttagacaagaaggaacatttattctctcttaaaacaagtccaataatgagggttttcaggttatttgagcagctcaacactggcatcaaattcctttatattttttactttgctggtgttattgtgtcgctccaatttatttgttgaagccctaacccccagtacctcagaatgtaatagtatatgaagatagggtctttaaagaggtgatgaagttaaaatgaggcagttagggtgggccttaatccaatctccctggtgtccttatatgaagaggaaatttgcacctgtaatctcagcactttgggagaccaaggcacgcagatcacctgaggttggagttcgagatcagcctggctaacatggtgaaaccccatctctactaaatatacaaaattagctgggtgtggtggcacgcacctgtaatcccagctactcaggaggctgaggcaggagaatcacttgaacctgggaggcagaggttgcagtgagctgggatcacgccactgcactccagactgagtgacagagtgagactccaactccaataaaaataaaaaa

SEQ ID NO: 1888211 - DNA, 4001 bp, Homo sapiens
caatgattattatggtgataaagtttccttagagaaattttatcccatgactcttaatattttgatcatatctaccctgtaaaaatcaataaaaaaaacatggtctgacaagcgccaaatttttattcaaatgcatgtatctttgcactttctaaattcctttcacagggcttctaagattcttaaacctcttaatttttatacatgctgacactgttaatgagcagaaatcttaagttattactgtaaattccaaagttgatcattggtagaatttttattatctcccaaatctgtaaattttgaatgattttttcccatgccttctattatactgtactctttttcagaaaggaatacattttccattcccaaaaaagaggatggattctattgcataaacctaaatgagctgactactgggagttataactttgtcatgggtttactggcctgggaatgtacagtataagcgtgtgttgttccctaggggaaaggtttaagtgcagctaggaccacctgttgctaaatgtttccttgagtagctcttagtacaaaaggggatgtaaccattaatgtgtagttgccttcagccaaagtgaagtggggagtatatacttttatgcagatgacattagcacatagacatttgcatcctaagatatcaaaagaattagtgacattctccctttctcattctcaatagggttatacagctgtagcaattgcctgtgggctataaaaatagacactagatgttctggaccatgggcttatgaaccatgggtacggaagagtattttgaaaacccttcatgtgtagaatctgaaataaatgtgcttgttgagattcaataatgtttgccgatacccatgtaggtgccgggggaacctaaggaagaaccttagggaggctgcctttttgtgtgtggaagtggagggaatgtttcaggacttttcccaacaaaattcagaaagaaaatctctgaaaattgttttggtgaacccatgacaactatttcactgtactgacaatttagaaaaacaagacacacgcacacacacacacacacacatttcccagagcaaaagtggacatgagagtatctagaaagagaaagtgatttctcacaacactgcttccatattgaactctttaatgtcttttgaaaagcaaggtcggcctcagaaccatgcaggcctacaagaattcaaccatttgttggtcttttgttaagatattgattagattcttgttcatttctttgcaagcctcccagtttagtctattgatttgtctaagctttttttcttagagtcttgaactaggtcatcggaataactcttaacatttaactagagtcattaaaaataaacagacatttgagaatagtgtaattggttgtgaaggcatttccaaggtggaaaggccaaaggtggcaaggcaagtccttgtgggcatgttgtctttgagacctgacttactctgcagttctccaagacaactaaagacttcctatagcttcaggcaataatttgtccgaagactgttgtaagagtttggctaaagaaaaccagaaagcctatgaaaacatggcttactagtaacacatcccagctgtttgctccctgttaaaaagtagagaatgatgtgttctggaacggcttaagtgctctgctgtgtatgtttttagaactgtacagagtcttaacagcatgagtcctgttcattttaatcagagttgtgtggtttaaacttgtctctgaatccagctttttgctattgatatgtcatgtttagtgtatagtctctggaattaggttattgccaaatttctattgtgtttttggtgatcatgatccctgtgattttcttactcatccaactcaagtagaaagatatctttacatctcctgttagagcataggttctttgaagacaatatattactcatgtttttcttaccgtgagcaataatcctcaaatcactgcatgcataagagcagcagaagaatcacctggaaggcttgataaatcacatatcactgggatgctgcatgagagagtgtgattctgttggtctggggtggagtccaagaatctgcatttttaacaagctctctgctgccaattctgagacctcattgaaatagcactgccttggagccctgctccacagccctatcaggccactaattatataagatattttataacacagcctttactactctaaaatgaaatccatagataatataaactacccacatacttatctttaagtcaatataatggtctaattatattgtaaaaataaattgcaaatgaaattaagaggaaaataatttatgataaaataagtatttcaacatgtcaatgtttggacataactacattggaagatataattaagttgtcatgcttatactcattcataggatcaccttaaatgtcagttacagatgtagatatgttgtgtagctactaaaaataatgactagggttgccttctgtgatgtgattttctgaaatagcaaaaaattattgagaaattgccaaacaaaataaagaatatattttctcaatgtgtctggtagttgctattaatacagtgtaaaagagatactttgtatttatatgtaaaatgaatttaagttttaggcttaatatataaatatgtttttcacccacatgaatgtcacataagaccaggttcattcttcattgtgtgagactattccgcacattgtagaacatctacaactctaggtcctactcactgaataccagtagtgcacctcaatctccaagttcttctaatgcctaaggatacaccttaactagtatatcttctttttttttaagttccggtgtacatgtgaaggatgtgcaagtttgttacataggtaaacatgttccatagtgatttgctgcacctatcaacccatcacctaggtattaagcccagcattcattagctttttcttctgatgcactccctccctccacacccccaaaaggccccagtgtgtgttgttcacctccctgtgtctatgtgctcacattgttcatctcccacttatcagtgaggacatgctgtgtttggttttctgtttctgcattagtttgctaaggataatggcttcagctctgcccatgtccttgcaaaacacaggatctcattcctttttatggctgcattgtattccatggagtaaatgtaccatattttctttatccagtctatcactgatgagcatttgggttgattttatgtgtttgctattgtgaatagtgctgcaatgaacatatgtgtgcatgtgtctttataatggaaagatttatattcctttgggtttatacccagtaaggggaaatgtgagaaaatctttgctatctattcatctgacaaagtctaatattcagaatctacaggaattcaaacaaatttacaagaaaaccgattaaaaagtggacaaaaaaacatgaacagacactgctcaaaagaagacatttctgtggcccataaacatatgaaaaaaagctcaacatcactgataattagagaaatgcaaatcaaaactataatgacatatcatctcacgccagtcagaatggcaattattaaaaagttaagaaacaacagatgttggtaaggctgtggagaaacaggaacacttttatactgttggtgggaatgtagattagctgaactagtatatctaaccttgctatctttagtaccttaaagatagtatttattttaatttattattttaaaaattgaagagaaatgccctcctatgctgagtagagattggttatcagactcttttttcttggatgtattttatcaagtcactgtttctttaaaaataaaaactcaacaacaatgatcaatggtatttttctttacactagttatttttacctaaaatgggtgttggacatcttcatcattgtgcctttgcatcattatttcaatcagcttgtaaatcagc

SEQ ID NO: 1888212 - DNA, 4001 bp, Homo sapiens
tagagacggggtttcaccgtgttagccaggatggtcttgatcaccacacctcgtgatccaccagcctcggcctcccaaagtgctgggattacaggtgtgagccaccaggcccggcctcagtcagaactcttttagtgacatcattatctttaaaaagcaaacaaggtggccgggcacggtggctcaagcttgtaatcccaaaactttgggaggctgaggagggcggatcacctgaggtcaggagtttgaggccagcctgaccaacatggagaaaccccatctctactaaaaatgcaaaattagccgggcgtgatggcacatgcctgtaatcccacctactcaggaggctgaggtagaagaatcacttgaacccgggaggtggagtttgcagcgagctgagaccgtgccgttgcactccagtctgcgtaacaatagtgaaactccgtctcaaaacaaaacaaaataaaaaaaagcaaacaaggctttgggaggctgaggcaggtggattgcttcttgtggccaggagttcgagaccagcctgaccaacatggagaaaacctgtctctactaaaaatacaaaattaactgggtgtggtggcacacacctgtaatcccagctactcaggaggctgaggcaggagaatcgcttgaaccctcgagggggaggttgcagtgagccgagatctcaccactgcactccagcctgggtgacagagtcagactcagtctcaaaaataaataaataaataaaaattaaaaattaaaagcaaacaaaaagggtcacgttttacaaatccagcgtatcccagtccgttctgctggcagcagccccagggcccgcacacatgcctaggcagacaagaccgcacacgtgcagggacgctgagcttctgaaatggcggggacccgtgtcctccctccctacgccagggcagccactctatgacctcggctccttcacagccctggctgtagcctgaggcccccgcatggcgggcatccccaccagacgttggcggacgagagccctgctgacgccagccccttcccccaccacacccaccacacttcccggtccgacgcaggactacctgttcccgggcagacacagagcacagagtgccgggtcccacgtcagcccctgacgcacctgccgtctcttcaacaccctgccctgctccctgctggctggagagccctcactcagaccccagagccctgagcctgctcttgggaacctcccctgccacacagccgggtgcgtcctcttccgtggcgctgtcctgtgcgtcctcttccgtggcgctgtcccgggccctgggcacatgtccacacagccgggtgcgtcctcttccgtggcgctgtcccgggccctgggcacatgtccacacagccgggtgcgtcctcttccgtggcgctgtcccgggccctgggcacatgtccacacagccgggtgcatcctcttccgtggcgctgtcccgggccctgggcacatgtgcacacagccgggtgcgtcctcttccgtggcgctgtcccgggccctgggcacatgtgcacacagccgggtgcgtcctcttccatggcgctgtcccgggccctgggcacatgtgcacacagccgggtgcgtcctcttccgtggcgctgtcccgggccctgggcacatgtgcacacagccgggtgcgtcctcttccgtggcgctgtcctgtgcgtcctcttccgtggcgctgtcccgggccctgggcacatgtccacacagccgggtgcgtcctcttccgtggcgctgtcccgggccctgggcacatgtgcacacagccgggtgcgtcctcttccgtggcgctgtcccgggccctgggcacatgtgcacacagccgggtgcgtcctcttccgtggcgctgtcccgggccctgggcacatgtgcacacagccgggtgcgtcctcttccgtggcgctgtcccgggccctgggcacatgtccacacagccgggtgtgtcctcttccgtggcgctgtcctgggccctgggcacatgtccacacagccgggtgcgtcctctccccggacacgtcggtgccatcacagctcagcattcatttgctcaacagttacgatgcatcgatcacatgcctcgctctgttctcagagctggggactcagtggtaacaaaataaaccaaacaggcaaaaatctccgcctgcggcagcttgcagtttagcaggtccctgctcctcagaatgcagcagcttgcagtctagcaggtccatgctcctcagaagacttaaagatcttcaggggtaaaaaaataaaataaaatacgtgtgttcttatttctgtacttccaggtgcaatctcagtgtgtgcagcaaacgttttataaaagagctgctgctgaactcaaactactgttggggaaaaactgtggccaactttgtaagaacagatatgaaaacatcttaaaaggaagtctatttttgttctgttttaaatattttactatgtattatgtgaaatacagaaagaaatatatggaacatatcagccgggcgtggtggctcacgcctgtaatcccagcactttgggaggccaaggcgggcgggtcacaaggtcaggagatcgagaccatcctggctaacacagtgaaaccccgtctctacaaaaatacaaaaacattagccaggcatggtggtgggcgcctgtagtcccagctactcgggaggctgaggcggagaatggtgtaaacctgggaggtagagcttgccgtgagccgagatcgcgccactgcactccagcatgggtgacagagcgagactccgtctcaaaaaaacaacaaaaaatatatggaacatataaattatgacgcataaacaccatgatcccgtctctaatttaaaaactggaaaattatcaataacttggaagtttcattttccccatatataccttaaattcaatgctattctcttgcttctaaaaaattacctcatgtttatccctaaacgctaattagttttaattttttgagcttaaaaatacggcctagcactggatttacttttctgtaatctgctttttttttcctttgagacagggtcttgctatgttgcccaggctggcctcaaactcccaggctgaagtgatctcccaccttcaggctctgagtagctgggactataggcacacagcatcgtgcctggcttgatctgcttctgaaacgcctacgttcctaagattcgtctacactgcagattgtagctacaattcattcatctccagtgtggtcacattctattctgtgaatagaccacaactgatccatccactcttgcaccgaaggacatctgggctgttctcagcttctgttaccaccaagttgcttggaacattcctgagcagcaggcgcggtgggtggcgaagggcggacagcgtgaagctgatgcagctaccgtgagcagcacagacactggcaggaggagtgggcgaccgtcacagcaacaagcaactgaggcgtgagaagacaggcagtgcccccactccctgggaaatgcaaattaaaccacagagcactactaggtacacacctatcaaaactgcttaaaaaataatcccagaactttgggaggccaaggtgggcagatggcttgaggtcaggagttcaagaccagcctggtcaacatggtgaaaccctgtctctgccaaaaaatacaaaaattacctcggtgtgatggcgcatgcctgtagtcccagctactcaggaggctgaggcaggaaaatcgcttgaatccgggaggcagaggttgcagtgagccgagatcgcgccactgcactccagcctgggcgacagagcaagactccatctcaaaaaaaaataataataataaggctggatgcagtggctcatgcctataatcccagaactttgagaggccaaggtgggcatgtcacttgagctcaggagtttgagaccagcctggacaacacagcgaaaccccatctctacagaaaatac

SEQ ID NO: 1888213 - DNA, 4001 bp, Homo sapiens
cttgctgcaagctccgcctcccgggttcacgccattcttctgcctcagcctcctgagtagctgggactacaggcacccgccaccacgcccggctaattttttgcagttttagtagagacggggtttcaccgtgttagccaggatggtcttgatcaccacacctcgtgatccaccagcctcggcctcccaaagtgctgggattacaggtgtgagccaccaggcccggcctcagtcagaactcttttagtgacatcattatctttaaaaagcaaacaaggtggccgggcacggtggctcaagcttgtaatcccaaaactttgggaggctgaggagggcggatcacctgaggtcaggagtttgaggccagcctgaccaacatggagaaaccccatctctactaaaaatgcaaaattagccgggcgtgatggcacatgcctgtaatcccacctactcaggaggctgaggtagaagaatcacttgaacccgggaggtggagtttgcagcgagctgagaccgtgccgttgcactccagtctgcgtaacaatagtgaaactccgtctcaaaacaaaacaaaataaaaaaaagcaaacaaggctttgggaggctgaggcaggtggattgcttcttgtggccaggagttcgagaccagcctgaccaacatggagaaaacctgtctctactaaaaatacaaaattaactgggtgtggtggcacacacctgtaatcccagctactcaggaggctgaggcaggagaatcgcttgaaccctcgagggggaggttgcagtgagccgagatctcaccactgcactccagcctgggtgacagagtcagactcagtctcaaaaataaataaataaataaaaattaaaaattaaaagcaaacaaaaagggtcacgttttacaaatccagcgtatcccagtccgttctgctggcagcagccccagggcccgcacacatgcctaggcagacaagaccgcacacgtgcagggacgctgagcttctgaaatggcggggacccgtgtcctccctccctacgccagggcagccactctatgacctcggctccttcacagccctggctgtagcctgaggcccccgcatggcgggcatccccaccagacgttggcggacgagagccctgctgacgccagccccttcccccaccacacccaccacacttcccggtccgacgcaggactacctgttcccgggcagacacagagcacagagtgccgggtcccacgtcagcccctgacgcacctgccgtctcttcaacaccctgccctgctccctgctggctggagagccctcactcagaccccagagccctgagcctgctcttgggaacctcccctgccacacagccgggtgcgtcctcttccgtggcgctgtcctgtgcgtcctcttccgtggcgctgtcccgggccctgggcacatgtccacacagccgggtgcgtcctcttccgtggcgctgtcccgggccctgggcacatgtccacacagccgggtgcgtcctcttccgtggcgctgtcccgggccctgggcacatgtccacacagccgggtgcatcctcttccgtggcgctgtcccgggccctgggcacatgtgcacacagccgggtgcgtcctcttccgtggcgctgtcccgggccctgggcacatgtgcacacagccgggtgcgtcctcttccatggcgctgtcccgggccctgggcacatgtgcacacagccgggtgcgtcctcttccgtggcgctgtcccgggccctgggcacatgtgcacacagccgggtgcgtcctcttccgtggcgctgtcctgtgcgtcctcttccgtggcgctgtcccgggccctgggcacatgtccacacagccgggtgcgtcctcttccgtggcgctgtcccgggccctgggcacatgtgcacacagccgggtgcgtcctcttccgtggcgctgtcccgggccctgggcacatgtgcacacagccgggtgcgtcctcttccgtggcgctgtcccgggccctgggcacatgtgcacacagccgggtgcgtcctcttccgtggcgctgtcccgggccctgggcacatgtccacacagccgggtgtgtcctcttccgtggcgctgtcctgggccctgggcacatgtccacacagccgggtgcgtcctctccccggacacgtcggtgccatcacagctcagcattcatttgctcaacagttacgatgcatcgatcacatgcctcgctctgttctcagagctggggactcagtggtaacaaaataaaccaaacaggcaaaaatctccgcctgcggcagcttgcagtttagcaggtccctgctcctcagaatgcagcagcttgcagtctagcaggtccatgctcctcagaagacttaaagatcttcaggggtaaaaaaataaaataaaatacgtgtgttcttatttctgtacttccaggtgcaatctcagtgtgtgcagcaaacgttttataaaagagctgctgctgaactcaaactactgttggggaaaaactgtggccaactttgtaagaacagatatgaaaacatcttaaaaggaagtctatttttgttctgttttaaatattttactatgtattatgtgaaatacagaaagaaatatatggaacatatcagccgggcgtggtggctcacgcctgtaatcccagcactttgggaggccaaggcgggcgggtcacaaggtcaggagatcgagaccatcctggctaacacagtgaaaccccgtctctacaaaaatacaaaaacattagccaggcatggtggtgggcgcctgtagtcccagctactcgggaggctgaggcggagaatggtgtaaacctgggaggtagagcttgccgtgagccgagatcgcgccactgcactccagcatgggtgacagagcgagactccgtctcaaaaaaacaacaaaaaatatatggaacatataaattatgacgcataaacaccatgatcccgtctctaatttaaaaactggaaaattatcaataacttggaagtttcattttccccatatataccttaaattcaatgctattctcttgcttctaaaaaattacctcatgtttatccctaaacgctaattagttttaattttttgagcttaaaaatacggcctagcactggatttacttttctgtaatctgctttttttttcctttgagacagggtcttgctatgttgcccaggctggcctcaaactcccaggctgaagtgatctcccaccttcaggctctgagtagctgggactataggcacacagcatcgtgcctggcttgatctgcttctgaaacgcctacgttcctaagattcgtctacactgcagattgtagctacaattcattcatctccagtgtggtcacattctattctgtgaatagaccacaactgatccatccactcttgcaccgaaggacatctgggctgttctcagcttctgttaccaccaagttgcttggaacattcctgagcagcaggcgcggtgggtggcgaagggcggacagcgtgaagctgatgcagctaccgtgagcagcacagacactggcaggaggagtgggcgaccgtcacagcaacaagcaactgaggcgtgagaagacaggcagtgcccccactccctgggaaatgcaaattaaaccacagagcactactaggtacacacctatcaaaactgcttaaaaaataatcccagaactttgggaggccaaggtgggcagatggcttgaggtcaggagttcaagaccagcctggtcaacatggtgaaaccctgtctctgccaaaaaatacaaaaattacctcggtgtgatggcgcatgcctgtagtcccagctactcaggaggctgaggcaggaaaatcgcttgaatccgggaggcagaggttgcagtgagccgagatcgcgccactgcactccagcctgggcgacagagcaagactccatctcaaaaaaaaataataataataaggctggatgcagtggc

SEQ ID NO: 1888214 - DNA, 4001 bp, Homo sapiens; identical to SEQ ID NO: 1888213

SEQ ID NO: 1888215 - DNA, 4001 bp, Homo sapiens
gcctggtgtgcagccgcagctacacgagcagcacgtgctgcaacctgctgcaagtgacgagctgccatcagcgttattcgcagtcttcatttctggagggctaagttccaaccttcagtcagaactctttttttttttttttgagacggagtctcgctctgtctcccaggctggagtgcagtggcactatctcggcttgctgcaagctccgcctcccgggttcacgccattcttctgcctcagcctcctgagtagctgggactacaggcacccgccaccacgcccggctaattttttgcagttttagtagagacggggtttcaccgtgttagccaggatggtcttgatcaccacacctcgtgatccaccagcctcggcctcccaaagtgctgggattacaggtgtgagccaccaggcccggcctcagtcagaactcttttagtgacatcattatctttaaaaagcaaacaaggtggccgggcacggtggctcaagcttgtaatcccaaaactttgggaggctgaggagggcggatcacctgaggtcaggagtttgaggccagcctgaccaacatggagaaaccccatctctactaaaaatgcaaaattagccgggcgtgatggcacatgcctgtaatcccacctactcaggaggctgaggtagaagaatcacttgaacccgggaggtggagtttgcagcgagctgagaccgtgccgttgcactccagtctgcgtaacaatagtgaaactccgtctcaaaacaaaacaaaataaaaaaaagcaaacaaggctttgggaggctgaggcaggtggattgcttcttgtggccaggagttcgagaccagcctgaccaacatggagaaaacctgtctctactaaaaatacaaaattaactgggtgtggtggcacacacctgtaatcccagctactcaggaggctgaggcaggagaatcgcttgaaccctcgagggggaggttgcagtgagccgagatctcaccactgcactccagcctgggtgacagagtcagactcagtctcaaaaataaataaataaataaaaattaaaaattaaaagcaaacaaaaagggtcacgttttacaaatccagcgtatcccagtccgttctgctggcagcagccccagggcccgcacacatgcctaggcagacaagaccgcacacgtgcagggacgctgagcttctgaaatggcggggacccgtgtcctccctccctacgccagggcagccactctatgacctcggctccttcacagccctggctgtagcctgaggcccccgcatggcgggcatccccaccagacgttggcggacgagagccctgctgacgccagccccttcccccaccacacccaccacacttcccggtccgacgcaggactacctgttcccgggcagacacagagcacagagtgccgggtcccacgtcagcccctgacgcacctgccgtctcttcaacaccctgccctgctccctgctggctggagagccctcactcagaccccagagccctgagcctgctcttgggaacctcccctgccacacagccgggtgcgtcctcttccgtggcgctgtcctgtgcgtcctcttccgtggcgctgtcccgggccctgggcacatgtccacacagccgggtgcgtcctcttccgtggcgctgtcccgggccctgggcacatgtccacacagccgggtgcgtcctcttccgtggcgctgtcccgggccctgggcacatgtccacacagccgggtgcatcctcttccgtggcgctgtcccgggccctgggcacatgtgcacacagccgggtgcgtcctcttccgtggcgctgtcccgggccctgggcacatgtgcacacagccgggtgcgtcctcttccatggcgctgtcccgggccctgggcacatgtgcacacagccgggtgcgtcctcttccgtggcgctgtcccgggccctgggcacatgtgcacacagccgggtgcgtcctcttccgtggcgctgtcctgtgcgtcctcttccgtggcgctgtcccgggccctgggcacatgtccacacagccgggtgcgtcctcttccgtggcgctgtcccgggccctgggcacatgtgcacacagccgggtgcgtcctcttccgtggcgctgtcccgggccctgggcacatgtgcacacagccgggtgcgtcctcttccgtggcgctgtcccgggccctgggcacatgtgcacacagccgggtgcgtcctcttccgtggcgctgtcccgggccctgggcacatgtccacacagccgggtgtgtcctcttccgtggcgctgtcctgggccctgggcacatgtccacacagccgggtgcgtcctctccccggacacgtcggtgccatcacagctcagcattcatttgctcaacagttacgatgcatcgatcacatgcctcgctctgttctcagagctggggactcagtggtaacaaaataaaccaaacaggcaaaaatctccgcctgcggcagcttgcagtttagcaggtccctgctcctcagaatgcagcagcttgcagtctagcaggtccatgctcctcagaagacttaaagatcttcaggggtaaaaaaataaaataaaatacgtgtgttcttatttctgtacttccaggtgcaatctcagtgtgtgcagcaaacgttttataaaagagctgctgctgaactcaaactactgttggggaaaaactgtggccaactttgtaagaacagatatgaaaacatcttaaaaggaagtctatttttgttctgttttaaatattttactatgtattatgtgaaatacagaaagaaatatatggaacatatcagccgggcgtggtggctcacgcctgtaatcccagcactttgggaggccaaggcgggcgggtcacaaggtcaggagatcgagaccatcctggctaacacagtgaaaccccgtctctacaaaaatacaaaaacattagccaggcatggtggtgggcgcctgtagtcccagctactcgggaggctgaggcggagaatggtgtaaacctgggaggtagagcttgccgtgagccgagatcgcgccactgcactccagcatgggtgacagagcgagactccgtctcaaaaaaacaacaaaaaatatatggaacatataaattatgacgcataaacaccatgatcccgtctctaatttaaaaactggaaaattatcaataacttggaagtttcattttccccatatataccttaaattcaatgctattctcttgcttctaaaaaattacctcatgtttatccctaaacgctaattagttttaattttttgagcttaaaaatacggcctagcactggatttacttttctgtaatctgctttttttttcctttgagacagggtcttgctatgttgcccaggctggcctcaaactcccaggctgaagtgatctcccaccttcaggctctgagtagctgggactataggcacacagcatcgtgcctggcttgatctgcttctgaaacgcctacgttcctaagattcgtctacactgcagattgtagctacaattcattcatctccagtgtggtcacattctattctgtgaatagaccacaactgatccatccactcttgcaccgaaggacatctgggctgttctcagcttctgttaccaccaagttgcttggaacattcctgagcagcaggcgcggtgggtggcgaagggcggacagcgtgaagctgatgcagctaccgtgagcagcacagacactggcaggaggagtgggcgaccgtcacagcaacaagcaactgaggcgtgagaagacaggcagtgcccccactccctgggaaatgcaaattaaaccacagagcactactaggtacacacctatcaaaactgcttaaaaaataatcccagaactttgggaggccaaggtgggcagatggcttgaggtcaggagttcaagaccagcctggtcaacatggtgaaaccctgtctctgccaaaaa

SEQ ID NO: 1888216 - DNA, 4001 bp, Homo sapiens
cggcttgctgcaagctccgcctcccgggttcacgccattcttctgcctcagcctcctgagtagctgggactacaggcacccgccaccacgcccggctaattttttgcagttttagtagagacggggtttcaccgtgttagccaggatggtcttgatcaccacacctcgtgatccaccagcctcggcctcccaaagtgctgggattacaggtgtgagccaccaggcccggcctcagtcagaactcttttagtgacatcattatctttaaaaagcaaacaaggtggccgggcacggtggctcaagcttgtaatcccaaaactttgggaggctgaggagggcggatcacctgaggtcaggagtttgaggccagcctgaccaacatggagaaaccccatctctactaaaaatgcaaaattagccgggcgtgatggcacatgcctgtaatcccacctactcaggaggctgaggtagaagaatcacttgaacccgggaggtggagtttgcagcgagctgagaccgtgccgttgcactccagtctgcgtaacaatagtgaaactccgtctcaaaacaaaacaaaataaaaaaaagcaaacaaggctttgggaggctgaggcaggtggattgcttcttgtggccaggagttcgagaccagcctgaccaacatggagaaaacctgtctctactaaaaatacaaaattaactgggtgtggtggcacacacctgtaatcccagctactcaggaggctgaggcaggagaatcgcttgaaccctcgagggggaggttgcagtgagccgagatctcaccactgcactccagcctgggtgacagagtcagactcagtctcaaaaataaataaataaataaaaattaaaaattaaaagcaaacaaaaagggtcacgttttacaaatccagcgtatcccagtccgttctgctggcagcagccccagggcccgcacacatgcctaggcagacaagaccgcacacgtgcagggacgctgagcttctgaaatggcggggacccgtgtcctccctccctacgccagggcagccactctatgacctcggctccttcacagccctggctgtagcctgaggcccccgcatggcgggcatccccaccagacgttggcggacgagagccctgctgacgccagccccttcccccaccacacccaccacacttcccggtccgacgcaggactacctgttcccgggcagacacagagcacagagtgccgggtcccacgtcagcccctgacgcacctgccgtctcttcaacaccctgccctgctccctgctggctggagagccctcactcagaccccagagccctgagcctgctcttgggaacctcccctgccacacagccgggtgcgtcctcttccgtggcgctgtcctgtgcgtcctcttccgtggcgctgtcccgggccctgggcacatgtccacacagccgggtgcgtcctcttccgtggcgctgtcccgggccctgggcacatgtccacacagccgggtgcgtcctcttccgtggcgctgtcccgggccctgggcacatgtccacacagccgggtgcatcctcttccgtggcgctgtcccgggccctgggcacatgtgcacacagccgggtgcgtcctcttccgtggcgctgtcccgggccctgggcacatgtgcacacagccgggtgcgtcctcttccatggcgctgtcccgggccctgggcacatgtgcacacagccgggtgcgtcctcttccgtggcgctgtcccgggccctgggcacatgtgcacacagccgggtgcgtcctcttccgtggcgctgtcctgtgcgtcctcttccgtggcgctgtcccgggccctgggcacatgtccacacagccgggtgcgtcctcttccgtggcgctgtcccgggccctgggcacatgtgcacacagccgggtgcgtcctcttccgtggcgctgtcccgggccctgggcacatgtgcacacagccgggtgcgtcctcttccgtggcgctgtcccgggccctgggcacatgtgcacacagccgggtgcgtcctcttccgtggcgctgtcccgggccctgggcacatgtccacacagccgggtgtgtcctcttccgtggcgctgtcctgggccctgggcacatgtccacacagccgggtgcgtcctctccccggacacgtcggtgccatcacagctcagcattcatttgctcaacagttacgatgcatcgatcacatgcctcgctctgttctcagagctggggactcagtggtaacaaaataaaccaaacaggcaaaaatctccgcctgcggcagcttgcagtttagcaggtccctgctcctcagaatgcagcagcttgcagtctagcaggtccatgctcctcagaagacttaaagatcttcaggggtaaaaaaataaaataaaatacgtgtgttcttatttctgtacttccaggtgcaatctcagtgtgtgcagcaaacgttttataaaagagctgctgctgaactcaaactactgttggggaaaaactgtggccaactttgtaagaacagatatgaaaacatcttaaaaggaagtctatttttgttctgttttaaatattttactatgtattatgtgaaatacagaaagaaatatatggaacatatcagccgggcgtggtggctcacgcctgtaatcccagcactttgggaggccaaggcgggcgggtcacaaggtcaggagatcgagaccatcctggctaacacagtgaaaccccgtctctacaaaaatacaaaaacattagccaggcatggtggtgggcgcctgtagtcccagctactcgggaggctgaggcggagaatggtgtaaacctgggaggtagagcttgccgtgagccgagatcgcgccactgcactccagcatgggtgacagagcgagactccgtctcaaaaaaacaacaaaaaatatatggaacatataaattatgacgcataaacaccatgatcccgtctctaatttaaaaactggaaaattatcaataacttggaagtttcattttccccatatataccttaaattcaatgctattctcttgcttctaaaaaattacctcatgtttatccctaaacgctaattagttttaattttttgagcttaaaaatacggcctagcactggatttacttttctgtaatctgctttttttttcctttgagacagggtcttgctatgttgcccaggctggcctcaaactcccaggctgaagtgatctcccaccttcaggctctgagtagctgggactataggcacacagcatcgtgcctggcttgatctgcttctgaaacgcctacgttcctaagattcgtctacactgcagattgtagctacaattcattcatctccagtgtggtcacattctattctgtgaatagaccacaactgatccatccactcttgcaccgaaggacatctgggctgttctcagcttctgttaccaccaagttgcttggaacattcctgagcagcaggcgcggtgggtggcgaagggcggacagcgtgaagctgatgcagctaccgtgagcagcacagacactggcaggaggagtgggcgaccgtcacagcaacaagcaactgaggcgtgagaagacaggcagtgcccccactccctgggaaatgcaaattaaaccacagagcactactaggtacacacctatcaaaactgcttaaaaaataatcccagaactttgggaggccaaggtgggcagatggcttgaggtcaggagttcaagaccagcctggtcaacatggtgaaaccctgtctctgccaaaaaatacaaaaattacctcggtgtgatggcgcatgcctgtagtcccagctactcaggaggctgaggcaggaaaatcgcttgaatccgggaggcagaggttgcagtgagccgagatcgcgccactgcactccagcctgggcgacagagcaagactccatctcaaaaaaaaataataataataaggctggatgcagt

SEQ ID NO: 1888217 - DNA, 4001 bp, Homo sapiens
attgcaccactggacgtcagcctgggtgacagagtgagaccctgtctccaaaaaaaaaactttcaaggggatcccatgtcaacagaaaggttataacacagttaaaggagaggcctggtgtgcagccgcagctacacgagcagcacgtgctgcaacctgctgcaagtgacgagctgccatcagcgttattcgcagtcttcatttctggagggctaagttccaaccttcagtcagaactctttttttttttttttgagacggagtctcgctctgtctcccaggctggagtgcagtggcactatctcggcttgctgcaagctccgcctcccgggttcacgccattcttctgcctcagcctcctgagtagctgggactacaggcacccgccaccacgcccggctaattttttgcagttttagtagagacggggtttcaccgtgttagccaggatggtcttgatcaccacacctcgtgatccaccagcctcggcctcccaaagtgctgggattacaggtgtgagccaccaggcccggcctcagtcagaactcttttagtgacatcattatctttaaaaagcaaacaaggtggccgggcacggtggctcaagcttgtaatcccaaaactttgggaggctgaggagggcggatcacctgaggtcaggagtttgaggccagcctgaccaacatggagaaaccccatctctactaaaaatgcaaaattagccgggcgtgatggcacatgcctgtaatcccacctactcaggaggctgaggtagaagaatcacttgaacccgggaggtggagtttgcagcgagctgagaccgtgccgttgcactccagtctgcgtaacaatagtgaaactccgtctcaaaacaaaacaaaataaaaaaaagcaaacaaggctttgggaggctgaggcaggtggattgcttcttgtggccaggagttcgagaccagcctgaccaacatggagaaaacctgtctctactaaaaatacaaaattaactgggtgtggtggcacacacctgtaatcccagctactcaggaggctgaggcaggagaatcgcttgaaccctcgagggggaggttgcagtgagccgagatctcaccactgcactccagcctgggtgacagagtcagactcagtctcaaaaataaataaataaataaaaattaaaaattaaaagcaaacaaaaagggtcacgttttacaaatccagcgtatcccagtccgttctgctggcagcagccccagggcccgcacacatgcctaggcagacaagaccgcacacgtgcagggacgctgagcttctgaaatggcggggacccgtgtcctccctccctacgccagggcagccactctatgacctcggctccttcacagccctggctgtagcctgaggcccccgcatggcgggcatccccaccagacgttggcggacgagagccctgctgacgccagccccttcccccaccacacccaccacacttcccggtccgacgcaggactacctgttcccgggcagacacagagcacagagtgccgggtcccacgtcagcccctgacgcacctgccgtctcttcaacaccctgccctgctccctgctggctggagagccctcactcagaccccagagccctgagcctgctcttgggaacctcccctgccacacagccgggtgcgtcctcttccgtggcgctgtcctgtgcgtcctcttccgtggcgctgtcccgggccctgggcacatgtccacacagccgggtgcgtcctcttccgtggcgctgtcccgggccctgggcacatgtccacacagccgggtgcgtcctcttccgtggcgctgtcccgggccctgggcacatgtccacacagccgggtgcatcctcttccgtggcgctgtcccgggccctgggcacatgtgcacacagccgggtgcgtcctcttccgtggcgctgtcccgggccctgggcacatgtgcacacagccgggtgcgtcctcttccatggcgctgtcccgggccctgggcacatgtgcacacagccgggtgcgtcctcttccgtggcgctgtcccgggccctgggcacatgtgcacacagccgggtgcgtcctcttccgtggcgctgtcctgtgcgtcctcttccgtggcgctgtcccgggccctgggcacatgtccacacagccgggtgcgtcctcttccgtggcgctgtcccgggccctgggcacatgtgcacacagccgggtgcgtcctcttccgtggcgctgtcccgggccctgggcacatgtgcacacagccgggtgcgtcctcttccgtggcgctgtcccgggccctgggcacatgtgcacacagccgggtgcgtcctcttccgtggcgctgtcccgggccctgggcacatgtccacacagccgggtgtgtcctcttccgtggcgctgtcctgggccctgggcacatgtccacacagccgggtgcgtcctctccccggacacgtcggtgccatcacagctcagcattcatttgctcaacagttacgatgcatcgatcacatgcctcgctctgttctcagagctggggactcagtggtaacaaaataaaccaaacaggcaaaaatctccgcctgcggcagcttgcagtttagcaggtccctgctcctcagaatgcagcagcttgcagtctagcaggtccatgctcctcagaagacttaaagatcttcaggggtaaaaaaataaaataaaatacgtgtgttcttatttctgtacttccaggtgcaatctcagtgtgtgcagcaaacgttttataaaagagctgctgctgaactcaaactactgttggggaaaaactgtggccaactttgtaagaacagatatgaaaacatcttaaaaggaagtctatttttgttctgttttaaatattttactatgtattatgtgaaatacagaaagaaatatatggaacatatcagccgggcgtggtggctcacgcctgtaatcccagcactttgggaggccaaggcgggcgggtcacaaggtcaggagatcgagaccatcctggctaacacagtgaaaccccgtctctacaaaaatacaaaaacattagccaggcatggtggtgggcgcctgtagtcccagctactcgggaggctgaggcggagaatggtgtaaacctgggaggtagagcttgccgtgagccgagatcgcgccactgcactccagcatgggtgacagagcgagactccgtctcaaaaaaacaacaaaaaatatatggaacatataaattatgacgcataaacaccatgatcccgtctctaatttaaaaactggaaaattatcaataacttggaagtttcattttccccatatataccttaaattcaatgctattctcttgcttctaaaaaattacctcatgtttatccctaaacgctaattagttttaattttttgagcttaaaaatacggcctagcactggatttacttttctgtaatctgctttttttttcctttgagacagggtcttgctatgttgcccaggctggcctcaaactcccaggctgaagtgatctcccaccttcaggctctgagtagctgggactataggcacacagcatcgtgcctggcttgatctgcttctgaaacgcctacgttcctaagattcgtctacactgcagattgtagctacaattcattcatctccagtgtggtcacattctattctgtgaatagaccacaactgatccatccactcttgcaccgaaggacatctgggctgttctcagcttctgttaccaccaagttgcttggaacattcctgagcagcaggcgcggtgggtggcgaagggcggacagcgtgaagctgatgcagctaccgtgagcagcacagacactggcaggaggagtgggcgaccgtcacagcaacaagcaactgaggcgtgagaagacaggcagtgcccccactccctgggaaatgcaaattaaaccacagagcactactaggtacacacctatcaaaa

SEQ ID NO: 1888218 - DNA, 4001 bp, Homo sapiens
tggagtgcagtggcactatctcggcttgctgcaagctccgcctcccgggttcacgccattcttctgcctcagcctcctgagtagctgggactacaggcacccgccaccacgcccggctaattttttgcagttttagtagagacggggtttcaccgtgttagccaggatggtcttgatcaccacacctcgtgatccaccagcctcggcctcccaaagtgctgggattacaggtgtgagccaccaggcccggcctcagtcagaactcttttagtgacatcattatctttaaaaagcaaacaaggtggccgggcacggtggctcaagcttgtaatcccaaaactttgggaggctgaggagggcggatcacctgaggtcaggagtttgaggccagcctgaccaacatggagaaaccccatctctactaaaaatgcaaaattagccgggcgtgatggcacatgcctgtaatcccacctactcaggaggctgaggtagaagaatcacttgaacccgggaggtggagtttgcagcgagctgagaccgtgccgttgcactccagtctgcgtaacaatagtgaaactccgtctcaaaacaaaacaaaataaaaaaaagcaaacaaggctttgggaggctgaggcaggtggattgcttcttgtggccaggagttcgagaccagcctgaccaacatggagaaaacctgtctctactaaaaatacaaaattaactgggtgtggtggcacacacctgtaatcccagctactcaggaggctgaggcaggagaatcgcttgaaccctcgagggggaggttgcagtgagccgagatctcaccactgcactccagcctgggtgacagagtcagactcagtctcaaaaataaataaataaataaaaattaaaaattaaaagcaaacaaaaagggtcacgttttacaaatccagcgtatcccagtccgttctgctggcagcagccccagggcccgcacacatgcctaggcagacaagaccgcacacgtgcagggacgctgagcttctgaaatggcggggacccgtgtcctccctccctacgccagggcagccactctatgacctcggctccttcacagccctggctgtagcctgaggcccccgcatggcgggcatccccaccagacgttggcggacgagagccctgctgacgccagccccttcccccaccacacccaccacacttcccggtccgacgcaggactacctgttcccgggcagacacagagcacagagtgccgggtcccacgtcagcccctgacgcacctgccgtctcttcaacaccctgccctgctccctgctggctggagagccctcactcagaccccagagccctgagcctgctcttgggaacctcccctgccacacagccgggtgcgtcctcttccgtggcgctgtcctgtgcgtcctcttccgtggcgctgtcccgggccctgggcacatgtccacacagccgggtgcgtcctcttccgtggcgctgtcccgggccctgggcacatgtccacacagccgggtgcgtcctcttccgtggcgctgtcccgggccctgggcacatgtccacacagccgggtgcatcctcttccgtggcgctgtcccgggccctgggcacatgtgcacacagccgggtgcgtcctcttccgtggcgctgtcccgggccctgggcacatgtgcacacagccgggtgcgtcctcttccatggcgctgtcccgggccctgggcacatgtgcacacagccgggtgcgtcctcttccgtggcgctgtcccgggccctgggcacatgtgcacacagccgggtgcgtcctcttccgtggcgctgtcctgtgcgtcctcttccgtggcgctgtcccgggccctgggcacatgtccacacagccgggtgcgtcctcttccgtggcgctgtcccgggccctgggcacatgtgcacacagccgggtgcgtcctcttccgtggcgctgtcccgggccctgggcacatgtgcacacagccgggtgcgtcctcttccgtggcgctgtcccgggccctgggcacatgtgcacacagccgggtgcgtcctcttccgtggcgctgtcccgggccctgggcacatgtccacacagccgggtgtgtcctcttccgtggcgctgtcctgggccctgggcacatgtccacacagccgggtgcgtcctctccccggacacgtcggtgccatcacagctcagcattcatttgctcaacagttacgatgcatcgatcacatgcctcgctctgttctcagagctggggactcagtggtaacaaaataaaccaaacaggcaaaaatctccgcctgcggcagcttgcagtttagcaggtccctgctcctcagaatgcagcagcttgcagtctagcaggtccatgctcctcagaagacttaaagatcttcaggggtaaaaaaataaaataaaatacgtgtgttcttatttctgtacttccaggtgcaatctcagtgtgtgcagcaaacgttttataaaagagctgctgctgaactcaaactactgttggggaaaaactgtggccaactttgtaagaacagatatgaaaacatcttaaaaggaagtctatttttgttctgttttaaatattttactatgtattatgtgaaatacagaaagaaatatatggaacatatcagccgggcgtggtggctcacgcctgtaatcccagcactttgggaggccaaggcgggcgggtcacaaggtcaggagatcgagaccatcctggctaacacagtgaaaccccgtctctacaaaaatacaaaaacattagccaggcatggtggtgggcgcctgtagtcccagctactcgggaggctgaggcggagaatggtgtaaacctgggaggtagagcttgccgtgagccgagatcgcgccactgcactccagcatgggtgacagagcgagactccgtctcaaaaaaacaacaaaaaatatatggaacatataaattatgacgcataaacaccatgatcccgtctctaatttaaaaactggaaaattatcaataacttggaagtttcattttccccatatataccttaaattcaatgctattctcttgcttctaaaaaattacctcatgtttatccctaaacgctaattagttttaattttttgagcttaaaaatacggcctagcactggatttacttttctgtaatctgctttttttttcctttgagacagggtcttgctatgttgcccaggctggcctcaaactcccaggctgaagtgatctcccaccttcaggctctgagtagctgggactataggcacacagcatcgtgcctggcttgatctgcttctgaaacgcctacgttcctaagattcgtctacactgcagattgtagctacaattcattcatctccagtgtggtcacattctattctgtgaatagaccacaactgatccatccactcttgcaccgaaggacatctgggctgttctcagcttctgttaccaccaagttgcttggaacattcctgagcagcaggcgcggtgggtggcgaagggcggacagcgtgaagctgatgcagctaccgtgagcagcacagacactggcaggaggagtgggcgaccgtcacagcaacaagcaactgaggcgtgagaagacaggcagtgcccccactccctgggaaatgcaaattaaaccacagagcactactaggtacacacctatcaaaactgcttaaaaaataatcccagaactttgggaggccaaggtgggcagatggcttgaggtcaggagttcaagaccagcctggtcaacatggtgaaaccctgtctctgccaaaaaatacaaaaattacctcggtgtgatggcgcatgcctgtagtcccagctactcaggaggctgaggcaggaaaatcgcttgaatccgggaggcagaggttgcagtgagccgagatcgcgccactgcactccagcctgggcgacagagcaagactccatctcaaaaaaaaataat

SEQ ID NO: 1888219 - DNA, 4001 bp, Homo sapiens
ggttataacacagttaaaggagaggcctggtgtgcagccgcagctacacgagcagcacgtgctgcaacctgctgcaagtgacgagctgccatcagcgttattcgcagtcttcatttctggagggctaagttccaaccttcagtcagaactctttttttttttttttgagacggagtctcgctctgtctcccaggctggagtgcagtggcactatctcggcttgctgcaagctccgcctcccgggttcacgccattcttctgcctcagcctcctgagtagctgggactacaggcacccgccaccacgcccggctaattttttgcagttttagtagagacggggtttcaccgtgttagccaggatggtcttgatcaccacacctcgtgatccaccagcctcggcctcccaaagtgctgggattacaggtgtgagccaccaggcccggcctcagtcagaactcttttagtgacatcattatctttaaaaagcaaacaaggtggccgggcacggtggctcaagcttgtaatcccaaaactttgggaggctgaggagggcggatcacctgaggtcaggagtttgaggccagcctgaccaacatggagaaaccccatctctactaaaaatgcaaaattagccgggcgtgatggcacatgcctgtaatcccacctactcaggaggctgaggtagaagaatcacttgaacccgggaggtggagtttgcagcgagctgagaccgtgccgttgcactccagtctgcgtaacaatagtgaaactccgtctcaaaacaaaacaaaataaaaaaaagcaaacaaggctttgggaggctgaggcaggtggattgcttcttgtggccaggagttcgagaccagcctgaccaacatggagaaaacctgtctctactaaaaatacaaaattaactgggtgtggtggcacacacctgtaatcccagctactcaggaggctgaggcaggagaatcgcttgaaccctcgagggggaggttgcagtgagccgagatctcaccactgcactccagcctgggtgacagagtcagactcagtctcaaaaataaataaataaataaaaattaaaaattaaaagcaaacaaaaagggtcacgttttacaaatccagcgtatcccagtccgttctgctggcagcagccccagggcccgcacacatgcctaggcagacaagaccgcacacgtgcagggacgctgagcttctgaaatggcggggacccgtgtcctccctccctacgccagggcagccactctatgacctcggctccttcacagccctggctgtagcctgaggcccccgcatggcgggcatccccaccagacgttggcggacgagagccctgctgacgccagccccttcccccaccacacccaccacacttcccggtccgacgcaggactacctgttcccgggcagacacagagcacagagtgccgggtcccacgtcagcccctgacgcacctgccgtctcttcaacaccctgccctgctccctgctggctggagagccctcactcagaccccagagccctgagcctgctcttgggaacctcccctgccacacagccgggtgcgtcctcttccgtggcgctgtcctgtgcgtcctcttccgtggcgctgtcccgggccctgggcacatgtccacacagccgggtgcgtcctcttccgtggcgctgtcccgggccctgggcacatgtccacacagccgggtgcgtcctcttccgtggcgctgtcccgggccctgggcacatgtccacacagccgggtgcatcctcttccgtggcgctgtcccgggccctgggcacatgtgcacacagccgggtgcgtcctcttccgtggcgctgtcccgggccctgggcacatgtgcacacagccgggtgcgtcctcttccatggcgctgtcccgggccctgggcacatgtgcacacagccgggtgcgtcctcttccgtggcgctgtcccgggccctgggcacatgtgcacacagccgggtgcgtcctcttccgtggcgctgtcctgtgcgtcctcttccgtggcgctgtcccgggccctgggcacatgtccacacagccgggtgcgtcctcttccgtggcgctgtcccgggccctgggcacatgtgcacacagccgggtgcgtcctcttccgtggcgctgtcccgggccctgggcacatgtgcacacagccgggtgcgtcctcttccgtggcgctgtcccgggccctgggcacatgtgcacacagccgggtgcgtcctcttccgtggcgctgtcccgggccctgggcacatgtccacacagccgggtgtgtcctcttccgtggcgctgtcctgggccctgggcacatgtccacacagccgggtgcgtcctctccccggacacgtcggtgccatcacagctcagcattcatttgctcaacagttacgatgcatcgatcacatgcctcgctctgttctcagagctggggactcagtggtaacaaaataaaccaaacaggcaaaaatctccgcctgcggcagcttgcagtttagcaggtccctgctcctcagaatgcagcagcttgcagtctagcaggtccatgctcctcagaagacttaaagatcttcaggggtaaaaaaataaaataaaatacgtgtgttcttatttctgtacttccaggtgcaatctcagtgtgtgcagcaaacgttttataaaagagctgctgctgaactcaaactactgttggggaaaaactgtggccaactttgtaagaacagatatgaaaacatcttaaaaggaagtctatttttgttctgttttaaatattttactatgtattatgtgaaatacagaaagaaatatatggaacatatcagccgggcgtggtggctcacgcctgtaatcccagcactttgggaggccaaggcgggcgggtcacaaggtcaggagatcgagaccatcctggctaacacagtgaaaccccgtctctacaaaaatacaaaaacattagccaggcatggtggtgggcgcctgtagtcccagctactcgggaggctgaggcggagaatggtgtaaacctgggaggtagagcttgccgtgagccgagatcgcgccactgcactccagcatgggtgacagagcgagactccgtctcaaaaaaacaacaaaaaatatatggaacatataaattatgacgcataaacaccatgatcccgtctctaatttaaaaactggaaaattatcaataacttggaagtttcattttccccatatataccttaaattcaatgctattctcttgcttctaaaaaattacctcatgtttatccctaaacgctaattagttttaattttttgagcttaaaaatacggcctagcactggatttacttttctgtaatctgctttttttttcctttgagacagggtcttgctatgttgcccaggctggcctcaaactcccaggctgaagtgatctcccaccttcaggctctgagtagctgggactataggcacacagcatcgtgcctggcttgatctgcttctgaaacgcctacgttcctaagattcgtctacactgcagattgtagctacaattcattcatctccagtgtggtcacattctattctgtgaatagaccacaactgatccatccactcttgcaccgaaggacatctgggctgttctcagcttctgttaccaccaagttgcttggaacattcctgagcagcaggcgcggtgggtggcgaagggcggacagcgtgaagctgatgcagctaccgtgagcagcacagacactggcaggaggagtgggcgaccgtcacagcaacaagcaactgaggcgtgagaagacaggcagtgcccccactccctgggaaatgcaaattaaaccacagagcactactaggtacacacctatcaaaactgcttaaaaaataatcccagaactttgggaggccaaggtgggcagatggcttgaggtcaggagttcaagaccagcctggtcaacatg

SEQ ID NO: 1888220 - DNA, 4001 bp, Homo sapiens
aggaggaggttgcagtgaactgaaattgcaccactggacgtcagcctgggtgacagagtgagaccctgtctccaaaaaaaaaactttcaaggggatcccatgtcaacagaaaggttataacacagttaaaggagaggcctggtgtgcagccgcagctacacgagcagcacgtgctgcaacctgctgcaagtgacgagctgccatcagcgttattcgcagtcttcatttctggagggctaagttccaaccttcagtcagaactctttttttttttttttgagacggagtctcgctctgtctcccaggctggagtgcagtggcactatctcggcttgctgcaagctccgcctcccgggttcacgccattcttctgcctcagcctcctgagtagctgggactacaggcacccgccaccacgcccggctaattttttgcagttttagtagagacggggtttcaccgtgttagccaggatggtcttgatcaccacacctcgtgatccaccagcctcggcctcccaaagtgctgggattacaggtgtgagccaccaggcccggcctcagtcagaactcttttagtgacatcattatctttaaaaagcaaacaaggtggccgggcacggtggctcaagcttgtaatcccaaaactttgggaggctgaggagggcggatcacctgaggtcaggagtttgaggccagcctgaccaacatggagaaaccccatctctactaaaaatgcaaaattagccgggcgtgatggcacatgcctgtaatcccacctactcaggaggctgaggtagaagaatcacttgaacccgggaggtggagtttgcagcgagctgagaccgtgccgttgcactccagtctgcgtaacaatagtgaaactccgtctcaaaacaaaacaaaataaaaaaaagcaaacaaggctttgggaggctgaggcaggtggattgcttcttgtggccaggagttcgagaccagcctgaccaacatggagaaaacctgtctctactaaaaatacaaaattaactgggtgtggtggcacacacctgtaatcccagctactcaggaggctgaggcaggagaatcgcttgaaccctcgagggggaggttgcagtgagccgagatctcaccactgcactccagcctgggtgacagagtcagactcagtctcaaaaataaataaataaataaaaattaaaaattaaaagcaaacaaaaagggtcacgttttacaaatccagcgtatcccagtccgttctgctggcagcagccccagggcccgcacacatgcctaggcagacaagaccgcacacgtgcagggacgctgagcttctgaaatggcggggacccgtgtcctccctccctacgccagggcagccactctatgacctcggctccttcacagccctggctgtagcctgaggcccccgcatggcgggcatccccaccagacgttggcggacgagagccctgctgacgccagccccttcccccaccacacccaccacacttcccggtccgacgcaggactacctgttcccgggcagacacagagcacagagtgccgggtcccacgtcagcccctgacgcacctgccgtctcttcaacaccctgccctgctccctgctggctggagagccctcactcagaccccagagccctgagcctgctcttgggaacctcccctgccacacagccgggtgcgtcctcttccgtggcgctgtcctgtgcgtcctcttccgtggcgctgtcccgggccctgggcacatgtccacacagccgggtgcgtcctcttccgtggcgctgtcccgggccctgggcacatgtccacacagccgggtgcgtcctcttccgtggcgctgtcccgggccctgggcacatgtccacacagccgggtgcatcctcttccgtggcgctgtcccgggccctgggcacatgtgcacacagccgggtgcgtcctcttccgtggcgctgtcccgggccctgggcacatgtgcacacagccgggtgcgtcctcttccatggcgctgtcccgggccctgggcacatgtgcacacagccgggtgcgtcctcttccgtggcgctgtcccgggccctgggcacatgtgcacacagccgggtgcgtcctcttccgtggcgctgtcctgtgcgtcctcttccgtggcgctgtcccgggccctgggcacatgtccacacagccgggtgcgtcctcttccgtggcgctgtcccgggccctgggcacatgtgcacacagccgggtgcgtcctcttccgtggcgctgtcccgggccctgggcacatgtgcacacagccgggtgcgtcctcttccgtggcgctgtcccgggccctgggcacatgtgcacacagccgggtgcgtcctcttccgtggcgctgtcccgggccctgggcacatgtccacacagccgggtgtgtcctcttccgtggcgctgtcctgggccctgggcacatgtccacacagccgggtgcgtcctctccccggacacgtcggtgccatcacagctcagcattcatttgctcaacagttacgatgcatcgatcacatgcctcgctctgttctcagagctggggactcagtggtaacaaaataaaccaaacaggcaaaaatctccgcctgcggcagcttgcagtttagcaggtccctgctcctcagaatgcagcagcttgcagtctagcaggtccatgctcctcagaagacttaaagatcttcaggggtaaaaaaataaaataaaatacgtgtgttcttatttctgtacttccaggtgcaatctcagtgtgtgcagcaaacgttttataaaagagctgctgctgaactcaaactactgttggggaaaaactgtggccaactttgtaagaacagatatgaaaacatcttaaaaggaagtctatttttgttctgttttaaatattttactatgtattatgtgaaatacagaaagaaatatatggaacatatcagccgggcgtggtggctcacgcctgtaatcccagcactttgggaggccaaggcgggcgggtcacaaggtcaggagatcgagaccatcctggctaacacagtgaaaccccgtctctacaaaaatacaaaaacattagccaggcatggtggtgggcgcctgtagtcccagctactcgggaggctgaggcggagaatggtgtaaacctgggaggtagagcttgccgtgagccgagatcgcgccactgcactccagcatgggtgacagagcgagactccgtctcaaaaaaacaacaaaaaatatatggaacatataaattatgacgcataaacaccatgatcccgtctctaatttaaaaactggaaaattatcaataacttggaagtttcattttccccatatataccttaaattcaatgctattctcttgcttctaaaaaattacctcatgtttatccctaaacgctaattagttttaattttttgagcttaaaaatacggcctagcactggatttacttttctgtaatctgctttttttttcctttgagacagggtcttgctatgttgcccaggctggcctcaaactcccaggctgaagtgatctcccaccttcaggctctgagtagctgggactataggcacacagcatcgtgcctggcttgatctgcttctgaaacgcctacgttcctaagattcgtctacactgcagattgtagctacaattcattcatctccagtgtggtcacattctattctgtgaatagaccacaactgatccatccactcttgcaccgaaggacatctgggctgttctcagcttctgttaccaccaagttgcttggaacattcctgagcagcaggcgcggtgggtggcgaagggcggacagcgtgaagctgatgcagctaccgtgagcagcacagacactggcaggaggagtgggcgaccgtcacagcaacaagcaactgaggcgtgagaagacaggcagtgcccccactccctgggaaatgcaaattaaaccacagagca

SEQ ID NO: 1888221 - DNA, 4001 bp, Homo sapiens; identical to SEQ ID NO: 1561917

SEQ ID NO: 1888222 - DNA, 4001 bp, Homo sapiens
tcaacacattcacaactggttctggttacccagtagtattacttgtgtacaattaagcaagagaccaaaaccacagagcaagttggacagggtgggaattacagggtagggaacagatataaaaacacagatgtgcagatttcagcagaaacgtcaaggatccacatcctgtgttggagcagaaggctctttagaagcgcatatcccttcacccatcactcctatccttggaccccaaagcagggccgcagcttttactttcaaacccagggtcctcaaaatgagcgtgcaaagtccataaacacaatctggttgaaaacagatgacacaacacacctacacgaactgtctgactgttaaattcatgttacaaaacactaacttcaggatttatttttgaaacttttttccacagagaaaataacacactccttggggaaaggtcacagattgagaagacaggccctaggtaaaaattattaagacagcacctggagttgataggcctgcctaggagagaaacatgggcactgtcacaccaccacaggggactgctgctgtctgaggtcagcaggccagttcacatgccacgcaaggtggctactgagccaagtcataaaaatcttccagatcatcatggaacaagtcccactcattttcaaagtctgtcagttcatcgtccccatctgccaaaagcataagcaacatctcacccagctcaaaggtgacaacctcttcttcattgttgtcaaaggggtcattgttctctctttcctcaatgagctccgagaagtggttccttcactgggcccagtatctgtttgcctgtctctgtgtatcctttctatggccatcagggaatacctgcttgtaaaaacacatcccccaagatgggcagctcccctgtccttcatcaaaatccctgcacgcctggctgctcattgcctccttgactttctggatgagtttctgcttctcttctttctcccgcctggtactcactgggaatgacaaagttagatgtgatccggcattctgggtaggacactatgatcttgctctcaaatagcttagtgcccttccacttgtgaatatacttgagacagtaggcgtggctgcagctggagaggatcccaaagccacgctcactggggctggctttctcacagaccacctccatgcagatcccacacatcgtatccttgctgcactgcacagcaaatgagagctccgtttccttctcatgggcctcaggacaagatttttatatgctgtggtctctgggcagcatccattggaggtaggacctgcagcttacatgatcacatgactctctgtggagatacacacagttctacccatttccatctctcccactgcagcctaggggcaaagcagcttgttatcacagctgtttgctctttctctgattctcccttggtcactgcagaaaggggcagtgtacgctgcagtagagttgcccaggaacaaactcaacagcatctacccagtcctctgaacccactcctacagttgcaaagtttgagtctgactcagcttcgcctgtattcatttccacaagcggtccaactatgaatgagagacttaaggaagcagcaagggatgattttgtagttagatctgtagcagttgcttgttcgtttcagtggcttgctgtgttcacatctgcagcggcctccataaacacagtaccgtcgctgaaaatacttgcccactacgccatgtggactgtcagagagggaatgcaagtagcgacagttatgtccttccttacaaatcccatgcacaaaataccagcaggtgacctgtttagttcagctgttgctgcagctactgccactccttcttcccgtccccagggatgggggtggtgactgtgggatggggtgggatagctgctgctgcaggtcctgctcctgatattgtggctgttgttctgggagctgcagcctccactgttactgtttatcccacatacccatttttggtaaaattaactgatcccatggttaagatgatatgtaggccaatatacttttatatcaattgtttcttttctgccgatgatgatatgataataataactttaaaacagtaagctccagccagcacggtggctcaggcctgtaatcccagtgctttgggaagccaaggcagcaggatcacttgagaccaggagtttgagaccatcctgggcaacataatataaccccatctctaaaaaaccaaaacaaacaaacaaacaaaaaacactagaaaaaattagctgggcatggtggtgcacacctgtagtcccagctacttgggaagctgaggtaggaggatcacgtgagtctgagtggtcaaggctgtagtgagctatgatcgtgccactgcactccagcctgtcccagcactttgggaggctgaggtgggtggatcatgaggtcaggagattgagaacatcctggctaacacggtgaaaccccgtctccactaaaatacaaaagaaattagccgggcgtggtggcgagcgcctgtagtcccagctactcaggaacctgaggcgggagaatggcatgtatccaggaggtggagcttgcagtgagccaagatcgtgccacttactccagcctgagcgacagagcgaaactccgtctaaaaaaaaaaaaattagaatatgaaaaagatggaatttctggggaagagggggaattcatgttaggaaactagaggtgttgatgggagagaggaagattatccgtctagcacatataccctataaatttcatgtagacttttggctcaacatttttaacagtaaaccaataggaatatagagataatataaaaaaattttcttatctaatctctaggtaagaataccaagccatcaaaggcagtggccacaaaagaaatgactgccaaattttactctaaacaaatttaaaatcttgcttttagataaaaacaagtaaaaacacacttagaaaatacatttgttaagtatatgaaacggtttgttgacttcatttaattatctcttacacatttataagaagattacactaccataaaaatgatctatgaatatgaagggtaggtaataaaagggaaatgcaaatgaagaataaatatgtgaaaacagcccataaattacaaattaaaaatgcaaatgtttatttatttatttatttattttattttttgagacagagtctcgctccgttgcccagacttgagtgcagttgctccatctaagctcattacaacctctgcctcctgggttcatgcaattctcctgcctcagcctcccgagtagctgagattacaggtacgcaccatcgcacctggctaatttttgtatttttagtagaaacggggttttgccattttggccaagctggtcttgaactcctgacttcaggtgatctgtccacctcagcctcccaaagtgctgggattacaggcatgagccactacaactggccaaaaatgtaaatgtttaaatacactttttggcctttatataaagttggcagattataaagaaaaatgatatctaggatgggtatcagtttgggaaaatgttaattctcataacttttttgaatataatttctaaaacaaatcatgtttgttggaggccactccacaccaagatttaaaatgagcatgcactttaatagactaattctatttctattaatgtgacctaaggaaatagttgtccaaaatatgtgtgtaggtatatttctcacagttcatgttaacagcaatacactgtaaaaaatctaaatgtgaaaaaaggataaaataacttgtaggaatctataaggtgagatgttaggtacccattaaaaattataatgcaggtgtcttcctgctggcaagaatataaaagaaaaaatatacaatgtagggatattctaaatgatatggctggagtttacaatatttttaaataaaatgcactttccacacaaaaataaggcattttt

SEQ ID NO: 1888223 - DNA, 4001 bp, Homo sapiens
tctagaatttccacttgagcctttgttattattgtagtttcttcttctctgctgtgatttcctatccatttattttaagggtttttggggttttgattttagtaagaattacaataactactttaaaaatccgcactaattccaacatctgggtcatctcgaagtcagtctctattgattgcctttttctttgaatatgtttctgtatttttttgatataatgggattgaattctgaagattgtaaaactagattttgttttgttcctctgaaaattttgataattttttgttgtatttgttgtattttgtttgattttttttctattgtatactttgcaatatattttcctccaatggttttaacatttctatttctcaaaatatttatgtttatgttaaaaattatacaaagtagcttggtgcagtggctcccctctgtaatcccagaacttttagaggccaaggcaggagggtcactcgagcccaggagttggaaaccagcctagacaacagggcaagaccctgtctccacaaaaaattattagcgtggtgcaaaaagtaattgcgggttttgccattactttcaatggcaaaacccgcaattacccttgcaccaaccgataaaaaataagctggatatggtggtggcttgtgcctgtggtctcagctatttgggaagtgaaggcagaggtgggaggattgcttgagcccaggagttccaggccagcctgagaccctgtgtctatgagaaaagaaaaaatttagctgggcccacgtacctgtggtactagctacttgggaggcaaaggcagaggtgccagaatcacttgagcccggaagctcaaggctgcagggcactgtgattatgccactgcactccagcctgggtgatggagcacgaccctgattccaaataataattagaaaaaggaaagacctagaacaccaggttagggttaagtattctaaaatttagctaacttactctgttctctataaaacaggttgtcacagaaaatatagcatgcccagttaatttgaaatttcagataaacaaatactttttttagtgtaagtatatcctatgcaatatttgggacatgcttatactaaaatattattccttgtttatctgaaattgaaatttaactaggtattacataattatagcagcctgaccataaaagatatgtaggctgagcaaaattctactttaaactgcaagctttataataaatgcattattaatcaagaactattatttactgagacctgtgtagatccccatatttatcttttatattgtggagctaggaaagctacataaagaacatttatagaaataaatgactgttctatagctgaaaggaaaactctagcttttatttttctccccaaacttaagctttattctacgtttgtataaacaataaaattacagctcaactttggaagcacagatcataatataaaaataaagcaaagatcccagaaatatttaacagacaacgaatctttcacatcatcttactatagcaactaaacatataataacttagaatgatccattaattataaataaagaataaattcttttacaaagcataactattaatattattgaccatcataagagcaaatattttaagtaaaacaccataaatactttacagaaaggagcgagttgcagacacagtcattcttggatttctttcaacaccaggctttcttcccttttgacctgaactgggagttgaatattgcctctctttgccttctgaccctctagtctctgaaacatcttttgtactagaggtatgtgcagagacttcctggaaatttggatttgtaaattgtgctgttgtatcttctaggcactgcagtgatccagatatagagctgttgctcttgcttgtataattgtaacattttgattcaaaaaaggaagtaaaaggaagagttgattaaatttggctactgacattaataataataaataataattgtacttgtaatataaacatctgaaagttttagttctaagaatggctgtcgacataagaaaattatgtaaaaataattaatgtctattataattactttaaccaaagaaaaagtataatttaaagatggctgtttaaggatcaaattgcagcaattggtaaaagtagatattagtcatatttatgaagtgacacacagtgatactgaaggcacttatttctcaagaaacatcattttttcccaacaagaacatactacatcctagacatgagatgaaaataagctttaattttcaccacagcagggcgacaatcagagaactgaggtggtacagatccattagaggaccatatccatgagtctatcagtctctactgtaggacagagcaagaatttttaaagaatctcggtgaaggctccttttcaaaaaaatataaagattaaagcctttgaaacgtaaattattttttccagttattacattgaggacaaagttatagttgcaaagttaagatttttataactatctctaaaattgattctcagtgactcccttgatctacatatgttaaggaaagaggcaagatgaagatgtgttaaatattttccagtttttaataatcactttaatataaggtatacccaaataatggtgaattaaatgacaaagtatgttgctccctctccctctccctctccctctccttctcccctcgccatggcctccctctccctctccctctccctctcgccacggtctccctctccctctctttccacggtctccctctgatgccaggccgaagctggactgtactgctgccatctcggctcactgcaacctccctgcctgattctcctgcctcagcctgccgagtgcctgccattgcaggcacacgccaccacgcctgactggtcttcgtatttttttggtggagacggggttttgctgtgttggccgggctggtctccagctcctaaccgcgagtgatctgccagcctcggcctccggaggtgccgggattgcagacggtgtctggttcactcagtgctcaatggtgcccaggctggagtgcagtggcgtgatcttggctcgctacaacctccacctcccagccacctgccttggcctcccaaagtgctgagagtgcagcctctgcccggccgccaccccgtctgggaagtgaggagcgtctctgcctggccgcccatcgcctgggacgtgaggagtccctctgcctggctgcccagtctggaaagtgaggagcgtctctgcccagccgccatcccatctaggaagtgaggagcgtctctgcccggccgcccatcatctgagatgtggggagcgcctttgccccgccgccccgtctgggatgtgaggagcgcctctgcccggctgcgagcccgtctgggaggtgaggagcgtctctgcccagctgccctgtctgagaagtgaggagaccctccgcctggcaaccgccctgtctgagaagtgaggagcccctccgcccggcagccaccccatctgagaagtgaggagcccctccgcctggcagccaccccatctgggaagtgaggagcgtctctgcccggcagccaccccatccgggagggaggtgggggtcagcccccgccaggccagccgccccatctgggagggaggtgggggggtcagtcccccacctggccagctgccccgtctgggaggtgagaggcgcctctgcccagctgcccctactgggaagtgaggagcccctctgcccggctagccgccccgtccaggagggaggtgggggggtcagccccccacccagccagccgccttgtccgggagggaggtggggtgatcagccccccacctggccagccaccccatccgggagggaggtggggtggttaaccccccgccaggccagccgccccctccaggagggaggtgggggggtcagccccccgcccagccagccgccccgtccgggaggtgaggggcgcctc

SEQ ID NO: 1888224 - DNA, 4001 bp, Homo sapiens
tgtagcacagacagggactcctgctgccctgggagctgtctcaagcaaaatctcttgtcccagaggtgcccatgtgggtccgctgtgtcccctgtcatcatccttgttttttctcattttggccaagggcaggctccctgggacaggcagggaacaactgcggagatattagtgattcataggtttgtacagtgttttatactttgcaaagcactttattagctcacacctgtccactcacatgaaactcgtgttaggccctgggaggccgacggtaactctcaccgtgccctcagatgaagcacagagaggttgttacttgcccgggccatccagtgggctggctgggtcttgtgtccccatctgtggacccctctagggtctgagatgagatgagaagtgtctcctgtatccacctcttcctggcctcccttcccccacttcctggtccctgtccactcctcaggttggtgctctcacttcttgaaagctctaggcacccccgcctcccgccaggctccccattggctcctggcaggccagctgagaatgaacaggagatggaggcaggcagcccaggctgcagaggtgagggatgtggggccaggcccagagggctcagcctagaggcttccaatctcagattctcctgcctgtggtcatctgtttgtccatcaccccaggacagggcagacagaggggcaaagcactgggggccccagagcctagcttcccctcagcctgggggacatcacagcatttcagtgtcagtcacattttaaactgatcagcctttgtataatgttttttaaatcatttctaaataaaacagaaatacagagtgtgtcatttccctgggatgagggaacaaagatcaggttccaagagtaaccttaggacgctctgggaagagaaccgggtcctttggggtgtctgggagctgcccacccatctcctctgccagaccggcggtcagatagcctccctctacaacaggctggccctgggggcccagggttattggggttccaggaacacagcctgatgatgcctccttacgatccaggatggagagcagcccccccaggagtatggggagggtcactgtggcacgggcttctccatgacctgggacatgacctgggacacatagtcaagagcacggttatcagcaatacagatattaataaaaggcagacgaagtcaggaggtcagcaactttgcgggcttaccaggaggcctgtcctgcctctggaagccagcgacagagagggatgcccccgacccagccagccggagaaagggatggggtggtcacgaaggtctgagctgggtctgggtgtaggctgggaagcaggctggggtgtagactgcgaaggcggccctgccgggacttctttccagtccccggcgacctcttcgaattctctgctatctctggggagcctcgggtgggagggggtgtaagagacgcagggacgtggggagaggagacaaggcaggcaagaaccacaggggacggcggacagacgggcgacatcctgcggaggacgccgtcagtaccaggaagtgcaggcgatgaggaagcgcacgtcgtccagcggcccccacgggctgggctcgggctggggctggggctggggctggggctggggctggggcggatgccggggctgttccgggccctccggcgccgcaggctggggctggggctggggctgggtttgcgcaggctccggggcgccgcggccgccgcttagctgagcccccatggtctgcaagaagagaagccctttaaggtctgggtcgccgggacaccccgctagggccccgccccggctctgccctcacctctcgcagccagacccgcgggtctcccggaacccacctcggcgtcgggaggagctggcgccgtgacgccaccaccgcgtaccgacctcaccctccgtgcgttggagcggaaagaagggactcgaccctgtgcttcggggcggggctccgcgaccgtcccccgccaatcccgccccagcgcctcaaggccccgccccgcgcaaggggacggaatgcaccccaacagcctccaagacgcccaggccaggaggacgctgggaacccgctgccccgccccacgcccacccaggaaaagacctgcaacctccatccaccttagtcaaagaatgccccgaagccagatgccccagagctctcacaggggacttgcccagctcaggggaaaatcggaacggactctctgcctttcaaggccagagaagaccggcgcagaagtcgggtgaaaactgtgagaactagaccgggcgccgtggctcacgcctgtaatcccaacactttgggaggccgaggcggtgggtcgcttgagttcaggagtataaaccagcctgggcaacacagtgacttcgtttctacaaaaaaataaacgaggcgagaggatcgcttgagcccaacaggtcaaggctacagtgagccatccttgcgtcacaacactccagcctgggtgacagagggagacactgcctcaaaaagaaaaaagaaaaaaggagaactgtagtggagagtgtttcttgccccaggatgaagcctcacatcctgatggtagaggagaagggaatggcgtgtgtggaggtggtgaactgggttgggtgtgtgttgtgttcatcccaccctatcttcccagaatgctggaacaactggagagtgcagggattgtacacaggctgagggccccaaacatcacattcagaatggcccggagggaactgcactttaatggggtggcacaggacagcagaaccctcagccagcagccacagggcctgccagccagcacaacagagcaggtttttgcagtaatgatagatccaggcgataagcacaggtggaaaagggttgggtgcccagcccctcagtcccagtgagctctctgccacctccctgccagcatccggtacagattgggcggaatgtggagaaggttggccacagtccagagccaggagcccatggaacaacttggaaggtgactcaggtgaggctgaagagaaaggaaagcgcacggtcagtagctgtttcacagagcccacctcactctcaagtgaggtgcctgcctcagccctcatcccgggaccagctctgacaagctgctcaagcagctactgctctagtatcctagccctgaaaaaccacaaagatgaggattagcagatgctcaagaaatattttttgaatatgctggctcttatctgctcagcagtgtacagatatgctctcacactcgagaagctaccagaacaaactggtaggctcccattctagatgacatcttttccccatactctcaaaatgcaagttaacccccaaccctgagcagaagaaaggagaggccccaggtacctgtcaatgagggaatcccgcatgctggtggcaatggtgctaggctgggcttcattcagcttgaagacactctccaccactgacagctctgtgctggttgtgtccaggccacagaaggcacaccagtcattcaccaccatcccagcagcaatcacctcactgcctcggttcacagtccccgcctgccaagggatgggctcaatgtgagtcacggcaccaaattctctccctcctcaatgaagactctccccaaaccctgctcctccctgacctgcagccccagtcccaaactgtggcaggtaatgacccagactcccaaacactaggcaaaaggatctgcctcgggagacggggttcagaggacaggaatgcttaccacaagggggacttgaagaagagaggacagctcatcctggtcttcaattgaagtcttgggatgcaccagccctccctgattgctgaagacacagtagcttcctactagcacctggtcggccactgtctgtctgaagacttccaccttgagcacatctgccagaatttcttctgtctcctgtcaatcaaagatattgtgttcagggctcagaacttac

SEQ ID NO: 1888225 - DNA, 4001 bp, Homo sapiens; identical to SEQ ID NO: 1561934

SEQ ID NO: 1888226 - DNA, 4001 bp, Homo sapiens
aacagtgtaaaagtgtccctatttctccacatcctctccagcacctgttgtttcctgactttttaatgattgccattctaactggtgtgagatggtatctcattgtggttttgatctgcgtttctcctaataatctagatacaacaaatatatagatatatgttttctaagtaattttacctataataatcaaaaactggaaaagttgaccggataaaccaattgtggtatacccatactcaacaataaaaaggaatgaactgggacattccagacatggatagatagcagaagtattatgggaagcaaaaaaggtcatagacaaaagagttcccatgaagctcagaacgtatacaatgatttatgatagaaagcagatcagtggtttcctaggagctgaggttagtaggaagtgggggaggaggactgacatgggtgggtgtcaaggagaatggggtgccaaggaatgtgctggagtgttagaaatgttgttcatcttcattttggtgatggttctatgagtttatgaatttgtcaaaatttgttacaatgtacacatataatgagtgcattctaatatagatatatgtgtatatatataaactaaactgcaaagttaattttgtttttttaagatggggtttcactcttgttgcccaggctggagtacactggcacgactttggctcactgcaacctctgcttcccgggttcaagcgattctccagcctcagcctcccaagtagctgggattacaggtgtctgccatgatgcctggctaatttttttgtatttttagtagagatggggtttcactatgttggacaggctggtctcaaactcctgacctcaagtgatccacctgcctcagcctcccaaagtgctgggattacaggcgtgagccactgcgcccagcctgattttatgaaaaaaacagcagcaacaataatccggaaaattggtaatcagatgagtaacaccagggtagggggacaacacaagcaaaaatcaacacccaatcatgacagaaattctcaaactaggaacagaaaacaacctcttcaaccaaaaaaggcatcaacaaaaacgtgcaactaacattacacgtaatggtaaaagactaaatgcctccctacacaggaacaacaagaatgtccattctaactctgtaatcatgactacacttcaaaggagtcctcagtaggaccccgtagtacattttgatgacaaatctgctttcttagtctctgagatgaccgttttatcccatcctttcctatttttctttaaacctcttacacccatatccttggtctactctgagatgattatttcacctcatactttatttttcacaaggtaaatcaatctcttacaaactcttcctatgataaagtcttccttcctatctaccatcccttccttcctacctactatgcaaatcttcctaccatcaatctctcaagaagacagaggtctatcctggccatcactcaagacatgccaagttatctggccagcttaaaactcaaccacaacttgggagtataaatataggtcttaccctagaaattctagagaattgataagttttccatttatcatcaactcctttcatcaaaagcaaagacaagttcaactcctcaaattggcataaagccacagtaggaagacagaaataattaattcccaacctttggttcctcatctttgtaaatagctcttgccatttaaaaaaaaggtaaatttggtggtttctaccaacatgtgtattaaataggaaaagtaaagaaaaacacaaaaaacatgtgcaatttgcatagtatttgttccttacctgctggtggtgggtgctgggaaacgtatactttacagagtgaggaggataatgactttgttctgtgctgaatgctccttggttgggagggtaacctgaacttgacattatcagtaaagaagtcctcaccagactgtgagatcaatgccaataaacaatcatgtttctaggaaaacatctaaacaggatgggaaaaaaatagaattaataagaactaaaacaccaagtgtacttctaataaattataactatagctacataaataaaaccacaattaccagtaaaagcttcctctcaagtatttacttaataaaagttaccaaggtttgaaaacattaatgtgtcattttttatatttaaaataggttaatatgtgacaaataatataattagctatataaagtaaaaacagtatataaaaacagcataatatctggcacatagtaactgctcagtaaatacctttctacaaatgtctgaggaatataaagacaaaaatacatggttttaaatttgggagttgataagtcaattgtgaaaagaattcaagagtagttttaaggtaagcatttgtgcagaggaagtattgtctttattaaataattctgaagcaaggatgataaaatactaagttttgtaatcacagatggtaggtagatggacatttgttatgttactctttgcatgcttctatggaactgaaatagcagataaagaaaaagaaggccagaagcggtggctcctcctgtaatcccagcactctaggaggctgaggcaggcggatcacttgaggtcaggggttcgagaccagcctggccaacatggtgaaacttcttttctactaaaaatacaaaaattagccaggcatggtgacatgcacctgtaatcccagctacttgggaggctgagacaggagaatcgctggagcctgggaggcggagtttgccgtgagctgagatcatgccattgcacaccagccagagcaacagagtgagactccatctcaaaaaagaaaaagaaaacaaagaaaaataaagccatcttcattataaagtatattcctacttgtccactattctagattaatttgatttgtctgtcttttcttgtgccaatgccacacttttcaaattactctagtattacgaggtttcatatccagcagggcaagtttcacctcactgtgctttgttgttgctgctactttcaccaccttcccagctattctagcacattttctcttacacacaagcatcagagtcagcttgtcaggtcccagagaaattctggatgagaacacataaatattgaattcacagactgactaatgggagaacaggtacccttatacgtctgagtactccaatcttaaaacatgattatctatgtttatgtttcaggataacacaaatatttatgttatacataattaatatgggaatattttacatacatgtggtagagaatattacacatatataaaaatgtgtgcaataatatataatttctatcttaattatatataaaactcccaagacaaaaattttatatacacatatacacatgtgcatgtgtgcacatacactcttactttaagaccagagttctattattacctaattgggtggttttaaaaaatagaatttaaatataagatgaaaattatataattgtatacataaaaatataacagatataattttatttacataaaatctccacccatttaatactttattagtaaagttttaattttctttccatcatttcaaggtatttgggaagagggcaaattcaaaaaataattcagtatgacaaattgatcaatttcccagtttttatcaatatattctttatccagttaggtttagaaaacaaaattttctaaggaattgtctttcaatctaactttaaaacaaaacttataggctggccacagtggctcacacctgtaatcccagcactttgggaagtcaagatcggaggatcccctaaggccaggtgttcaagaccagcctgggcaatgaagccagacctatctctacaagaaaattaaaataataataattattattatttaggtggccaggtgcagtggctcatgcctgtagtcccagcactttgggaggccgaggcgggcggatcacgaggtcaggagatcgag

SEQ ID NO: 1888227 - DNA, 4001 bp, Homo sapiens; identical to SEQ ID NO: 1561938

SEQ ID NO: 1888228 - DNA, 4001 bp, Homo sapiens; identical to SEQ ID NO: 1561939

SEQ ID NO: 1888229 - DNA, 4001 bp, Homo sapiens; identical to SEQ ID NO: 1561945

SEQ ID NO: 1888230 - DNA, 4001 bp, Homo sapiens; identical to SEQ ID NO: 1561953

SEQ ID NO: 1888231 - DNA, 4001 bp, Homo sapiens
cagcagcagctacagggtcagagacagatctttgagaggccataagcattgaaaagattgtggtacctatcacacaccgtctaaaataaaacaaatattttatttatgggaaaagtgttaaggtgttgataattccaagaaagcttttatttgtcctacaatcattactttgataccttttctgaaatcctagagctgtccccactctgcccatttttttttctcattatggtgatgtctctgggttgctggtgacctgcgtaactattgggaaatctagtttctcaaaacttttagtttttttttagacagggtctcactctgtcactcaggctggagtgcagcggctcactgcaacatccgcctcctaggttcaagcgattctcatacctcagtctcctgagtagctgggattacaggtacgcgtcaccaagcctgactcattattttgtacttttagtagagacaaggtttcaccatatcggccaggcggatctcgaacttctgacctcaaatgatccgcccgccttggcttcccaaagtgctgggattacaggtgtgagccaccgcgtcccgtctatcataagttttattgaacattgcctaggtatcaggatgtgtttacatgcattatctcatttaatctgtaaaaccaccatgtgagggagaaactgaattatccccattttcaggataaggaaaaggagggactgggaatgtgaactcaggaagtgtgactccatcgggtagactgctcaggctgcagatgtaaaggttttacacgtaggcttttccagatctcagcttctgaaaggcggagggaccgtttggacgggagcagggcctcctcttccaagcaccctgtgcctttaagagtcgccccctccctccagggatgctccaatttctttctccccaccacccccaccccgccccccgcgccgcggagccgcacctcggtccttcctccccgccccacaccctcaagctcggctcttggccttcgctcgtccagaagtgggtgagctgtaccgccagaggcgcattctcctagccccaaaccatgcccgctacgccccagcggaatgccaccttaaagaccctaatccgggcacctcccagctcctgcttcccaagggcgaggcctcagcgccccctcccatcgcccatgctcacgacgccgtgaaggtgacctcccccaggggcggcacacgcccagtggtgcccgaactggctcacacgtggtgagccgggagcgcgcggcccctccccgccacgcgcctcgtgccggccacccggccacgcccccaggactggctccgccccgtgcccctgcacgcttctccaggcttgggtggggcgacgcgcccaagtcgggcaccgggcaggctacggggtggggtaggacctgggaatggcgcacccacgcatcctcgaatgtcgcctgcggtttgtgaaaagcgggaagtccgcccagctcaggacctttggctggcaggcgaggtgccccgcggcccttggtgctgagcaggggagagacagctgggaccgcgagcctgggaatcgaatcctagtctgcgtgtcctcggtgcttcctatttggaaactgggcatcatattatcatattcccttctccctccggattcttatggagcttcgaacgagattaaatatacatatatatgagaaagggatttgttcactaggtccaaaagcatttgctggtcccatatgtggtcggaccctgtgtgtagtaggcggggggcaacatctacgacaacctgagttcgtccccttaagaagctttcctgagtcttgggccccccaaattctcttctgggatggtccgaaaagacgtccctgaaagaggaaagggcggaaatcctacctgacggcaggtgtctcggaatgagctaaaatttaaaaggcaacgcggggcagggacaagcgtccagcgtcagatggaagcaggctcgcgtcccctacccttcctccaacccctaacctaagaaaagaaaccgatctcgccggtctcccccaatcctagccgcgagaccgcccagccccgcagcccgagccccgccccgctccggcggccagcgattgggagatgcaaataccggcttctctgcccagcaacgggtgacgcggcgcccgagcgcgaggcggggcccggccgcagcccaagcgggcacctcggtgtttacacggggcggccccgcgcgcgccgcagcggcccgcagacggcgagggggaggggtggtgcgcgcgccggcggggccgcgcggggagaaagacactgaaaggcgtcggcggccgggcggggagcggcgcgcgcgggccgcggcggagccagaggctgcaggaagagcccgcgggggcccggagggtgcgattcctcggcccccgcaaaacaatgtgtgttgtgagccaggacgcaacttgccggaggcggcgggggcgcgccgagcccgcctgagaccgcgctgaccttctccccccgccgtccgttgggcccgagcgcccagctcctcgctccccagttcgcgggggccgggccgagccgcggggcggggccgcccctccgtcgccgctgcctcctcccccacccccagccgcggaggatgcggacggcccccggcggcgtctagcggccccgggcccaggcgcgatggtgcagcagcggggcgcgagggccaagcgggacggcgggccgccgcccccgggacccgggccggccgaggagggggcgcgcgagcccggctggtgcaagaccccgagcggccacatcaagaggccgatgaacgcattcatggtgtggtcgcagcacgaacggcggaagatcatggaccagtggcccgacatgcacaacgccgagatctccaagcgcctgggccgccgctggcagctgctgcaggactcggagaagatcccgttcgtgcgggaggcggagcggctgcggctcaagcacatggcggattacccggactacaagtaccggccgcgcaaaaagagcaagggggcgcccgccaaggcgcggccccgcccccccggtggtagcggtggcggcagccggctcaagcccgggccgcagctgcctggccgcgggggccgccgagcagcgggagggcctttggggggcggggcggcggcgcccgaggacgacgatgaagacgacgacgaggagctgctggaagtgcgcctggtcgagaccccggggcgggagctgtggaggatggtcccggcgggacgggccgctcggggacaagcggagcgcgcccaagggccgtcgggcgagggggcggccgccgccgccgccgcctccccgacaccgtcggaggacgaggagccggaggaagaggaggaggaggcggcagcggctgaggaaggtgaagaggagacggtggcgtcgggggaggagtcgctgggctttctgtccaggctgccccctggcccggccggcctggactgcagcgccctggatcgcgacccggacctgcagcctccctcgggcacgtcgcacttcgagttcccggactactgcacccccgaggttaccgagatgatcgcgggggactggcgcccgtctagcatcgcagacctggttttcacctactgagcccaccgtcagcggggcgcgcacgcccccaaaccagctgtttacatacaggaatcaggtattggggcccctcggaggccgaggctggcaccccatctcccgcgcagcctgccccctcctggacgtgcccatcccccctcagatccagacatgcccctcccccgcagacacaccccaaggcagcccaacccccaccccttccccgacacccaagcccctccccacgtcgccccctcctgcacagccaccagcagccagccccctccgatacacctcccgtcctctcctacagacctgcacccctccccccttttgcacacgcccctcctcgtggccggaggacccgccccctcctttgctccggaatctctcctccctcgc

SEQ ID NO: 1888232 - DNA, 4001 bp, Homo sapiens; identical to SEQ ID NO: 1561958

SEQ ID NO: 1888233 - DNA, 4001 bp, Homo sapiens
aggaatgtcaccagttcccaggcccagcaggcctgcagggctaggagatggcagtgtcccctaggggctgggctggggccttctccacctttccaccaccatcattacagggacaactctgcgaggagctatcctcatggccaagtccaaaatccagatttagttttacctaaatgttttgaaatgaattggtatagcagttacagaagaaatttatctggagtggccactcctgatttttatttcaagaggtcaccaaccttgccatgtatctgccagcagatgtcaaaggtggatgagcaagggacccgcggtgctgggaaatggcaggtgaaagtgactttgtgttgccccatatctgccagtgcttagagagagggccctgaggaggcgctgaactggcatcagctgtgttgaacagtccccagggtgaccctcccggtggcccaggcttcgtgtggtcctctcccctaagtgccttcttacaactgagagatggcggcaaaggtgaaggaagccacggcttgcccatgtcatcctggttatataagactcggcaccctagagagaaagactcccctggtggctttgaaaagaaaacggccgtgctttgcactgcctatggagggacaggggtccgccagcagcttccaggagctgagtaaggcccccagcccgcagcagaaggacagagacccctacacacccagcttagggagagaggcccctgtggacacgtggcccctccgggggttatcctccaagggacattcttctgatggggacatcctctggggggatttctcttgggggacagaaatattcctggaagaggggattctctgcggggcaggcatcctccggggagagaatcctgctgggaggacatcgtcgggaagacatccttcctaggtacccggctcatcttccggggagaccgtcctctggggggcgggcaggctttggggacattttcgggagggaggatctcctagggcgggcatccttgcgagacggggtggggcgaatcctcccgggtgggcatcgtggggtgggggtgggcgttccgcgaggggcatcctcccgggcggacgttgggggattctcgggggagggaggggcgcggggcgggcgtcccggggagggaggggcgttgcgcgcggacgcgggcggggcctgggccgctccgtcccctccccccgcccgccccccgcgcttcctctgctttcggtttcgcttccgcctccagcgcgagccccgccgccgccgagcatggacgaccccgactgcgactccacctgggaggaggacgaggaggatgcggaggacgcggaggacgaggactgcgaggacggcgaggccgccggcgcgagggacgcggacgcaggggacgaggacgaggagtcggaggagccgcgggcggcgcggcccagctcgttccaggtgcggccccgcggcgcggaagaggcctggggtccccggcgccccccgcccggctgcgtggacgggagacccccccatcccgggcggagacacctggagcctcctggagctcccgcagccccggggacccccccccagaccggccgacccccagccccagggcccggcggggaagtgcgggggccgcgcgtgggtgacagcggagctgagcctcccgggccccatcgtgtgtgggcgccgttccccccgggggtgcctcgggcgcgtcccgcccccagccgccgtggccgcccctgatggaacccctcccgcctcgggcccgcgcctcggcctcctggcggcccctgcgcaggccccgcggcctggggctggggctggggctggggctggggctggggcccgggccgggtctggcctgggaggcttcgcgtctgcacctgcgggagcccggggcgggccgacggggcctccgcttgttacttttgttaccgccgggcgcctgtcatcgccggggttacttttgttgccgcgctgggaacgccacactgtcgcagtccggcccccctgtcggggagctgggattgatctgggagcggccttccagctgagctgcccgggttgcggagggccgggaagtgcatggaactcgacggctccgcatggattctccccttggcacccagcactgtttgcgtttgcgcctggccatggtggagcgggcagtgagagagcacggaggggctccgccctgtcgccgggagggcagcggccaggcaggctgggcaggggggtggggtctggctctgtcccacaggacggtgtgacccctgggtgggctcttgacgggctttcctcactggagttcctcaggccgctctcctgaagcggtgctcagaggccctgaccatcctgccaggcgcccgtgacccctgacctcttccctctgcctcctgctgtggcttctgtccacaagcccctccccttcccctttggacccctcaggcctccccagctgcctgcgctggaccctggcggggctgtttcactttttcctgggcagtgtcatgtatgcacctgtgggctgactgtgtggccacatccagtcaggacccagcctccagaactgacccagggaggctcccgctggccccaggaaggagaagtagaaactgatgatcaggcggggcgagagaaccacaccagcggccctgttgagaaatcaggccgagaggtcggtggcggtggctcaggcctgtaatcccagcactttcggaggcctgggcagtcggatcaccagaggtcaggagtccaagattagcctggccaacatggtgaaactgttgtctctactaaaaatacaacattagccaggcgtgatgggcacctgtaatcccagttcctccagagattgaagcaggagaatcgcttaaacctgggaggtggaggttgcagtgagtggagattgcctgggaggtggaggttgcagtgagtggagattgcctgggaggtggagattgcatgaagctccatctcgaggggaaaaaaataagaaagaaaaatcaggcagagaggcaacgccaggtcccagctggagctcagcggggagccaggggatacagtggctgaccgggcctcctaaccccccttctagcactcccccaggatcctgggtcccaattgttgccctggacaaatacgcccattcctgccctacccaccgagtgaggctcagccccaggccccccaccctcatcacaaggtcagggctgtgtcccaccatcctcatcactaggtacttccggccctttgctcagccccatgatgcttggcctgcagagatgggggctgaagggcttggggcatcaaggggacctgacatcttgctgagaagccatcactagacagggctggaggctggagactcagggcctgccctcaccgtggccagtgaggcgtggggttgggcagggaaggggcattcattcattagaccctgccagaagcacctgggtccccttctggggctacaggtggtgaggccactgcccccaagaacacagcctggtgactttagtgtacaaagcagggggagtctccaggggcacagaacagaggctaaagccagggtggaggtggccagcaggcctaggaggaggagagggtcagggccacaccccaggggaggtgcatgtcagccaggggccaccctaaggtggaagccaggagtcccaaaggggcctagagaaggagcagccccccacctggctaccgcagccctctctggttctgtgcagggtattgggatgcgttactgaggcccaaatctgccccactgggaacccccaaaaaagagccagggcaggagaatgagagggaggagccatgaaacccccgccctttaaagacagctctgtggcagctggcccaggccctgcagccctcaccacgttgggactcacttgggggtctcccatgggggtcctaatcccatctcttttcttcccagtccagaatgacagggtccagaaactggcgagccacgagggacatgtgtaggt

SEQ ID NO: 1888234 - DNA, 4001 bp, Homo sapiens
gtcacattcttggaaagcatctaactctttatgatggagatgtgcttacataaaatgaaatactgtaactttttagtttttggtatttaatataattagggatggaaagcaggtaaaatgagaattcaccaaaactgtattgagcatctactaatccccaggaagtgtgctaagccctgggaattcaatcacgatccagacaattctttcccctcaaggatatatgagattttttttttttttttgagacagttttgctctgttggcccaggctggagtgcagtggcgcaatctcggctcactgcaacctccgcctcccggcttcagagattctcctgcctcagcctcccgggtagctgggattataggtgcatgcgccaccatgcccagccaatttttcatatttttagtagagaaagggtttcgccatgttggccaggctggtctcaaactcctgacctcaagtgatccacccgcctcggcctcccaaagtgctgggattataggcatgagctaccgtgccaggccttctcaaggatatatgagattttatcttaagttatattttgaagtggcagcttaaaaagacatgtttggttttgatacatttcacttggcaaggtctgagaaaataaatacatcatatttcccgctttttcttgtccaagagatgttgagaagggcagtttaaatcctgacttactagcactgtgagacaggacaaaggcagctagaacaagttatctgatctctaacataatctaatgctatctaactagcatcattaggttacaatgaacagttttctttcaaccggtcagttactgagcctctggtatgaacgacgagaatttaaaatgttttatccagggccaacatcatgcttcatgtttaacaacgttatacaataaattgttagatttcatttacagacataggccaggcattccaaagcctggctgtagttaagctggacacagttaaaccatcttcggcagcctatctagttgactacaactaaggtattggggaatgacggtggatggggccagttttggttcagggaaaaaccctcactctaggggtgggccacaatcaacgccatccaactcaattgcgcaaaatcatctgttctcacgaagctttgagcagtgcagacgtggagctggagattggcaggcgaggagaggcacagctagatcagcagaaccagtcctggtgatggagcgggtggcagctgttgcacagatcaccttttcccgcctaccatctgagcaacattcagaatcagaaaaatgtaaagaatcctaaaattcatctcctttggtgaactgcctaaatctttttgcaaaatttggtgtgtaggtgcatttctttggcaagaggatctacagttctcaccagattctcaaaggagtctacgcctgaaaacacgagattcaccgataaggttcaacttcctcacttactagatggaaaactgagaggcccaaaggaggaaaagcagttgcctcaagacaaacagcagagatatcaaaaccgaaggcatttcaattcaattctaattctggcttcacactattgaccctggccacgtccaatacctcttcacttctctgcaggacctaaaagatcaccaggaggcgagggctggtgtccgagtcccggagaggtcgcaggcagtccagattctagcatcacagaaactctggccaagcgctcagccggggattgtctgccataaagacccccgcaccctgtcctcgcccccgccccgtggaattcctctgcataggtgactccacgtagaggaccgagcgcaaggagatcccggggcggtggaggcagaggactactgtgaagaatgacgcctactcactcacctaacagagaggaggaagcaggcacgccccaaaagcgggtcgggagcaaatccacgccactgggaggaggcaaaccgaagaataacaggaaattacgtaaggcgcacgtgcttctgaggggggcgggtgcggggcgttggagaggcgcggccgccgccctgcgtctgcgcagtcgtcggctgccgcgctgccgagtcactggggtgggaggagcataagcagggggaggggtgcatgccggagtgcgcaggcgcaacgcgactcccgaggcgcgggccgcccccttggctggtttggatccgggtcagtcgggtgccgagatttgggagagacgctctgaactgactgccccgcatcaccggagcgtcccagctgcgaggaggtaagtgccctgacgtgacggggaggggccgcagcactgcgtctcagcttccactgccggtctggccgcgggcggttttccccgggcccgcccgccttgggtcgcgtcgtctcccgacgcctcctgcctgggccgggcctgggcctctccgcgcccccttatctgccgcggcctgtgcctgctggagctccgagctccacgctctctccccttcccgccttcccgtcctcccgcggtcccccgccccgtctcgctcctccgccgtctcccgcccagcggcagcttccccttttcgccctccttggccgccctttgccccttccagtcctttctctctcgcctcggagccccattctctttggctacctcttcggccccactcctttcttctcccgcatcccttgtgcctcgctccgactccagcctctcgttctgaccccaggaatctcccgaggagcgcaacttcacagctggagaccccgggcgggcagtgcccctggacagctccctgcttggcgttgtccccacactccaagccccgtcctacccctctgggttctgactaggaattttcctccgttcatgtttaaccgcgacaggcacagactctgggtgaaaagaaagaactttgtgctttggctgcagcgctgcgagtataaagggatgagtgggttgcacggagaggtgtgaatgtgctttttgtcctgggggccgattgtttcctcccggtctagtttgcctcttagagttgctgggtttggttttcttccccatactctacgctttctggtggtctgggagtttcgaaatctttaatgttgtgatgacaacgcttacccgcgcatcccttcttgatcgttcttaggtcttctcaggggcctggaagtgtagacctaggcttgggattcaaggaggtcttggttaaaacggcaagatgtaaataagattgtgacgcatccattttgttgaaagaaaaaaccaggaatttggccttttgatggaggaacttagaagaactttgtaatttttgtaaggttgtggaaaatccgaggcaaagttaaattgcctggtgtgatttgactttaacttcgaataggctttttaaagtttcatctctttggagattgttcaacttcacgagttcactgcagtgaaaacgccaagactgtctcccacaaatttaatattaatgaagaaaggcaagccaattatatctgttgtccggagttagttgtacagccctttctttgaatggggatctggggatgcagaggagcataatgagccttttataattacaaacatgctcttctctagctcttaaggttatgcctaacgctcatttgctcttggctaaaataactgagaaaaaaagtgagtagtaaaaaaatgctggaagtctgaaaatggtttagacagaacttcattcctgaagttttagtctgtagccagattttaattctggcctgttttggtttttagatgatagatcttttagtgtgtcaacaggaatgtaaagtttgtattaacatctagggtgatcacctgccatgctattaagtcagcatggtataattaaaagttacatatgtaggttcagagcctcttagcacagtgttacattgtaagctcttggagggcaggaatgagattctagtccttacggaaatggagtttgggcttctatccctagcattcattctagtgccatgcacgtggtaggaattctgtaaata

SEQ ID NO: 1888235 - DNA, 4001 bp, Homo sapiens
tcacaccgtgagccagtcctatgtataatgacttaaaacttcaggccacgtcaggtgtgtgagttaacaggcttcagcattcacaagaggttcccaccttccaagtactccccgagtaatgagtcacattcttggaaagcatctaactctttatgatggagatgtgcttacataaaatgaaatactgtaactttttagtttttggtatttaatataattagggatggaaagcaggtaaaatgagaattcaccaaaactgtattgagcatctactaatccccaggaagtgtgctaagccctgggaattcaatcacgatccagacaattctttcccctcaaggatatatgagattttttttttttttttgagacagttttgctctgttggcccaggctggagtgcagtggcgcaatctcggctcactgcaacctccgcctcccggcttcagagattctcctgcctcagcctcccgggtagctgggattataggtgcatgcgccaccatgcccagccaatttttcatatttttagtagagaaagggtttcgccatgttggccaggctggtctcaaactcctgacctcaagtgatccacccgcctcggcctcccaaagtgctgggattataggcatgagctaccgtgccaggccttctcaaggatatatgagattttatcttaagttatattttgaagtggcagcttaaaaagacatgtttggttttgatacatttcacttggcaaggtctgagaaaataaatacatcatatttcccgctttttcttgtccaagagatgttgagaagggcagtttaaatcctgacttactagcactgtgagacaggacaaaggcagctagaacaagttatctgatctctaacataatctaatgctatctaactagcatcattaggttacaatgaacagttttctttcaaccggtcagttactgagcctctggtatgaacgacgagaatttaaaatgttttatccagggccaacatcatgcttcatgtttaacaacgttatacaataaattgttagatttcatttacagacataggccaggcattccaaagcctggctgtagttaagctggacacagttaaaccatcttcggcagcctatctagttgactacaactaaggtattggggaatgacggtggatggggccagttttggttcagggaaaaaccctcactctaggggtgggccacaatcaacgccatccaactcaattgcgcaaaatcatctgttctcacgaagctttgagcagtgcagacgtggagctggagattggcaggcgaggagaggcacagctagatcagcagaaccagtcctggtgatggagcgggtggcagctgttgcacagatcaccttttcccgcctaccatctgagcaacattcagaatcagaaaaatgtaaagaatcctaaaattcatctcctttggtgaactgcctaaatctttttgcaaaatttggtgtgtaggtgcatttctttggcaagaggatctacagttctcaccagattctcaaaggagtctacgcctgaaaacacgagattcaccgataaggttcaacttcctcacttactagatggaaaactgagaggcccaaaggaggaaaagcagttgcctcaagacaaacagcagagatatcaaaaccgaaggcatttcaattcaattctaattctggcttcacactattgaccctggccacgtccaatacctcttcacttctctgcaggacctaaaagatcaccaggaggcgagggctggtgtccgagtcccggagaggtcgcaggcagtccagattctagcatcacagaaactctggccaagcgctcagccggggattgtctgccataaagacccccgcaccctgtcctcgcccccgccccgtggaattcctctgcataggtgactccacgtagaggaccgagcgcaaggagatcccggggcggtggaggcagaggactactgtgaagaatgacgcctactcactcacctaacagagaggaggaagcaggcacgccccaaaagcgggtcgggagcaaatccacgccactgggaggaggcaaaccgaagaataacaggaaattacgtaaggcgcacgtgcttctgaggggggcgggtgcggggcgttggagaggcgcggccgccgccctgcgtctgcgcagtcgtcggctgccgcgctgccgagtcactggggtgggaggagcataagcagggggaggggtgcatgccggagtgcgcaggcgcaacgcgactcccgaggcgcgggccgcccccttggctggtttggatccgggtcagtcgggtgccgagatttgggagagacgctctgaactgactgccccgcatcaccggagcgtcccagctgcgaggaggtaagtgccctgacgtgacggggaggggccgcagcactgcgtctcagcttccactgccggtctggccgcgggcggttttccccgggcccgcccgccttgggtcgcgtcgtctcccgacgcctcctgcctgggccgggcctgggcctctccgcgcccccttatctgccgcggcctgtgcctgctggagctccgagctccacgctctctccccttcccgccttcccgtcctcccgcggtcccccgccccgtctcgctcctccgccgtctcccgcccagcggcagcttccccttttcgccctccttggccgccctttgccccttccagtcctttctctctcgcctcggagccccattctctttggctacctcttcggccccactcctttcttctcccgcatcccttgtgcctcgctccgactccagcctctcgttctgaccccaggaatctcccgaggagcgcaacttcacagctggagaccccgggcgggcagtgcccctggacagctccctgcttggcgttgtccccacactccaagccccgtcctacccctctgggttctgactaggaattttcctccgttcatgtttaaccgcgacaggcacagactctgggtgaaaagaaagaactttgtgctttggctgcagcgctgcgagtataaagggatgagtgggttgcacggagaggtgtgaatgtgctttttgtcctgggggccgattgtttcctcccggtctagtttgcctcttagagttgctgggtttggttttcttccccatactctacgctttctggtggtctgggagtttcgaaatctttaatgttgtgatgacaacgcttacccgcgcatcccttcttgatcgttcttaggtcttctcaggggcctggaagtgtagacctaggcttgggattcaaggaggtcttggttaaaacggcaagatgtaaataagattgtgacgcatccattttgttgaaagaaaaaaccaggaatttggccttttgatggaggaacttagaagaactttgtaatttttgtaaggttgtggaaaatccgaggcaaagttaaattgcctggtgtgatttgactttaacttcgaataggctttttaaagtttcatctctttggagattgttcaacttcacgagttcactgcagtgaaaacgccaagactgtctcccacaaatttaatattaatgaagaaaggcaagccaattatatctgttgtccggagttagttgtacagccctttctttgaatggggatctggggatgcagaggagcataatgagccttttataattacaaacatgctcttctctagctcttaaggttatgcctaacgctcatttgctcttggctaaaataactgagaaaaaaagtgagtagtaaaaaaatgctggaagtctgaaaatggtttagacagaacttcattcctgaagttttagtctgtagccagattttaattctggcctgttttggtttttagatgatagatcttttagtgtgtcaacaggaatgtaaagtttgtattaacatctagggtgatcacctgccatgctattaagtcagcatggtataattaaaagttacatatgtaggttcagagcctcttagcaca

SEQ ID NO: 1888236 - DNA, 4001 bp, Homo sapiens
tgtatcacaccgtgagccagtcctatgtataatgacttaaaacttcaggccacgtcaggtgtgtgagttaacaggcttcagcattcacaagaggttcccaccttccaagtactccccgagtaatgagtcacattcttggaaagcatctaactctttatgatggagatgtgcttacataaaatgaaatactgtaactttttagtttttggtatttaatataattagggatggaaagcaggtaaaatgagaattcaccaaaactgtattgagcatctactaatccccaggaagtgtgctaagccctgggaattcaatcacgatccagacaattctttcccctcaaggatatatgagattttttttttttttttgagacagttttgctctgttggcccaggctggagtgcagtggcgcaatctcggctcactgcaacctccgcctcccggcttcagagattctcctgcctcagcctcccgggtagctgggattataggtgcatgcgccaccatgcccagccaatttttcatatttttagtagagaaagggtttcgccatgttggccaggctggtctcaaactcctgacctcaagtgatccacccgcctcggcctcccaaagtgctgggattataggcatgagctaccgtgccaggccttctcaaggatatatgagattttatcttaagttatattttgaagtggcagcttaaaaagacatgtttggttttgatacatttcacttggcaaggtctgagaaaataaatacatcatatttcccgctttttcttgtccaagagatgttgagaagggcagtttaaatcctgacttactagcactgtgagacaggacaaaggcagctagaacaagttatctgatctctaacataatctaatgctatctaactagcatcattaggttacaatgaacagttttctttcaaccggtcagttactgagcctctggtatgaacgacgagaatttaaaatgttttatccagggccaacatcatgcttcatgtttaacaacgttatacaataaattgttagatttcatttacagacataggccaggcattccaaagcctggctgtagttaagctggacacagttaaaccatcttcggcagcctatctagttgactacaactaaggtattggggaatgacggtggatggggccagttttggttcagggaaaaaccctcactctaggggtgggccacaatcaacgccatccaactcaattgcgcaaaatcatctgttctcacgaagctttgagcagtgcagacgtggagctggagattggcaggcgaggagaggcacagctagatcagcagaaccagtcctggtgatggagcgggtggcagctgttgcacagatcaccttttcccgcctaccatctgagcaacattcagaatcagaaaaatgtaaagaatcctaaaattcatctcctttggtgaactgcctaaatctttttgcaaaatttggtgtgtaggtgcatttctttggcaagaggatctacagttctcaccagattctcaaaggagtctacgcctgaaaacacgagattcaccgataaggttcaacttcctcacttactagatggaaaactgagaggcccaaaggaggaaaagcagttgcctcaagacaaacagcagagatatcaaaaccgaaggcatttcaattcaattctaattctggcttcacactattgaccctggccacgtccaatacctcttcacttctctgcaggacctaaaagatcaccaggaggcgagggctggtgtccgagtcccggagaggtcgcaggcagtccagattctagcatcacagaaactctggccaagcgctcagccggggattgtctgccataaagacccccgcaccctgtcctcgcccccgccccgtggaattcctctgcataggtgactccacgtagaggaccgagcgcaaggagatcccggggcggtggaggcagaggactactgtgaagaatgacgcctactcactcacctaacagagaggaggaagcaggcacgccccaaaagcgggtcgggagcaaatccacgccactgggaggaggcaaaccgaagaataacaggaaattacgtaaggcgcacgtgcttctgaggggggcgggtgcggggcgttggagaggcgcggccgccgccctgcgtctgcgcagtcgtcggctgccgcgctgccgagtcactggggtgggaggagcataagcagggggaggggtgcatgccggagtgcgcaggcgcaacgcgactcccgaggcgcgggccgcccccttggctggtttggatccgggtcagtcgggtgccgagatttgggagagacgctctgaactgactgccccgcatcaccggagcgtcccagctgcgaggaggtaagtgccctgacgtgacggggaggggccgcagcactgcgtctcagcttccactgccggtctggccgcgggcggttttccccgggcccgcccgccttgggtcgcgtcgtctcccgacgcctcctgcctgggccgggcctgggcctctccgcgcccccttatctgccgcggcctgtgcctgctggagctccgagctccacgctctctccccttcccgccttcccgtcctcccgcggtcccccgccccgtctcgctcctccgccgtctcccgcccagcggcagcttccccttttcgccctccttggccgccctttgccccttccagtcctttctctctcgcctcggagccccattctctttggctacctcttcggccccactcctttcttctcccgcatcccttgtgcctcgctccgactccagcctctcgttctgaccccaggaatctcccgaggagcgcaacttcacagctggagaccccgggcgggcagtgcccctggacagctccctgcttggcgttgtccccacactccaagccccgtcctacccctctgggttctgactaggaattttcctccgttcatgtttaaccgcgacaggcacagactctgggtgaaaagaaagaactttgtgctttggctgcagcgctgcgagtataaagggatgagtgggttgcacggagaggtgtgaatgtgctttttgtcctgggggccgattgtttcctcccggtctagtttgcctcttagagttgctgggtttggttttcttccccatactctacgctttctggtggtctgggagtttcgaaatctttaatgttgtgatgacaacgcttacccgcgcatcccttcttgatcgttcttaggtcttctcaggggcctggaagtgtagacctaggcttgggattcaaggaggtcttggttaaaacggcaagatgtaaataagattgtgacgcatccattttgttgaaagaaaaaaccaggaatttggccttttgatggaggaacttagaagaactttgtaatttttgtaaggttgtggaaaatccgaggcaaagttaaattgcctggtgtgatttgactttaacttcgaataggctttttaaagtttcatctctttggagattgttcaacttcacgagttcactgcagtgaaaacgccaagactgtctcccacaaatttaatattaatgaagaaaggcaagccaattatatctgttgtccggagttagttgtacagccctttctttgaatggggatctggggatgcagaggagcataatgagccttttataattacaaacatgctcttctctagctcttaaggttatgcctaacgctcatttgctcttggctaaaataactgagaaaaaaagtgagtagtaaaaaaatgctggaagtctgaaaatggtttagacagaacttcattcctgaagttttagtctgtagccagattttaattctggcctgttttggtttttagatgatagatcttttagtgtgtcaacaggaatgtaaagtttgtattaacatctagggtgatcacctgccatgctattaagtcagcatggtataattaaaagttacatatgtaggttcagagcctcttag

SEQ ID NO: 1888237 - DNA, 4001 bp, Homo sapiens
gtacatattacaattgaaggcatcttataatagaaatgccctttcctgttcccttttaaggctgacccagtgctttaagaggctgatacagaagggtaaagttaagtctccacaaaatccagggaagagactgtgaaactcatcttagaaccttgtatggagtcacagctgaactaggaaaaaaaaaaaaaaaaaaaaaaggaaagaaaggcattccagagataaagaatagactaaggagaggagatatttgaagccataatgattgagaatatgtcagacttgaaatgaatcttcagttccctcaacaagacaaataaaactaactccatacctagatacatggtagaaaaactaaagaattctgctgaccaaggtattaaaagtaactaaagagaagtggtgtgaagaaagcaagagagaaacaacaaatcctgtccatcctgtaacaattgaaaatttctggctgggcgtggtggctcacgcctgtaatcccagcactttgagaggccgaggcaggtggatcacctcaggtcaggtgttcaagaccagcctggccaacatggtgaaaccccgtctctactaaaaaaaaataataataataatacaaaaattagccgggggtggtggtaggcacctgtaatcccagatactcgggaggctgaggcaggagactcacttgaacctgggaggcggaggttgcaatgagctgagatcgcgccactgtactccagcctggatgacagagcaggactccatctcaaaaagaaaggaaaagaaaagaaaaaatattaaatgtgtacgctctttgactcagctgtattacttcaaggagttgatatcaccaaaattgcctaagtgctcaaaggtgtttgtagttaaacaacaggagattgataaattatgttatatacatgtgatgctatgttttaaagaggtactgatatgataaaagatgtacgtggcataaaattaaatgtactttattaagtacttttccaagtgtttacggaatgagtgcatttttgaaaaaaaaaaagtgtattcgaacttttaaaaaagctttaaaagctttatacaatgaacgattgagtgattataagagctggcgggggaatgttaagaggatgatagggagctaagtttaacagaacaattcacctctttatcttgtgacacctacgagcgcatcaattctgtaattgaaaaataaagtgcatatttgcagcagctgtactctcttcaggctgcaaggaggcttttcctcccggtaggcttgatttgcatttcactttcactttcgtggctggaaactttctacccacgtagtgggaggctgaggagccaccataaagctggggcttgacgagccgggaccgggacccgatctccacatatgcccggacttgttctgcggccgggttcaggagtcaaagaggcggggagacctgcgcgacgctgccccgccctgcgcccgcttcctccaatgtatgctctagggggcgggcctcgcggggagcatggacacgattggccctaaagtcttccccgcaaggccgtgggctggacagcgtggtgacgtcgcaacgcggcgcagggtgagagcgcgcgcttgcggacgcggcggcattaaacggttgcaggcgtagcagagtggtcgttgtctttctaggtctcagccggtcgtcgcgacgttcgcccgctcgctctgaggctcctgaagccgaaaccagctagactttcctccttcccgcctgcctgtagcggcgttgttgccactccgccaccatgttcgaggcgcgcctggtccagggctccatcctcaagaaggtgttggaggcactcaaggacctcatcaacgaggcctgctgggatattagctccagcggtgtaaacctgcagagcatggactcgtcccacgtctctttggtgcagctcaccctgcggtctgagggcttcgacacctaccgctgcgaccgcaacctggccatgggcgtgaacctcaccaggtgagcctcgcggccccgggaagccggccccggcccgcctgcacctccggtgcttggcgggagcgctttcgagcctagccctcattggctggcgtgggccatccgcgccttctcattggcctgccacgcagtggggtggggcccagctgagcgcgcggttcggaaaagcccgcgctggctgctgcgcgaacctgctttttcgcgccaaagtcacaaagcgggtggtggcgggaaaatcaagggtttttccgcagtgccaggaacactgttccagggctctttgctcactaaatcctgttggccttgaatggacgctttagctgtggctttcttgtttctgagacggtctcggtgtgttgcccgggctggtctccaacttctgggctcaagcgatcctcccggctcagtcgcggttgactttaaatgctttataatgcccttgcgagaaatgtggcagcctgtcatcctacttagtggcaggagattgtttctatccagaagggacactgctggtggtattttagtataaatactgccagatgcgtcccaaaacgtctgcattaataatggcatcctccagcagtccgcttaccctccaccagttctgagacggcctgatgggtgagagtggtaaccccttctaaccgcgttcgaaatacagcccttcagcagacggcgttgattttaaagcatgtgtctcctgtcttctagtatgtccaaaatactaaaatgcgccggcaatgaagatatcattacactaagggccgaagataacgcggataccttggcgctagtatttgaagcaccaagtaagtcgtacctttttaccgagtcacgaagctacagaaaatcaaaactctgtgtcagtatttctcaaaagcatctgctttcttttggtagaccaggagaaagtttcagactatgaaatgaagttgatggatttagatgttgaacaacttggaattccagtgagtatcagtttctcattgtagagagtgctgtacacaggcacgatagttatgtcatagaatgtttgtttatttttacagacagggtcttggctctgttgcccaggctggagtgcagtagtgccatatagctctctctaacctgggattcctgggctcaagcagtcctcttgccttagtctcctaagtggctaggaaggactacgggcctgtcccaccacacctggctaattttttcatttttgtgtgtgggcgtgggggcagtcttgcccaggctggtctggaactcctggcctcaagtgatcctcctccgtcaagatatgttaatataatttaagcctacttcataacaactttttctagaaatatatctactggtgcatgtttcaaagagagattttagtatttggatagttgttcaccacaagtctaaaactcacaggttaaatttattgtttactgccagttgtctatttgcattaacttccatgaacctcttttaaaatttgtttccttctagaatgcttgctttttattaagtggattttaaagctgacttggaagaaatttatccaggttaggtttataaacaccaaaggagagaagaaatgtttgaatgttgaaaatgcctaatatattctcttgctttcttttagaaagtagttaggcctgcttgcgccatcatgatttctgtgccatactctaatgttctcttactttatccctggaggatgaggaggaggaggctcttgttccctggatggtgcatttaatagccatttatttttttgagtggagtttgttaagaaattacgcaagtcatattttaaagtaatcagaaaatattgattctgagttgtttaggtgttgccttttaagaaagtgagggtgccaaatcattaaatttctaacaattaacttttggaaaatttttgttcttaataggaacaggagtacagctgtgtagtaaagatgccttctggtgaatttgcacgtatatgccgagatctcagccatattggag

SEQ ID NO: 1888238 - DNA, 4001 bp, Homo sapiens; identical to SEQ ID NO: 1561999

SEQ ID NO: 1888239 - DNA, 4001 bp, Homo sapiens
gtggattttaggtgcaatgggaattcacggagggttttagcctggatgtaggggatcatgatttaatttcattttaaagatttaaagcatgataaatccaggcaaaaccaaactgatagatccaggcaaaaccaaacaaggtgagtagtctgggtgacaggagatggggccttcagcttgtgggctgagtgacaaggtcttgatggattggaggtgaggcaaagggaggaatcaaagttagctgcaaggtttttgaccttccaacttagagaagtttagcgccgcgttctgagaaagtgaagactgtggaaggaatcgtttggggagggaaggcgagctgtctaagggggggggatgtggaacatgcagtgggatgctggggcctggaacgtaggggagatgcaggtttggagtcaccggtgcctgtgttgttgggcaaagccaggggaaaggtcaggtcgccttgggatctggcctagcactgagtgcagaggaagagaagcttctgagatcgagaggcagcggctacaggaggaggaagaaagcaaggcggggaaaaccaaagttcaggagagcatttgcaggagggcgctgcggggtagggtctgagtcggagccccgaatcggactcgagtcctgtcgcgtggggacggagcgtgcagaggcccatgcgagggacagacacaaaggccctgggagctgcaggtcagaccactggacagcgcggccgcggacctaacgcccctgtaaggggtgctcacgcttggggggaactctccgaaagagaggaccactgaaagccaccctggcagcaggggcggaacagacagacgtgggtctggccgtcgccagaactgcctgcggaccagccccgcgctgccgggggggcgggacatgtcggctgtccatcagtgcccgcgaccaatccgcaggcagccccgcccccgcccctcccgggagagggcgcgcggaggacccgccgccgccggtgtgaggcggcccgtcctggctcccttgtccgggaagcccgcccaggtaactgagtttggccgggcattcccggaggacgcgccatcccctcacgtcccgtcccggtcgctgcatgggcggtgttcgggacgcgggggctgcgtctgtgcgggaccgcggggtagcggccgcccgtgcgagtacgcctgactgacgcgccggccgccgggcctgcggcctgtgggcggggctgccgtgcgtgacagggccgctcgtggccgccgggctgtgtccggggccgcgtgagaaagctctgcgggactgagggctgggtgggtcgaccgggaacggcgcgcgctcccgccgccatcgcgcctccgtccccgcctgcggcctgtctgggggtcgcggggcgcaggcgcggcgggccgacgggcgggggtcctccccacgggtgcgcgggcgcctttgttcccggcgccgaagcggggtggggcctcagggcagccccgccccgccgcgctgaggccccgccccgtgtccgcctgcaggagccgccgccgggtcccgctcgtctgccgcctcagcctcagccccaacctcagccgccgccgttgcgcttgctcccgggcggtcctggcctgtgccgccgccgcccccagcgtcggagccatggcgggcgccgcgtccccttgcgccaacggctgcgggcccggcgcgccctcggacgccgaggtgctgcacctctgccgcagcctcgaggtgggcaccgtcatgactttgttctactccaagaagtcgcagcgacccgagcggaagaccttccaggtcaagctggagacgcgccagatcacgtggagccggggcgccgacaagatcgagggggccagtaagtgcgcccacttcctgcctgggcccgccccgcgcgggggtcgtgggagcccggcccgactgcttgcaccccggccggccgccccagcgacttgggcaaactttcgggccctcccagactccctccgggccccgcccccgcttcgtctcgggtggtcactgggggcggggggcatccgggtcctcggtcacctgacaggacaccccccctcccccagctggggggagtgttccaggcgctttgccctgaggcctaaaaatcctcgcgggctggagacctgcggtgcaggcatcgggccccccagaccctgggagtggtggcggcgtcggcgaggggagctaaggcagtggcccccaccctgcacgggaacctggggcctgaccagacggtccccgcccactctttatccagaaagagcagtctgtgaaactctccgggcccccaggctgggctcttatttgcaaaggaatctttgggttccctaagtagaacttaggcagatgttgggtagggctggtcttggagcagagctgggcctactcatctccctctgggggagagggaggaaggtggtcttgtttggtttggagaagcctgagagaagccagtggctggaatttttttttttttttttctgctacttttgtcccaaagctgggttttggaggcctatgtgggtgggcagacactcaatgccagggcagggactccccttgccctgggaagcacgttcccaggagatgggccccataaaggcctgccccagcgccttggagtcaggtattcttctcaggagtgcagctagtttgtgagtctagccctttgtcctctgtccggtggcttcagggagcgggagcggcttctcttagtttcctgccttttcgccttcccaggcctgagcttggctgcttttgcgctggtctctagtgggaggagggagttgggggattttgaaaaaccccagatctttgagagttgttccacttagcgcgtgcctgtgctgtggtcggatgggcactctgctctgccctccattcccccgcctctcagtgtgaagagatggtgtgtctgcaactctagactgggttgcttcttgcagggacccccggagactagggttagagagacccaggctcagaaccaggtctgtgtgaaggagggagatcaggaagtgacaccccaagggggggtcccacaaaccttcttgggtatggtgtgcatgtgtgtagatagttgaggagattgggaggaaggaaggtcttgtggtgaggcagccaaccatcctcagctacaaactccagatctgacacagatctaatgcagctgctcaacttagaaatggcagcccccttcctcagtgcccccactgaccctgtcagccattgggagaacattttagtgacttgagagcctgtggattccaaagtaaaggaagaatcgacactgcaaagagctgagataaccctgggaacatcactcaggcatcaggctccaggcatggtccccttccttactccctatgctgtgttgagttggtggcactggctggaagttctcagagatctcctgggtaacagactgcattttaaaccacgcatattagcaggcaataaatgtagcacagtggttgatggcaagtctggatttgaagcccatatattcattgtgtgtttcccggccagttacttaccttctctgagccttgatttcctcatgtgtaaaatgggggtaataatatatccagtatatatggttgctccaggatcaaatgagacaattcatataaaacatctagcattgtctgacacataaatgtttaataaatatgagctgttattagcaataacattaacaatagaccgtggctgcccttcaagaccctgaactgggaatggtgagggggtgaggtgtggctataggtgaggatgaaggtgcaggaagggaggaggacggtgaccaaattcacatttcacttagattgctactcagaaaaaggcaggaaacagttttgttttgccccaacccatgtgcccactcacccacccaccatgtagaacagtgtttctgtagagaaagtgtttgcagttgtgcacatttgactcctgggtgtgacctttcttgtttgtaagttggggcctga

SEQ ID NO: 1888240 - DNA, 4001 bp, Homo sapiens; identical to SEQ ID NO: 1562016

SEQ ID NO: 1888241 - DNA, 4001 bp, Homo sapiens
atagagtggtacagcgacttgcctgggatcacactgacagtaaacagtgatacgggatttcactcttggccatctgattccacagacaccgggctcttaactatcagcttgctttaccccttcaaaagtgttatgctactttaacaaaactgccccttgttggtttgttttgttttgttttgtttttttgagacggagtcactctgtcgcccaggctggagtgcagtggcgttcactgcaacctctgcctcccaggttcaagcaattctcctgcctcagcctcccgggcagctaagattagagacgcgcgccaccaagcccggctaatttttgtatttttagtagagacagggtttcaccatgttggccaggctggactcaagtgatctgcccgtctctgcctcccaaagtgcggggattacaggcctgagccaccgcacccagccgaaactgcgccttctgagttaatgtgtgtaaagagtttaagactgggccgggcgtggtggctcacgccagtaatcccaacactttgggaggccgaggtgggcggatcacgaggtcaggagatcgagaccatcctggctaacagagtgaaaccccttctctactaaaaatacaaaaaattagccgggagtggtggcgggcgcctatagtcccagctacttgggaggctgaggcaggaaaatggcgtgaacccaggaggtggagcttgcagtgagccgagatcgtgccactgtactccagcctgggctacagagcaagactacgtctcaaaaaaaaaaaaaaaaaaaaaagagtttaacgctgtctggtccatggtaagttttcagtaaacaccaactcttactattaggaaacctgaagatgtggaatgaaagatgagaggaagtactgtatatgactggcgtacagtacgcccccaattaatgttagctatttggatgatttatatagggcttcttcaccagcaagcactccggtgctcggtaattttctgtttacaagtaggctctccccacaccctgtgagctccctgcgtgtagagctgttttcaacacatccttgcaggttcggagcccaacacgtggcccccagagcaaatagctgctcagtaagtttcttgacaggagagaaaacgcttccttccttcaccagaaatgcgaacttggatttctaagatgacacctcccccagctaccagcccttaacatgattccaaaaaagagggcaagaagggacaagggtcccacccaagaaatgcgggggccaatgggctccatgggataagagatggagccgggcttgtggccaggacacttgagaagtccgtgcaactccgtgaccggccacaccgagagggggacctcccaaaccccccagcagtcctaaaaagtccctaggaaaagggcaaggccctgagagggaagtcacccacctcccaggtggcggaccccccgcccgcccagggtcgactaggacttgggactaccccctccgcccatcccacggcagctgcaggcgcaggaagaaaagaagtgacagggagtccaaagtttccccaacaacaaaaatccttcccccgagggaagggaagggctcccaccctcagcccgccccgcccagggaggagggaccgccaccagtggatctaggcagttgggggtcccgctgttctggtcccgacaaggagtgcctggcttgaggttcccccgccccgcgcttcgtgcactctgaattctttgagagggtcccagggagggacaggggtgccccaactcttacttacagtcgtctaagtcatcctgcaagtccacaaagtacagggggatctctgaaaaccaagaaacacacaagaagttaccagggggctgcggcgagaggggacggggtcgggcaggggcccctcggcctcgcggggtggtcacggggcgagagagagaggggcacccctggcatcccccgagcccagccccactcacccgccatcttgggatgggcatggaggcgggaccggcaggggcggggccctgcagacaggggcggggccctgcagacaggggcggggccctgcagacaggggcggggccctgcagacaggggcggggccctgcagacaggggcggggccctgcagacaggggcggggccctgcagacaggggcggggccctgcagacaggggcggggccgtcggcttcgggccccgcccccgatccgcgccggccggccggccccgccctctcagcgaaggtggctgccgaggtgggcggggaggtcaggtgacgcggccggcgtcccaagatggcggcggcggcggctcccggaaggccgcggcggcgtcccggctgctaaggcgggccccacgcggctggcagcggacaggccggacctacggccggaggacgggcggcagccgcctctgcgcggaccggggctgggccgtgcggcggcagcggcgccaggggatgctcttgctgggcctggcctctcccttctcaacttagggcggcggcgggcccgcgcccctggctcccgggccatggcgctgagggagctcaaagtgtgtctgctcggggtgagtggcggcgggtccggccgggagggccacgggaggctgggctggcggggaccccggatcccccctgtcccctcatcccttcccccctcccacgtccaagacgctgtctgccagccccgtggaccctccctccagctcgggagccgtcccgcccacctcttgcactctcgaaaaggtcctggaggccgaagggacccttccccttcccctccctggagcccgtggactcttcccgccccacaaagagcaaacagcccccccttgcctctctattgcatctgggttaagagaggttcttaaatagttttctcccaacttaccaaggtattagttgggagttggccaagtcttccaaagtaaaaccaataacaggtctttaggttttacaagcagcattagcctactttgtctcttgggtgtttttgaacttgtgggatacccctgccacttgtccaaagagttactttgccaagtaactcttcctgtggagaaaaggggtgttcaaatcaggaagccccaaagactagtttgaagcttcagcttcctgtcttgtcaggaaagacaaggtgttggccatttcaaagccttctttctgaaattgatgctgtcattccagagtttctgccttaaagatcggcaggaactccaataactaatctttattcccccaaatagggtggggctaggattcatcagggattactcagaggtaactcaggagttcaaagtttactaacatatgttaaaaagcaagtggacttgttactttttacacgaagcagaaactttgggtctctcaaaaggtcctaatctgtcttaacggcaaaaacctctcccttttagtacagttggaatttcctaattactctactgaatttttatgacaaccgcttttgtgttcctccgtttataaaatttacacgtctagggtgatttttctaaaatcctgaacttatgccacaaagtagtttttggtgtctgccaaaaggtaaactttttctcagtccctcatctcgttctctttcaggatacaggtgtaggtaaatcgagtattgtgtggcggtttgtggaagacagttttgatccaaacatcaacccaacaatagggtaagagacttttatttgatacacatctaaaggtgcattgaaaatccttccaaatacatagtgtgttacaggtgtaggccctgcgctttgtagtcattgaattctgagtcgctggttcgcatcatctctggaaggacttgaaagagtccagtgaggatctgtgtattttaggaaaattatcttcggacttgttgggggtgagaacttcaaaatgcaaatatgaattggagttctactaattattagaacagacacagaagcttcggtctataaatatcaacagcaattacaccttgaaataaggcagatgaaaataga

SEQ ID NO: 1888242 - DNA, 4001 bp, Homo sapiens
gtggcccactcatcccactaactaccataacttcatttcgtctgctttttgcaaagaacagacaattccaaacagccaagcctaacaagtagctcatcttagcttgtggattcagagcactggtggcctctccacctccaattgacaccagaaaacatataaatacctctaaacatgccttgggtatttgtttttctaattgcaaatattataccataacttagtttgaaggctttgtaaagaatatgccagaaacatctaatattagccctaaaaactagggcaatcttttttttaacagaagagtgttcatataaacatcaaaagatgtgatgagagtagtttcaacttctaatcatagaaattatagggctatttcatgaaagaggtgctttatcagctcatcttgagtgaatgttaaagatgaagatatggctagtatctccagagtctactgtctcagagaggtagcccaaagttgtaagactgagtgccttgaggtagggaacaggaagcaacagggtctccaggttcactgaggagtactgacctgcaatgcgattcctacatcagcaaaggtcttccttccatcgttagaggactcctggatttgctatgcctatcctgatggcttcctacatgagaccatccattcacacttggcccttacccaggcctgaaattctccccagttgcactccacccacttatgtctatcacttagctcaaagccagtaaagctcatctctgaactagcaaagattccctttatcccatcaaaatgtccttaacatctatcttgaggtcatgcagcatgatcttactttgctggcattctttccttcttctgtggattcccaagcagagtacagatgtacagattccttgggggataagagctggaatttcagcttcttttttttttttttttttttgagacggagtctcgtctgttgccaggctggagtgcggtggtgcaatctctgctcactgcaacctccgactccctggttcaagctattctcctgcctcagcctcccaggcagctgaattacaggcacacaccaccacgcccagctaatttttgtatttttagtagagacagggtttcaccatgttggccaggacggtctcgatctcctgacctcatgatttacctgccttggcctcccaaagtgctgggattacaggcatgagccaccgcacccggcctcaccttcttttatatcccacacagcacccagcacagagcacaaagctaagcgcatcgatccagcgactgactgactgaataaatgaatacatgctatcttgcttgtagaagcccagattcctccttcttacgactcccacacccacttaggagattctattatgtcttaaaagaagttacatctccattagtgtcaaagcaacattatataagtggctcaacatgatcaggcatgaatttctttgttttcccactcacctgaaagcccaaaaacaatccaggtggtggtaaacacttctgatccttcaaagaaaacggaagaaagcgatccctaccgtctattttgaatctaccgttttttgtttttgagtgtcttttaaatctattcaaaatcctttaagggcatttcaccatgcatgggagaaggtcatggatcctcaacaaattgcaagaggcctttcacaggctagactctgccttgttctccaagctcaccttccataatcctgatgtgctccatattgccagactctttcaagtccttccccgccctgcggagaatccctactcacacctcaggaccagctcagacatggtctccaggagaccttttctaagatcctatgtgaggtaactagcccccttggcaccttgtgacataattattcacttccatgtacatgtcccgtagtgaactatgagcacctccagaccttaccctgcgtttggtcgccttgctctcctctctgcagctggcacccaatctttccaggctgtctctagggactcgagcccttgggatggggtcctcaatgcttttccacctgcctggcttctaaattccactaagatcctgtcccattctcttggaaacactagaacttactctgacatgccctatggaagttatttctccactgctgttcaaacccactcccagacctggccttccctgaggagagcgtctcagccaaatccaactgcctctagctcaagtttccttgcggggggcccgctggcctcatcctgttaggtcgtcttagagccacaggagaatcaatgttccagtgtcagcaggaagaatcaatgttccagtgtcagccagcagggggcagtgtgaaaatacacacaccaggcccttttttcaaagggtctcggcttccctgagggtgtctatctgtgcctctatgaagcatggcttgggtcattcctccagtcccatggccaggtggatccttcgtttacctttcatttctattaaatgagaacattctcaattcactaactggattgttggaaaggcagcaagctctgctagatagttctaaatatttgcatcaaatatggaccagaaattgtgaatctgtctttcaacgccctcggatctgagtcagcaaggctgccacgtgcaaaagtaggaacgttaaatacttgaagctgggagagaataagtgggtttctaatcctctctggtgcattcagttctagaaagtggttctttgtattctactggaacatttctatgtatggtttttttgttgtttgtttgtttgttttttgagacagagtctccctctgttgctcaggctggagcacagtggcacaatttcagctcaccacaacctctgtctcccgggttcaaggaattctcctgcctgagcctcccgagtagctgagattacaggcacgtgccaccacgcccagctaatttttgtatttttggtagaggcagggtttcactatgttggccaggctggtgtatgtatgttttaaacatgctttaaaacaaaatttctttttagagatgggatcttgctatgttgcccaggctggagtgcagtggctattcacaggtgtgatcatggcgcactgaagcctagaactactaggctcaagcaatcctcccaccctagcctcccacgtaattgagactacaggtatacaccaccatgcccggccttaaacatgcttttaaatgtgtcataaatcacatttctctgatgaataaaaagaattatctaatgttgagaaagagtcagtgtttaatcatttacctcacagtgcagatttcttaataaattctgttattgaatctacagaatttaacattatgttatttttggccctgaaggcataacttcaagccattctggatactgaatgtgttgctgacatacacattagcaaatcactcagaagcatatacactttattgcattatcagtaacatgaagaaatatttctatatcatgagaaagagcactttcttcttgatatgtgtgtaatcccttggtcttgggaagctaaggcacagcttacagagggattttgtataccccactcattacgtagcttaaatcaggctgggtaaacatgtaaaccaaatgcaaatcatcaatctacatatgtttaagaaataatatagacatactgctgaagcatgcctcccagggagttctggactttaaacagcatcttataaatcaccagcaagaacaatcaattaatattttggctgagggtctttaccagactcccaaataccactggagttaagcactgaaccaacacaggccagctgcaaataagattcattgctatggtttggatatttggcctcccctccaaagacaatatcatgttgaaatttcatccccaatgtcagaggtagggcccactgggaggtttgggtcatgggagtatatctctcatgaatggcttgctgccatcctcatgggagtgagttctcactcttagttccctcaagagctagttgttgaagagtgta

SEQ ID NO: 1888243 - DNA, 4001 bp, Homo sapiens
cccaggaggcagaggttgcagagagccgagatcgtgccactgcactccagcctaggcgacagagctagactccgcctcaaaaaacacacaaacaatgaacagacaaataaatgacagaacaagaagacaaactagagaacatcttgagacaaggtgttcagggaagagttcttttgagaaggtgatattaaagcgagtttggggaagaacgtcccaggccttgcgctcagggtcgtcaactctttgatttctcttccttttgaagcagggcagggaggtcatcaaacaacagaaggacaattataactgctggtatggcaaagccaggactctgaattcaaactctgctccattctcaggaatcccgtctgttaagcaggttctggggaagcgatgtgagtcatgaaatcacaggtcggaggaggcatcgagaatatggtcagttctcaactttcagggaaatccatagctgaggaatgaaggacaacgggcttctcgtgctctcactaggaagactggttcaccggaggctggaacactgaaagtgagaaatcccgacaggagaaatgtgtaggagagaggactagcacctggatcaagttataaaacatctcctgcatctttttcggagatcacccttagcgcggcctctccgcccagtcccagattaggcagcgaagagcgaccctcaccttgtctaggtggcacgttccttaaaagcgaaaggaccaggagtttcttcctgcctcgtctcttccggatccctcctgcaccgcccacagcctgcagatttgagcgccatctccaggccccgcccacctcaagcaccacccctcagtccttccttggggcacgcctccttccggcacccgcccagagtagccacccccggggcccctcctcccctccctgcttccgggcccgcctccttcaggcccgcttccatcttcctcccactctaagcttctcttcagccccgcctccctccacccgtggctccgccctctgggcgattctccatttagccccgcccacagcatctcctttcaagcgctgtcctggttcccggctctccatctcctgcacggccttccccactggtccggcgaccctcttcccagggcctcatcaccatcttagctccgcccctacttcggctccaaacctgtgcaagctgccctcttcccgccccagccccgcctccccaagccgcgtctcagtccctcctccctttcaggccccaccctggccccgccttcctcccgtccccgccgaagctctggacctttccaaagccaggctgagagggtggggagagcccatgcgcctgggaagccgggctgtttctgggcggggctgcagactcctcgtgctcgtgtcaccgtgtccttcccaggagacagagaaggaggagagcccggaaccagggccggagcggcgggcggagccgagctgcggggagccgctccgggtgcccccacccccgcgcgcctcagtggtgccggccgagggcagggctcgcggttgcggggctcgcgccgctgtcagtgcggcggggcgcgcgagcggcgccagctcggggcagcggaacccagagaagctgagggggcggtagcggcggcgacggcgacgacgacgactcccgcgcgtgtgcccagcctcttcccgccgcagccgcccttttcctccctcccttacgtccccgagtgcggcagtaccgcctccttcccagccgcgcggcttcctccagacctctcggcgcgggtgagtggggactgcgggcgtctccttaggggtgcggggagggtgtgtgctttgtgcctttccgttcactcacttcttccggcaggccgctgcctatttttagaaacttatttctgcccttcggggagtcccgggagcccgagtaactctaggccccctccgccgctcctttctcccactcggacccgccgccccgggtccccggccccagccctccgcgcccggtcctgctcccggcgttccctgtctgctctctccgcgggccaagtctgggccagtagttggctgggtgggcccgcgcccgctcggaagttggagtcttttgtgctcgtgccccgccccgcccggcgaggggcggagggaggggaacggaggctgctccggggaggccgcaggcgggcccggccgcggctgcttccggctctcctaacccggactgggtctacgggctcccggaggcgcgcagagcttgtcctgcctcggctcccgcctcttctgggctctttgcacgccttgggctcggagagaaacaacaacgggccctcgaactggggccgtatccgcgtttcactcagcctccttggcggccgagtcttagtttgcctctcggtgacatggggggaaagaaggaaactcgctttgcggggtgttcgtggattcagggagggaactaatatgtgaaagaagtgtttaacaccgacagggaacatttaatgagacttcacccaggaacttcccaagccttatttcatttaatgttcacaacggccttctggtttatcctcatttacaaaagcagaaattaaggcgcagaggggtcaagtaattttctccaagtcacagtagccacagaagtgcaaaggagtggtgccagtacctattatttattaatatttcctggtgtgagcatgtatcatctcttagtgcagagggtatttttacctagccttgggtcacaccatttaattaggggcataactctgggttttccctgacttctgggccgttgtccactatactgtggatgaaatcccattctggggttaccatagttctaaagggaaaggtttggatgaattccttgctagtgttgcggcagttagaagttgatggatgcagactccaggtctcagacacaactcaaattccctggggttttggctcaaggaagctttgagactgtaaacggtgggatccaccctttagtttgtgtgtggtgtgttcctcctcccagaccttgcaggttctctgtgtttagatttatcgatcctagtttgatgggggttagggggagtagctcaagtcatctgccttcaaacaaatattactcctattttcagataaggcccagagtggttaaagtgaactaaaattaactttggcaaatgttccagtttttcaatgtgatccggttggagggagtgtctaaaaatcaggcaagggagtttctgggccaggtcttgaggagtctcttgatgttcacattagttctttggagtctggtacgtctgtggtgcctggccaggattctggatttacgagtcctatgtgggagctgaaaggggtcttaccatctggtccaactttttcatatctgcctttccccgcttccctgttaactgaaccttggaaaggggaagtaagttgtctgaattcagactgccttagtgtcagagtgagaactaaaatttccagtcttcttcctcctaatccagtaatatttttatttctcccataccttgccacttcttaaaagggcacgaaaccacttattcaggtcttaaggtcaggaatcctgagtaattggaaatcccaaggaagttttatagtccccacccctttctgtgccttatggttagtattaagaggaggccaggtttaagcacaggtgtactagttctcgtaagtcaccacttcggttttatgtgtttatggcttatatactcttccataaccattatctgatttaatttctaatccatttctgtgaggtagtttgcagagcttggtttatgtctctttttttactgtgagggaatggagacacagcatagcacttgccttagatgacagaatgagtaagtagtgaggacaagacacctctctggagcagaggatttgatttgacatcataaactgagccactcattgtggctctctgagcctcagtttccttatctgtaaactcatagggttgttgtggggattgttaagaaaatggctatgaaagtgcttta

SEQ ID NO: 1888244 - DNA, 4001 bp, Homo sapiens; identical to SEQ ID NO: 1562055

SEQ ID NO: 1888245 - DNA, 4001 bp, Homo sapiens
ttacccagtctctgggatgtctttattggcagcatgagaacagactaatacacacatcattggatttagggcccacatggaagacccaagataatctcctcattgcaaaatccttacctttataacatctttaaatatctcttttccaaacaagggaacattcacaggttccaggaaacaggataaggacatgtctttttggtgaccaccactcaactcataacagtgagataagaaattggattgtgccgtgattccacaatgacaatccttaaggttgtccagctgccgacatgagggtactttctgagggatgtgggcctttgtaatcaagacaactaaaccctcgcagggttccctaaggactcaaactaattcaaattaataagtaaagttttaaacagttacttattaaggtaaagttcgttttcaggaagccatgtgctgaaagcaagaccaagcgttttctttagacaagggagtcacctgtgggccaggctttcgattctgattcttttctctcacttctcctaatcttatgatagggattcctataatctggctcaagagttatcatgtgctctaatccatggaaaggcaatacattgcacttcgcactcaaatttttaaaatgttatcaaggtcatctcttaagcaatttcttaagcagaacaaggacatgcgaagagatccaagttcagaatttctggctgtttttcctgatgctagtctctataacccatgactgtattttcacgtttccctgatgttcaggaagcttgaaacttttaaatgaaatttaattagtttaaagtattataatgggcagttttcaggaccaagtgttccacaatttatttaaatatcccatataaccctccagttccctgagtaagtataaacaactattctatttaaattttaagatgctaaattttattatagccagaaatagtttctttttgctgttagaagtggaaccactcaagtctctgaccttaccattcctaggccaataaaatatctattaaaaggtcatatgccagtgacatgtaatatctactgagtgaattcataagtcggattctggcattaaaaactctgaaaattaaactttcactaccctgggcaccctgcctatgggatagccctgctacacaaggagcaatacgaaagaaagaaagaagcacagaaagaaagaaggaaagaaagaaagaaagaaagaaagaaagaaagaaagaaagaaagaaagaaagaaagaaagaaagaaagagaaagaaagagagggagaaagaaagagaaagaaagaaagaaaattaaatttcaactgaaaatggggaaatatctgtgaaatttatttcaaaaattcatttagcaaaatataaataactagctgggcatggtggtatgtgcctgtagtcccagctacttgggaggctgaggtgggaggatcgcttgagcccaggagtttcaggctatggtgagctacaactgtactactgcactccaggctgggtgacagagtgagagtttgtctctaaaataaataaataagtaacaacgaaaacttttatattttggggtttagtttttaggaaaaatgaggcacattacaataaaataaactggtgggatttattcaacatctcaatatctaaggtatggcctgaggtcttagtgatggactccactatttctttaaaaattaatcaattaatacagtaaaataaattaaagcaaatttttcttaaacatgtaagacaaacttagatccagattgggtgctctagggggctgtttcctgcatggtttctctcctccgtcattatccacaggactctgagaagttgtaggaatatgcatgtgcagagttgaggtccagcttcatctccaatgtcatggaaaaggacagtacatcatggggacagagccctgtgctcccctatgctacttggacacagcctggggagagagtgacctcctgggtgtatccacattggagactccactctttttgcgtgacttgaccttcatactgatgaccccaagacactatacaccaaggccaaataatctaattagtaataagagcagggcgtttagagtgattttaaaataagtattgagaggaagaaggatcaccagttaacatgcagtcaacattctaatgcaatctgatatggctgtccatcatgtggcagagagatgcgggggccaatgaaacagctaggctaccttctcctcttgtccacggtgctgtgaatttaagcagcagtaatagactgatggcagtggaggcctccacctgtgaagatcagtgtgcttctaatggctatgtctgaaaatcaagggattctggactccttgtgacatctatgcaaaatctgggctagaatatacatcctgcccagacatactgatgccagccttcagagagattttactacaattagtacatggagactcatattcagtaggttctaatgagatgcttaaattaaaaaaaaaactgtaaagtttaccttcttttagaaagggtacttgatcggatacataaaggaaaatgaagtaatgggtgggtggtcctgattgttttatcttcccaatccttagccggggaatattctttttctaccaaatgtgtattcagtggtccttacctatgctttcttctcagggacataaaagcagaatattgccatttcatggattacagaagtagcctcctaacaggtttcctggttcccctctccaattcattttccacatcacatgcaaagagattctgctaaaacaaaagctggagcatgccctctcaatggctgctcctgtcttctggataaagctccaagcccttgatgcttcttgcaatggtcttgcatgctctggccccattatggtttcccttggtctcagctcttttcattggaatggacttctttctgatcctgcactgttccctttgccttaggccagctacatctgctgttccctgtgacttgaaccccttcctatgatttctaagagttctcattcctactcacacatctcttatattgacttaagattcacatcctctggaaacgatacgcagtgaagctaagaccctgttttatattattagtaggccatctcttggaccagcagttataaatcaaagaccactggtagtgtaagtactttgaaaagagatttaggattatatatgtagacaatctgaagcaattatcaaagctaggttggcttcgtaatattttctgacagaatcatctctttggcactggatactctatgcagcaaaaatatccatcacatccaaagctgcctctgcgtgcttcagagctttcaagaataatttcaaaatcctttcagtcaggcaaatttttacactgagtactttttatttggttttaaaacctaatgatctatacgttgctgaacagtttgttctaccctctctactctttcatattaaattgaattaaataaacaagacacatcaatgaaaaatccaaatgtcaaaatggctgatttttagctccctttggctagaaaatatcagtccatggactccttccaggcgtgcattgccagggcattctgtactgaagcagtgagaagtcttcaaatccatctacaaaacactccagaaagcatctcttaactgaggatgtacagaaagacagtacaaactaaagcatgtgtgtaaagatcgggctcagaaatccttttaaaatctagaagtctaagtgctcatattccaagcacgaaggtgttcatctgaattatcccctactggtcaatgggcagaactgttgcagggaggtcagcgggcacacactgaggagatgggaactgggaacttgcatttgtgcctgaacctgagccatgcctgagaaaacctggacagcactcttttggggtcacggacttttcctgatgatttactcctttgaagacagttctgcttgtggctaatgctgaggaattagaggcttaca

SEQ ID NO: 1888246 - DNA, 4001 bp, Homo sapiens; identical to SEQ ID NO: 1562072

SEQ ID NO: 1888247 - DNA, 4001 bp, Homo sapiens
cagctctttggaacaaagtgttccaaagagtgttctcactctaagttcaaagatgggggctgaagtccccttgtcagccctgctgatctccgaagcccagctattggtttgttgtgggtgttgttattgcttatatcaaaaagtacagaagctcagggatggaaatctggaaagggctgtgggagaggaaaattcctctgagagagaggggttaggtgggttcttttcctttcggaggaaccaattacttgtgggaagccatcagcacagaactgagcaaacttccactgtcagattataggagccaggcagcctttcaacctaactcgttagggccatggtttctctccttttccaggcccaggttattcttcgaaagactttctacttattgactgcaaacacagacaggcatgggaagaaagactgtatatttaggatatcaggctttctcttctctctgtgcctgcttttccactcctttcagaaatagtaatgggatgcctgttgtgtgccaggcactgtgctcagcactgggggttaacaaatgagtgacatttcctgaccagtgagggagatgagcaaacaaacacagcacagtggaaatccaacctaggaaatgcagaaggccttgctcatagtaggtgattaacaaacacttgtggaatatatgatgaagaggcaaatacaagaaatgctgtcgtctagagaagggaggcttgccaatctccatgcgtacaggtgggggaaagctttaaattggaggaaaaagagttcacaacaaggaaaagagagaaggcatgaatgactcttaagacagagggaatagcacctgcaaaagcatggaggcatgaactagcaggctgacttttaggactcaacctaaagtagtctggaataaatgaacttcatgataagtgtggagaagaatgagatggtgagaatggaaacattaccagaagtcaggtcacagagatttgagggcaagaagtaggtatggcttcagaagggaaagggaggagctgaggataactcccagatttctgacatagcccatgggtggattcagtgagaccgctggggaggcgcggcacagctggggaaaatcacgagtccagtttggataatctgcgaggtaaacgggatccagaaggcaactggactctcaggcctgggcctccctgtccctggaatagcacactctcttcccacttgaacatccatcctacacggcccagtcagggtcttcttccttcctccaggagaccttcctgattgccctagccttcctcctatacgccacatccaactgcctgagtccctcataacaggctttcggtctgattttgctgtgggaattgatttgcccggccaagccaagaacccttccctaggcagcagaagcccagtcactcagtcactggtgggtgggacgcggggtgaatctgcgtagggtggggcggggcatttttagctcaacactgggtcagaagtcacggccagacaagaaacgggtgagaaacgggggaggaagggtgacgtcacaattggtaggaaataccttgggacttgacgctttcgaaaccaaagggagagcaaaagcagccgggagcgcgcgggccgacctggttctcctcccttcccacggctgccttagtacagaatcttataagtcctcctccttcagaggctacaaatggtgttccgaggccaggggagtttaaagctcgatttcacccgcgcagcctccaatccggtaaagaggggccgcggagcccgaccaagtcttcctatgccttactctgctgctttacctgatctatttttgtggatgccggcgccagctacgggcgcccggagaaagcacgaggccgggtggactctggtaacgcaagcggcaaggaggccgccatgttccactctgcagccgctagggatcgtgggagtcacccctaaccgcgcccgggcctgggtgggcgaaacgcatgcgctctagaagttgctgagtcgcttggcggtgtttctgcgcaggcgccgtagcccatagcaaccgccgtaacctgtagcaaccggaagatgtcgcttccggctggtttggggctaagaaaggggttatagtcatttcgagatcatagaacgatgtgacagataggaaactgaggctgggttggaggcaggccctagggaccgttgcgttggacctcgctcctgtggcgcggtggatggagtttgtggcttgtggctcctatttcccaaagcaggaaattgagacagagggaaggcacaggttcgtcctgaggctgcagcccaggtgatggttccccgggtaaaaaatcaatatgatgccctttgtttataaggagaaggcagggacatgaaagtaatttctaataaaagaatatgcatttcactttgtaaaagctgaggctggcttacacccgatcacgcttgtacccaacttaggaatcagcttaggtttactagaagacaatattcagctgaattttgccaacagtttatatctgacatcttgagtcaaaggctaaatatatttatataaaagcgcggagtcactgtgacagctacacatgtacacagacgtgagcatgctgttcgggtgactcacccgtggggagcagggtgggcagcgattttccagaatggtgagcaaagtgtaactccccacaaccaacctgatatatgcatttccagacagtctagtgtgtactaaaactagggaaaaattcattgtgattgtatgtacaaccaattataacggatttttggcttacttgaaagtttggcaggatatctgaaagttgtgcgggacaggaccatttgttatggtgactgtaatggactgtcccatccattacaggagtttcatatccctgccccccccacccccgacagggatatgactgtcccctcagtctcgtgacacccaaaaatgcccacataaatttccaatctgttccttggaaaaccactgatttattcagtcaaataatttttgctagcatatgtgtgctgggcagtgccgtggcggggaaggatcgtgtgtgaacgggacagagctcctgcccttatgagtgaggtccagtgtaagaaaatacccagatattaatcacataatttgataaatagcttggcaacaggggcagtacaggtcaggggtggaatacatgggaagacccagccaggcagcctgggtatcatgcagtctggaaaagccaagcagagaagtagcatctgaactgagcctcgaaggagcatcacaccaaggaggatgatgtgcacagcagagggaccagcacgtctggcacacagtggacactcaaatgttttgaatgattgaacgaaacacagcatgttcgctggcagggaaccattccccattatattgtgagctgctacaaggcaggggatacagtatgcctttcctatccccaggtttcacatccatggatccaaccaactgtagacagaaaatatttaaaaataaaaattaaaaaaaacaacaaaaattcaaataaaaataaaatataactttgtttagcatttacattgcattaggtattgtaagtaatctagagatgatttaaagtatacagaagaatgtgcataagttatatgcaaatattatgccactttatgtaagggacataagcagctgtggatgttggtatccgagggatggggagtgaggggcattgtcctggaacctaccccaaggaacgactgtacctgttttctcacttccccgcatcccagcactaagatgggatccagagaaggtggcagtggtgaaaggatctcagacacagaaaaagggttatgtgatctggcccgggagtgatttccaggaaatggatctctgactccctgctctcccaggggacagctgacaaaaatataagtgctctactggttaaatgttaggaaaatcagggcaggagtggctgcttattttcgcatctgctgttcatgcgtggtcctgg

SEQ ID NO: 1888248 - DNA, 4001 bp, Homo sapiens; identical to SEQ ID NO: 1562088

SEQ ID NO: 1888249 - DNA, 4001 bp, Homo sapiens
aactaaacgggtaatggagccattcgaagagatggggaaaactgggagaaggagcatgagttcagtttggtacacggcacatttcaagtactttagggatgttaaatatttaacagttttgaatgataatggtattttgtcagagtgattaatactaaatgctggaacaaatgccctctacatacttttaatgtgctttcacacaataaaagttccagttctttgagctgacatgaaagaaaagataatcaatagtgtaatgttcctaagaaagcacatgtggaaggactggctggaggctggagtgcaaacagcttctctgttgaagggaaggtgtctagtatgatgtacttgtcttacctttcacatttctacataagaagtcaatatcttttctacaaaatctgcaactgttcccatattgcttaatattagcattgctattttgcccccttacccatcctatgaaatgtttttcttttcttcctcacctttctttcaaaatctattgcattatcaggttttatttattcttccctggtaatgtctctaatcaaagacctctttctatttctagtgccaataaataagtacatatttttattactagctcaaatgtcacttccttcttgaagccttctttatttatcccaaatctattttttttcgtatttcacagcattaaaagaaaaacaggctgggcacggtggctcacgcctgtaatcccagcactttgggatcacttgaggtcaggaggtcaagaccagcctggccaacacggtgaaaacccatgtttactaaaaaaatacaaaattagccaggcatggtggcgcatgcctgtaatctcagctactccagaggctgaggcaggagaattgcttgaacctggcagaaagaggttgcagtgagctgagatggagccattgccctccagctgggggacaagagtgaaactctgcctcaaaaaaaaaaaaaaaaaaaaaaaaagacaaaacaaaaattaccttaccatgttgtgaatcatccttatgagagtgtcctactactaaaaatattccattctttacaattctttttggggcctcccccctttcttccttttctcttctattattttttaaaaatgtgttccaaataattatttgcccaatatatataacaagtacccaaactgccaaataaatgtggatttacaacatccactcaattagccttgaagatgatctgatatatagaaacacaacaaatttggggggagggtaccaaacttctaaattataggtcaccctactcatgtggcggactttagtgaaactggattttcagaacccgccaggtgagtattatccagaatcaagccagctttttggacctgcgtcttaacattaagcaattggtagaataaagtaagaccactcggctctggttaacaggcatctggatttgttttgacgtaagacgtgttttcaatataacattttggttgtccgcaacttcttggttcttaaaaccgtcttgagtatcgcagtctacatttgttctttctaaacttcaccaaattccaatgaaatttgtaattttcactacaggtttgaggagccaactgcatacgatgtggaaccatttgccaatactttcatttcttttggtcttttttagttgcccacccagaggaaagcatcagattacctggtgaaaatcctcctcaacagggcagttggagtgagcacggacaattcgtgttgaccctcggtctcctcccacttctacatcctccaagtccctgaggcggctttccgctagctcgcctgtcacttggcgcacctggctctacaggccacgccctcaagtcttccaagaggccagcggtaagcgcggtccacctccctctcccactaggcgtcggcttcacgccgcgcccacgtctcgaggacagctccagccccctcgctccctggctccgccccctcgctccctggctccgccccctccagctccctagcgtcgtcggcgtcgagcccgagcctgcgcctgcgcgtgcgccctggggcccaagttggggcgcgccgtggctagaacacggagagcggcgggcagtgcagccaatgggaggcggcgctgcctagcggctggtaggcggtgcctgcgcgggtgttaggttagcgcgaggcgtgacctagttgacaggctctgaggtgctgctgtggcggcgtccgcggggctgaggcgggtgggagccggagccgagcgcgggctgagggaggagggcggcgactggagagcggcgagcggcgagcagcgcaggacgcagagcctctttcactttttccctgctgagtgccccctcccacccctcccactccacacacaccctgtttgcccgtgagcctggggaacttgcagcttaaagccagccacccccacggcaacatgtaccccagcaacaagaagaaaaaggtgtggagagaggagaaaggtaaccggcccgtcgagtcctgggggtgcgggcggtgggggttagggtgggggcgggggtcaggctgtgtgtgccgcggcgccctccgcccgagctcccgcctcgcgccctcccggccggtgccgcctccctccggtgtccgtgtgtacacacgcgcacactcgcgcgcactccggcgtgcacgcgccgcccctgggcacctgcagctcgcgcacgtgtgggcgcacgcccctctctgttgccctcggcaccccgtcaccttctcccgaggcggtgctgcgttcgcctcgcttgcggcggggacccccaggcggcagccccgggcgcggcacaagttcctctgcaccgcagctgggacttgggcactgccggcctgggtgtcccgcggacaggtgcccgtcggcgggcgctcaggctgcagctgccgctgtgcctccgcgctccgtgcaccctcatttctttccttctcgcccctgtccccccagcccccgaatggcaaagcgtacccaccatcgggtgtttaccccttgtctaggtttccttccttcgctgccgcagcgtgacttttgaaacctggaactctaggggagccctaaaacgagcgtgttgtccgtgaggataagtgccttcagagaagtctgaatgggctgttctcccaacagtgtgtttctctgtattccatccccattcatgggctgaagttgctcagagtaagattttgtgactaatgtcactctgtatgaacccatctctgaattttgtgcgtataaggtttatctaaatcagctagattgacagtggcactgattctttaagaaacacaagtgtacgatccagcgtctcccaccaagatctcccgcttatcccatcacagtttggtaatattctaacttgagtgtctctggcgtttttcaccctccttttcacacctctttccttttcattctttagctatttacagaaatgtagcaaaaacttcttgcactcctattgctaaaataaactaaaacctgtatagcaagggtgaggtctattgagggtagtgcgcatttctcctggtacctcatctttacaaaaggatataggggtgactaggtatcaagttgatttccttgttaatagttcgttaaaacctgtagatttttattgcaagtcccggcctttatgaacacgaaggcaaaacagtggaggtaagaaagggaattaatgtggaaaaagaatccactatataggatcggcttccacaatgcacgaacaaaggcgtgaggagggaattttttttttcaaatttactgcaggaagatttaataatagaaccgaacaacacaattaaaatgatctttaaaaatgttgaaagtttagtcatttaattatgttttaataattatgggtttatagagagctaacacttctggtgttataaatcaaatgctgtcgagagtaatagcctgatagataaagtagtgtaaaataattttgctttgtttttttcagtagtagttactttagtttcaacacactttca

SEQ ID NO: 1888250 - DNA, 4001 bp, Homo sapiens
cctacagctgacctggtcggagaatggaaacgtgtgccagagagaaacagcctcgacccttacagagaacaaggatggtacctacaactggacaagctggttcctggtgaacatatctgaccaaagggatgatgtggtcctcacctgccaggtgaagcatgatgggcagctggcggtcagcaaacgccttgccctagaggtcacagtccaccagaaggaccagagctcagatgctacccctggtgaggttactcaaaatttttaaattttgtctttttctctcattttaaaagtaatatccacacttgctgtaaaataagctagaagtctataaatacaaagtaaaattttaatgtcagctccatccccccaaatcccacatgcgaagagtcatgactagtaagaatttgatgcacaagttaatagaacttttgacataaatatatgtttaattttttttttttttgagacggagtctggctctgtcgcccagactggagtgcagtggcgcgatctctgctcaccgcaagctccgcctcccgggttcacgccattctcctgtctcagcctcccgagtagctgggactacaggcgcccgccaccacgcccgactaattttttgtatttttagtagagatggggtttcaccgtgttagccaggatggtctcgatctcctgacctcgtgatccgcccgcctcagcctcccaaagtgctgggattacaggcgtgagccaccgcgcctggcgtacataaatatatatttaaggagcaaagaggcaggcagggggaaccatcttctcatagagtcctttgccttcccttattccttgagagttgttgtgcccgtttctcatcagcccacccttgtgctccctactttttctaacctctgctttgtttctgtttcatccaaacttttccatcctcatttatgacctcatcccagtacaccctgacatctgctgtgtatgtttcagaaagacaaatgtagtttaaaactgtaccaggcctggcggctcacgcctgtaatcccagcactttgggaggccgaggcgggcggatcacgaggtcaggagatcgagaccatcctggttaacacggtgaaaccccatctctactaaaaatacaaaaaaatgagccgggcgtggtggcgggcgcctgtagtcccagctactcgggaggctgaggcaggagaatggtgtgaacccaggaggcggagcttgcagtgagccgagatcatgccactgcactccagcctgggcgacagagcgagactctgtcaaaaaaaaaaaaaaaaactgtaccaggcctgcaggtgaccatgaatggtcacagaacggacctcttctgtgtcctgattgtgatatttgagcaacaataatcacaaacccctctgcaaatttactaagtgcaaatttccattcatccatgatctctgtttttgcttcaaccacccagtaagtctggagttttaaagaaggggaaactaggacttgggaagtcatgggggatgttgttgaagacctcttgcctttagatcgggttattggttcaaactaattaaagtaaatctgggtccctgaggacaaggtcagtatcagcctaaaatgcaaatttgtgctagttagagaaacagtcctcttctgctgggcattgtcccatggacctgaagttggcctgtgttccactccgtatgaccaaaatatgtcttacttccctcttgtgtaataccaggaggagtctcaactccaggagacttttcaaaggcccaggttcctcccacataccttatggtggttagtcttatctgctgggtcagtgctaggtcacggatttttccatgtccctgtctgctggaagagtaaatataggaaatggagggcaaaaaatatcttctataatcagagatgtatggaaggcgtgtgatcatgtccacagctaactcagtcatgcatgtacacgcagttccaaatggaatccatagttgggtgatcttatgactaaagacagcataacaaaaccagtatcattattacagttaatacaatttcaaatttttaatcactaaatttcataaaattattaaaacaattcccttatatcatctaaaatggagtatacattcaaattttcctcaaatttcttttatgactatctttctgtgcactaaatttggttttaattcatatttaaatgctttgcagtatttttctttgaaacacttgggcctcaagaatttttgggggtgttttaaaagtataaattcaatttcctcagtagtttagggttactcatattattcatttcatattgggtgagttccggtaactcgtgccttttgaagaattttgtgtccattttatctaagttgtcatatttttgtgtgtagagttgttcataatatctccttattatctttttggtgtctgaagggttatggcgatatcccctgtttcaacctcatatctaaaatatgccatttctgttttcttcttcatcagccttgctatagtttttttccattttattggtcttttcaaaggaccactttgtttccgtgagtttttaaattgtttttgtgtttccagtttattcattttttgcactcttctttttattaattcctgtctcctgcttgctttgagtttattttgctctactttttctagtttcttgaagtggtgatttaattgacttgaggcttttgctcttttctatgtcattcctttgcctccgtttatggctggggctggtgttgggggatgggtcccaggtgcctggctgcagggctgtccctcagtcctgaggcccctagtcagtctcccttcttcctctcccaccttggaatttctcctattcctgatccttgtgatgtttctagggttcatagttttacttctcagggaggtaaaactgcaccatcaagactggattgcatttgcttttcagttattcatccacccactggcttggaccaggaccagggctggcatttttgggtgctttcggtttgccagatgtagcatctttgctcaggtactaaggctggaaatgcattttaagttgtctaggctggcaggtaaaatgcaagatgccttgtggttacataagtgctgcaccagtggcgtgggagccgggtaagagactgtgcactagggttaggtgagtgttctgttttgactcacggtcattttgcagtttggctttctctcttcaagtaatactgagagccagggttgtgcagaacttactttgttttcattttttatttgatttggggaggatattttatacagataagtagctatgctgctgcaattgtacccagcaactcttaagtcaaccgaagatctttgagtgctttgacccaaatgtccactcccacatctcagggtcccacaacttccccatcagggccctaccccagcatagcaaccgttgaagctgagattcatcctcctctgtgattctgctactcttttaatgatgtccagggcccaaccctctattctttctgccctctagccacaagagataagaaagtgcagtgctgccaagaagtcctcttgctttcacgctgaaccttaactcataatcaatcactcgtagcttctcagcatatttccccaaaaaaaatatgcccagtgatagccatggaacaagttagtccttataactaccatttcccaatttgtttcaaaagcctgatgccaaggaatttcctgcctgtggttacgccatcccagcttactgccagtgaaagttttatcaattgcatcccagccatggtgcccagccccactcactgccagccctgaggtcctcattgcgagctgatgagtattcaggcttcaaatttatattttagagtaagctttacagacaacttaccaaggtcagtttctctgtaaggcagactagagatggatacaggaatgcaggaagcatcctgaagagctgtagggtcagcatgcctcaggaaatggggaggcaggactgt

SEQ ID NO: 1888251 - DNA, 4001 bp, Homo sapiens; identical to SEQ ID NO: 1562120

SEQ ID NO: 1888252 - DNA, 4001 bp, Homo sapiens
gtgggccacaggcataggctcagcctggcgccccctgggtttctctggaataagtgtgggtgtcccccacctgcctgcaccccactctactccctgtcggaacaggggccctttgtaatcagaccggggagctgacagcctcaggaacagcaggttcctcccaccctgggtctggcccactctgaccctcagtctcttctccacaccccgacctctgcccaccactctgaccctcagtctcttctccacaccccgacctctgcccaccactctgaccctcagtctcttctccacacccccacctctgcccagctccatctggctcctgctgaagaaccccacgttcatcctgctctgcctggccggggccaccgaggccactctcatcaccggcatgtccacgttcagccccaagttcttggagtcccagttcagcctgagtgcctcagaagctgccaccttgtttggtgagaaaactgaatcttgggggtcctctgcttttatgtcagttctcagaaacagagtcttcaagggcatcttctagaaagacccagacagggcacatggcagtgagtgccctcccacccccgctgccagagcaggtgtggagagcgccacgggggctgagcgactctgtccacaggccgggagagtggtggtcctgccctctttgtgggacatgctccgtaggtggaagggtccacggtgggctccaccccctagccacctagtcttggcttctgtgacttggtgcaggaagggtttggacctggctgttccatgagccaggcactggtgcctcaggacctcctggaacagtgcagctgggggtttctcggtgccagaggcaggctggccttcccaggctgggcaggtctgcagaaagtggggacccctcctcagagctgctcctcctgccagcgttcacagagtaccctgggccatggcagaggtgccaggcatgtgggccaccaccgccaatctaccgcgctctacccttccagggtccactatctggacaggaagagggcatcagatgagggctcccctccctcccccacaggcccatcctggcctggcccctctgggctgacctcacaagcccacattcccacactcaacagccccccagaggtcagctctactgccccttggagagcctccccacctgtccccccaaatctgtcccctccccacctgtccccccaaacctgtcccctctccacctgtcccctcacctgtgccctcctcacttgtcagcccagaagctagatgccagctaatcgcaattttttactgttggtggccactcaggcttcgacaaatgtccttgtcacagcctgcagggactcggcagaggcccctgggggaggagggggtgtggctgccctggaggggggtcagtggaggagtcattggcttcccactggggcaggggccgctgaccttggagcactctgggctctcctcctccccccgccccgccccgcccccccgctcccccttccccttccccttccccttccccttcccctctgaggcatccccgctgtgggctctggacagaggtccctcctagggctctatcagcgcaacagctaagcactcaggtgtggtgttgagtgctgccatgcaggcaggaattgatccctctatgcctcagtttccccacctgtaaagtggacccggctgatccaccaccctctcccaccacggccccctgcctgagtccctggctgaatccctccctctccccagggtacctggtggtgccagcgggtggtggcggcaccttcctgggcggcttctttgtgaacaagctcaggctccggggctccgcggtcatcaagttctgcctgttctgcaccgttgtcagcctgctgggcatcctcgtcttctcactgcactgccccagtgtgcccatggcgggcgtcacagccagctacggcgggaggtgagggccagatggcacctgggtacgcgtcggggccccaagcacccgcggtccctgggcatggaggaggagtggtgcagcacttgggagaggtggttttgaaaagggctacgtcacaggacagcggcaagggcaacacccgctcagcagggcacccggcagcatccacgtgaaaaggcaccatgccagcccccagcagtgcctgcgcttgggtcccggctgtgcccccgggcagtcatatgcctctctgggcctcagcactctgctctgtagctgtgtcaaatggaacaacagccctagtgttcggggtccttgaggctggtctctcggtgacataaaaagtgtcccaggatgtgctcctggagttgccatgtgctgggagtgggagggacacctgctggtcaggtggcaattagggaatatccaaaatacacgtaggtagcctgcacctcggccctgccctgcgggccccgggagtgcacctgcaggtgccgtgcaaggccgagaagcacaaagcagccgttgtggcattatcggaacctaagagtcatcagggtggacggggtcactacgctgtcctcacaacagaggccctgcccacaaaggagtggaggaagctcatcctgggccactgccaagacatactgtgaagtgggaaaaaggaaggagttggacaatgggcgcagtgtgctctgattcaagtgagaagtgcagatgtttgtgactgccgaggggcgtgtacgtgcagacgacccctgcaaatgcacagccggcctgtggctggagaaccgaggactggggtggggctggggccacgaggctgcctttgtgtacttggcgctttttctttcctaatgtttgtatttgatccatatgaatgtgttgcctgtccaaaaacaaatgaactagggaaaggggctgtgcatcaggcggacggtgctggggggcatgggtgtgccttccttgcgtgaggaggaaaaaccattctatcaccagaaggcagtgcccagtgtgagtgcccagcgtgctgggggcggtgcaagcttggcaagtttgtagacccgaaatgcaggctgcatggggacgagccccatggctgaccctgtgcctgctgggcgccagcatggctctggcctggaccctaccactcgcttgtcccccctctgcagcctcctgcccgaaggccacctgaacctaacggctccctgcaacgctgcctgcagctgccagccagaacactacagccctgtgtgcggctcggacggcctcatgtacttctcactgtgccacgcagggtgccctgcagccacggagacgaatgtggacggccagaaggtgagtggagccgctgcctaccgcccctgtcctcccctggaccctgggaaggggcccccgtgccttccccttgtaatcggagctattgttgggcttcccaggtgtaccgagactgtagctgtatccctcagaatctttcctctggttttggccatgccactgcagggaaatgcacttcaacttgtcagagaaagcccctccttctggttttcatattcgttgtaattttctttacattcctcagcagcattcctgcactaacggcaactctacggtaagctggggtcgggtgtgcgcttgtccagagctttccttgcagcaccctgaggcggagctctgcagatcctgagacaggagcactccaggaaacacccaggtctaagcgggcctgtctgtcactggtggcaggagagacctcactgtctctgatctctgacgaggggcttcccacttgggggggggtgatgatgtggctggggactggtccaggaggccactggcctagggggtgacttggcatgcaaccccacttctgtgggtgctgacgctgtggttttctattgcagatgtgtccgtgaccctcagagatcctttgccctgggaatccagtggattgtagttagaatactaggtactgtgcagtgtgaggaagccatggtcagttgcacagtgtgctcactgcacaagggcatgggcaagtgtctaaccacca

SEQ ID NO: 1888253 - DNA, 4001 bp, Homo sapiens; identical to SEQ ID NO: 1562122

SEQ ID NO: 1888254 - DNA, 4001 bp, Homo sapiens
gcatccttcccggaaaagtacaaacagttcctcagacgaggtcccccacctcccacgcgctccccagccctccctccctgcggagagccccgcgacagcctccccaacacctgtgaatcatccgggaggctgccaccgccgagcgatccgcgcaccacccccttcccgggcccgggcacggccagggaggacagttagggttgttgctttataattatcacttttaatctctaatacgaccagcacaagtagcctttgtctccccgccctgatttgagcatccgagggccccccgaggcagcctgcacgggtaccccggggtttgcgcactgagtgaacccccagattcggccgtgtcccagccgtccttgctctgaatcccccacctcctcccggccgtttggacggttccctcggggcgtctgtgcctccgtggggtacccctaagacacccagcatgaaaccccagcaccgactgcaaattccaccgaaagcagagtcatccgtttttgccctcggcaaacaactcaacttcaagcctcgagtccttgcaaacccacgctggctgggctaactccgcttcccttctccttcccccgactcctgcaacagctcagagagcctggctctgacgtagttcaaaataacgtgcgccagcctcgctgcccggctgaccacagcaacgagagccacaagccctcgacgctgcttcgataacatgaagcaatcactcataaaaatagcaacccacgtagcctggccatatatggagctggcgagggtggacggggatgcccctacggaccctcttcggagaaaacaaatcgccgctgaaatttcccccacccctcccatcactaccttttacccctcctctgccttcccctctccttagatgactcaaccacagattccactgaaagggggtgggggtgggggtgggggggaatatatacacatacacacaaattatacatatattatacatgtattataaaatatacacacacatacatatatacatacacacacatatacacatatgtacacacacacgcacacacaccaaagaacatcaggaatgcagttgcgggatgaacgcgtttgcccaagaccgagtgttaaaatggagtcataagagtcgccccgtgcgggtgtttatagaaggtgaaaacacgcaggtttgcaggccagcgcactgggaaccgagtcaagcgcgccgcagcccgggccccgcccccgcccccgccgtgccccgcccccacttcctcccgcccctcgctgggcggctattaaaagctgctgacgtcaaaacggacggccatctttgatgagggcagagctcacgttgcattgaagacgaaacctcggggaggtcaggcgctgtctttccttccctccctgctcggcggctccaccacagttgcaacctgcagaggcccggagaacacaaccctcccgagaagcccaggtaagaacccccctccccaggtcgtggctctggctcgggatggctgcatacccagaagggacagcagctgggcagtccgagtgggcttgggtaaatacaagtattggtgcacttagggtgcggtattccgtgtgtgcacgtctggtgggggctttataaagtgttttcgaggtgagctgctggggaaaagggaaacgggagccctgcaaatggagcgacggggaggaagagcgagggtacgtaccgaataataacttactcttttgaaacagtagtgggaccccctctttcttccattttgcgatgcagttttcagagatatttaggctgttgagttttcctcccctgtcgttctaaccctattattatgactgttgtcgttagggtgctattatccagggaagaattaagggggagacagggtgtgggtgctggggaggcgaaaggagaaagggggagttcccgccccgggcaagctgagctgctgcagcgacagcagcctccatgccccgcggacttgatttatgccgcctgctccacgtcaactgcaggctggcgggaggcgggcgggtcgtgccgggtgggagggctctgcggagggctggcgcgggtgggctggcttcggggactgcggcggcccgcgctcagcaccctggatagcaacaccgagggctcgcgcgggcgccctcgacctttcagcaccggggacagcggtccggccgcagcgcctcatctgcctgcggcagaaatgcctggccggggctggatgtgccagggctggagaccaaattgtctccctgagaccccggtcttacggagacccttaatagaggagtcatagtagcttaaaagaaaacaagaaagaaataaatcttcctcacagagactcctttgcagacaatttcctgttcccctcctcacctcctgcatagcttcaacaaaatagtctacttgtggaaatcttctgtgttgccctctgacccttattttacgtagaaaataaatacattttttaaaaaatatggatttatcctccagcagggtatcaaggtttttgtttggttttgttttttaacacagagtagatctgtctacagatcttgggtgagcataagtactgtatatatgaagaagccaatgctatctgtttatagggatgatacatctctctctatgtttccatttgataaaaatgtgagattagctgaactaagcagaatcaactttaagaatgaatcactcttccttttccttcttcccccatccttgcaatcaggcatgaatacaagcattcatccacaaaaacacatatctgagaaattttactggtcctgtactgaatagatttaacctctttggccacggtttcagagttactggaagtatttgctatcagcactggttatcgcaggctgatagctttagattttgacaatattaagactggccttcctcaggagaatccaagtgtgtccttcagggtaatgcaggtaaagaaccatggtgttaaactagaacttaactctgacctaaaggtctactgcaatttctcttatggcactgcgggattttgctgaggtggtaataactactttaaccattttctactctgaggcttggagcatctgagagagcaaaagtcatcaggggtatttctctctgtttgatgtagataaaactggcataaaaatgaccagagtcaaaattatgccatttgagtcattagcaaaaaagagtaacagcgtcatatgtaataatctatacaatgcattaaagaaacgctatcatgatccccttaaaagaccccaaatgagaacttggattgtgtttagatagtcatacctcctatcatctgtatgctacagacactaaaattccctgtccatatacagaaggtaatttcattcgctgctatttaattatttcctagtgttttttctttttatagatgaccatgtgtttccatgtatgtatatgttgatctgttattttgcatggatgtaaaattatttgggtggacatttatatatgagtatgtaaacgtataaaagaagtttataactttgcaatctgcagacaaaaataaacaactgtgttttagtagtggaggagagaaaatatgggcaggaatctttaaaaatgctttaacttcatgctgcatgtccagacagctgtctgcgtagttgcgtcaaatgaaaagcctaatgctgccggaattacgtgcttggacattagtaattactgctgggtttgtttgctagtggaagactggggaggagcgggggaagtagaggaccgcagtgaagatggcaaagggcacagagctgagaggaagaagcaatgtgcacaattagaaagctaattttagaatagcttactgagaaatttaaaaaatatatcattgaaccatgaatttaacatttatatcattgacaagcttccagggaaaaaaaatcgagaaatttcccattttaagttagaatttttaaaatccagggcaatgcggtgagaagaggcaggagcagatgga

SEQ ID NO: 1888255 - DNA, 4001 bp, Homo sapiens
agataagatgccatgagtgagcacccagcttgtccctgctcgcagcagggatggcaggcaacaggaaagggcttagcacagtagttaccagacagtaaacactcctaagcaaacacactatttcctcataaaagagaaaatagttaactctacagaggaagacagcggatggtctatggcagggtgagggtggccaacactgatcaatgtgtagttaatcagcaaaagattgaaaggagatcaaaaccaggtttacagcagtgtgccatggctgagtggcagtgactctgctggtcatcaaggggaatttaagcaacacacacagcctggttcccaacagcagggagcaggaagtgaaagctctaatcatgatataacacacacggcagcccccaatcccctggaggccccaggtgtgtgcagctttgagaaggaggagtgtaggaaagctcctgggacaggagggtgaagatgtggaccctccaaacacagcaacctttcccgcatttcctctgcctgcactaccaatgaccaggacacgggcagcccgtgatcacttacgaatgcaggcgcagaaaagagcaaaggggatccaggaacagaggccaaagtgagctgcctggagattgccaaagcgccaagcccaaaggacctgagcgctatccacttaatgcagtacaaagatctcatctgcccccatcaagaaagtcacagaagaccaatttctggttaaaaaaaaaaaaggcttaaattgttcattcatcccacaaatattgagtatctacaagtagccagacatcatgggttcaaaagcaagaaaaacgtgcaagatctccccacttacagagctttcgcagtttccctacattacagaaagtcaagctcaggagaatgaaagaacttagccaggctctcctctgcacccggctttgccatacagttctcggaattcatgaccatgccctccgctggggtcccccagaagggaatttgaagggtcccccaaagtgctcatgaccagcaccacttacccagggacatcctcacaccgcggacagtgggagcccctcagggagtgcagatcagggtgctgcaggaaaaatgggggcgctggctggtgcggaaccagcaaagccatccaagggagagctgtcatctgtctccaggatagccgcacagcccacgaggcctaggcagggaaaagcgtagggaaggggcttagtacaaggtcctggcaaaggagtctggaattcgcccctctggggccctgggagcgtcctccatttaaacctcagccaactggtctgtaaaatggaggttttacagctactttttaaaggttattgaggagaaaatgagttcacggttccaaggacgtggcacaatgaccgacactttgtaggcaaccgaaaagcagctttgggggcttccaaagtcaggagtcggagatcggggtcgggggagtaaaagtcgcgaggtctctagccccctcagcccgcgtgcaaggccccgggcacagcgttgccaagccgtttctcaagggggcactaagcctccccgcagagaggctgtgccgacctaggggggtttgacgtctgcatggggtcggcttagcccagcgaaggccgagggcgcggctcacccgccagtctctttcccgaggacacgcgaaacccgaggggcccaccccggcagaggggacggaccactgcaccagcggctgggcctgacgtccagccggctcttcccactcccctcggggcctcagtttccccttttgtcggggaggaggtacacagcaccggccttgggaggccaccaggggttcttgggaagaccactcctcgggccctgcccctcattgactcatccggagcgccaggacggatggcggcgggtacaggggtaaccgcgcggaggaggctgaggggcaggccgcagccacaagacgctctctctagtgctcagcgcccgcggaaatacggctgggggcgcggctgcagcctagagcggcgcttccgccgggcccctgcccaagcagacgtgcctgcagcgccccctgggaggacggagctgcaattctgtccctccactaacgccctttatccaagcgttcatctaatggagcatcccttcatgagttcactcacccatccatttacccagaaaatatttgtgaaacatcagcttccatttgaggacacagtgagaagacagccatcagtctataaaccaggaagtgggccctcaccgcttcctagtttaccaaatctactggtgcctttgatcttggacttttagcctccagaactgtgagaaataaatttctgttgtttataagccacccagttcatgatggcactttgttatggcagcccagacaggggtcggctggcaaataggtcagcttggaccatggccagcttggtgtccacacaccctcctctccaagcaaaaaaatagaaaaaaatccacttcaaacatgcatcctttctagcattggcaagagtgtgtctgcagtcttgttttgtttttgacgtcagcatacaaataaagggtcagccattgagagtagactgttcttttaatgctgtaacaaaggctgtcacaacatacttatttcaagagctcaacatactgccctgtttgctggaatcacgtactacgtaggccagtgtcccagatgagaaagtcaacgtggataagcaaaatgcccacaaggctgtatgcaacagccaaaccctcaatggaatttcttaataactggccatttaggacaagttaaggaaaagacttgggcttttagatagaatgtgttggtgatagaaacctaacttacgctttaaaaataaaatacattattggaaaacttatataatcaagcgaagggaagggcagaggtcaagctgggcctccaagacaacaaacaccagaactggaattccatccctgtcctgcaactctgcctctctctctgggtggacttctgacttcacacttgctctgattttttgcttatagtgagggacatatgccacgtttacccaggggaacatctccatcctgcttccattgagggtaggcaggactgccacatatggttgtgcaggtcgtgtactgcacaactcatgggagcaccatacacatcatagcctatggttgagaagcagagatgccagggatgattgggcaatctgatgacacagaaaacacttgacttaaaagaaagaaggtgttttccctagcatgttcttccctggtgtagcagagtcaccctctgtcataccatctcatccttaaatgatggtccttctaataaagtcccttgaaaatatctctgaatggcaacacttttgaggaattttttctccacgctacttgagatcaagcagaagactttaattaaacctgtgacagtgaaacctgtgcacggtcattagaaaaaaaggtttgcaagcagtagcggggctttctgagaaatgctattctgaattccacaaactttttttttttttttttgagacagagtcttgctctgtcacccaggctggagtgcagtggcgtgatctcagctcactgcaacctctgcctcccgggttcaagggattctcctgcctcagcctcctgagtagctgggattacaggcgcacatcaccacagcctgactaatttttgtatttttagtagattgcaccatattggccaggctggtctcaaactcccaacctcaggtgatctgcctgacatcggcctcccacgtgctgggattacaggtgtgagccactgtgcccggcctgatttttacaacctttcacactcaagctctcaattctcaaaattaccttctgggccaaggataggcacttccaccctttctggagctctgggaggagtcacccatctctgaggtccctcatctaatttgtcttgagtgtgggttaggacttgttgaggctgcacacccctcagggtgtctgtgctttgcttgttcatgggatcct

SEQ ID NO: 1888256 - DNA, 4001 bp, Homo sapiens
atctaccaagcaccaggtaagtcaagagacaggactcagatactgagacaggcgaagtggctcacacctgtaattccagcactttggaagactgagggaaaatcacttgaagccaggagttcaggaccagcctgggcaacatagcgagaccctgtctgtcccagctatttgggaggctgaggtgcgaggatcacttgagtacaggagttcaagctatgatcacgccactgcacactgcacctcagcctggacaacagagtgagatcctgtctctaaaaaaatacaataaaatattaaacaaaactcaagacactgtcctcaaggtcacaatagagagaggcaaagacaatcaagccagtaattgccacagggtgtgactagtgggggctgcagctgtggtttcaccaccaatcctgaggcagggactcacccctcatagaccctggtgaacgcctcatggaaccctgcactgagccttgcacagggagcactcactaataagacaccaagtgccaggaggcatttgaaagatggtgagaaggaggtgtgagaaagctccagagtttgaaagggacaggagcggaccctccaaacacggggaagcactttccgcgatttctctccctgcactatcaatgaccagggcacaggcagcccacgatcactttcgaatacaggtgcaaaaaagggcaggtgagcccacgtcagcgtgttagctgccagatctccagagggaggctcaccccccagggaagagaagggtacccaggaccctgagagccatcatcacttcacaggcagattccatctgtccccacccagagtccacaggaaaacagacttctggtaaaaatgcctcggctgtacattcagcccaccagttctgagtatctacacgtggacaggcaccgtgggttcaaaatcaagaaaaacagccaaggcctctgccctcagagagcctttgcagtttccctactttacagaaagtcaacctcaggggaatgaaggaacttagctagcatgtgaccccaagcgcagcccgtctcctaagtcacgctttgctctgcacccgctttgccagacagttctcagaactcagaactggctgagctcattgactgtcccctctactgcgtcccacagaagggtccttccccaaggtgcgcagaagcagcggcacttacccaggggcattctcaccccgcggacagtggaagcccctcagggggtgcagatcagagtgctgcaggagagagagggcgctggctggtgcgaagccgtccgaggtgcagcacagcccacaaggcctaggcaaggaaaaagcacggggagggggctttagtacaaggcccggggacagaagtccagactctgccccactggagtgctggcagcgtcttccatttaaaccacagctaactggtctgtaaaatgaaggttctaacacctacttttaaaagttattgaggggaaaacgagttaacggtctcaaggacgtggcacaatgactggcactttgtaggcaacagtcaagtggctttggaggcttccaatgccaggagtcgggggcgggcagctaaagtcgccgagccctgtttcccgccatccaggggcactaagcctccccgcagagtagctgcgcggacagggggtctgacgaccgcacgtggcccgctcagcactgccgcggccaagggcgcgactcacctgccagtgtctttcccgaggacacgcgaatcctggggggctcactccggcaaagaggacgagacactgcaccaaggacagggcctgacctctctggccgccttccccggggcctcagtttcccccgatggtgagagtggagccgaccatgcgccctgctgtggactcacccggcgccctggcgtcgagtggcggcggagacctgacagacagcgtgggaaaaatcaagatgtctgcagatttcgagagatggggtgcggtggcgtgcgatggcgaaggacggcgagggacggcgaaggactgaggccacacgacaaggaagctacgctcgtttcgcgccggcggaaatacagacgagagcgcgagctgcggcctagagcggtaggaaccgacgcgagcagtcctgcagcgtcccctggcggagcggaggctcaacgccagactctggaggacttgggataattttcgaaaactatctggaagtttagaagtaaacttctcccacttgctttgcttttctgtttgttctgaagatgttccttggtcactgattcattattaatctgtaggaatggccaattttccatgataggagctgttactacgatgaggggactgtgcttagtttggacttctttctgcaagggtccaaaggcatctgtctttgattcaccactgtactcagtacctagttcagtgactagcacagttgaatgaatgaattctacccccgccccattcctttttttctgaacaatgtcagaccgagatgactgagtcatggcctgagactggaatgtgagcgtgagaagatgagccaagagagatgcacagcgggtaactgctttgctaaactccagcctcaaagtacacgggatggagggtggaaagagtctctgaagcagaagagacctgaccagactggcatctgaggaacctgatcagatttgcacagtgacagagactgtagacagatgtcccatgttccctgcaacatactggagacaatcttgggaggggactcatggcccacaaatcctcataagcattggcactgcctgcaccctgggcaggatgtgcctcttcggcctgagacagccctgctactgactctgcccatgttctggagtgcaagcagcccacccttgggcctgatgaggagcccacgccccaccctccgccccgctccagtcagattcttggtactcaataggtcagaaggacaagaaaatccagtcctgatctatgcaaccatgagggaaatgggggtccctgaggtgagatctgctccatattttgtacctgggagaggcccatgggattcccagactgtgagaacactgggagtctctgtgatggggaggggctgtgggatgctgctatggtttggctgtgaccccacctaaatctcatctggaactgtacttcccataattcccacctgtcgtgggaggtaatggaatcatgggggtggttacccccatgctgcggttcttctgatagtgagtgagttctcatgagacctgatggttttataaggggctttacccacttttgctctatacttctccttgctgccaccatgtgaagaaagacatgtttgcttccacttccgccatgattgtaagtttcctgaggcctccacagccatgctgaactgtgagtcaattaaacctctttccttcatgaattacccagtctcaggcagttctttataacagtgtgaggatggactaatacagatgctgtggctgagaggacactgggcagggtggtcaggtgtgcccacttgtggccacacagccctggtgtcctcttctgcctcccactcttgctgttactctccatgtgactttggctaagtgacctaacttctccgccccgcctcagtttccagttatggaaaataggcagtcatagttccctgctcatagcgttgctgtgagaattaaatggaatgatttatatcaagaccgtagcacagaacaaatatccaaggcctagtagttgctatattatagtatttctgagaaagctgagggcttctgtcaccgtaaggactctgggattctttatgaagcagaggaaatgtgctgtgtttgaaaagtctaagatggcattgtcagcccggtgtgatggagcagtcctgtagtcccagctactcaggaggctgaggcaggagaatcacttgagcctgggaggttgaggctgcagtaagctgagatcacaccactgcattccaggttgacagaacgagaccctgtctcaaaaaagaaaaagaagaagaaagatag

SEQ ID NO: 1888257 - DNA, 4001 bp, Homo sapiens
gtggctcacacctgtaattccagcactttggaagactgagggaaaatcacttgaagccaggagttcaggaccagcctgggcaacatagcgagaccctgtctgtcccagctatttgggaggctgaggtgcgaggatcacttgagtacaggagttcaagctatgatcacgccactgcacactgcacctcagcctggacaacagagtgagatcctgtctctaaaaaaatacaataaaatattaaacaaaactcaagacactgtcctcaaggtcacaatagagagaggcaaagacaatcaagccagtaattgccacagggtgtgactagtgggggctgcagctgtggtttcaccaccaatcctgaggcagggactcacccctcatagaccctggtgaacgcctcatggaaccctgcactgagccttgcacagggagcactcactaataagacaccaagtgccaggaggcatttgaaagatggtgagaaggaggtgtgagaaagctccagagtttgaaagggacaggagcggaccctccaaacacggggaagcactttccgcgatttctctccctgcactatcaatgaccagggcacaggcagcccacgatcactttcgaatacaggtgcaaaaaagggcaggtgagcccacgtcagcgtgttagctgccagatctccagagggaggctcaccccccagggaagagaagggtacccaggaccctgagagccatcatcacttcacaggcagattccatctgtccccacccagagtccacaggaaaacagacttctggtaaaaatgcctcggctgtacattcagcccaccagttctgagtatctacacgtggacaggcaccgtgggttcaaaatcaagaaaaacagccaaggcctctgccctcagagagcctttgcagtttccctactttacagaaagtcaacctcaggggaatgaaggaacttagctagcatgtgaccccaagcgcagcccgtctcctaagtcacgctttgctctgcacccgctttgccagacagttctcagaactcagaactggctgagctcattgactgtcccctctactgcgtcccacagaagggtccttccccaaggtgcgcagaagcagcggcacttacccaggggcattctcaccccgcggacagtggaagcccctcagggggtgcagatcagagtgctgcaggagagagagggcgctggctggtgcgaagccgtccgaggtgcagcacagcccacaaggcctaggcaaggaaaaagcacggggagggggctttagtacaaggcccggggacagaagtccagactctgccccactggagtgctggcagcgtcttccatttaaaccacagctaactggtctgtaaaatgaaggttctaacacctacttttaaaagttattgaggggaaaacgagttaacggtctcaaggacgtggcacaatgactggcactttgtaggcaacagtcaagtggctttggaggcttccaatgccaggagtcgggggcgggcagctaaagtcgccgagccctgtttcccgccatccaggggcactaagcctccccgcagagtagctgcgcggacagggggtctgacgaccgcacgtggcccgctcagcactgccgcggccaagggcgcgactcacctgccagtgtctttcccgaggacacgcgaatcctggggggctcactccggcaaagaggacgagacactgcaccaaggacagggcctgacctctctggccgccttccccggggcctcagtttcccccgatggtgagagtggagccgaccatgcgccctgctgtggactcacccggcgccctggcgtcgagtggcggcggagacctgacagacagcgtgggaaaaatcaagatgtctgcagatttcgagagatggggtgcggtggcgtgcgatggcgaaggacggcgagggacggcgaaggactgaggccacacgacaaggaagctacgctcgtttcgcgccggcggaaatacagacgagagcgcgagctgcggcctagagcggtaggaaccgacgcgagcagtcctgcagcgtcccctggcggagcggaggctcaacgccagactctggaggacttgggataattttcgaaaactatctggaagtttagaagtaaacttctcccacttgctttgcttttctgtttgttctgaagatgttccttggtcactgattcattattaatctgtaggaatggccaattttccatgataggagctgttactacgatgaggggactgtgcttagtttggacttctttctgcaagggtccaaaggcatctgtctttgattcaccactgtactcagtacctagttcagtgactagcacagttgaatgaatgaattctacccccgccccattcctttttttctgaacaatgtcagaccgagatgactgagtcatggcctgagactggaatgtgagcgtgagaagatgagccaagagagatgcacagcgggtaactgctttgctaaactccagcctcaaagtacacgggatggagggtggaaagagtctctgaagcagaagagacctgaccagactggcatctgaggaacctgatcagatttgcacagtgacagagactgtagacagatgtcccatgttccctgcaacatactggagacaatcttgggaggggactcatggcccacaaatcctcataagcattggcactgcctgcaccctgggcaggatgtgcctcttcggcctgagacagccctgctactgactctgcccatgttctggagtgcaagcagcccacccttgggcctgatgaggagcccacgccccaccctccgccccgctccagtcagattcttggtactcaataggtcagaaggacaagaaaatccagtcctgatctatgcaaccatgagggaaatgggggtccctgaggtgagatctgctccatattttgtacctgggagaggcccatgggattcccagactgtgagaacactgggagtctctgtgatggggaggggctgtgggatgctgctatggtttggctgtgaccccacctaaatctcatctggaactgtacttcccataattcccacctgtcgtgggaggtaatggaatcatgggggtggttacccccatgctgcggttcttctgatagtgagtgagttctcatgagacctgatggttttataaggggctttacccacttttgctctatacttctccttgctgccaccatgtgaagaaagacatgtttgcttccacttccgccatgattgtaagtttcctgaggcctccacagccatgctgaactgtgagtcaattaaacctctttccttcatgaattacccagtctcaggcagttctttataacagtgtgaggatggactaatacagatgctgtggctgagaggacactgggcagggtggtcaggtgtgcccacttgtggccacacagccctggtgtcctcttctgcctcccactcttgctgttactctccatgtgactttggctaagtgacctaacttctccgccccgcctcagtttccagttatggaaaataggcagtcatagttccctgctcatagcgttgctgtgagaattaaatggaatgatttatatcaagaccgtagcacagaacaaatatccaaggcctagtagttgctatattatagtatttctgagaaagctgagggcttctgtcaccgtaaggactctgggattctttatgaagcagaggaaatgtgctgtgtttgaaaagtctaagatggcattgtcagcccggtgtgatggagcagtcctgtagtcccagctactcaggaggctgaggcaggagaatcacttgagcctgggaggttgaggctgcagtaagctgagatcacaccactgcattccaggttgacagaacgagaccctgtctcaaaaaagaaaaagaagaagaaagatagcattgtccaatagaaatataacacaaggccgggcatggtggctcacgcctgtaatc

SEQ ID NO: 1888258 - DNA, 4001 bp, Homo sapiens
agtgctaaaagggcctgaagacttctggtgctctgaggactcctttctggctttattggatcaggctcattaaatcagtttttttgcctccattctacaaggtcaggctcagacagttcatcacctccaacagctagctatgccactccacacccagcaaagcccaactgacctgaaccattgcttccttcatgacatccagattctttcgtggtatctctccagtctcatagaaggacagtcgctcttcaacttgttctcgaagcttctccccgaatacactcgtgggcacctctggatgtgtgtgggtgacaaagcctgtcagcccaaagagagaaactaccccaaccctgtgttccctctaccctcagcttcactcagacccagagtctcaacactcactaggtgaactgctgttgacgaaaaatattgccatcattgtggaagctatggttgcaagcctccccacccagccacccagccccttctcacacctgccaacgcccccccacccataccagagaagcaatcgattcgtgaggcaatactgcatttgtttgccaggtatcgggagatgcggcctttgttcttggcagctgctcggccaatgaaggtggagtggaaaatgagtccatattttggagtgttaccccttgtcttcagggctctgagagaatattcagtggagagtttaagatcagaaatttcaaccccattagccaaggcagctcagctcctcccctcctctcaccccgaagtcctgagtgagcctcaggccagattggatctctaccccaatgcatgccaacccatagctcccagaggcagagggaaggcatccaatgtcgctgacctggaaacttggtccctttgctgggccctgggaatcactcagacaccaggactggccatcacccccatagcagaggcctgtataggtcagggagccctggtcagccatcaccgtgatcccccaacaagcagtgggcaccagaagtggcacctgattgtgggcaggtgccctcactggtacctgaacagggccttttcagccccaaggatctgcactgtggatgctggatacttggccaggttggtgaggctgccagcatgtgcgatgagacgtgcacctacctggagagagagtcaaggaagcagtcagagaaatgaactgctgacctgcccagttgcacgacagccctgctccccacctccccatcaagcacaactagggaagacatggtgggtcacgaaatacagcagtgcaggtgcacatggcaacagtccttattctcccatttttgagtcccctgtgacgcaccgcttccccaattagggctgacaggctgggggctacttggctcatcttggagcgcaggtaagtgtgtaggctctggcggtattcagataaagacaccacacgactggagaagctctcgatgtttatcaagtcaatggcagatatgtccatgcctaggaaaaaccaagtgtgaatgcaagaggccagctatttagagccccataccttatgcaggttgccaggctctgcactgacccatggaggaccgtgaggcatccagaatagccttagccttggccccatccattgtcagctcctccagcttctccagcttgtcctcattcagttcccttcggtttccaataaactgggcaagacggcagtatgtggcattgtcgttgatgatcttcaccagctccggaaagtgatacccgtaccactccctgcaaagagccacagtcactccctggcccagctgcttcatcaaaaaccatagagctacagccttgccttctccacacctactctgcctggaggaaatgggacaaagatccaaatcttcctcaattctatgttcccccattcacaatacagaccaggcacagggcctgagctgaggtgtatatggggtaggtttactctacctcctctttctatacagtcagtgtaagaacacagcctgtggtaagcaccaggaggcctacacccagccccagcccacatggttctacccacaggatggtcagtcctcatcaagactcaaaattaactgaactacagaccaaaggctccagtattatgggtggcccctgcactttacctgacacgcatagagaaggtattgatgtccttatccagctggtccaggaggctaatggactggatgatcatattgtccacccggttcacattaaacttaactttggcacgggaatagctgtgtcccagccccagctgtgctttacaagctgacagatcggtcagacccttcaccagattgtggaagtgcagacgaactcctaagaagagggcaagacggtgagcaacaaggggctctgagctagctcccgcacccacgggcaccagcccagcctgaaggccttcccagaaatcacaacaagcaaccaagtttccagaacctcctcccccaaaatgtccaggataacaggaatataacagatgatggtctcacctcgcaggatctcagctatgactcctccagtctggcagttgtaccctaactcctcctgtattgcggcaccaatcttgggatccccaactcccaagagtactttcttctttttggacggcaggtgggtctccaagagcaggcggaggtcctcatgaacaacccctcaggggaaagaacacagttcccactaacaggctgaaggacgatcaactctaacatccctcagctgactaccctggtcccaccgagcacgctgggatggcatacctagatccctccccatcaggcattgctcagagacatggagacatcagtgattgcactcaggggattgacagatttgattcgcaagtcatcactgcaaagcctggcccagccatgggaacaactgcattcaggtctgatagcacaagtgggcaataaataatagcttgtaacacaccctcgagtatttcgtagaatttgccttctggaaccaaacctttttttctcagcctgtgtttacccaactgccctttccaatcgaacagaaagcagagaaccagacacttgattgtgtttaggcaaaacctcaggcacaagtaggtgttaagccgaccccctttaagaaacccccctttgtcggccgggcaccgtcgctcgcgcctgcaacctcagcaccttgggaggtcgaggcgggcggatcacgaggtcaggagatggagactagcctggccaacatggtgaaaccccgtctctaccaaaaatacaaaattagccgggtgtggtggctggcacaggcctgtaatcccagttactcgggaggctgaggcaggagaatcgcctgaaccagggaggcagaggttgcagtgagcccagatcttgccactgcactccagcctgggggacagactccatctcaaaaaaaataaaaataaaaaatagtttgtcactacagtgcccacaaggaaacgttaacacacattccacatcgtctgcttaaacagtttggtctagcacagttcccagaccttgagctctgtgaagacaattatttcaaattacacattgtatggctcaaatactgcctcacgcctatcagactcagagccagccaaggacggcaaatactatcacaagctgcccgagaggataccgaaaggaaccacatctctctgtgacacttggcggtggccgacttaccttcagacacggcgttggcattttccaaggcaacctgggatgaggcaaagggacaaaaggccaccagacgaacgatgctgtggaatttgcccaggttgagcacagactcctccacctggggggagaaagaggctaagtggtttccttccctccctcctgcctctgcggcgcagtcaagcagcggttctcagccttggaagctcttaaaatatgctgatacctgggccccacatcccagcttctgctttaatcgttcgggggcggcgtccgggaggcttatttctaattgctagagcgattctacccatgggtcaaggtaaagacccc

SEQ ID NO: 1888259 - DNA, 4001 bp, Homo sapiens
tcatatactccactctctcctctgctcaaaaccaactcctacattcacctgcaatccaccacctgagctcagggcactcttgcattcttcaaggactccagcccctgcctccatccctaagttatcccgtcatagtcttctctcccaaagccttggctcaaatgtttcccctgccaacttaatcctaagagttccccttctctcctaagcctgaacccccccacccctagatgcacttgggattattgttcaaccccggtccaaatcccacgtcccatctcacattccctaggtcaagccttgggtatgtgtcaaggggaaagtcttaatgagtgagaaccagaagacctgcccttgtgacccactctctacacccagtcttgctggcacacggagatactgattaaaaaaaaaccaaacacacaaaaatgaaagaacaagcagcagggcatgtttcaagatttattgagtgggtgagaggacaatggtccatagcacagaaaaagtcaacaggaacaaattcttggttttcagaagtcacaccaggaggaggcgggaggacacggaggatggccactggatggcctggcctagatggaagaaaacctgtcttcctgggccatggcactctgtggcactggcagggcagagccagctgaagggtcttcaactctggatcccaagtccccagagccacagggcttttcctctgcccacccacgctgagggaaaagtcgaataatgttgtgctgagacaataggggcaagaaggtccagccatgagtcacagggtgacatcactcgtcactcttggtctgtgatcaacccccaaacaatctaaaagagaagacaaatgaagccagcgacctggaatttccacctcggaaacacaggccaacttaacctcttggcattcacttaccatgaggaggcccctccaggggagctgggaccccaggtcattgtcctgagaggctcagtgcctgcacctcttggggtttcctctaacagtttccagacccaaggcagcatccctggagtgaggaggggccacagagcagaaggctgtaagtacttggtctccagtgttctgtcgtctttcttcaagctgatgtcaatgggaatgcccccagttaatcaatcaggtatgagttgccagtttctttcataccaaactcatctcaaaaaggaatctcaatgctcccaaagaatatcaaaataaaaacttaagagtccagcaaaactgtcttaagagtcttaacaggcaactgagcagatgtgcaactggcagaaagacagctcaagagacctctcagggcccctcccatagatgtccacctcgccgtgctgggagccaaggatcaccccagcagccatccctccatgctgtcattacttgcctacacatctgtctccctggtgggactagacactcttgctcatcccagactcaaagaccttctcatgctgctacccctccctggaatacctttctactgcccatcacatcccaatccttgaaagaccttctcatgttgctacccctccctggaatacctttctactgcccatcacatcccactccttgaaagacctgcccaggcccaccacctccaaaaggctgcttctctttgaaaatcttaaggcagtgactgtatgccacccatcatcacacttattcattaaaaataattcacacaggctttctccaccatctagtactcaaaccttgacactgaaagagactgctctctgataacaggaggctaagctgaaaaaagccatactaaagtgtctcccatcactcactcacacaacatcctgcaatgctcctgagaccagaaggtgctggcaggagagaaggagtgtgtgaaagcgccagcatttgaaagggacaggtgtgaaccctccaaacacgggaaacggctttcagcaattcctctccctgcgttattgatgaccagagcacaggcagcccgtgatcatttttgaatgcaggtgtatacaagggcagagagagatccatgaggagaaacagatgccagcagcttgtggactaggtccagtccaggaaaatgatccagcccagcacaggatcccaaaagtggccctgctttcctgtaaaacttccttgccaggaggaatcacagagaagtcacatggggcaaaaacaatcggaaaatattggttggtaatgataggaatcatatggtctcaagtaccacaaaagtcacctctatcagaacattattttccaaatgaagaaaattaggttctgaatcagtccttgactgggatagtggcagaaggggattcaaagccaggggaccagagtctctgaagcctaggtccactcattttccattacaacatcctgctgcccagggagaaagggcagagacctcttattaccaaagtgggactctggaggtttccccccagcagcaagcccggaaggcacaggaaaggccagaggtgatctgggttggctgggtggacagcggatctggggacccacagtgccattctcatctcacctctcagctcccctacaccaaccccaaagcccctgggaacatgtacagaactgtactagatacaaggaaccaacattccagagaatgaaccagagatcttacctcaaggatactgaggtctagcatgttcccaacatgacaactcccatgcctctgcacacagtggactatctgcaacagataagatgccatgagtgagcacccagcttgtccctgctcgcagcagggatggcaggcaacaggaaagggcttagcacagtagttaccagacagtaaacactcctaagcaaacacactatttcctcataaaagagaaaatagttaactctacagaggaagacagcggatggtctatggcagggtgagggtggccaacactgatcaatgtgtagttaatcagcaaaagattgaaaggagatcaaaaccaggtttacagcagtgtgccatggctgagtggcagtgactctgctggtcatcaaggggaatttaagcaacacacacagcctggttcccaacagcagggagcaggaagtgaaagctctaatcatgatataacacacacggcagcccccaatcccctggaggccccaggtgtgtgcagctttgagaaggaggagtgtaggaaagctcctgggacaggagggtgaagatgtggaccctccaaacacagcaacctttcccgcatttcctctgcctgcactaccaatgaccaggacacgggcagcccgtgatcacttacgaatgcaggcgcagaaaagagcaaaggggatccaggaacagaggccaaagtgagctgcctggagattgccaaagcgccaagcccaaaggacctgagcgctatccacttaatgcagtacaaagatctcatctgcccccatcaagaaagtcacagaagaccaatttctggttaaaaaaaaaaaaggcttaaattgttcattcatcccacaaatattgagtatctacaagtagccagacatcatgggttcaaaagcaagaaaaacgtgcaagatctccccacttacagagctttcgcagtttccctacattacagaaagtcaagctcaggagaatgaaagaacttagccaggctctcctctgcacccggctttgccatacagttctcggaattcatgaccatgccctccgctggggtcccccagaagggaatttgaagggtcccccaaagtgctcatgaccagcaccacttacccagggacatcctcacaccgcggacagtgggagcccctcagggagtgcagatcagggtgctgcaggaaaaatgggggcgctggctggtgcggaaccagcaaagccatccaagggagagctgtcatctgtctccaggatagccgcacagcccacgaggcctaggcagggaaaagcgtagggaaggggcttagtacaaggtcctggcaaaggagtctggaattcgcccctctggggccctgggagcgtcctccattt

SEQ ID NO: 1888260 - DNA, 4001 bp, Homo sapiens
gcagcagctgcttctgattcccaaagatttctaacatggtttgatttcccaaactttagcatgaatacgaatcacctggagaccatgttaagccagattgctggctccagatccaaaacttctgatgtagtaggttgggacagggctaagaacttgcacttcttacaagttcccaagtaatactgatggtacctggttctgggaccacagtttgagaaccactactcaaatgcttccctcataagagaatgagatggaagatcaactctgggtgaaatgttgagaattcactggattaggaagtcagggattgtgtgatactatccacacgtcggccaggcctggacttactatccataatcccagcactttgggaagccaaggtggaaggattgcttgagcccaggaattcaaaacgagcccaagcaacatggtgagactccgcctctacaaaaaatttctaaaaattagctgggtgcagcagcacgtacctgtggtcccagctactcaggaagctgaggtggaggatcacttgagcccaggtcgaggctgcagtgagccatcattgcaccactgcactccagcctgggtgacagaatgagaccctgcctcaaaaaaaaaaaaaaaaaaaaaaaatccataaatcacttcataacaaggatcgccaccaagtccagagaaaaccactagctaattgcctgcctccaaaatgcagtactcctcccacttcaacaaactatgccaatccacactaggatgactcagagcccaaggggagctctgtaagccccaccgtgattcacacagtggagtcgcagagttcgaggaaaagagggtgtcacatgtccctgtgggcctcagtggaagagcaagcaatgggaagcagcctctgcctcccctctagtgacctcaaagccttcgtccttgcggcctgaacaccagtgcattctctagagaagcacccaggattcataccttacaagcaccgcagctcagcctcttcttgaagacacgtcacctggggccactgggcacacaggacagaggtcagctgacaatcctgcaatgacaagaagccacacatatcacttcttataacacattccactatccaacatgttcaacaggaaaaagcgacctctcaatcggggtgggatgggctagacggcggctgcatcagtgacttccccttggtcctccctctctagctttattcctgatcttacaactccacccattcctccaggggcaacctgagaaccagtcatcctcaggggagccccaaaggccagcacaaaaggcagaggaattaagagctggaatggtggccagtgagtgacaccaatgcacacctcagagggtcgagagaacaggcgaaactcttgggtgggaagtgagggaagtgttttgcctctcagaacccggctgtgctccccttgcagcaatgagcactttctctttcttacgacaaacccttcaggaccccctattccaggccaatgacatgtaaagatgtaaagatgctaccctatcctgtccccaagttacacatacacacacacacacacacacacacacacacacacacacggggtcagccctgctcaccccaacctcaaagtctccctcatgtttatatgccaatattgcacttattcgaaactgtgctatccactgcgacacaccatgactcattacatatcacattcccttcctgatctacccctcagaacacagagcctggtttctgcaaagagaggtcaagctgagaaagacttaagcatgatgcccccccgcactgactttcatgtggcagccaagcaagcgccggactcctcaagggctggcaggagagcaacaggagttgtgtgaaagcttcagggttcggatgggatagggtggaccctccaaacacggggacaacctctttcagcgttcctctccctgcactatcaatgacctaggcacaggcagcctatgatcactttcggatgcaggagcagaaacagacaggagagccaggaagggcaggaggatggtgccagggcctgtgggatgacccaagtcagggacagtacaagactcctgcagctgccatctgtcctgtaaaatcccataaaacctaaccaccaaggggaatcaaaggggaaacacctctgacaaaagccctggaaaaatctggggactagagagcaggatcatggggtcacgtctgtaaaaatcaattatgccctacctttgttttctgtatcaggaaattgagattcaaaacaggtcagatggcccttggctggcatctgggaacttggctctcgggatgttcctagtcaacagtttactgatcagaaccgttcactggacacagtctctccgtgcaaataatgtggcacaggcacctgttttcctgaaagtctggaattttggtgcgtgctaggcaggtggtgtctacataaccagatcccagtaaacaccccgggcatggaggccctactgggcttccctgggcagaaacactgcacacaggctgaatgcattttcactgctgaggggagaatgggttccatgtgatttctgagagagggagggagcatgaggaagctggcacagggattcctccagactcaacctgcatcttttttcctgaatcatttggctgtgtacccctacaatgttgctaggttaaatcttaaccattgattacaactggaaagaaatccagccactttccattatgacatgctgctaatgcactgcaggaaaagcccccagcgctcgccccaggcagctccctgcaggggcctcctcctccacagcccctgaaggcacagaaggaggggccagctccaatccagctttcccagggaagaggagtctggatctgggaatccataggacatggctcctcttctcatcctcacctctccctacgtcaccaccaaagcaccagaaaaaaaggggacgtgactttacagggtgcaaaaagccaaaattccagagatggacaagaaaccttacctcgggccctgcggtctgccactctcctgcaacacctctcactaagcatctctacagtgttgcatagatgctgactaaaccgttcttctcacctgaacagccatgacttcttttaggaatgaaatagcagcttatctctaagaaaggggctagagaacttctaaggcagggatgatatccgcttcatctgtcaggccaactgttactaagttcaagaggatgctggggccatgatgatcttgggatgtgctgtttctccagcagcgtccagcaagcagctggggaggtcgtggggaagccgtgcagaggctgctgccgtaaatccctcagtgatcttctcccctgcctgtctctggtccttgattcctttcccacaagctggagggaaaatcctccccatacaagggaaatcctccccatacaaggctggagggaaatcctccccatacaaggccaaggccaacagaaatgagttacctcagaatcctgtgaaggggtggaaaacaccaaatctgctcccaccaatcccacacaggtgctgactcagtatttttctccaacaccccaaaatgtaatgaacccgatctccttacagtggagggactctccctttctcgtttttctttcttgagacagggtctcactctgttgcccaggctgagtgcagtggcatggtcatggctcactgcagccttgtcctcccgggctcaagagagcctcctgcctcagcctcctgagaagctaggactacaggggcatgcaccgccatgcctggctaattttttagttcttatagaggcggggttgcccaggctgccgtttttcctttgtcccacactgtcagaatactgaccatctggcagacataacaaagtagggaacaaaattcagacactgcccttgagaccacagcaaagagagccaggaaacaagtcaggcaacaatttccacaggttcagcttggtgcaggggctggataaggacgt

SEQ ID NO: 1888261 - DNA, 4001 bp, Homo sapiens
aggttgcagtgagcaaacacagttcactgcaacctctgtctcctgggcttaacttcagcctgggtgacagagggagaccctgtctcaaccaaaaaaaagaaaaagatagagaaagatcctgtcatttgccacaacatggatggacctggaggatattatgttaaatgaaataagctagacacagacaaacagtgcatatctcacttatgtgtgcaatgttaaaaaaaaaaaaaaaaggtcaagcatacaaagatagagaataaaatggtaattaccatgggcaggagctgaaggaaatagggagatgtaggccaaaggacaccaagtagcagatatacaggatgagtaagtctagagggctcacgcacaacataagggatttctgtgaagcaggtttcagctgctcctcacacacactaaaaacggtgactatgtgagataacagacatgctcatcggcttcaccatagtaaccactgtgctatctatatctgtcccattattctataacatcatgttgtaaactcaaatatagacaataaacattttaaaaacaggttgggtgtggtggctcacgcttgtaatcccagcactttgggaggctgtcccaattatttgtatcacataaggccaggacttcgagaccagcctggccaacatggtgaaaccccatctctactaaaaatacaaaaattagctgggcgtggtgatgcacatctttaatcccagctactcggaggctgaggcatgagaatcactgaacccaggaggcagaggctgcagtgagccgtgtttgcaccactgcactccagcctgggcaacagagcaagactgggtctcaaaaaaaaaaaaattaaaaaaaaaagaaaaaaaggatgccaaggcaagaaggcttttggagcaggccatgcctggcagtgatcagcacagacctgggatgggtaatgaacaggtggggtgggagagccccgcacctaccatctagtgtgtaagagctgcattcatacatctgactatacctatagcatattgtctcccccgattactactctagcccttgccaccttaatctaaggccagaaggaaaatccacctctggtagaccatggacgctcctcacagccaggactgaaggtggactgtaacagctggcttgttctaggacatttttaaccccagcactgctcaatgggataagccttgtcaccttacaacaatgtgtcttctcatttactgtttgtccaggtgctacatgtcagttaccaggcaccatgtgaaacaagacagaggcactgccctgaggaagctcacagcacagtgggcaggagaagcaaaccaacaattcccagacagtgtgaccagtgctgagaggtgggaaggagtgtgatggggaggcagagagagcttctggggggagctctaggaaggggtaaccactactgtggctccaaaactagctcagagacataaactcagtgtggcaggtccctgcttcactgtcctttgacaggagcctctgagtcccatgctaggcacaagggacactcaatgaaccatacagcaccagtgtatggtagatgcatgtaacaatagcttcttaggaaatgagggttgccatgtggaggttactgggggaaggtgctatataatctgcatgcattttacaagtggatgaggtgcccccatccagccccccaccactagactgctgactgccctcaagttccccagataaaccctgtttccttcactggctccaggtctcttctccggcctgttgaacctggtgccatccctaatgaggtaaacaggggtctggcacgacaaccaggtaccaggaggtaacatcactggtgagaataaaggcatgtacgaaagctccagagtttggaagggataggagtggacccttcaaacacggggaagcgctttcattgattcctctccctgcactatcaatgaccagggcaaaggcagcccacgatcactttcgaatacagggacaaaatagggcagtgagtgagttgagaggggaggcactgacagcagcttaggaagggcccaaactaagagacctggaaacaagtcagtgaccagatttgcagcctagaattgcagcagctgcttctgattcccaaagatttctaacatggtttgatttcccaaactttagcatgaatacgaatcacctggagaccatgttaagccagattgctggctccagatccaaaacttctgatgtagtaggttgggacagggctaagaacttgcacttcttacaagttcccaagtaatactgatggtacctggttctgggaccacagtttgagaaccactactcaaatgcttccctcataagagaatgagatggaagatcaactctgggtgaaatgttgagaattcactggattaggaagtcagggattgtgtgatactatccacacgtcggccaggcctggacttactatccataatcccagcactttgggaagccaaggtggaaggattgcttgagcccaggaattcaaaacgagcccaagcaacatggtgagactccgcctctacaaaaaatttctaaaaattagctgggtgcagcagcacgtacctgtggtcccagctactcaggaagctgaggtggaggatcacttgagcccaggtcgaggctgcagtgagccatcattgcaccactgcactccagcctgggtgacagaatgagaccctgcctcaaaaaaaaaaaaaaaaaaaaaaaatccataaatcacttcataacaaggatcgccaccaagtccagagaaaaccactagctaattgcctgcctccaaaatgcagtactcctcccacttcaacaaactatgccaatccacactaggatgactcagagcccaaggggagctctgtaagccccaccgtgattcacacagtggagtcgcagagttcgaggaaaagagggtgtcacatgtccctgtgggcctcagtggaagagcaagcaatgggaagcagcctctgcctcccctctagtgacctcaaagccttcgtccttgcggcctgaacaccagtgcattctctagagaagcacccaggattcataccttacaagcaccgcagctcagcctcttcttgaagacacgtcacctggggccactgggcacacaggacagaggtcagctgacaatcctgcaatgacaagaagccacacatatcacttcttataacacattccactatccaacatgttcaacaggaaaaagcgacctctcaatcggggtgggatgggctagacggcggctgcatcagtgacttccccttggtcctccctctctagctttattcctgatcttacaactccacccattcctccaggggcaacctgagaaccagtcatcctcaggggagccccaaaggccagcacaaaaggcagaggaattaagagctggaatggtggccagtgagtgacaccaatgcacacctcagagggtcgagagaacaggcgaaactcttgggtgggaagtgagggaagtgttttgcctctcagaacccggctgtgctccccttgcagcaatgagcactttctctttcttacgacaaacccttcaggaccccctattccaggccaatgacatgtaaagatgtaaagatgctaccctatcctgtccccaagttacacatacacacacacacacacacacacacacacacacacacacggggtcagccctgctcaccccaacctcaaagtctccctcatgtttatatgccaatattgcacttattcgaaactgtgctatccactgcgacacaccatgactcattacatatcacattcccttcctgatctacccctcagaacacagagcctggtttctgcaaagagaggtcaagctgagaaagacttaagcatgatgcccccccgcactgactttcatgtggcagccaagcaagcgccggactcctcaagggctggcaggagagcaacaggagttgtgtgaaagcttcagggttcgg

SEQ ID NO: 1888262 - DNA, 4001 bp, Homo sapiens
acagtctctccgtgcaaataatgtggcacaggcacctgttttcctgaaagtctggaattttggtgcgtgctaggcaggtggtgtctacataaccagatcccagtaaacaccccgggcatggaggccctactgggcttccctgggcagaaacactgcacacaggctgaatgcattttcactgctgaggggagaatgggttccatgtgatttctgagagagggagggagcatgaggaagctggcacagggattcctccagactcaacctgcatcttttttcctgaatcatttggctgtgtacccctacaatgttgctaggttaaatcttaaccattgattacaactggaaagaaatccagccactttccattatgacatgctgctaatgcactgcaggaaaagcccccagcgctcgccccaggcagctccctgcaggggcctcctcctccacagcccctgaaggcacagaaggaggggccagctccaatccagctttcccagggaagaggagtctggatctgggaatccataggacatggctcctcttctcatcctcacctctccctacgtcaccaccaaagcaccagaaaaaaaggggacgtgactttacagggtgcaaaaagccaaaattccagagatggacaagaaaccttacctcgggccctgcggtctgccactctcctgcaacacctctcactaagcatctctacagtgttgcatagatgctgactaaaccgttcttctcacctgaacagccatgacttcttttaggaatgaaatagcagcttatctctaagaaaggggctagagaacttctaaggcagggatgatatccgcttcatctgtcaggccaactgttactaagttcaagaggatgctggggccatgatgatcttgggatgtgctgtttctccagcagcgtccagcaagcagctggggaggtcgtggggaagccgtgcagaggctgctgccgtaaatccctcagtgatcttctcccctgcctgtctctggtccttgattcctttcccacaagctggagggaaaatcctccccatacaagggaaatcctccccatacaaggctggagggaaatcctccccatacaaggccaaggccaacagaaatgagttacctcagaatcctgtgaaggggtggaaaacaccaaatctgctcccaccaatcccacacaggtgctgactcagtatttttctccaacaccccaaaatgtaatgaacccgatctccttacagtggagggactctccctttctcgtttttctttcttgagacagggtctcactctgttgcccaggctgagtgcagtggcatggtcatggctcactgcagccttgtcctcccgggctcaagagagcctcctgcctcagcctcctgagaagctaggactacaggggcatgcaccgccatgcctggctaattttttagttcttatagaggcggggttgcccaggctgccgtttttcctttgtcccacactgtcagaatactgaccatctggcagacataacaaagtagggaacaaaattcagacactgcccttgagaccacagcaaagagagccaggaaacaagtcaggcaacaatttccacaggttcagcttggtgcaggggctggataaggacgtggaaggagaggtgtggaggcagagaaagcttccgggaggaaggagcagggcagccctatctcagctccacacccagcccttctgctccatgaggccaaacccatcaccccacacccttccctcatgtctcacaataactgccctgggccagggagaagagcaacacaacccactagatgatgccaggcaccaggagccatctaagacgtggtgggagggaggaggtgtgggaaagctccagggtttggaagagacaggagtggaccctccaaacacggggaagtgctctcggcagttcctctccctgcactaccaatgaccagggcacgggcagctcatgatcactttcgaatgcaggggcagaaagggcagagggcaagcccagaaaggaggccaatgctggcattccgggcaatggtctcacctggaacagaacagctgacagggcaatgagcagacttacagcctaagattacagatgctgcttctgactcccagagatcacttaccactccctgccagaagcagaaaggaaggcaaacatgggcagaaatattgagaatcctggggctcttctcaaagactgggctggccgggtgcagtggctcacgcctgtaatcccagcactttgggaggctgaggcaggtggatcatctgaggtcaggagcttgagaccagcctgtccaacatggtgaaaccccatctctactaaagatacaaaaaaacattagccaggcatggtggcaggcacctgtaatcccagctactcgggaggatgaggcaggagaatcatttgaacccgggaagtggaggttgcagtgagtcaggatcacgccattgcactccagcctgggcaacagagactccgtctcaaaagaaaataaaaataaaaataaaaaaataggccgggcacagtggctcacacctgtaatcacagcactttgggaggccaaggcgggtggattgccagaggtcaggagttcgcgatcagcctggccaacaccatctctactaaaaatagaaaaaattagctggacatggtggcgggcacctgtaatcccagctactcaggagactgaggcagggagaatcacttgaacccgggaggcagaggttgcagtgagctgagatcatgccattgcactctagcctgggcgacagagcaagactctgtctcaaaaaataaataaataaataaataacagactgggctggagggtatcaatattggctatctgttccactgaggcttacataagactgctcagccgggcactgggtatgaatccaggcttgaatctgaaacgcagcccctctgtccattccaacacatggttttcctctcaacatgacagggtctttgtcagggactctcagagccccaatcaagctcagggagcaccttcttggcagcagccccacgaaggcagaagagggcccaggcctgtccctgcctgctgaaggagcaaagacaggagcaaagggaagcagccttcaccggtgtcctcactccccactcctcagcacccaaccacctctggcctcacaacctgcagagaacttgagctctagaggactgagcaggaccccacttacctgggacctcaggatccatgctctcccagaggacgcctctcacacacatggggcggcagtcatgtgacactcctgcagggcacaagaagccaagatgtgactgatgcacttggcactgcttatggcaagtccaggaaaccacgatattcacccacagaaaacacaccaggggaatcagtgtctcaggaggtgaatgtactgacagcttgtctagcccatcctggtcactgacacagtcccctgaggtcatcccgtctgaaatggacaatggtgcctctacacaagaggaaaaccttgtaacttttcctttattaccaataaccaagacacaagcagcctgtaatcactttgcacacaggggcagaaagagatccagggcttgttgaaattggagaccaacgtcagaagcctgaaaaatggcctgagccaggacagtggcacagcagagcacaggatgaagcagcttccatcttgtcccacataaacggaacctgccccaaccaggagaagtaaaggaaagaccctccagatgagaaagctggcagacttcttcggacgtggaagatagggacggtgtgatcctaagaaaaatcacctcagcgtactcctgttttccagacgagaaaactgaagatcacaaaaagaaccaaagctagggagtagtggtaaagcgtttgggaccaaggtacaggtaggtttgatgccaaagccctccagcttttgagtcagatattccaagacacaacaatgataagggatccctaa

SEQ ID NO: 1888263 - DNA, 4001 bp, Homo sapiens
gaacaccatggtccacctgcttcctggcagggtggagatacctctcatgggcctctctgcaccaatcagcctcctctgccagaatcaagaagccctggatgagctatctagacatcacctggtcaaacccgttctggaaaggacaaggagagtactggcacagaagccaccaggtggtaaacatttcctaaaagttggctagtgttaacagtggtctacggtctcagcaacacgaagagttcatctagagaagaaccagtcatcagggacagcttaagtctcatcttatgcacatattgttgaatttgtgatcctgaagcagtacactgaaggggactctgaacctaggacaggttctggtgtggcacaccagcgtggcgcagtctagcatacacagtaagggctatgatgggcaggatggcccatctgtcatctgcgggtcagggctgattacacatctcactcttctatcagccatgcctagctatacctctggctttggtcgctgacatcacaatgacaatcctgtggggaaattaatcctggtggcccacggacaagaccgtcaaagagaacaccatgggatgaccactgggccagtgggaaatagctctgaccacccccacacaggctgccttgctcaaaactacttccctgacatgcatcaatgtgctaagccctgtcaccttacaactgaagtcttttttgttgttgttgtttaaagacaaggtctggctctgcagcccaggctggaatgcagtagcacaatctcggctcactgcaacctccacctcctggcgcatgccaccacacctggctagtgtgtgtgtgttgtagacaggtttttgccatattgcccaggttggtcttaaactcctgggctcaagcgatccacccacctcagtctcccaaagtgctaggattacaggtgtgagccaccacgaccagccacagttgtctttttccagctcctgttttttgttttttgttagggacatagtctcactctgtcgcctaggctggagtgcaggggcatgatcttggctcactgcaacctccacctcccaggttcaagcgattctggtgtgcctcagcctcctgagtagctggaattataggcgtgtgccaccacacctaggtaatttttgtattttttagtagagatggggtttcaccatgttggccaggatggtcttgaactcctggcctcaagtgatccacactccttggcctctcagagtgctgggattacaggtgtgagccattgcacccggcccatctcctgtttttcatttgttccataactgctgaaaatcaaccatctaccaagcaccaggtaagtcaagagacaggactcagatactgagacaggcgaagtggctcacacctgtaattccagcactttggaagactgagggaaaatcacttgaagccaggagttcaggaccagcctgggcaacatagcgagaccctgtctgtcccagctatttgggaggctgaggtgcgaggatcacttgagtacaggagttcaagctatgatcacgccactgcacactgcacctcagcctggacaacagagtgagatcctgtctctaaaaaaatacaataaaatattaaacaaaactcaagacactgtcctcaaggtcacaatagagagaggcaaagacaatcaagccagtaattgccacagggtgtgactagtgggggctgcagctgtggtttcaccaccaatcctgaggcagggactcacccctcatagaccctggtgaacgcctcatggaaccctgcactgagccttgcacagggagcactcactaataagacaccaagtgccaggaggcatttgaaagatggtgagaaggaggtgtgagaaagctccagagtttgaaagggacaggagcggaccctccaaacacggggaagcactttccgcgatttctctccctgcactatcaatgaccagggcacaggcagcccacgatcactttcgaatacaggtgcaaaaaagggcaggtgagcccacgtcagcgtgttagctgccagatctccagagggaggctcaccccccagggaagagaagggtacccaggaccctgagagccatcatcacttcacaggcagattccatctgtccccacccagagtccacaggaaaacagacttctggtaaaaatgcctcggctgtacattcagcccaccagttctgagtatctacacgtggacaggcaccgtgggttcaaaatcaagaaaaacagccaaggcctctgccctcagagagcctttgcagtttccctactttacagaaagtcaacctcaggggaatgaaggaacttagctagcatgtgaccccaagcgcagcccgtctcctaagtcacgctttgctctgcacccgctttgccagacagttctcagaactcagaactggctgagctcattgactgtcccctctactgcgtcccacagaagggtccttccccaaggtgcgcagaagcagcggcacttacccaggggcattctcaccccgcggacagtggaagcccctcagggggtgcagatcagagtgctgcaggagagagagggcgctggctggtgcgaagccgtccgaggtgcagcacagcccacaaggcctaggcaaggaaaaagcacggggagggggctttagtacaaggcccggggacagaagtccagactctgccccactggagtgctggcagcgtcttccatttaaaccacagctaactggtctgtaaaatgaaggttctaacacctacttttaaaagttattgaggggaaaacgagttaacggtctcaaggacgtggcacaatgactggcactttgtaggcaacagtcaagtggctttggaggcttccaatgccaggagtcgggggcgggcagctaaagtcgccgagccctgtttcccgccatccaggggcactaagcctccccgcagagtagctgcgcggacagggggtctgacgaccgcacgtggcccgctcagcactgccgcggccaagggcgcgactcacctgccagtgtctttcccgaggacacgcgaatcctggggggctcactccggcaaagaggacgagacactgcaccaaggacagggcctgacctctctggccgccttccccggggcctcagtttcccccgatggtgagagtggagccgaccatgcgccctgctgtggactcacccggcgccctggcgtcgagtggcggcggagacctgacagacagcgtgggaaaaatcaagatgtctgcagatttcgagagatggggtgcggtggcgtgcgatggcgaaggacggcgagggacggcgaaggactgaggccacacgacaaggaagctacgctcgtttcgcgccggcggaaatacagacgagagcgcgagctgcggcctagagcggtaggaaccgacgcgagcagtcctgcagcgtcccctggcggagcggaggctcaacgccagactctggaggacttgggataattttcgaaaactatctggaagtttagaagtaaacttctcccacttgctttgcttttctgtttgttctgaagatgttccttggtcactgattcattattaatctgtaggaatggccaattttccatgataggagctgttactacgatgaggggactgtgcttagtttggacttctttctgcaagggtccaaaggcatctgtctttgattcaccactgtactcagtacctagttcagtgactagcacagttgaatgaatgaattctacccccgccccattcctttttttctgaacaatgtcagaccgagatgactgagtcatggcctgagactggaatgtgagcgtgagaagatgagccaagagagatgcacagcgggtaactgctttgctaaactccagcctcaaagtacacgggatggagggtggaaagagtctctgaagcagaagagacctgaccagactggcatctgaggaacctgatcagatttgcacagtgacagagactgtagacag

SEQ ID NO: 1888264 - DNA, 4001 bp, Homo sapiens
ggcagaaagacagctcaagagacctctcagggcccctcccatagatgtccacctcgccgtgctgggagccaaggatcaccccagcagccatccctccatgctgtcattacttgcctacacatctgtctccctggtgggactagacactcttgctcatcccagactcaaagaccttctcatgctgctacccctccctggaatacctttctactgcccatcacatcccaatccttgaaagaccttctcatgttgctacccctccctggaatacctttctactgcccatcacatcccactccttgaaagacctgcccaggcccaccacctccaaaaggctgcttctctttgaaaatcttaaggcagtgactgtatgccacccatcatcacacttattcattaaaaataattcacacaggctttctccaccatctagtactcaaaccttgacactgaaagagactgctctctgataacaggaggctaagctgaaaaaagccatactaaagtgtctcccatcactcactcacacaacatcctgcaatgctcctgagaccagaaggtgctggcaggagagaaggagtgtgtgaaagcgccagcatttgaaagggacaggtgtgaaccctccaaacacgggaaacggctttcagcaattcctctccctgcgttattgatgaccagagcacaggcagcccgtgatcatttttgaatgcaggtgtatacaagggcagagagagatccatgaggagaaacagatgccagcagcttgtggactaggtccagtccaggaaaatgatccagcccagcacaggatcccaaaagtggccctgctttcctgtaaaacttccttgccaggaggaatcacagagaagtcacatggggcaaaaacaatcggaaaatattggttggtaatgataggaatcatatggtctcaagtaccacaaaagtcacctctatcagaacattattttccaaatgaagaaaattaggttctgaatcagtccttgactgggatagtggcagaaggggattcaaagccaggggaccagagtctctgaagcctaggtccactcattttccattacaacatcctgctgcccagggagaaagggcagagacctcttattaccaaagtgggactctggaggtttccccccagcagcaagcccggaaggcacaggaaaggccagaggtgatctgggttggctgggtggacagcggatctggggacccacagtgccattctcatctcacctctcagctcccctacaccaaccccaaagcccctgggaacatgtacagaactgtactagatacaaggaaccaacattccagagaatgaaccagagatcttacctcaaggatactgaggtctagcatgttcccaacatgacaactcccatgcctctgcacacagtggactatctgcaacagataagatgccatgagtgagcacccagcttgtccctgctcgcagcagggatggcaggcaacaggaaagggcttagcacagtagttaccagacagtaaacactcctaagcaaacacactatttcctcataaaagagaaaatagttaactctacagaggaagacagcggatggtctatggcagggtgagggtggccaacactgatcaatgtgtagttaatcagcaaaagattgaaaggagatcaaaaccaggtttacagcagtgtgccatggctgagtggcagtgactctgctggtcatcaaggggaatttaagcaacacacacagcctggttcccaacagcagggagcaggaagtgaaagctctaatcatgatataacacacacggcagcccccaatcccctggaggccccaggtgtgtgcagctttgagaaggaggagtgtaggaaagctcctgggacaggagggtgaagatgtggaccctccaaacacagcaacctttcccgcatttcctctgcctgcactaccaatgaccaggacacgggcagcccgtgatcacttacgaatgcaggcgcagaaaagagcaaaggggatccaggaacagaggccaaagtgagctgcctggagattgccaaagcgccaagcccaaaggacctgagcgctatccacttaatgcagtacaaagatctcatctgcccccatcaagaaagtcacagaagaccaatttctggttaaaaaaaaaaaaggcttaaattgttcattcatcccacaaatattgagtatctacaagtagccagacatcatgggttcaaaagcaagaaaaacgtgcaagatctccccacttacagagctttcgcagtttccctacattacagaaagtcaagctcaggagaatgaaagaacttagccaggctctcctctgcacccggctttgccatacagttctcggaattcatgaccatgccctccgctggggtcccccagaagggaatttgaagggtcccccaaagtgctcatgaccagcaccacttacccagggacatcctcacaccgcggacagtgggagcccctcagggagtgcagatcagggtgctgcaggaaaaatgggggcgctggctggtgcggaaccagcaaagccatccaagggagagctgtcatctgtctccaggatagccgcacagcccacgaggcctaggcagggaaaagcgtagggaaggggcttagtacaaggtcctggcaaaggagtctggaattcgcccctctggggccctgggagcgtcctccatttaaacctcagccaactggtctgtaaaatggaggttttacagctactttttaaaggttattgaggagaaaatgagttcacggttccaaggacgtggcacaatgaccgacactttgtaggcaaccgaaaagcagctttgggggcttccaaagtcaggagtcggagatcggggtcgggggagtaaaagtcgcgaggtctctagccccctcagcccgcgtgcaaggccccgggcacagcgttgccaagccgtttctcaagggggcactaagcctccccgcagagaggctgtgccgacctaggggggtttgacgtctgcatggggtcggcttagcccagcgaaggccgagggcgcggctcacccgccagtctctttcccgaggacacgcgaaacccgaggggcccaccccggcagaggggacggaccactgcaccagcggctgggcctgacgtccagccggctcttcccactcccctcggggcctcagtttccccttttgtcggggaggaggtacacagcaccggccttgggaggccaccaggggttcttgggaagaccactcctcgggccctgcccctcattgactcatccggagcgccaggacggatggcggcgggtacaggggtaaccgcgcggaggaggctgaggggcaggccgcagccacaagacgctctctctagtgctcagcgcccgcggaaatacggctgggggcgcggctgcagcctagagcggcgcttccgccgggcccctgcccaagcagacgtgcctgcagcgccccctgggaggacggagctgcaattctgtccctccactaacgccctttatccaagcgttcatctaatggagcatcccttcatgagttcactcacccatccatttacccagaaaatatttgtgaaacatcagcttccatttgaggacacagtgagaagacagccatcagtctataaaccaggaagtgggccctcaccgcttcctagtttaccaaatctactggtgcctttgatcttggacttttagcctccagaactgtgagaaataaatttctgttgtttataagccacccagttcatgatggcactttgttatggcagcccagacaggggtcggctggcaaataggtcagcttggaccatggccagcttggtgtccacacaccctcctctccaagcaaaaaaatagaaaaaaatccacttcaaacatgcatcctttctagcattggcaagagtgtgtctgcagtcttgttttgtttttgacgtcagcatacaaataaagggtcagccattgagag

SEQ ID NO: 1888265 - DNA, 4001 bp, Homo sapiens
ggaaacttggtccctttgctgggccctgggaatcactcagacaccaggactggccatcacccccatagcagaggcctgtataggtcagggagccctggtcagccatcaccgtgatcccccaacaagcagtgggcaccagaagtggcacctgattgtgggcaggtgccctcactggtacctgaacagggccttttcagccccaaggatctgcactgtggatgctggatacttggccaggttggtgaggctgccagcatgtgcgatgagacgtgcacctacctggagagagagtcaaggaagcagtcagagaaatgaactgctgacctgcccagttgcacgacagccctgctccccacctccccatcaagcacaactagggaagacatggtgggtcacgaaatacagcagtgcaggtgcacatggcaacagtccttattctcccatttttgagtcccctgtgacgcaccgcttccccaattagggctgacaggctgggggctacttggctcatcttggagcgcaggtaagtgtgtaggctctggcggtattcagataaagacaccacacgactggagaagctctcgatgtttatcaagtcaatggcagatatgtccatgcctaggaaaaaccaagtgtgaatgcaagaggccagctatttagagccccataccttatgcaggttgccaggctctgcactgacccatggaggaccgtgaggcatccagaatagccttagccttggccccatccattgtcagctcctccagcttctccagcttgtcctcattcagttcccttcggtttccaataaactgggcaagacggcagtatgtggcattgtcgttgatgatcttcaccagctccggaaagtgatacccgtaccactccctgcaaagagccacagtcactccctggcccagctgcttcatcaaaaaccatagagctacagccttgccttctccacacctactctgcctggaggaaatgggacaaagatccaaatcttcctcaattctatgttcccccattcacaatacagaccaggcacagggcctgagctgaggtgtatatggggtaggtttactctacctcctctttctatacagtcagtgtaagaacacagcctgtggtaagcaccaggaggcctacacccagccccagcccacatggttctacccacaggatggtcagtcctcatcaagactcaaaattaactgaactacagaccaaaggctccagtattatgggtggcccctgcactttacctgacacgcatagagaaggtattgatgtccttatccagctggtccaggaggctaatggactggatgatcatattgtccacccggttcacattaaacttaactttggcacgggaatagctgtgtcccagccccagctgtgctttacaagctgacagatcggtcagacccttcaccagattgtggaagtgcagacgaactcctaagaagagggcaagacggtgagcaacaaggggctctgagctagctcccgcacccacgggcaccagcccagcctgaaggccttcccagaaatcacaacaagcaaccaagtttccagaacctcctcccccaaaatgtccaggataacaggaatataacagatgatggtctcacctcgcaggatctcagctatgactcctccagtctggcagttgtaccctaactcctcctgtattgcggcaccaatcttgggatccccaactcccaagagtactttcttctttttggacggcaggtgggtctccaagagcaggcggaggtcctcatgaacaacccctcaggggaaagaacacagttcccactaacaggctgaaggacgatcaactctaacatccctcagctgactaccctggtcccaccgagcacgctgggatggcatacctagatccctccccatcaggcattgctcagagacatggagacatcagtgattgcactcaggggattgacagatttgattcgcaagtcatcactgcaaagcctggcccagccatgggaacaactgcattcaggtctgatagcacaagtgggcaataaataatagcttgtaacacaccctcgagtatttcgtagaatttgccttctggaaccaaacctttttttctcagcctgtgtttacccaactgccctttccaatcgaacagaaagcagagaaccagacacttgattgtgtttaggcaaaacctcaggcacaagtaggtgttaagccgaccccctttaagaaacccccctttgtcggccgggcaccgtcgctcgcgcctgcaacctcagcaccttgggaggtcgaggcgggcggatcacgaggtcaggagatggagactagcctggccaacatggtgaaaccccgtctctaccaaaaatacaaaattagccgggtgtggtggctggcacaggcctgtaatcccagttactcgggaggctgaggcaggagaatcgcctgaaccagggaggcagaggttgcagtgagcccagatcttgccactgcactccagcctgggggacagactccatctcaaaaaaaataaaaataaaaaatagtttgtcactacagtgcccacaaggaaacgttaacacacattccacatcgtctgcttaaacagtttggtctagcacagttcccagaccttgagctctgtgaagacaattatttcaaattacacattgtatggctcaaatactgcctcacgcctatcagactcagagccagccaaggacggcaaatactatcacaagctgcccgagaggataccgaaaggaaccacatctctctgtgacacttggcggtggccgacttaccttcagacacggcgttggcattttccaaggcaacctgggatgaggcaaagggacaaaaggccaccagacgaacgatgctgtggaatttgcccaggttgagcacagactcctccacctggggggagaaagaggctaagtggtttccttccctccctcctgcctctgcggcgcagtcaagcagcggttctcagccttggaagctcttaaaatatgctgatacctgggccccacatcccagcttctgctttaatcgttcgggggcggcgtccgggaggcttatttctaattgctagagcgattctacccatgggtcaaggtaaagacccccggatctagagctttccaggcccgtccccccgccccgaaccgctcggccggccacgtgggagcgcgctgtgcatgctgggacccgcgcgatgagggtctgcggggccgccaaaggagcccacggatctcacccacctgcggctgcagcagactgatctcctccacttccttcagcgccagcagcgcgtagccgaccgcgtgctcaaacagcacgtgcaacagcacctggaacgggagccggggcgcgagcgtcaacgcaacctcagcgtctgccggaacccgttcccagggcaggcgcaggcgcaggcgcaggcccaggcccaggcccaggccctgtctgcggcccgaacgcaggccgaaacccccaccgtcgcgtcgcccgcgccccgcaaccactcctcaccatggcgccagctcccgggttcggctcgcaatgcggctagcgcgctccggcgcgcggaaccaggctccagaggccacgcccccgcccccccgaccaatcggaggccggggacgacaccatctccggcctttggaggggccgcccagggtggtatcgcccggagcgcgggctgggtggtgccgagcgcgggcgagcgggccttttccggcctctgcagctgcgcgggcgggcgtggttgccggggacgcgcggcccccggtcgggcactgcaggcggcgaaacgacttgggaaggccctttcggggtaatagtccggttcctgatgttcttgtcatatgagttacgggcagcagagctgggtgaagtcggggcgggaggtccgcgtggggcgcggcgtccatcccagacagagaccgctgcctagccggcttcccgcttcgtccgtggcctcg

SEQ ID NO: 1888266 - DNA, 4001 bp, Homo sapiens
atgttttttctgcatctgttgagaagatcctatggcttttttcttccattaatgtggtaagtaccactgattgcatttacaattatcttccccctacacagtaactttacaacagtgttcaccttatttttgtacccttagagcttgatgcactaagtactagagtgctgctcagtgaacacaggctttgggtggaagaactcatgaagataccacaattcaaaagttacgttaggttatatgttacgtgtgtgaccctggcagaaagttatgccaaaattgttcctctcccagcagaattttcatttttagcatttgcttcatggagaagctatctagacaagtgccttcccaagaggatattatgggtactgatttcaacaaaactgatctttgaatctgataagtgaaaatgttcaattttgtaagtatcttagtgtatgaggatgtacagatgcaaatgggtagtaaaacattttatagggaagaaggtaagatcagggttaattttttccaaggcaacccttcttgactctattaagcacccaatatatcaaagatttttctaaaaataaagatccataggtgcaattataatgttctcttaagagtttattataaaccagtttcataggccacaaggagataaaaggactatgtacagccttacgggaaacaggcagggagctgaggagggccaagatgagtctagggccttggtgggcgcattcccgggggagggggccctgtaagggaaaccagacaatcccatgagactccacgaacaacagcataagaaacaaacaggtctgtggtaacgtggccctgaggaatcgagcccacgcctctgcggagctacttccatactctgtggccaagggtcaaagaaggcctgaagtaagagtaagaagtttagtcagtgcctgatctgcaacttgaatccccaaccctgccccagcctcccacgccctgcagtaatcgagtgaggagaggggtatacatggcatatgtgctaactagggactactctgaggctgactgggttcctatgtctataaaaacccatagaggaataatccagactagagaaacaggggtcaccaagtttgcccatgggttatcttatagggaaagaacactgggcttggagtccaaactccctgggggcctattttctcatccatgtggggactgatctcagaatttctccaactgaagttaaagagaaatccataatagtacagcaaagcccagagccccctcttaattactaggcactgtcaaaccaaagagcataagacaatctcataacttctgttagggatcctcagaatgcattatttcattgtgtcctgaggccgctgccttagatattgagaaacaccctgggtgcatggctgctctaacttttctaagaggggaggtaagcccaatttaagaaatgttccctcttctctttcctttctggatttccctagatttaaggcttgaaagcccatgggatatgatctaaatgcaatcttccctccatttcctatcccactaggctctagggaaagaagccaaagtcaccactgcaggcacttacctcgcatcccagggggaggaggccgcattcccggagggggcatgcccattggagtccctcttccaggggggatccccattgggggacccataggaggtctcataccaggaggtgggcccatcatgcctgcaagagaaaagccccaagaatatagctcaagtgtctatcttgaaaaggtagcaaaaaaactacaaagctttccaccaagttctgagatagatggaccattccaccctctcagcagctcccagaaaactgacatttgagcctaacacccagggctcccaatggctcttgtccacctagtctcatcagtcagccacgctggatctcagagtaatcctgcttaattatacaaactcatcatcagcttcagtcaaggttatatctcatcattaatccagctaaggcatcttctatcaattagcactggtctccttatgggctcctcacctggagggggtgctcctcggcccataggtgggggaggacccccacggccaggtgggtactgggttggagccccggcaatactggctgtggcagcagctgcagcggctgcaacagtacctcttccttgtggggtcatcacctaagaggacataagaagaaagagttagaagagtacagtacaatgcagcttcccactctcctccccaacttggggaaggacagtgggaaataacagacaccaaatcccttaatgctacaactctcagcaccagacttcccatccaaaaccacatgtcgggaaagatcaagcttgaatgcccaactcccatcttctagacctgaatgtaagcatgtccaatccaagtgagagaaggcaactgcattttcaaatatgactcatgatttcaaatgctgtcatggaaatattttccttaaatacagttggctaattcgtacatctctttaatagcatcaacataatttacaatggcaacttatccttttcacttgcttctagggccatgtataaaccacagtgaaacactgatagtctgacaatcacaggttggtcactctggacccttttaaaactatggaccctcccctttatcctttattttagccaccaggaggtggtaccctttccccaactcctcacctgttgggatggcccgccaaccccacggactggcccagcaagtcctgcaggagcctggggcatgggaaccccagctgggattcctctgccagcagccctgccgatccctgggcccccggcagctccagcaagtggaactcgagcaataccagtctgaaaaataaacaaatatgctctgatgcccagtgatctgaagatcagaagtatactttggaatatcattgccaagagagcccctcgaaatagcttataaatactatcgaaatagcttataaatactacctctccatgtgtgccaacaccattcttcctccatccaagactatgagttatccctgaagcagggtagaacttaagagtaagtctagagaaacatgccacaactcaaccacctatatgcactcctgtgaaagttaaaccaagagcaaagggccagggttccactcagggttcagcaggcaaggcattaaagggacatgagatccattcccagctgattctaatccgctaggtgacaatggacaaataatcccacaatcccgggctgagttgccttatctgcaaatgacatggttatggtacaactggttgtgatcacaaaggtttatgatgggttatgttagaccagccaattctactggaagtaggtactaagagatttgaatatgtacatggactttgaaccaagatatgctaacatcccttgcagacatttttaactggaaaaggcaaaaacgtaaaaatctccaaaaaagaaaatgattaggataaactactctgtactcatttgagaaaatctcagtcattaacttgactttaaaagtgttgagcaactagaaaaatgttaacattaagtgaaaacacagaacaacataatatatgcccactatgtgttaagtacaaaaaaatccagataatatatgtggatttttaaaaagttaaaaggattattctcttttgattaaaataacgtcttggcagggcgtggtggctcacatctgtaatccccgctactcgggaggctgaggcaggagaatcacttgaacccgggaggcagaggttgcaataagccaagatcgtgccactgcactccagcctggcgacagagcgagactccatctaaaaatctaaaaaaaaaaaaaaaaaaaacccttcaaatgaaaaagggaaagggaaaacaaatttgactaggtctctaaagcctgctctatttctatgtgtagcttggtgtttacagaatcaagactgtctgagatcaaatgtcagtttcaccacttagtggctgtggcaccttgggcaagt

SEQ ID NO: 1888267 - DNA, 4001 bp, Homo sapiens
ttattcatccccaagcaaacgtatggtggtgttgtggtggaccattactgaatactctgccaagttacttggcgtggcacttgagctctaatccaattggctatctccctttcaccctggtatttcatccagaaaacatacataaaaacagaacatcataaaacaatggatgtccctcgtgactctcatgtttatatagatgccattggaatcccacgaggagtgccagatagatttaaggcccaaaatcaaatagctgcaagtttgaatccatgttgttctggtggtcaactctaaataaaaatgtagattgggccgggagtggtggcacacgcctgtaatcccagcatgttaggaggctgaggcgggtggatcacaagatcaggagtttgagaccagcctgaccaacatggtgacagcccccagctactcaggaggctgaaggagagtaggttgaacccaggaggtggaagttgcagtgaaccattgcaccattgcactccagcctgggcgacagagtgagactccatctcaaaaaaaacacaaaaaatgtaacccagcaacgattcattaattatactagggatgctattaagggaacagtttaacaattagggcccaccagtcaaacggcctgagaaaatacaatagcattagacatgatactagcggagaaaggtgtagtttgtgtcatgattggaacccagtgttgtactttcatccctaataatactgctcccgatggaaccataacaaaggcccaaggacttactgctttatccaatgagctagctagaaattctggaataaatgaccccttcacgattttaatggaaaaatagttccgcaaatggaaaggacttacgtcctcaatctcctgccatcagaataggtttgctcattcttgtaggatgctgtatcataccctgtatctgaggattaatacaaaagcttattttaacagctctcacccaccaaaatcttcctcaatcctccctcgcatcattcagttaagcttctaatttcagaggaccaagaggaacaaaatcaagacacgctaaaacaagtctgaagagaaataattataaaaatcaaaagggggaaatcgttagatacaatggatttctcttcaaagttttaacttccttgttctttgttcttaaggtcaacttcctcataccttcctgctccgagttacccgttctataaacaacttctccggccaatctcaacctgtaacctgttccctatttggaaaagtccccctcactcctagcaaccagctctgtaaacaagtttcctgcccttcccacagctgtaacccacatgcctcctgtttaaaatagccaatcaggactagtttagattgcgctgtcgactccagccaatggggataggacacagaagcagggactacttgttaggaataaaaaccctttctctcttttgttaggtgtgctcttgccaggaatgccagcagcagcaccctacggcagaagtaaatttgccttgctgagaaatcttttgttcaagtgctcgttttctttggaactccaagctcttatttccaacaaagacctagtaataccaacaggccaatgtcagtcctaatgacttattctcccagttttatacccaacttggaaatgggtcctgaggttaggcccagttggacaaattttgcggtggggtttggcagatagaaagcagaaacctcacctgttacaaggcagactgaatcaagccaagatcaacacacactggtacacgtggctcccaacctatagaaagttaacaggtcaaaagaagccatctgaatgctggaaaaaatagagaaagcccagttcccatgaacaagcaatagtctctgataaagataagcagaaaacaaagataggagttattactggggccaatgcatcagacaaaactggccaatagtgtagagatcaacagggtcgatctgatggggaaagaagctgtatcatcagctgcaaaggccacatttgagtcgtacaagaagtagggtgacaaacccacactgaaaagcagctactaccccctccagagcctgtgtctactcagccagggaagacgtgttggcaccacttaccaattttatatgtatatatatattctacttccaacacccgcattcatcctggttcaatcaaagcctggttttggccaacaataaacctgaaatgaaaaaacagaaaaatgagctcccatcagctagatgcccaggggagctgggacaaaggagctgctcaagctggcatatcagacagaaactggcttagaaaagttagatcaacatagtcgatctgtcggggaaaaaagctaagtcatcatatatgccagcaggaagttcttgagtgaggagtaagatttgaaagccatgaggagtaagatttggttggtatgcttcatatttgcaaatttgcattcggtgtttgagcacttctgtgttgtatcctgtagctggcaataacttggtagccaaaccaaacacccctgtcttcagtgcttacactctgagtacaggcccatgatagaagccagtgtggctggaagagttgaggaagtagttggcatttactgagttgggaagtgaacaagtaccaagagattgcattttaacacaagttaccacaagttacctgacaaaagaacaatctggaacaataagcttcacatgtgttcccatgaagcccagactttgtaaacgcctcactcctggactctagcaaaaatattagttatgtagtcgggcactggtttgagtggctagttcaacagaaaaacacatttggctttccaaaatatgtcaataaatcatccctccacttggaaatttaagcgccccaacacacaggaagaatggaatccaaaaatatgtttaagtggcattaaaatgttaaacgcctcttcactaacaaggttctttcacttcaggcatttctcttaaacctgtttcttcaccagaaacctagttccaatatttgaactgtgagaataaaacattcagaacatgtttttcttttttttttttttttgagacggagtctggctctgttgccccgactgtagggcagtggcgcaatctcaactcactacaacctccgccgcccgggttcgggcaattctcctgcctcagccttgtgagttgctgggattacaggcgcgtaccaccacgcccagctaatttctgtatttttaatagagtcagggtttcaccatgttggccaggctggtctccaaatcttgacctcaggtgacccatctgccttggcctccccaagtgctggggttacaggcgtcagccacagcgcccggccgtcagaacacttttttaaatacctaataaatgctcgatagaaagtgctttgttaaatcccacgttttcctagaaaactaaagcttctcaaagcacgtgttttctacagtagacccataggagacaaagacttactcgtcaggagatcgaaggttgtagatgtctgcacgtggcttccttggaggtccagtggtgactccctcttccaaaatccattctgtacccgctggctgctctaacctgtgaaccaacaaataaagggcgttaaccgccatcttcccacggtcagaaacgaacaaggccgggccttttgaggccgatgtatcagaactaactggcaaaatataagacgtcagcattgtcgatctgatggggaaaaaagtgaagtcatcatttacaccagccaagggcttctcaggcccgtgcagaaggcagtggcttttccagctccagaaactcatttctcccacgcccttaaggcctatttggggtcagagacggagaagccacgagaaggagattagggctggccgcagagacgacggcacaaagaagggaagggaggaccagaggtctccaacgaagaacatggagtttccactcaccacacacaaaacgggaacttacgggcaggacaatagcgtatgaagcctgactgcaa

SEQ ID NO: 1888268 - DNA, 4001 bp, Homo sapiens
ggatcacaagatcaggagtttgagaccagcctgaccaacatggtgacagcccccagctactcaggaggctgaaggagagtaggttgaacccaggaggtggaagttgcagtgaaccattgcaccattgcactccagcctgggcgacagagtgagactccatctcaaaaaaaacacaaaaaatgtaacccagcaacgattcattaattatactagggatgctattaagggaacagtttaacaattagggcccaccagtcaaacggcctgagaaaatacaatagcattagacatgatactagcggagaaaggtgtagtttgtgtcatgattggaacccagtgttgtactttcatccctaataatactgctcccgatggaaccataacaaaggcccaaggacttactgctttatccaatgagctagctagaaattctggaataaatgaccccttcacgattttaatggaaaaatagttccgcaaatggaaaggacttacgtcctcaatctcctgccatcagaataggtttgctcattcttgtaggatgctgtatcataccctgtatctgaggattaatacaaaagcttattttaacagctctcacccaccaaaatcttcctcaatcctccctcgcatcattcagttaagcttctaatttcagaggaccaagaggaacaaaatcaagacacgctaaaacaagtctgaagagaaataattataaaaatcaaaagggggaaatcgttagatacaatggatttctcttcaaagttttaacttccttgttctttgttcttaaggtcaacttcctcataccttcctgctccgagttacccgttctataaacaacttctccggccaatctcaacctgtaacctgttccctatttggaaaagtccccctcactcctagcaaccagctctgtaaacaagtttcctgcccttcccacagctgtaacccacatgcctcctgtttaaaatagccaatcaggactagtttagattgcgctgtcgactccagccaatggggataggacacagaagcagggactacttgttaggaataaaaaccctttctctcttttgttaggtgtgctcttgccaggaatgccagcagcagcaccctacggcagaagtaaatttgccttgctgagaaatcttttgttcaagtgctcgttttctttggaactccaagctcttatttccaacaaagacctagtaataccaacaggccaatgtcagtcctaatgacttattctcccagttttatacccaacttggaaatgggtcctgaggttaggcccagttggacaaattttgcggtggggtttggcagatagaaagcagaaacctcacctgttacaaggcagactgaatcaagccaagatcaacacacactggtacacgtggctcccaacctatagaaagttaacaggtcaaaagaagccatctgaatgctggaaaaaatagagaaagcccagttcccatgaacaagcaatagtctctgataaagataagcagaaaacaaagataggagttattactggggccaatgcatcagacaaaactggccaatagtgtagagatcaacagggtcgatctgatggggaaagaagctgtatcatcagctgcaaaggccacatttgagtcgtacaagaagtagggtgacaaacccacactgaaaagcagctactaccccctccagagcctgtgtctactcagccagggaagacgtgttggcaccacttaccaattttatatgtatatatatattctacttccaacacccgcattcatcctggttcaatcaaagcctggttttggccaacaataaacctgaaatgaaaaaacagaaaaatgagctcccatcagctagatgcccaggggagctgggacaaaggagctgctcaagctggcatatcagacagaaactggcttagaaaagttagatcaacatagtcgatctgtcggggaaaaaagctaagtcatcatatatgccagcaggaagttcttgagtgaggagtaagatttgaaagccatgaggagtaagatttggttggtatgcttcatatttgcaaatttgcattcggtgtttgagcacttctgtgttgtatcctgtagctggcaataacttggtagccaaaccaaacacccctgtcttcagtgcttacactctgagtacaggcccatgatagaagccagtgtggctggaagagttgaggaagtagttggcatttactgagttgggaagtgaacaagtaccaagagattgcattttaacacaagttaccacaagttacctgacaaaagaacaatctggaacaataagcttcacatgtgttcccatgaagcccagactttgtaaacgcctcactcctggactctagcaaaaatattagttatgtagtcgggcactggtttgagtggctagttcaacagaaaaacacatttggctttccaaaatatgtcaataaatcatccctccacttggaaatttaagcgccccaacacacaggaagaatggaatccaaaaatatgtttaagtggcattaaaatgttaaacgcctcttcactaacaaggttctttcacttcaggcatttctcttaaacctgtttcttcaccagaaacctagttccaatatttgaactgtgagaataaaacattcagaacatgtttttcttttttttttttttttgagacggagtctggctctgttgccccgactgtagggcagtggcgcaatctcaactcactacaacctccgccgcccgggttcgggcaattctcctgcctcagccttgtgagttgctgggattacaggcgcgtaccaccacgcccagctaatttctgtatttttaatagagtcagggtttcaccatgttggccaggctggtctccaaatcttgacctcaggtgacccatctgccttggcctccccaagtgctggggttacaggcgtcagccacagcgcccggccgtcagaacacttttttaaatacctaataaatgctcgatagaaagtgctttgttaaatcccacgttttcctagaaaactaaagcttctcaaagcacgtgttttctacagtagacccataggagacaaagacttactcgtcaggagatcgaaggttgtagatgtctgcacgtggcttccttggaggtccagtggtgactccctcttccaaaatccattctgtacccgctggctgctctaacctgtgaaccaacaaataaagggcgttaaccgccatcttcccacggtcagaaacgaacaaggccgggccttttgaggccgatgtatcagaactaactggcaaaatataagacgtcagcattgtcgatctgatggggaaaaaagtgaagtcatcatttacaccagccaagggcttctcaggcccgtgcagaaggcagtggcttttccagctccagaaactcatttctcccacgcccttaaggcctatttggggtcagagacggagaagccacgagaaggagattagggctggccgcagagacgacggcacaaagaagggaagggaggaccagaggtctccaacgaagaacatggagtttccactcaccacacacaaaacgggaacttacgggcaggacaatagcgtatgaagcctgactgcaactaggagaagtaccacactccgggcaccgcagacgcgaaagaacgaatggcttcctgaacctcccttatataaccaaagatggctttcgcacctgcgcactggacccgaaacgctctctttcccgcccgctccgcgcgcgtcgctctgggaaatgtagtctcgagcagcacagcccgaggcgctctagtagttgtccaggccgcgtctagccccgcccccttccctctacacgccgggccacccgggcttgtccgcttcctcgccatgtcgcgcttcacacgcaccaaaccgctcgacgggttccccttcctctggggccggctgaggcccgcaaaggccttgggcgcagtcatctcccgccccccgcgg

SEQ ID NO: 1888269 - DNA, 4001 bp, Homo sapiens
atcaagccaagatcaacacacactggtacacgtggctcccaacctatagaaagttaacaggtcaaaagaagccatctgaatgctggaaaaaatagagaaagcccagttcccatgaacaagcaatagtctctgataaagataagcagaaaacaaagataggagttattactggggccaatgcatcagacaaaactggccaatagtgtagagatcaacagggtcgatctgatggggaaagaagctgtatcatcagctgcaaaggccacatttgagtcgtacaagaagtagggtgacaaacccacactgaaaagcagctactaccccctccagagcctgtgtctactcagccagggaagacgtgttggcaccacttaccaattttatatgtatatatatattctacttccaacacccgcattcatcctggttcaatcaaagcctggttttggccaacaataaacctgaaatgaaaaaacagaaaaatgagctcccatcagctagatgcccaggggagctgggacaaaggagctgctcaagctggcatatcagacagaaactggcttagaaaagttagatcaacatagtcgatctgtcggggaaaaaagctaagtcatcatatatgccagcaggaagttcttgagtgaggagtaagatttgaaagccatgaggagtaagatttggttggtatgcttcatatttgcaaatttgcattcggtgtttgagcacttctgtgttgtatcctgtagctggcaataacttggtagccaaaccaaacacccctgtcttcagtgcttacactctgagtacaggcccatgatagaagccagtgtggctggaagagttgaggaagtagttggcatttactgagttgggaagtgaacaagtaccaagagattgcattttaacacaagttaccacaagttacctgacaaaagaacaatctggaacaataagcttcacatgtgttcccatgaagcccagactttgtaaacgcctcactcctggactctagcaaaaatattagttatgtagtcgggcactggtttgagtggctagttcaacagaaaaacacatttggctttccaaaatatgtcaataaatcatccctccacttggaaatttaagcgccccaacacacaggaagaatggaatccaaaaatatgtttaagtggcattaaaatgttaaacgcctcttcactaacaaggttctttcacttcaggcatttctcttaaacctgtttcttcaccagaaacctagttccaatatttgaactgtgagaataaaacattcagaacatgtttttcttttttttttttttttgagacggagtctggctctgttgccccgactgtagggcagtggcgcaatctcaactcactacaacctccgccgcccgggttcgggcaattctcctgcctcagccttgtgagttgctgggattacaggcgcgtaccaccacgcccagctaatttctgtatttttaatagagtcagggtttcaccatgttggccaggctggtctccaaatcttgacctcaggtgacccatctgccttggcctccccaagtgctggggttacaggcgtcagccacagcgcccggccgtcagaacacttttttaaatacctaataaatgctcgatagaaagtgctttgttaaatcccacgttttcctagaaaactaaagcttctcaaagcacgtgttttctacagtagacccataggagacaaagacttactcgtcaggagatcgaaggttgtagatgtctgcacgtggcttccttggaggtccagtggtgactccctcttccaaaatccattctgtacccgctggctgctctaacctgtgaaccaacaaataaagggcgttaaccgccatcttcccacggtcagaaacgaacaaggccgggccttttgaggccgatgtatcagaactaactggcaaaatataagacgtcagcattgtcgatctgatggggaaaaaagtgaagtcatcatttacaccagccaagggcttctcaggcccgtgcagaaggcagtggcttttccagctccagaaactcatttctcccacgcccttaaggcctatttggggtcagagacggagaagccacgagaaggagattagggctggccgcagagacgacggcacaaagaagggaagggaggaccagaggtctccaacgaagaacatggagtttccactcaccacacacaaaacgggaacttacgggcaggacaatagcgtatgaagcctgactgcaactaggagaagtaccacactccgggcaccgcagacgcgaaagaacgaatggcttcctgaacctcccttatataaccaaagatggctttcgcacctgcgcactggacccgaaacgctctctttcccgcccgctccgcgcgcgtcgctctgggaaatgtagtctcgagcagcacagcccgaggcgctctagtagttgtccaggccgcgtctagccccgcccccttccctctacacgccgggccacccgggcttgtccgcttcctcgccatgtcgcgcttcacacgcaccaaaccgctcgacgggttccccttcctctggggccggctgaggcccgcaaaggccttgggcgcagtcatctcccgccccccgcggtccgctcccctcagccgcgcccgcctgagcccgccggctccgccgccggggggagctgaggtgacgccctcctcgagggcggaggcgccggccgtgcctgggccaggccctcgtgctctccaccctgggcccccgcctcctccttctcctcctctgggccgcccgcccggctccgcccagggtctgcggggaacggaaaccgaaagtgcgcggcgccgggcggggccaccgacctgcctgggccgaagccccagcactcgccggcggcagtgaaaggacgcgccggagccgggtgagtggccccgcaactgcccctgcccctgattcttccttgcctcgccgcgaaccccggcgcccgcgccgacccgccactgcctctgcccgtaagacctgtcaccctctcaagcccccaacgcacccgtcacccgctcagagcccctggcccctcagcgccccgtcgccccctcaatccccagacccccatcacccactcagagccttgtcacctctttggcccccagcggcatcagcacccactcagagcgcctctcagcgccccgtctccccctcagaccccagacctccatcgcctactcagcgccccgtcacccactcagcccctggcccatctcagcgccccgtcgccccttcggctcccctgtactctctttagtgtccccatcccctcagctggcccgtcgctctccccagcacccccgacaccgtcaccgcttctgccctcagcacttcgatctcctctgcccctacccctgtctgtgccctcccttctgccactcgcacccccctcattcctccggcctcacctcctgtcaccttatcaatccccctcttctacagagcacctcggcacccccttcagcctgctccctgcccccaccccgccgcctccgtcctcagcaagcaccccctggtgctcgctaccaccctctccccaaggcccccataaccccgccacctcacagccttggcgctccctgaccccataacatttccattagggaccgtgggctccctgggtcagggattccccaggaccctggagacttcccccaaacccagctctgcctccgacctcagcctcctgcgtcccactctggtgatgactagcccctctcattctgactccaggccagcttgatcatcactgattttcttcttcgtgccctttaggccttgattccccccaccaaaaaaaaacacttcagtctgttttcgatcccagcatttcctgttcatgtctactcctcccttccttcccttgccttttttttaacatctttttttcttttcttccgtttcttttaaattttctggagtttctattttagcatttttcaacaaggggaa

SEQ ID NO: 1888270 - DNA, 4001 bp, Homo sapiens
tcatgatgtacttccctaccaggtcaatccttacaatacggattataatcagccttcacggtaaacaagcacggcttcatttggaaagcacattttcaactgttttaaaaaatcgcagtgcttttggtaagagagccaaggcacttccctaaaaggagaaaagtagttacggaatccctgtgcatttcctcacctattcatcagcttcccagctggggcacatcagacactggctgcaggacaaccctgcagctgttgagctcctgcccaccagtcttcataaactcacttttggtccaaatttcacttacgactctaccagcaaagctgcctcttcaaaaggtttaatggcttacagagggcaaagggcacctggatgactgaacaacacaaaaggcaagattctaaaactcagaacccaccaggagaacagaaaaaatacagttttttctaagtggttatggtgactgcagactcagtgccaaaatgaaaaagacacagtccaaagaagtgaaactccacaatctctgatctgttagattggggctagttgaacagtcatttaaatctaatagtcatttgtatacaatgtaagacatggatacaatatgcagtgctagcctgtattttcctatttgaatatcccacataaattactacagataggataaaaaagacacatatctatttaaatgacttcctagtttccattccaaaagcagaagatatgtacttaagcagcacatgctacagtgtcttctctttcaaactatctgttcctagcctctagggattttgttttgttatgtttcattccactgcctaagaaactaagattttgccagcaagagggccaatatgacaaatcatcgatgattcttagcatggagccaagaagcctgcctccttgatcagattttcagctggaaagatatccacaccttgcctagtccaatatttgttaagtgagaatataaaattcaaagatgttctgtcacactctagatttgtattaatgtccacaaatattaaagattcacatgatacatatttaggaaacacatgctactttgttactgtttgaactctcaggaaacaatgttcccattggtgctccgaattgttactattctctgccatcctgaagataactaatacgtacctatctgtgttcaatctcagctttagattatggcactggtgtgtgagaaacaactggttcaactaactataagcaatatattaactctgcttttttttttttttttttgagacggagtctcactctgttgcccaggctggagtgcagtggcacagtctcagctcaccgcgacctccacccccggggttcaattctcccagatactcctgcctcagcctcctgagtagctgggattacaggcgcccaccaccccacccagctaatttttgtatttttagtagagacagggtttcaccatgttggtcaggctggtctctaactcctgacctcgtgatctgcccgcctcagcctcccaaagtcctgggattataggcgtgagccaccgcgcccagcccaactctgcttttacaggtattggctctcattccctagccattggttctccccttcctgtaattcaggcctgcaatataatttcttagtcccccaaggaaaacagaactaaagacttctaacagaagatctcagtctactaacatagctaatagctattaaagctactcaggcatcggcttaataaaaaactaaagggctgcagcaagtgatcagattttcaccactcatctttgtgagatgggtctcagagggccccgtccctgctgacaccaaccattcttaccggtagcctgccaacacacaagcagttcacagtagaacactgcagactgcagggcattttcaggctacatagcctcaagttcctagaacaggaactgaggcttggaagaaggtcagtgcagcgcactcagcgaatggataaactgaatcatcatttcacaaggctgcaagcccatgtactaatggaatcaacatggaaccagagttaaattactgccttaaatatctaatgcatgtcaagaaatccatctaattactaagtaccgaaattataatactttcaaatgaattcacaaagcaaaacagctgaactaatgatctgtaaggatctcctggcagataaatcctactgggaatcaatacaccactgctaccaagaaagcaggtccaacaaatgaataaaagaaacccagccaggcagagaggttcttgtctgtaatcccagcactttgggaggctgaggcaggaggatcgcccgcggccaggagtttgagacaagcctgggcaacacagcaaagccttaaaaaaaatcacctaggctcggtggcctatgcctttactcctaacactctgggaggctgaggtgggaagatcacttgagctcaggattttgagtctgcagtgaactacgatcagaccactgaactcgagcctgggagcaggccgagaccctgagaccctgtctcaaaaagtaaaaaacagaaatgccagtttcctttactcagagctaaaagccttcacctactacccaatcccatcatggctccctcccaaaagttcactggcataccatatcaagtcagcaagcccccttttttgtagcagggtctcactctgttgccaaggctggaacaagccctcttcaacaaagctaagatggtccatattactcatgtggatgagggtgttgaaggacatttactgccttccttcatggtctcacttcatgatcaaaccaagatgcacaggaaataggtttgacaatttacctttaccaagaaagacgattcagcaacagtggtagagctgcctgtttgaacttaaccttggtcatctcagtttgaaatacaaatggcagcatggagagcaggctgcccgctttttggttggacatttctttcactcttgagtttgaggtacagcaaatttcccaaatcattcagatgtaaatattccaatactcagaccaggggcccattcaggaggctgagtgcaggaagatggcctgagctcaggagttcgataccagcttgggcaacacagcaagactgtcttgagaaaaagaattctaaacaaaataaatacaagaattcaaaacaaaattcatgaaagatataggaagggtgagggaagaagtccaacattttatcacccaccagctaccaagtatctaacagcacaatgtcctagctctgcggtgctcttgaaagaaaaagtgaaaaccctgacaagggagccatctggatttgtattcctcaccatttaccatgactagaatgcttaggagtgtgcccttcagaaactgagcttttcaggcagaaaattagttttctctccagaccatataggaatgcctaaaaaagttatgccaaaatgtaaaaagaagagtcaagccaaggacccccatttttaaacttaagtgttggctgcccctcaaactgcaacttactcctcctggggtactatggtttgcctttaggcagcatgtgaaggtgtgaagatctcttttaggagatcttgtcagagtacctcaatggccaatcagaaaacaggtattaagggtgaagaagccactttttggaaagttagatcatgcagagaaacttaatttacactttaatagccgtttctcactattgggatcattaaaagttagactgtttccttaaatactatttaacttcactacacactgttgtgaccacgggctatttaagacattcagggtactaacctatagatctgttctcacctaatttgctcgagcatcaagaccctgataataaagacagaaaaatgctgaaacagcagaattttaaaccaagttcccctctgcagcacaagaaactcaggtaagtttccagtgtccaaagcctacactcacaaacacaaacacgaagccctccctttgcaaccctcaagtacccagaacctgctgaag

SEQ ID NO: 1888271 - DNA, 4001 bp, Homo sapiens
tgtccttgggccggcttccttaggggacagactgttgggtggtgatggggattgttaggatggagcccaggccacatggatgatgatgattctcccccacaggttcgaacctctgacatgggtggctatgctacttgccatgacttcactgaggctgtcattgctgccttgccccacccataggccctgtccatacccatgtaaggtgttcaataaagaacatgaaccaactcttgtgaatttgtttttattggggaacacggcacagggtgggaaatgtcaccttgggctatggtatgccccacctcccagagaatgtccatttgcattctaatcttcctgggatgctttatggaactttttcttcttcttggagctgctcttgccaaccgcctcttcaggcccactgctgaccggctcctctttggagaatttcctctttttcttggagccacttctgtggcctgcctcctcagggtcattaactgtttcctccttgggtgtagacttcttcctcttgggaatactggtgctgccagcggtctcttcaagatcgctactcatcaactcctccttggaaaaagatttctttttcttgggtttggagaaagagatagatgggtcttccattccattctcctgaggaacctcctggggcttttgctttttcttctttttgggtttttcactcatctcctaaagggaaggacaggggaacaggctgtgagaacagtgctcattacatcttcagcaattaagtagccaaggcaggggaacgcgtgtcgttaacattgcccagtgtttctgggatagtttaattgtgtgggtataactttagaaatccaccccaaaggctgtcccaaattagaaggaaaacatgtcatgagaaattacctcagcccattaaaaaaaaaaacctaaaaaacacccaccatgctggtcgcaacagaaccatcatgccaagttccagacagggccctgaaacactgtttaagaaactgggtgctaaatgaaaatctcagggagaatgattgtagcttagcacattggggacctccctgcccccatccccactgtgaaacacgaccacctccggacacacgtctgataataagcagagcaggaatttacactaccccaggttgaggactcctgggaggcagccgaggacagaacacacatgcccagggaacgggtgtgagctacaaccagctctctgggctcttgagcaagttcagcacctatctccttcctatagaatcaagaggtagttttagatgtttcaggtccttgtttcagtccaaaagcctggactcaagaccacagcttgatgcagcatatcctttgttctgctgttgaaaatcctacaacctaggatctctgccagggccgtgctgcctactgacctcacactcctctggagtactactgctgttttctgaagacgcgagggcaagtgcagccagccgtttcttttccttctttaagcgtttcttctcctgtttctccagcttcctagtaatctcagcagccgcttcctctgcctggtcaaagaaaagtgctaaaagggcctgaagacttctggtgctctgaggactcctttctggctttattggatcaggctcattaaatcagtttttttgcctccattctacaaggtcaggctcagacagttcatcacctccaacagctagctatgccactccacacccagcaaagcccaactgacctgaaccattgcttccttcatgacatccagattctttcgtggtatctctccagtctcatagaaggacagtcgctcttcaacttgttctcgaagcttctccccgaatacactcgtgggcacctctggatgtgtgtgggtgacaaagcctgtcagcccaaagagagaaactaccccaaccctgtgttccctctaccctcagcttcactcagacccagagtctcaacactcactaggtgaactgctgttgacgaaaaatattgccatcattgtggaagctatggttgcaagcctccccacccagccacccagccccttctcacacctgccaacgcccccccacccataccagagaagcaatcgattcgtgaggcaatactgcatttgtttgccaggtatcgggagatgcggcctttgttcttggcagctgctcggccaatgaaggtggagtggaaaatgagtccatattttggagtgttaccccttgtcttcagggctctgagagaatattcagtggagagtttaagatcagaaatttcaaccccattagccaaggcagctcagctcctcccctcctctcaccccgaagtcctgagtgagcctcaggccagattggatctctaccccaatgcatgccaacccatagctcccagaggcagagggaaggcatccaatgtcgctgacctggaaacttggtccctttgctgggccctgggaatcactcagacaccaggactggccatcacccccatagcagaggcctgtataggtcagggagccctggtcagccatcaccgtgatcccccaacaagcagtgggcaccagaagtggcacctgattgtgggcaggtgccctcactggtacctgaacagggccttttcagccccaaggatctgcactgtggatgctggatacttggccaggttggtgaggctgccagcatgtgcgatgagacgtgcacctacctggagagagagtcaaggaagcagtcagagaaatgaactgctgacctgcccagttgcacgacagccctgctccccacctccccatcaagcacaactagggaagacatggtgggtcacgaaatacagcagtgcaggtgcacatggcaacagtccttattctcccatttttgagtcccctgtgacgcaccgcttccccaattagggctgacaggctgggggctacttggctcatcttggagcgcaggtaagtgtgtaggctctggcggtattcagataaagacaccacacgactggagaagctctcgatgtttatcaagtcaatggcagatatgtccatgcctaggaaaaaccaagtgtgaatgcaagaggccagctatttagagccccataccttatgcaggttgccaggctctgcactgacccatggaggaccgtgaggcatccagaatagccttagccttggccccatccattgtcagctcctccagcttctccagcttgtcctcattcagttcccttcggtttccaataaactgggcaagacggcagtatgtggcattgtcgttgatgatcttcaccagctccggaaagtgatacccgtaccactccctgcaaagagccacagtcactccctggcccagctgcttcatcaaaaaccatagagctacagccttgccttctccacacctactctgcctggaggaaatgggacaaagatccaaatcttcctcaattctatgttcccccattcacaatacagaccaggcacagggcctgagctgaggtgtatatggggtaggtttactctacctcctctttctatacagtcagtgtaagaacacagcctgtggtaagcaccaggaggcctacacccagccccagcccacatggttctacccacaggatggtcagtcctcatcaagactcaaaattaactgaactacagaccaaaggctccagtattatgggtggcccctgcactttacctgacacgcatagagaaggtattgatgtccttatccagctggtccaggaggctaatggactggatgatcatattgtccacccggttcacattaaacttaactttggcacgggaatagctgtgtcccagccccagctgtgctttacaagctgacagatcggtcagacccttcaccagattgtggaagtgcagacgaactcctaagaagagggcaagacggtgagcaacaaggggctctgagctagctcccgcacccacgggcaccagcccagcctgaaggccttcccagaaatcacaacaagcaaccaagtttccagaacctcct

SEQ ID NO: 1888272 - DNA, 4001 bp, Homo sapiens
gtcacgcattcttggcttccatttcctcaatcacattgccctacctcccttcatgggctctcttttctccctccccacggctgttgccggtggtggctgtaggtgcggactcgagacatgggcggctacagcaccacaaccgacttcatcaagtctgtcatcggtcacctgcagactaaagggagctagagccctttatttcttccaaccttgcaaggaccacactccccatacccttcagtgcagtgtaccagggaagagaccttgtgcctctaagcagtggaccatggtcaccttgctgggtagagcctaggttgtccttgggccggcttccttaggggacagactgttgggtggtgatggggattgttaggatggagcccaggccacatggatgatgatgattctcccccacaggttcgaacctctgacatgggtggctatgctacttgccatgacttcactgaggctgtcattgctgccttgccccacccataggccctgtccatacccatgtaaggtgttcaataaagaacatgaaccaactcttgtgaatttgtttttattggggaacacggcacagggtgggaaatgtcaccttgggctatggtatgccccacctcccagagaatgtccatttgcattctaatcttcctgggatgctttatggaactttttcttcttcttggagctgctcttgccaaccgcctcttcaggcccactgctgaccggctcctctttggagaatttcctctttttcttggagccacttctgtggcctgcctcctcagggtcattaactgtttcctccttgggtgtagacttcttcctcttgggaatactggtgctgccagcggtctcttcaagatcgctactcatcaactcctccttggaaaaagatttctttttcttgggtttggagaaagagatagatgggtcttccattccattctcctgaggaacctcctggggcttttgctttttcttctttttgggtttttcactcatctcctaaagggaaggacaggggaacaggctgtgagaacagtgctcattacatcttcagcaattaagtagccaaggcaggggaacgcgtgtcgttaacattgcccagtgtttctgggatagtttaattgtgtgggtataactttagaaatccaccccaaaggctgtcccaaattagaaggaaaacatgtcatgagaaattacctcagcccattaaaaaaaaaaacctaaaaaacacccaccatgctggtcgcaacagaaccatcatgccaagttccagacagggccctgaaacactgtttaagaaactgggtgctaaatgaaaatctcagggagaatgattgtagcttagcacattggggacctccctgcccccatccccactgtgaaacacgaccacctccggacacacgtctgataataagcagagcaggaatttacactaccccaggttgaggactcctgggaggcagccgaggacagaacacacatgcccagggaacgggtgtgagctacaaccagctctctgggctcttgagcaagttcagcacctatctccttcctatagaatcaagaggtagttttagatgtttcaggtccttgtttcagtccaaaagcctggactcaagaccacagcttgatgcagcatatcctttgttctgctgttgaaaatcctacaacctaggatctctgccagggccgtgctgcctactgacctcacactcctctggagtactactgctgttttctgaagacgcgagggcaagtgcagccagccgtttcttttccttctttaagcgtttcttctcctgtttctccagcttcctagtaatctcagcagccgcttcctctgcctggtcaaagaaaagtgctaaaagggcctgaagacttctggtgctctgaggactcctttctggctttattggatcaggctcattaaatcagtttttttgcctccattctacaaggtcaggctcagacagttcatcacctccaacagctagctatgccactccacacccagcaaagcccaactgacctgaaccattgcttccttcatgacatccagattctttcgtggtatctctccagtctcatagaaggacagtcgctcttcaacttgttctcgaagcttctccccgaatacactcgtgggcacctctggatgtgtgtgggtgacaaagcctgtcagcccaaagagagaaactaccccaaccctgtgttccctctaccctcagcttcactcagacccagagtctcaacactcactaggtgaactgctgttgacgaaaaatattgccatcattgtggaagctatggttgcaagcctccccacccagccacccagccccttctcacacctgccaacgcccccccacccataccagagaagcaatcgattcgtgaggcaatactgcatttgtttgccaggtatcgggagatgcggcctttgttcttggcagctgctcggccaatgaaggtggagtggaaaatgagtccatattttggagtgttaccccttgtcttcagggctctgagagaatattcagtggagagtttaagatcagaaatttcaaccccattagccaaggcagctcagctcctcccctcctctcaccccgaagtcctgagtgagcctcaggccagattggatctctaccccaatgcatgccaacccatagctcccagaggcagagggaaggcatccaatgtcgctgacctggaaacttggtccctttgctgggccctgggaatcactcagacaccaggactggccatcacccccatagcagaggcctgtataggtcagggagccctggtcagccatcaccgtgatcccccaacaagcagtgggcaccagaagtggcacctgattgtgggcaggtgccctcactggtacctgaacagggccttttcagccccaaggatctgcactgtggatgctggatacttggccaggttggtgaggctgccagcatgtgcgatgagacgtgcacctacctggagagagagtcaaggaagcagtcagagaaatgaactgctgacctgcccagttgcacgacagccctgctccccacctccccatcaagcacaactagggaagacatggtgggtcacgaaatacagcagtgcaggtgcacatggcaacagtccttattctcccatttttgagtcccctgtgacgcaccgcttccccaattagggctgacaggctgggggctacttggctcatcttggagcgcaggtaagtgtgtaggctctggcggtattcagataaagacaccacacgactggagaagctctcgatgtttatcaagtcaatggcagatatgtccatgcctaggaaaaaccaagtgtgaatgcaagaggccagctatttagagccccataccttatgcaggttgccaggctctgcactgacccatggaggaccgtgaggcatccagaatagccttagccttggccccatccattgtcagctcctccagcttctccagcttgtcctcattcagttcccttcggtttccaataaactgggcaagacggcagtatgtggcattgtcgttgatgatcttcaccagctccggaaagtgatacccgtaccactccctgcaaagagccacagtcactccctggcccagctgcttcatcaaaaaccatagagctacagccttgccttctccacacctactctgcctggaggaaatgggacaaagatccaaatcttcctcaattctatgttcccccattcacaatacagaccaggcacagggcctgagctgaggtgtatatggggtaggtttactctacctcctctttctatacagtcagtgtaagaacacagcctgtggtaagcaccaggaggcctacacccagccccagcccacatggttctacccacaggatggtcagtcctcatcaagactcaaaattaactgaactacagaccaaaggctccagtattatgggtggcccctgcactttacctgacacgc

SEQ ID NO: 1888273 - DNA, 4001 bp, Homo sapiens
tggtgctgccagcggtctcttcaagatcgctactcatcaactcctccttggaaaaagatttctttttcttgggtttggagaaagagatagatgggtcttccattccattctcctgaggaacctcctggggcttttgctttttcttctttttgggtttttcactcatctcctaaagggaaggacaggggaacaggctgtgagaacagtgctcattacatcttcagcaattaagtagccaaggcaggggaacgcgtgtcgttaacattgcccagtgtttctgggatagtttaattgtgtgggtataactttagaaatccaccccaaaggctgtcccaaattagaaggaaaacatgtcatgagaaattacctcagcccattaaaaaaaaaaacctaaaaaacacccaccatgctggtcgcaacagaaccatcatgccaagttccagacagggccctgaaacactgtttaagaaactgggtgctaaatgaaaatctcagggagaatgattgtagcttagcacattggggacctccctgcccccatccccactgtgaaacacgaccacctccggacacacgtctgataataagcagagcaggaatttacactaccccaggttgaggactcctgggaggcagccgaggacagaacacacatgcccagggaacgggtgtgagctacaaccagctctctgggctcttgagcaagttcagcacctatctccttcctatagaatcaagaggtagttttagatgtttcaggtccttgtttcagtccaaaagcctggactcaagaccacagcttgatgcagcatatcctttgttctgctgttgaaaatcctacaacctaggatctctgccagggccgtgctgcctactgacctcacactcctctggagtactactgctgttttctgaagacgcgagggcaagtgcagccagccgtttcttttccttctttaagcgtttcttctcctgtttctccagcttcctagtaatctcagcagccgcttcctctgcctggtcaaagaaaagtgctaaaagggcctgaagacttctggtgctctgaggactcctttctggctttattggatcaggctcattaaatcagtttttttgcctccattctacaaggtcaggctcagacagttcatcacctccaacagctagctatgccactccacacccagcaaagcccaactgacctgaaccattgcttccttcatgacatccagattctttcgtggtatctctccagtctcatagaaggacagtcgctcttcaacttgttctcgaagcttctccccgaatacactcgtgggcacctctggatgtgtgtgggtgacaaagcctgtcagcccaaagagagaaactaccccaaccctgtgttccctctaccctcagcttcactcagacccagagtctcaacactcactaggtgaactgctgttgacgaaaaatattgccatcattgtggaagctatggttgcaagcctccccacccagccacccagccccttctcacacctgccaacgcccccccacccataccagagaagcaatcgattcgtgaggcaatactgcatttgtttgccaggtatcgggagatgcggcctttgttcttggcagctgctcggccaatgaaggtggagtggaaaatgagtccatattttggagtgttaccccttgtcttcagggctctgagagaatattcagtggagagtttaagatcagaaatttcaaccccattagccaaggcagctcagctcctcccctcctctcaccccgaagtcctgagtgagcctcaggccagattggatctctaccccaatgcatgccaacccatagctcccagaggcagagggaaggcatccaatgtcgctgacctggaaacttggtccctttgctgggccctgggaatcactcagacaccaggactggccatcacccccatagcagaggcctgtataggtcagggagccctggtcagccatcaccgtgatcccccaacaagcagtgggcaccagaagtggcacctgattgtgggcaggtgccctcactggtacctgaacagggccttttcagccccaaggatctgcactgtggatgctggatacttggccaggttggtgaggctgccagcatgtgcgatgagacgtgcacctacctggagagagagtcaaggaagcagtcagagaaatgaactgctgacctgcccagttgcacgacagccctgctccccacctccccatcaagcacaactagggaagacatggtgggtcacgaaatacagcagtgcaggtgcacatggcaacagtccttattctcccatttttgagtcccctgtgacgcaccgcttccccaattagggctgacaggctgggggctacttggctcatcttggagcgcaggtaagtgtgtaggctctggcggtattcagataaagacaccacacgactggagaagctctcgatgtttatcaagtcaatggcagatatgtccatgcctaggaaaaaccaagtgtgaatgcaagaggccagctatttagagccccataccttatgcaggttgccaggctctgcactgacccatggaggaccgtgaggcatccagaatagccttagccttggccccatccattgtcagctcctccagcttctccagcttgtcctcattcagttcccttcggtttccaataaactgggcaagacggcagtatgtggcattgtcgttgatgatcttcaccagctccggaaagtgatacccgtaccactccctgcaaagagccacagtcactccctggcccagctgcttcatcaaaaaccatagagctacagccttgccttctccacacctactctgcctggaggaaatgggacaaagatccaaatcttcctcaattctatgttcccccattcacaatacagaccaggcacagggcctgagctgaggtgtatatggggtaggtttactctacctcctctttctatacagtcagtgtaagaacacagcctgtggtaagcaccaggaggcctacacccagccccagcccacatggttctacccacaggatggtcagtcctcatcaagactcaaaattaactgaactacagaccaaaggctccagtattatgggtggcccctgcactttacctgacacgcatagagaaggtattgatgtccttatccagctggtccaggaggctaatggactggatgatcatattgtccacccggttcacattaaacttaactttggcacgggaatagctgtgtcccagccccagctgtgctttacaagctgacagatcggtcagacccttcaccagattgtggaagtgcagacgaactcctaagaagagggcaagacggtgagcaacaaggggctctgagctagctcccgcacccacgggcaccagcccagcctgaaggccttcccagaaatcacaacaagcaaccaagtttccagaacctcctcccccaaaatgtccaggataacaggaatataacagatgatggtctcacctcgcaggatctcagctatgactcctccagtctggcagttgtaccctaactcctcctgtattgcggcaccaatcttgggatccccaactcccaagagtactttcttctttttggacggcaggtgggtctccaagagcaggcggaggtcctcatgaacaacccctcaggggaaagaacacagttcccactaacaggctgaaggacgatcaactctaacatccctcagctgactaccctggtcccaccgagcacgctgggatggcatacctagatccctccccatcaggcattgctcagagacatggagacatcagtgattgcactcaggggattgacagatttgattcgcaagtcatcactgcaaagcctggcccagccatgggaacaactgcattcaggtctgatagcacaagtgggcaataaataatagcttgtaacacaccctcgagtatttcgtagaatttgccttctggaaccaa

SEQ ID NO: 1888274 - DNA, 4001 bp, Homo sapiens; identical to SEQ ID NO: 1562151

SEQ ID NO: 1888275 - DNA, 4001 bp, Homo sapiens; identical to SEQ ID NO: 1562153

SEQ ID NO: 1888276 - DNA, 4001 bp, Homo sapiens
tcagcccaccctatacacaggtttcacatcccatactgtattttccaaccatgtttcattgtggatgtggaaccctctgatagagagggctgactgtatttattgaaaacaaaacaaaacaaaacaagggttgtattggtggacccatgcagctcaaacccttgttgttcccaggtcaactgtatatccagagcttataggaaaatacctctcccagtaaccctgctcaccatttctctcttaagctattattatgattagccacggtttgctatttaaatttaaatttaaataaaaatgtggcctttcagttatgctagccacatttaaagtgctcaatagccatatgtggctaatggttactatttcggacagcacatatttagaacattcccatcatttcagaaattttcattgggaacactctgcggaaaaagggggccatcataatgtgagtccatcttctggaaaaatcctgggaaggggacaaaggaggtctgtttggcattgtgtaatggtaatttggtatttaattttcaaaaatgtttacccaattcctattcatcagccaggtgtggtggctcttgcctgtaatcccagcactctgggaggccgaggtgggaggactgctgcagcccaggagtttgagaccagcctgggtaataatagggagatcctgtttctacaaaacaccaaaaacaaaacaacaactttgatgttgtggagtcaggacagtcctgggttaaaacctttgctctccttagctgtgtaaaccgtgggtctcagctttcttatctgttaacggtaggtacttcttcctagggctgttttgaggattaagtgaaagtccaagattgtgtctggcacacagtagcttctcagcaaatgttttcctcctatgtcagggaatggctcctttatcccgttttgggcccatgggtggccctgaagggtgggtgctcaggtgttaagttctgtagatggcatatccttgggaaaagcaaggcaattaaaaacagtgagaggttgctctggttaagttttctcctataactttccccatgggtcaattgggtagaatctgccattttcctaatacttactgatggtagtggcattcggaagcacaatagctgaagccggagctctgagtggagagaaaggtctgtttctcaggcccaaaaagaggttacacacccatggctgtccagtttggtggtgcaggccctgaaatcagaccaaactggatttaaatccccaaacctatactctaagctatgtgaccttgggctagatacttcacctctctggccttatgaagtaggaataataataataccgtctaggttgttaggagtattaaatgaggtaaagcactgaaaacgtttagggactgtgttaaatcattaaataaataaaaacggggatgaccttatcggcttgacacaggggattaaatgagataatatatgaagacaagtacacggcaaatgcttaattaatgttgcttatttttatgtctgcaaactgacttaaaggggaggcctttaagaaagacagtggggcaatttgcgcgttgatgcattgtaggagaaaatgtgcagggggcccgttgggaccagagttcaaccaggtaagcggcagaaaaccacaaatacctccaggcgttcctggggcagcgccgcctccccaaaatcacgcaaaacttggtttgctaagaattgtcagctcttctaaaggaggcgcttcacgcatctcagtctgtgaaatgggacccaggacccaggtagaggtgcgttctcggcctggggaccgagtattttgtgcgctccggtaacgcaggaagacagcgccactgacactctagagaccagcgggcaccgcctggaggcgccttcaccacttggcggttccgggtccgcgccccaccgcgccacaagactcacgcccgaaccacgtgatcagggccgtggctccgccccgctcccgcgccgcgcgccgcttccggtaggggcggaaagcggaagtgtgggagggtctgcggggcgggctcaggaggtccgcgggaggatggagcagtgagcgggtctgggcggctgctggcagcgccatggagacggtacagctgaggaacccgccgcgccggtgaggggccactggctaagaggacgggcatggggtcaggggaagaaaaggcgggaactggttgaggggatacacctgtgtgggagtccccggagctaagcgacccagccgatggggcacctgctgagtgaggggggggacgtctggtgggtgagggtccggctgaggggagcatctgctaaggaggttagacttgggaccggttagagggagcactcgctgtggtgagactgtgctgaggaacgtggggacaagttagggagagtacctgctgaggccgggccactcgggggaacgctatccaagcagggactcacggaggtgggggcgaatgctgaagcagggtgagaatctgtgagggatctctttaagggggtggatcgagaactggccaagaggaaggccgggtggactttctaagggtctgaagtcccacttgaggggtgcggtggggggatctgtggaggggaaaagctttgcgcctaaggctgaaagcatgcgaggaaaggttgagggtctagcaagggaggggatggtggagggtagcatttcagaggatgctgttggtggtgtccccactgtaggatggcatcttttattactgatgttcagtgtcttcctaatggtcttcacatcctcctcagctcttcagaacctgacattgggaggtaggtaaggaaataagaggatattttcgagatggggagactgaggtccagagtagttgggaagtgtttccttctttactccgggtcactgaaccctgccagtctgtgcccttttcaggcctcagttgttttgtgaatatcagcaccaaatcctagtggtacctggaattgctttagttcaagatcaggatggtggctgatcctagaaaatctcaactcctggatttcccttgtggacatcccgggtcttttgccactctaccacatctggagaaaagtagggactagagaccgaaggagtcatgcttctctgaggttcagtgtggttacttctatttcacagagacgtctgacttcctgcagcagaatgagctctaaagaaggaagtgttcagggtgtggaagtgcagggcaaccaagaggtgaagagaagggattgactgcctgggcagcactcttaggggttgtttgagcttggggatgtttgaggtgcacaaacattgcagaaggcaaataggtggttgggatgggctttggattcaccctagcgtagtgtgctgagactgtaatagtaatgattattacactcatattgcacttaccgggtgccaggcactgttctaagtgctttccatgtgtcctgctgaagcatatgaaattgctgatatttgaccatttttgaaccataaaaacctcatttgaactcatttgaacctcacaacaatcctgtgtggtagatatccctatatgtctgttttacagatgataaaactgagatacagagggtagtgatttgctgggagaagtcatagcaagtaagagacagagctaggattttaatgtctatggggtctggtccaaagtccatgttctttttttttttttgagacggagtctcactctgtcgcccagtctgaagtgcagtggcgcaatctcggctcactgctacttccgccttctgggttcaagcgattctcctgcctcagcctcctgtgtaactgggaccacaggtgcgtgccaccacgcctggctaattttttgtagttttagtagagacggggtttcaccgtgttagccaggatggtctctatctcctgacctcgtgatccgcccaccttggcttctcaaagtggtgggattacaggcgtgagccaccgggcccggccatgctcttaactgcctcactctg

SEQ ID NO: 1888277 - DNA, 4001 bp, Homo sapiens; identical to SEQ ID NO: 1562159

SEQ ID NO: 1888278 - DNA, 4001 bp, Homo sapiens; identical to SEQ ID NO: 1562160

SEQ ID NO: 1888279 - DNA, 4001 bp, Homo sapiens; identical to SEQ ID NO: 1562160

SEQ ID NO: 1888280 - DNA, 4001 bp, Homo sapiens
gttagagtgcattggtgcaatcctagctcattgcagcctcaacttcctgggctcaaccaattctcccactttagcctcccaagtaactggaactacaggaatggaccagggtggccggctaatttttaaaatttttttgtagagacagtttcattaagttgcccaggctggtctcacactcctggcctcaaaggctcctcccacagcgctgggattactggcatgagccacagtgcccagccaactgaggtaattttttttttttttttgagacagggtctcgctctgtcacctaggctggagtgcagtggtgcaatctcagttcattgcaatctctgcctcctcagttcaagcgattctcctgtctcagcctcccaagtaactgggattacaggcacacaccaccatgcccggctaatttttgtatttttataagagatggggtttcaccatgttgaccaggatggtctcgatctcctcacctcgtgatccacccgcctcagcctcccaaagtgctgggatcacaggcgtgagccaccacacccggcctcaactgaggtaattttttgagaaattctgggcaaatgccctcacttaccactgatcataggtttaaaaacgccaataaaacttgtttattgcttaagactagggcagtagttaccctgctggggaagtgatagaagggggtgcagaggtgtccctttgtgaaaacccatcaagctggatattcctgatttttccactactgtgtatctaggaaatatttgactttttttcttttacaatttttacaaatattgtttattttaatgaagctggtgtagacaatgtccatttaaaacccgatatcccaggccaaaaagtacaaataaaaaagagcagtattctgttgtattcatttctgcatgtatacctttattgataatgaaaatcagaacttttctgggatcttctgacaagattaagaaaaaaaaaatcttcaaatgtcttttcttcagggaagccatctttggagttagtcgttactctcaaccttatctgtcaccttgacttaacctgatgctccttttcttttggtccagaccctcaaatcttaaaaatagcttcaagttgttaaggagaggtcatttttccacagctcagttctctaaaaaacttccatctcccaccaaaagtcatagtccaggagtgaaacaatcacatggttgaaaatcagggccaactggaaagtcattatgaatacttgcattggtcaatcttatcatctgaaaatgtacagtcctgaaaaaggtggcctctctgtgcacacataatttttataaaaggagagggcaatatgaagaggcctgagccttgatcaccagaaatcagcataatgaaaacaaacaataatgaataatgaacactagaattcaaattaccagatgttttaaagagatggagtgcctgttttcaattccgttttaaataccatgctacaaaagaactatttaaaaaaataaaaaaggattgagggaaaaggaaaaaaaaaaagaatgtctaaactgttgaatgacctccgatttgttcctgataaacctcaatcacatcttcttcctccattcccagttcttctggagtatgattatcagcaattctctgaccttcaaagagaaacctgagggaattcactggaacgccctgtctctgacagtacgatttcttgagtttcttgagaggtgttgtcattttcactttgaaatgaatctcactgctatcctgtccaataaccctgagtttaatatcttcatcttttatcttatcccccaaatgctcagttgaaggttttgcctccaggtcagacatggtgatggggcattcacctgcaggtctccgaacagcagcagtctcggggtaggcagaacctcgctctggcgtttacaatgccatctcccttcgtcacagcacgacaccatggcggcagtcacttccgctatgcctcacgacacttctgctacgccttgcatcacttacggtgcaccttgcatcacttccgctaggcgcagagaggagggagggagaagagctaacttttttttttttaagtaccgatatgtattccctgttcctgcttcctcatcaatttcaaacttaacatgacccaaagagaacttgggttctctgttctcaggggctgccagccatcttttcccagcctcactccaacaacttcagcacatccttgattcttctttctctaatctcctcacccagtctggatagcctgttgtctctccctctagaacaggtctcaaatctcctggctttaccccatcttcatcgagctggccgagtccatgtagtattttggctggacaactgccacacactcccagttggtttaccccctgcttcacttgtctccctctccagcgaatccattctccatttccatttgattttattttattattttattctatttcattattattttttgagacagaatctcgctctgacacccaggctggagtgcagtggcacgatctcggctcaccacaacctccgcctcccgggttcaagcaattctcctgcctcagcctcctgagtagctgggattataggcatgtgccatgatgccaggctttttgtattttttagtagagacgagttttcaccatgttggccaggctggtctcaaactcttgacctcaagtgatccgcccgcctcagcctcccaaagtgctgggattacaggcatgagccaccgctcccggcccccatttccattttataagaatggaaatcagataacgacattctccttctgtaaaacctccccatggcttcccttcacattgaaagaaccacccaggctagggagaagccttctggtgtcacacaagaaaagccatggccacctcccctcatcccttccctcctccctcttggtcattgtgttctggtctccttctgtccctccaacatgcgtagctcattccttcctcggcgactttgccttgctgtcctctgtcccaggtctcggccctaatgtctcctcgccacaaaggctgtccctggtcacctgtgtggttgccactcaccgtctcatcaccttcgaaacccctgtcactgctggacatgtgatcttacctctttgttttgttgtttattggatgtttccctcattaggatataagtgcccagaggggcaagaactgtctaccttacactaccctacactacttcgggtgtataaaaacaatttgaatggtcacatgcttaaaacccgattcctgaacttcccattcccaccgtcagcgcctccctcctgtcctgatcctcccctggtcttcccctctcagcgcacggcaactctattccttcagcggctcagacccagatattggaggagtccggggtgccccttttcccctcacattccacactcatcctgtccgcaccttcagttgcctttaccttgagagagcctgagaccacctctgtgtcctgcttccgccctggtctgggcagccacaggggttcctggagcttcctgcagtcgctgcacttactgtctctacatccccctgtgccctccttcaatctagtctctggagtgaggttatttgaaaatcatttccaatgccacatctctttccagagttctccaaagacggccagctcagagtgaaatctaaagccatttagtcacatcagcccaaatgcccctctctgaccggctcgcccacctaccatccttttccttgcttattccactctggggacactatctaagggcacgcctctgaggccctgtgagtctgctgctctctttctggaaggacctctcccagatgctactcagtgctcccttccttgtggaggtctctgctcagtgaggtcctctccagcgtctccctttaaaattgtcccctcgggacaggagctgtggctcctgcctgcaattccagggctttgggaggccaaggtggaaggatcacttgagcccaggagtt

SEQ ID NO: 1888281 - DNA, 4001 bp, Homo sapiens
ctacttcacccttaaaggaaaggtttgctgatccctaggctagaactcaggttgtgtgcatcatatggctcttcaacaaagcctggcattcccacagctcttcccaggagcatagagtctcctacgagactacaactaggcatatggtgggtgtgcaacctccactatccaacacaatactatcaaatgccaaacatctgcaccacactttcagctgacaaagaaaggtctttgacatacataatctcatattatccctaaaaaaacctcacaaagccattcttcttcttttaattcttatcactttttggataataacttgcccaagggctaacacagagaacaagcagcaggagcaaggactccatcccaggtctcctggctttaagaactgtgctcggccgggcgcggtggctcacgcctgtaatcccagcactttgggaggccgaggcaggcggatcacgaggtcaggagatcgagaccatcccggctaaaacggtgaaaccccgtctctactaaaaatacaaaaaattagccgggcgtagtggcgggcgcctgtagtcccagctacttgggaggctgaggcaggagaatggcgtgaacccgggaggcggagcttgcagtgagccgagatcctgccactgcactccagcctgggcgacagagggagactccgtctcaaaaaaaaaaaaaaaaaaaaaaaagaactgtgctcatcaccacgccacagctgcctcttagatgtaacaacttataggcctcctttacactttacaaagtaccttcttattcctaaacccctctgggccttgtaacattttgttgagggcaacatggtaggagcatccggcccacttttcagaaaaggctcagaaaggggaagcaacttgcccaaggtcccacagctagttttatatgtttaggcctagactgaacccttgcttttctgaacccaaagcacatgctctttatattgcagtccacgacctctctgcaactagtctcatggttttgaagacaggaaaacaagttcacagaggtgacatttgccccaggtcacacagctagtaagtggatcttaaacggacgcctgtctgaccccaaagtccaggcagtttccactgtacccgcacgaatgctcttttatccacccctctctccgatgtggcacctgagaacctagctcagagaaatcaagtcactttcccagagtatcagaaaggaaatgtatcagagttgcctggaacacagacgtgtttattgtattaacatccaggcccttttctttgtactaatcagcctctgctgtcattccattttatggatgaggcagctgaggctcagaaaggtgaaatccctttcccagggctacaaagaaagaaggtgacccagccacgtctacagcacagtagtgatggaccacaaagcctactcggggaggccgagaccccacccgccccagtccggggaccctacctcggcgtcgaacatctggtccagcgaggggctgcttcgcactagcccgtccaccagcgccagccacaggcccagcgagccgtaatacacggtctgcatgaggacgatctgcgacaggatcagcagcgggtcccacacgtagctgcggaactgacccgccatgccctgcagggacacgagccgggcctcagccagcggcctgtctccatggcaacgtcgccccgcccgggaggagggactggaaccaaggggtgagcccattccaagagtcagggggaaggcggggcagacagacccattctcagagtgaggggaaatccagcccattccgcctgcgcggcccccgcccgtacacgagctcctctggggtctactcaccagtgacagactcgacgatcgaagtgtctgagcgtggcccggcctcaccggcgggctcccaaaacagcgctgacagacaggaccatggaggagaggcgctgccggcctagagaggcaaagctccagcgaccacggcggcaggagcggctgcgtaggaaagaaacgtttccggggaaagcagcggaggggcggggctgaggttgcgcaggcgtagtgggtgcaacctctgcctgaacctcctgaaccaggtacaagcagccggatagcgaactgagcacatgcgcagaaggaagagtgaaggcaaacggaagagaggaacgaaggccgcagagcttgcgcgccctctagaggggaattctttttttaaaggaaggcggctaggggagaggcaagtggggtggcttaggacgcggtaatgatgtttgggaattaacgaggtgataaactgtgtcgttattttcagcctaaattctcaatgttttctcctagttagagtctgataacttgaagtggacctgcaagctcctccacgtaggagtttgccaatgttcccgctgtacagatagttaagctaagggccagagaaggaaagcaacatactgtttcaacgacacagttagtagcaaagtaagtattaaaattcaagtgttggtcgggcgcggtggctcacgcctgtaatcccagcactttgggaggctgaggtgggcggattacctgaggtcggtgtttcgagaccagcctgaccaacatggagaaaccccgtctctgctaaaaatacaaaattagcggggcgtggtggcgcacgcctgtagtcctagctactcgggaggctgagccaggagaattgcttgaacccgggaggcagaggttgcagtgagccgagatcacgccattgcactccagcctgggcaacaagagcaaaactccgtctctaaataaataaataaataaataaataaataaataaaattcaagtgtttcctcaacactacaacattgatttcgcacctactcggtggcaggaaggctagaacatgtatatataagacagcccctgccctgagacacagatgaactatattagaaggcagagtagtgggtgttttaaaatgtgggtgtccagtggaaaaaggcacaggttctgaagtcgcacataggagtaaatcctgaccctctctgctgccatgactgttttatctatcttccaaatccgaatagtggacagtcagtaaatatttgctgaatgagttaagaacagaaaaagcaagagcaaatcgataactcacttattcctactccagcagacgaaaacccatcaacttcattgatcctaggttccccctctctgaagtggaaagacgggaagtaagttgttccaggaaaagaatttgggttttagggccagctatgccacccagtgtgaccagcaagccacttccttctttaaacctcagcttccctgtttatgaaatgaggagttggacatgattaacgttttccaccatttaatctaccttccagtaattattttctcattaaaaaaaaaacttaggctgggcacagtggctcatgcctgtaatcccagcactttgggaggctgaggcgggcagatcacaaggtcaggagttcaagaccatcctggctaacatggtgaaaccccatctctattaaaaatacagaaaattagccgggcctggtggcaggcgcatgtagtcccagctactcgggaggctgagacaggagaatggcgtgaacctgggaggcgaagcttgcagtgagccgagattgcgccactgcagtccagcctgggcgacagagcgagactccgtctcaaaaaaaaaaaaaaaaaaacgtatcaaagagccatgtaactgccaatcagaatttctgaacagcttgtggtagccgtgttatcaccttgagctgatacaattccagacaaaagtaaagaaacttgagactttattgagagtgtgcgattgtccttatcatttggaaataccctgaacagttcccctggactccagttggggagttattaaggcccaaagatttcttaggtgctttccagctcaaccattcttttaggcacctcaattcagtccaacaaatatgtattcaaattcctctagttcactgattatgca

SEQ ID NO: 1888282 - DNA, 4001 bp, Homo sapiens; identical to SEQ ID NO: 1562170

SEQ ID NO: 1888283 - DNA, 4001 bp, Homo sapiens; identical to SEQ ID NO: 1562187

SEQ ID NO: 1888284 - DNA, 4001 bp, Homo sapiens; identical to SEQ ID NO: 1562203

SEQ ID NO: 1888285 - DNA, 4001 bp, Homo sapiens
cccagaggcagaggttgcagtgatccaagatggcgccactgcactccagcctgggcaacagtgtgagcacctgtctcaaaaccaaaacaaaaacacactcttattgagctcctactgtgtgccagaaccatgctaggtgctggggacacaaaagtgagtgggacagacaagtttcccttactggggaagaagacagaacatccaaaggataaagaatgagcaagagaattccagacagtgatgcgggcaccaggaattaaattgaagttgtgctggagggtgactccacagtgtggtcaaggagggctctctgaggagggacctgaagccccgaggaggagaagcagaaaagaggagcaggtggggagacctgggggtgggctgcaggcttcaggcaaaggcctgtggtaggactgagcttgcatttgcacttgcagaggaagtgcggggagcaccccagcccaggaggtatctggcccgaggggaccctctcagcctacccctgcccctccctgtccccggaggctgaggctaagaggcaaggtgcgggccaggctggaggaaatggggccaagacccgtctggccagcagactctcctgggactgctaatatcccaagtgctggtgacaagacacagccccgggtggcagggggctgggggcctgagactccgtaaacagccctggctcgtaaagctgatcaaagcagcaggcctgtcccagccctggccacttcctgcagggcccagagccctggcctgtgggagatcctgggaagggcctctcagcagaggctgctttggggtctctaggcactgggggcaggggcaggggcagggccaggtccccgagcctgtcctggcttcggttttccctcttgttttgcaatgaagactggctggaacctctgagaagcctgtttcactgcatgtctttgacaaaagcttggcctctggaaccggaggtctgggggtttgaatcccagtcctgctacggtgtgacctcaggcagtgacacccgcacctcccctaccgcccaaaactgtccttagctctaaaatgaggataatgatggtacctatttcaacagccttagactgtgaaattttattgatatgatttctaattatagttcattaattatctaatgacaacagtgacagtagcaggcatcctggtggaaaaggcatcccaggttgcaggactggctgaggtttgtggagccaacggcaaggattgttgggaaggtcccggctcccatgtgctcctcctgggccaggtctgggcaaagagaggccccgaggtggaggatttccaggcggagtggaggttgccagggctacagcccctggcctgacgtgaagtagcttttcccaggcctggctccaagaccccaggggtctcactctctcaaatcggcctgagaagatttgaggatgaaaacagacccaggactcggccaagtctcccctccctgttacccactcagcctggccccaccctctcacgcccggactgttgcggtggcctcctgggctccctgcctcccattcagtccccttcggtccccttttggccacagaagctaagtcagacagaccctgtccctctgctcagagccctccagggttcccaccccactcacaaagcctgagccctcccacagcccacaggcccaaccagccaaggcggagtaggcctgtcacctcccaacgcctccctgtcactcactgagataccgcctcaccacgtaaaaccaccacggcccgcatgccagctgcctctcccggcctggtgttttcattttctttagcactggttcccttctgacgcctggtataaaatccctgttcatcttctccgtctctgccacaggagagtcagcaccatgagggcagggatttttgtttttgttttcttccattttgttcccagccatatctatacccagttcctaaaactggaggcacttaataggtgtctgtgggaggcaggaacgggtcctcaccagctctaggggcaggtactatcgttatttccactttacgaaggaggaagtgaaattgagcaagacctcacacagctgggaagcggaaagtcagtgccttgatgatcatgatgatgatgatgataacaacagctaagatatattaagcacctactgtgtgccaggcaccgttctgggtgctggaacaatagcaaaagaaaaacaccaggtgcggccggcaaggtggtgtgtgcttataattccagcattttgaaaagccgaggcaggcagatcacttgagcccaggagtttaagaccagcctggccaacatggtgaaaccccgtctctactaaaaatacaaaaattaggctgggcgcaatggctcacacctgtaatcccagcactttgggaggccgaggagggaggattacctaaggtcgggagttcgagaccagcctggccaacatggagaaacccccatctctactaaaaatacaaaattagctgggtgtggtggcgcatgcctgtaatcccagctacgagggaggctgaggccggagaatcgcttgaacctaggaggcggaggctgcagtgagctgagatcgtgccatcgctctgagcgacaagagcaaaactccgtctgaaaacaaaacaaaataaaacaaaaaacagcacgaaaattaacctggtgtggtggcacatgcctgtaatcctagctgctcaggaggctgaggcaggagaattgcttgaacctgggaggcagaggctgcagtgagccaagattgtgccaaggaagaaaaggaaaagaagaaaaataccaggtgcattgtaagtacgttacagcagataactcttggaatcctcagtggggccctctgtggaggggactattactgtccccatttcacagatgtggaaacagaggcccagagggattaagtaaccggtctctaacaacaacagctccaacagcagcccccatgtactgagctgtgctctgggccctggcattcacccggtatccctcacctttcctacgcttttggttatcctctacagcaaagaacccagcctctggagaagcagtaagtcccagcccatttcccaggctcttctgccccctgggcacacctggtaccaggcatggacaggcccaaacaccgaggccattgcacatttgctgcctcagagggactcaccttggtgtctcagtttcccaagactcttcggggtctggggcccatggaacgggtaagcagttctttctcattcacacctgggacccctgctgtccccagggagggcctgaggaagtgttggccactctgctgtgtgaccttggacaaactgctgtgcctctctgatcttccaggctcaaccaactccatggggtggtggcttgctgagaaaactgtgggctaggatctgtgagccagggtctgggaggagtgaggaccattcatagaaagcctggcaactgggagcacctgcatcctgcctgggaggaccacgtggagggagcagagccaccttcacccctgtctcgggcctgttttcccttcccgctctgccctgtactttgcaagcccccaagagatggggttgggtcctgtccactgctccccctccctgttttggccacactttctcactaggaaagaaaatgaccaggaggccacattctccaggcccccaaagcctgcaccagggtctctcccaatccacatcattccaccttttcccgctgccactccacctctgtgaccccttctcctgtcactcagtccttgcaataactaaggattcagccagggttatggctctgcctcttttttttttttttttttttagacggagtctcgctctgtcgcccaggctggagtgcagtggcacaatcttggctcactgtaagctccgcctcccaggttcacatcattctcctgcctcagcctcccgagtagctgggactacaggcgcctgccaccatgcccagctaattttttgtatttttag

SEQ ID NO: 1888286 - DNA, 4001 bp, Homo sapiens
atggaggttcctgtagacctgggggcgggcaacagggctgatggtggtctgggcaaaactcatgggaaaggagatggctaggcattggtggggcacggcacagaccctcataagctagcagcaggctgtgatgtcaggccaccgtggggcaggaggagcagtatgatcacaaagaatgtgctgtccactgcttcatgcccttgacctcacccatgcccagcagccagctgtgtgctcatcctgccagatacccaagagtccacttggtggtagcctgtggtcttgaggccatggaatgtccaagcctgggtggcacccggcaccaaatgaagccacttcatcttgggtgatgagactcagtttgccacagccagggtgtagagagctactgtgagcacgaccagcaagcatgcgaaggccggcaggctggagtcttgaagcataggcctcaaagaggcactgtcctccaagtagtgacttgtgggtacccttgtcaaaaatggctgggatggccacggtcacaggtccatgccgtaaagattatggcagtgcacatccacagcactgggtgcttagtgtagacgcagcggcatgtgacagccacgtgatgttaacacagaacagcaagaggccatatggaaacagtagagactggccacgagggccacaatttgagagctgagtccaccgaaccacgcagagcgggagtgcacagaacagacagcagacagcagacagcagacagcagacaacagagcgcccaccatgggcctgagcccagatccgccacccgtaggaggcatgaggaagcttatgtaggccgcacatcccaaggcagcacttagccagactggaacccgtagggcctagaaggggtctccgtgggccaccttgcgaggcctcccctggctctgcagggcctatcccccagcaggtagtactgcagggggttgggccacaggtcatctttaataatctgggcaaccctgtcggcctctgggaggctgtgctgtgaaaaccagctgaagaagcttcggacagtgtcccggttcctgtgtacgagggccgggggttcctggccccagtgccatcggatgcgagtcgcaatagacaccactcggcctgaggctctgcattcatactccttcactatcaccttgttctggaagtaggggttgctccaaaagcggaacttgaatttgcaacctgtcctagagtgcctgagctccctcacctccaaattcatcaggtagcagagcatgtcttcatctcgagggctgatcatggctgagagctgcgggtggttcaggaaggcggtgacccagaagcccggaatattctggatgatgaagctcctacgggcgaggtacaacctgtgcatccgcccaaacctgcgctcgagcgggaggtaggccctgtcggcctgggcgctcacggcctccgcctcccactggatggcctccagtgggtccacaattagggcaccaaggttcaggagccgcgggccctcctgggcctccgctgccacctcctgcttctcctccccctcctgctgcttctccacctcctccgctggctccttcttgaagatggcgccctcctccttgttcgcgtcctcggccttctcgctggctcctgcccgagtccctagcccctctgcaccacaggtttctggggcttcgtcccggacccggccattttccaggctcggagtagtcgccgtggaggccgcttccccgcgcccaggggaagggaaggcggtcccggggcccgctgcggggtggagggacccgcgccccccagcttctcgggcccgggccgcggggaccgtgcgcgcgtccccctcccgggcaaggccgggcggcgggcgcgccgcggcttctggggtccccgccctcttgtccgccatcgcctgcgggagcctctggcctggaggggctcggggcgcgctggcgactgcgggctcggcgacaggggcggctggtggcgggaggacagtgggaggaaggctccgccccacgcgcccccctctcggatgtgattcgccggggtctcccgcagccggggcgagcggcttggaagcccggaggaggggtacggaactgcccgatggggatgcgaccgcgggcgccagacgaactgtccccacattcgttggcgctggcggtggaggtggggagaagtgtgtaccaagcaagagtcagctcggagcaaacaccaggggacaggcccagtcgctggtcctggacaagtaaaactttcccatcacaaccaccacgccaggcgattgctcagtgttccccatctgcggtgggcaggcaggagtcgcccggcttccacactcgagtggcgctttggggcagttgtaggacactctcggccttacaggggataaattactcaggcacatgcagagggcttaagaggtatctcctgcaaagactgaccagactgaaactgggagcggcagataatggtaattttctgacacacaaaggtgatcaacacgttcatgtagggaaagcaggtgcttgaaatattcatgtggggaaaataagcaaggtcagagtggaaggatctggggtgagagagggtcttaaatgctacaaaccagggagcgagtgggcatctgcctggtttccccaacaggagttggttcctcctgggctggttggcagaagcgaggtggaccttgcttcactttgtgctaggcccaaaggctacccttccaaaggtggactctagcttgaagtgcaggaactgtacctggcaggctaagagctggattggccagccctcttagtcctcgatcctgcaaatctgtgttcctgtggtctcagctcccaaactgtggcctatggaggtcagtacctccaatccccctccacctctgcgtggaagtccttgccacctcttccagaaagctttcagccttttcctgacaaatggatacaacagctccctcatctgagccctcagacctatactgtggtatacactccctagggagcaaggtggatttccttagggtcctagctagggttttaacctactggggtggacagtgaacatttgtcaagtggaaggtcaaaaatgaagggtcagcccacttcctttgtacataaaacacctgcacttgttaacggccccataggctcttggctggactgcaagtgacttgcactgcttggccatagacactggctccagaccacagaaaagccagttcagtctgagcccctgatgggaggatctcagcacaagggctggcacccaggatggtggtaacgaccttcattagagaccaccaaagtcaggtgaagctatgtaagcctctcagcagtctgcctgaacccggtggttgggcacaagtataggtaaggtcaggtcctagctgtcaccagctgtacaccttgggcagtgactagggtgaacatttgtcctttcttggacaaccagcatcaattcttcatcttaagagtgccccaaatttcctttgagaaaccactcctgtttcagtcttgttgtcactggcatatggtaactggtttggggatggcacagaatcccatcaaggccaatgaaacaggatgcttattggggcttctgtggtgagtcctctcctgagagcccagaaagggttgcttccttctggctggcaatgtgtgagaatggcaggtctggaatccaggcagcattctgctcactcccacacaaaggggaaatctactttgtagggcctgtggatgaagtcacaactacacaagacagagcagagagaaataggaatgctgaggccagccatgttggagccactggatcaagcctaacccaaagactgctctacatctggcattttccagttacatgcaatttcagtgtttaaagccagtttgattttggctgtctgactcttgcatccaagatgattaactgatagaattatgccacttacctcaaagacatgcaaatatgatatttaacttaaaagtacaaagctt

SEQ ID NO: 1888287 - DNA, 4001 bp, Homo sapiens; identical to SEQ ID NO: 1562217

SEQ ID NO: 1888288 - DNA, 4001 bp, Homo sapiens; identical to SEQ ID NO: 1562219

SEQ ID NO: 1888289 - DNA, 4001 bp, Homo sapiens
gcccaagcttgagggcagtggtgcaatcataactcattgcagcctcgaactcctgggcttaagggatccttctacctcagcctcccaggtagcaggaactataggcatgtgccaccatgcccagctaatttttttattttttgtagagacaaggtcttgctatgttgtccagactggtctcaaactcctgggctcaagcgatcctcccaaagtgcttggattgcaggcatgagccacttcgcctagccaagcctgcatttttttgagttcctacatcatttgtccacaaagatggcttcagagaggtggtcacatgctttgctctgcttcctcttggcactgaccttgatgcagccttcacatgagatttgagggtccgcatggatggcctgtgccgccctcgctggcgaggctcctgtgtgcccctggctttctgggtctgtgcctctccagaatcttgtcttaccctccggtgtgcttgtgttcttagaaaagccccagcatggccgggcatggtggctcatgcctattatcccagcactttgggaggccaaggtgggtggatcacttgaggtcaagagttcgagaccagcctggccaacatggcaaaaccccatctctactaaaaatacaaaaattagctgggcatggtggtgtgtgcctgtaatgccagctactcaggaggctgaggcatgagaatcgcttgaaccggggaggcagaggttgcagtgagccgagatctcaccactgtactccagcctgggcgacggagtgagactccctctcaaaaaaagaaaaaagccccagcatgtagcaaaagcatttcttggtgagtgtgggggctggtgattcccaccttcaccctgtcatggtctcagggaacagcctgcttcccaccagcagcttgacacccacagtgtgctctggctgctgggagcccatctctcggagaaaccctgtccacccaaccccgagagccctagcgtgcagtcagcgtcagcacggcgctcccagatgagggccggactgcctccccttaagcagctgtgttggaggtactgcccagaccgctgcaggtccctggggatctgcatttctaacaggctcctgcccccaagactgctctggtggaaaatccagcctgggagcccctggagtggcaggccctgtcctgggtacaggtggagccacccccaggagttgcgtgtgtttttcttaattgaaagacttcccccaaaaggaagtggtcttttcactacccttgccagaaacatgctaggcaccactgggctctgtttctgtcccctagaaaatgggaataaaatttcttttgctgtcacctggctctgaaggcagtttatttctcactagagcctggacccaggcacagaacagctgtaaacacgcagagtttaagtccacggacggagaagactcaggacctcagagccttgctgtggccctgctgccctccagagatcttccaccccctccatgaccacagggtctgtgggcacatgtctcttccccttcctgtgacattgactcggccctctgaacgcaggtcagggccatggtacccctgcggtttggtgggggcaaaggggcccaggcagcaccattctccaaatctctcctcccaaggtgcaaaggtctaccctgtggctctgcctttggccattctctgtcctcactcgcaggggcttggctctccagtcgcccttccagcccctgagtaggtggaagagaggttggcatcagaaaagaagtagatgaaccaaatggccaggaagaagaacagctgctcacagtgttccatctccctgcagctgggctgcgaggccccagagcacctggggtgtggggcttagtagcttctcccagccccacacctgccctgcttcccccgtagctctccagcttgaggcctcccagcggctgggcacttttccattccccaggagatgggccttctgacgctcggtggctgtaagtaggtctgcagacaaagagtcctgccctggaggaaaccactttgcctgcccggcctcctgcctgtggtattgtgacattgtgaggctgggctggctgccattgtgatggccactggggtgggaagctgcttcaggctgatttctcccccaggactcctgtgggccttcgttgagcaggtcctggcttcagagctggccccccccggctaggcctgctgtcacctcacctggctgctcagcgtgtttgccagtgcaggctctttccttccagttctggattggaaggggcagggctgggttgtgaattagtgaaaaccgcactgtccagtagagtagccactagccacagtggctatttaattaaaagtaaatgaatttttaaactcggttcattactcacaccacctacatttaaagtgcttgatagtcacatggggttagtggctactgggtttcggccataatcccaaaagacacagtcccaaaggccataacaccgaatgttgaaatccctaaagatcaaaatccctgaagtctaaaatccctgatgtctaattgaatccccaaaccataagtgacagatttgaaattaggtacaattaagtcttcttaaatttggacttttgagattgtgatttttaggatttcagacttcagggattttgatctttcaggatttcaacatttaggattatggtgatggggatcctgttttgggagttatgatcagcacaggtgggtcctatattggacagcacagatagagaccatttccaccatcaccgaaagttctcctggacagtgctgggccaaaataagagcttgtcgcccttccctcttatgaactgtcacctgggagaggaggaaagcccccccccccatgggggcaggagagcaaaacaatggtgtacaaaatcagacaggcttgaaccccacctgccttcctcccccgctgggcagaagcggtgcacccaggctccacctggctgtaatgcactccctcccttgcagagaggtgcctgaaatggctctgtctgtgccaagaggggtgacaagatctccagagtggcacaggactaaggtgaggacaaaggaggaagacttgggagggtcaagtttattccctccgggttttcaccaataataggataacgctacccttaacccggctatcaagtgagcaccacacaaacatcttgatgttttccctttcaatgtttttctgtaaagaaaaaaatatttctaggtatatagtgtgtgggtctgttgcctgctatttctaacactatctcatggacatttgcctttgtcgttagatactcttcttgtaaagctcatttgtaggccgggcacggtggtttatgcctgtaatcccagcactttgggaggccgaggtaggtggatcacctgaggtcgagagtttgagacctggccaacatggtgaaaccctgtctctactaaaaagacaaaaaattagccgggtgtggtggcgcacgtctgtaatcccagctactcaggaggctgaggcaggagaatcgcttgaacccgggaggcagaggttcaagtgatctcactagccaggatcgcaccactgcactccagcctgggcaacaagagcaaaactccatctcaaaaaaaaataaaaataaagctcatttgtaagaataagtcaaggtagccaggaaaactctgaaaaagaacagtttggtttgtgggtggggagaactaacccacgaatacacaggcagatgaacagaacagaatgaaaaacccataggcaggcccaactacacatggaaattttgtgtactgcaaggcaggaatggtggaaaactgacctttccacaggtggcgctgcagtcactgggcgaatgaaaccatggaagaactagagataaatggaaaacgagagaactccttcgcaacctgggagtgaggaaaactgtcctaattcaaaatccaggccagatgcggtggctcacgcctgtaatcccagcactttgggtg

SEQ ID NO: 1888290 - DNA, 4001 bp, Homo sapiens; identical to SEQ ID NO: 1562223

SEQ ID NO: 1888291 - DNA, 4001 bp, Homo sapiens
tcccctggccctgcgtcccttcaggtccacaccctcccagtgggcagtgactaggaactttgcatggctggagtctaatagggcctgagtctgttcctctgctggttccaaagaggcgttgtttttttgttttgagatggagtctcactctgtcgcccaggctggagtgcagtggctcgatctcggctcactgcaacctccctttcccgagctcagttcaagcaattctcctgcctcagcctcccgagtagctggaattacaggtgtgcgccaccacgcccggctaatttttttttgtatttttagtagagaggtattttgtcaggttgtccaggctggtctccaactcctgacctcaggtgatctgcccgcctcggcctccgtgggattacaggcgtgagccaccgcgcccagccaccaaagaggttttgatttaacccgaggtggggcaggccaacgctagataagcactgagagctcttgagaaaggcactcctggatgacacaggttggtggcagcagccatctgggcctgccctgtgcacagacggtgggctgggcacggtggccctcgctgtgtcccacgaggcagagactgttgttatctttctttggtgtggttaccaagggacaggagggaagctccaggcagtgaggatagattgcagcacccttctccaggggccccggtctgccctggaactgcctcttgtcttaggcacatttcttgcactttgtgtcctgatgcttgtgccatcgaggacttcctctgccccagcctagggcttttctcactgttccccgagcgtgtccccaacgttcctgcgtctgcccctcttcaacctctgctgctgcccttagtgttccagagcaggctccagcttggaggtctgtgcacgggtggaggtctgtccccagggctggggttcctccaccaccgttccagtgcctcctgccacatcctcccggcaatcagtctgtccatcttgcctgttgtttattgtctgcttgccactcgtgactctgtcctgggcacctgcccccagagctggcccgtgctggtgcaggaacaggtcctttgtggtgttagcagtgactcctggctgcggttgagatggagtctggggctgtggaagtggggagcagagggaggctgcccatgatctgtgcagggcaggtcctgctgagggaaggtttcctgagtggtggggtgggccagggcaagcccccaacccccagtgctcatccagcctgagaaagcagccctaatgactctccctgagtcagtccggcaccagtggggtcaggcctgcattggctcctgtgggctagctcctccctgctccctcctccccccagcctcattttagttatccagcaaacttcccttaaacctgacctgtcaggaggtgccgtgctacaggcacccagcaggaaggtccgtgggcgatggtgaccccaggggtggtagaacaggcctgaaccacagcaagggagtgcccgagccttcctttctccctgtgtgctctctcccgtggctgtttcctcagtgtcggtttcacatgccctgcgctccctgctgctggacgtttgcttctggtttccttggcattgtggatggttcgtgaggggcagccctgcctccaggtctccacacatgcctgtgcttatttttcttcctttcttttttttttggagatagagtcctgggctggagtgcaatggcaccatctcggctcactgcaacctccgcctcccgggttcaagcagttctcctgcctcagcctcccgagtagctgggactacaggcgcccgccaccacgcccagctaattttttgtatttttagtagagacggggtttcaccatgttggccaggctggtcttgaactcctgacctcagatgatctgcccgctcagcctctgaaagtgctgggattacaggcgtgagccactgcacccggctgcctgtgtgtatttcttttgttttgttttgttttgtttttgagatggagttttgctcttgttgcccaggctggattgcagtggcgcaatctcagctcacagcaacctctgcctcccgggttcaagcaattctcctgcctcagcctcccaagtagctgggattacaggcatgtgccactacgcccggctaattttgtgtttttagtagagacagggtttctccatgttggtcaggctggtctcaaacgcccaacctcaggtgatccacctgccttggcctcccaaagtgctgggattacaggcatgtgccaccgtgcccagctaattttgtatttctagtagagataaggtttctccacgttgaggctggtctcaaactccgaccttgggtgatccgcccgcctcggcctcccacagtgctgggatgacaggcgtgagccaccgcgcccggccacctgtgcctatttcttgacgatgacatcagttatggggcctgatcaccgatgaggcatctgccttggactttatgagctgacccacctgtaatgaacctgctgttagtccttgaggaggaaactgaggcaagctgtggctccgtggaggggactgagccacattcgactgtgctgtggcccagagtaggatggctgaaggtgagggaagggcaaggggtgccctgaagtgactgaggcagcctccagcaccacgggcctcagacagccccacctgcaaggaggaagccttaggcagaaggtgctctgggcagcgcttaccccagcgcggcatcagcacctgtgggtggcgtgggaatgggagttctctggaccggcccagctcaggaagttagaacctgggaggaacaccagtgaataggaccagggcaggctacccctccccaccgtgagcggcccctccctgccgtgggctgctgtggccgagagcagccccgtggaggggcatgttggggaccacgtggcctgcagcgaggcgacgtgattccagggtggggcctggtggttccattcacagctgcgtgcctgggctcctccgtccctcgcctggccagcacagtgctggcttccccaggcctgtagccttgcctcttggccggctagggcagccagggtgcatgcccatgccaggcaagaccagtctgcgtccactctgctgttcagacagcccagccagtggcatggcccccaggagcccggactctgcgcccctgctcaggacagcctccgcctccccgaccctgggctgtctcctgcccacttcccaagtgagggatgtagccgcctcctgggagcagaatgaggagaggaagcacctgtggacacagacagatgggccggtcctgcctctgaggcagctcccaggagtggcctactattgaggagtatgacctccatgtggagtcttcccttttccctgagcttctggcagcccctgcctcagtactagaagctccaagagaaacccatggtaggaggaagctgacacccatggctgacctgtctgcccctgggagagagcttagggctgccaggacttctctgtgcacatccttgactgactctgcggagggtggggccgaaaccctgtttctgtgggcggggaggtggctgtgtcccctgtgccctgctgagccctgggcggggaggtggctgtgtcccctgtgccctgctgagccctgggcggggaggtggctgtgtcccctgtgccctgctgagccctgggcggggaggtggctgtgtcccctgtgctctgctgagccctgggtggtgagccctgggtggctgcaggtccctgcaggatcccccgtgagtgggggtagggcaaggcagttattttcagatggtgccagagggtggagtttcagatttgtttatgcctgtcggaagcactctggggctagggatggggtgcccagctcagcactgacgttcaggacacctggccaagaggcgcctcagatatccttgtcctgctgcggggggttcactctgtagccccaggcaggccggggtactgtagctt

SEQ ID NO: 1888292 - DNA, 4001 bp, Homo sapiens; identical to SEQ ID NO: 1562225

SEQ ID NO: 1888293 - DNA, 4001 bp, Homo sapiens; identical to SEQ ID NO: 1562228

SEQ ID NO: 1888294 - DNA, 4001 bp, Homo sapiens
cttcaagggccgccccactctgggcctcctgtgtcacggccacctttgtaattgacattacgttaatgtttgccagttccatgtatttagagttttcttttctttttttttttttgagagagggccttgctgtgtcacccatgccggagtacagtggtgccatcttggctcactccaacctcgacctcccgactcaagggatcctcccacttcatcctccagagtcgcggggactacaggtgtgcaccaccatgcccggctaattttttctattttttgtagagatggggtctcaccatgttgcccaggctggtcttgaacttttgggctcaagccatctgctcgccccggcttccctcagcgttgggatttcaggcatgagccaccattctggcctggccttgaaatcttttctcagagttaagcacgtgtcttttaagtcctttccagaaatctttaaaattgtatcattgagttaagccacactggccaccacacggctaacttcgtaagggagaagaggggagaggaagggaggtcgcggagctcctgctgtctcccggagtcctctccacctgctgggctctggcaggtttgctgaggaccgcgtgagggcgctgctgtcttctgggctcagggctcctgtgagctcctgaggcctggacccaggggtggcctttgttgctcccttgggcataatatggggggacacaggcaagatgtggggccaccaccccagcaggcctgtgccgaaccccaggaccccattcctggaatagacgcggccatgaggactggacgcgctgggcgtggcccacggcggggcccccagggctgcgcccccagggctgctgaccttgccccccttggctccaccgagtctgcacctttagtgcccacttcggccaagcccatggcgaagtgccccaggcgctgcggtccctgcgaaggggaacgtggaaggcgaacgtggagagccccttgagtgcctctgcagcaccggagcaccgagccgccagctcccaggtcttacctcatgaatcatggagttttctttcttttttttttttctttttctttttttttttttttttttttttgaagcggagtctcgctctgccgcccaggctggagtgcagtggcgccatctcggctcaccgcaagctccgccccccgggttcccgccattctcctgcctcagcctcccgagtagctgggactgcaggcgcccccaccacgcccggctaatttttttttgtattttttagtagagacggggtttcaccatgttagccaggatggtcttgatctcctgacctcaccatccgcccgcctcggcctcccaaagtgctgggattacaggcgtgagccaccgcgcctgctggttttatttcttaaggcggccttggcgcctgtcctggccgagcgctggaccgaggagggccttctctgggggaggctctgtccgcctcccacccacgctggaggagctcaggtctcatggggaggcaggactcgcttaggggcgggaggtcacactgccccggagcccaggccctgccctaggaggaagagcctggcttcccccttccctcccgccgggcccggggctgagactccttgtgggtccggatgaccctgtccgtgacctccgccctggccccgcttccgccccacgcccccctgaagccccgggctccgtggcgtctgccttccgggccctcccctgcgctcagcccccggggcaagggctgggaaggatggcttgactggcctacagggtacaggggacccctgacaggttcatcgctggggccccatgggccccccctccgtctgtgccgtgcggatgtggagactgaggactcctccatcgaaggcggccggtggtgaaatccagtaatctgggtggggtccttaccgcgctgtccgcggggtttcctcactgctcaggcggctgctgctcatccacgccacctccgtcggtccgttcagcttccgtgagtgtcccctgtgggaaggtccgttcagcttccgtgagtgtcccctgtgggaaggtccgttcagcttccgtgagtgtcccctgtgggaaggtccgttcagcttccgtgagtgtctcctgtgggaaggtccgttcagcttccgtgagtgtcccctgtgggaagggcctgtgccgcacaaggtggggacttgggcacacggcctcggaggccagacaccgggcgagccccgctctgggagtgagacccgctcggagggggagcgagccctgaggcgccgcctgtaagccagacccgctgcctcacacagacgggtgcttcgcttgttttggcctagtacagcttttaagcaaaaagtaactggttagggattctatcatattgcttgatgtaaacaaatgcggcaaaatgttaaaaaatggagtagctgaaggccgggcgcggtggctcacacctgtagtcccaacactttgggaggccgaggcgggcagattgcttgaggccaggagttcgagaccagcctggccaacatggtgaaaccccgttcctactaaaaatgcaaaaattagccaggtatgctggcgtgcgcctgtagtccgagatactggggaggctgaggtgggagaatcactcgaactcgggaggtagaagttgcagtgagccaagatggcgccactgcactccagcctgggtgacagagcgagaccaaactgactcaagaagaaacagaaaatctgaatagacctataacaaataaagaatcagtagtcaaaaaacttccaatgaaagaaaagttcagaaactttcactacagttattgtactttttagcttccaaaaagaaaagtcaatttcaataaagaaattgaatcaatagtcaataaacttccaacaaaagaaaagtccatctctgtctctctctatatatgtatatgattgtatatatcacttcactgttgaattctatcaaacattttaagaattaacaccaatcctggccaggcgtggtggctcacgcctgtaatcccagcactttgggaggccgaggcaggtgcatcatgaggtcaggagatcgcgactatcctggctaacacggtgaaaccccgtctctactaaaaatacaaaaaattagccgggtgtggtggcgggcgctggtagtcccagctactcaggaggctgaggcaggagaatggcgtgaacctgggaggcggagcttgcagtgagccgagatggcgccactgcactccatcctggccgacagagcgagactccatctcaaaaaaaaaaaccaaaacaaaacaattagctgggcgtggtggtgggcgcctgtagtcccagctacatgggaggctgaggcaggagaatcgcttgaacgtgggaggtggaggttttagtgagccaaggtcgcaccgttgcactccagcctgggtgacagagccagattccatctcaaaaaaagagaaagattccatcatattccttgagagcatagtgttgcctttattttaagcaggtattacaaccttcttatttaggttctattttttttgaagttaccatttcaggtcagagttagccatagcagtatctcagatttaaaatgtacacaaatagttttcttgccttgttaagctgattagctttcttttctttcttttttttttttttttgagatggagtttcactgttgttgcctgggctggagtgcagtgatatgttctcggctcactgcaacctctgcctctcgggttcaagcaattttcctgcatcagcctcccgagtagctgggattacaggcacccgtcaccatgccaggctaatttttttttttaacttttagtagagacggggtttcactatgttggccaggttggtctcgaactcctgacctcaggtgatccgctcgtctcagcctcccaaaatgctgggattacaggcgtgagccacctttcccagccagctgattagctttctgagaaaattataatatttttaaaagttg

SEQ ID NO: 1888295 - DNA, 4001 bp, Homo sapiens
aaccaaacacccctgtcttcagtgcttacactctgagtacaggcccatgatagaagccagtgtggctggaagagttgaggaagtagttggcatttactgagttgggaagtgaacaagtaccaagagattgcattttaacacaagttaccacaagttacctgacaaaagaacaatctggaacaataagcttcacatgtgttcccatgaagcccagactttgtaaacgcctcactcctggactctagcaaaaatattagttatgtagtcgggcactggtttgagtggctagttcaacagaaaaacacatttggctttccaaaatatgtcaataaatcatccctccacttggaaatttaagcgccccaacacacaggaagaatggaatccaaaaatatgtttaagtggcattaaaatgttaaacgcctcttcactaacaaggttctttcacttcaggcatttctcttaaacctgtttcttcaccagaaacctagttccaatatttgaactgtgagaataaaacattcagaacatgtttttcttttttttttttttttgagacggagtctggctctgttgccccgactgtagggcagtggcgcaatctcaactcactacaacctccgccgcccgggttcgggcaattctcctgcctcagccttgtgagttgctgggattacaggcgcgtaccaccacgcccagctaatttctgtatttttaatagagtcagggtttcaccatgttggccaggctggtctccaaatcttgacctcaggtgacccatctgccttggcctccccaagtgctggggttacaggcgtcagccacagcgcccggccgtcagaacacttttttaaatacctaataaatgctcgatagaaagtgctttgttaaatcccacgttttcctagaaaactaaagcttctcaaagcacgtgttttctacagtagacccataggagacaaagacttactcgtcaggagatcgaaggttgtagatgtctgcacgtggcttccttggaggtccagtggtgactccctcttccaaaatccattctgtacccgctggctgctctaacctgtgaaccaacaaataaagggcgttaaccgccatcttcccacggtcagaaacgaacaaggccgggccttttgaggccgatgtatcagaactaactggcaaaatataagacgtcagcattgtcgatctgatggggaaaaaagtgaagtcatcatttacaccagccaagggcttctcaggcccgtgcagaaggcagtggcttttccagctccagaaactcatttctcccacgcccttaaggcctatttggggtcagagacggagaagccacgagaaggagattagggctggccgcagagacgacggcacaaagaagggaagggaggaccagaggtctccaacgaagaacatggagtttccactcaccacacacaaaacgggaacttacgggcaggacaatagcgtatgaagcctgactgcaactaggagaagtaccacactccgggcaccgcagacgcgaaagaacgaatggcttcctgaacctcccttatataaccaaagatggctttcgcacctgcgcactggacccgaaacgctctctttcccgcccgctccgcgcgcgtcgctctgggaaatgtagtctcgagcagcacagcccgaggcgctctagtagttgtccaggccgcgtctagccccgcccccttccctctacacgccgggccacccgggcttgtccgcttcctcgccatgtcgcgcttcacacgcaccaaaccgctcgacgggttccccttcctctggggccggctgaggcccgcaaaggccttgggcgcagtcatctcccgccccccgcggtccgctcccctcagccgcgcccgcctgagcccgccggctccgccgccggggggagctgaggtgacgccctcctcgagggcggaggcgccggccgtgcctgggccaggccctcgtgctctccaccctgggcccccgcctcctccttctcctcctctgggccgcccgcccggctccgcccagggtctgcggggaacggaaaccgaaagtgcgcggcgccgggcggggccaccgacctgcctgggccgaagccccagcactcgccggcggcagtgaaaggacgcgccggagccgggtgagtggccccgcaactgcccctgcccctgattcttccttgcctcgccgcgaaccccggcgcccgcgccgacccgccactgcctctgcccgtaagacctgtcaccctctcaagcccccaacgcacccgtcacccgctcagagcccctggcccctcagcgccccgtcgccccctcaatccccagacccccatcacccactcagagccttgtcacctctttggcccccagcggcatcagcacccactcagagcgcctctcagcgccccgtctccccctcagaccccagacctccatcgcctactcagcgccccgtcacccactcagcccctggcccatctcagcgccccgtcgccccttcggctcccctgtactctctttagtgtccccatcccctcagctggcccgtcgctctccccagcacccccgacaccgtcaccgcttctgccctcagcacttcgatctcctctgcccctacccctgtctgtgccctcccttctgccactcgcacccccctcattcctccggcctcacctcctgtcaccttatcaatccccctcttctacagagcacctcggcacccccttcagcctgctccctgcccccaccccgccgcctccgtcctcagcaagcaccccctggtgctcgctaccaccctctccccaaggcccccataaccccgccacctcacagccttggcgctccctgaccccataacatttccattagggaccgtgggctccctgggtcagggattccccaggaccctggagacttcccccaaacccagctctgcctccgacctcagcctcctgcgtcccactctggtgatgactagcccctctcattctgactccaggccagcttgatcatcactgattttcttcttcgtgccctttaggccttgattccccccaccaaaaaaaaacacttcagtctgttttcgatcccagcatttcctgttcatgtctactcctcccttccttcccttgccttttttttaacatctttttttcttttcttccgtttcttttaaattttctggagtttctattttagcatttttcaacaaggggaagaaggaattttcccctcggagaattgaaaataaacaaacaaactctaaatactgagcctgcgccaggagggctgggtttgataagatgagggaggggactcaccagagatattcccagggggaagaaaagagactcctttttcagatgaggaaaaaagctgcccctcatataatgccaaatgtagtcacagtttccaattatgaatattttagaactcagtgaagacagtctcaaaaatccctttgctgaggactctgagtcacccactctttccttagccccagcccacaccatgtgtatgagttgggttgagaagctcccttaaaggggcttcctcttcctcttacaggaccagtgtcaaaaatcaccaaggtagaagaatgaggaggaagaaagaatatcagatttctagctggtcctgaggaaacagcacctcgtagttgccaaacctcctggttattgaaacatgtaatttctttctcttgattcagtagagcagagagcttaatcatttggctccattccaaagagtaggctaaggggataactgctcactaattatttataaactgtagggtactgcaagctattgggtactatataagtggcagatatgtaaatgccagataaggtggtgagcacatggttttggattaacaaaaatgtactcctttttgtcctggcaacaatattgtctgcttcttaggaaaggaaaatgaaacctagcaactgattaagtaacttggctaaaggcataaaccaaaca

SEQ ID NO: 1888296 - DNA, 4001 bp, Homo sapiens
ctgaaaagcagctactaccccctccagagcctgtgtctactcagccagggaagacgtgttggcaccacttaccaattttatatgtatatatatattctacttccaacacccgcattcatcctggttcaatcaaagcctggttttggccaacaataaacctgaaatgaaaaaacagaaaaatgagctcccatcagctagatgcccaggggagctgggacaaaggagctgctcaagctggcatatcagacagaaactggcttagaaaagttagatcaacatagtcgatctgtcggggaaaaaagctaagtcatcatatatgccagcaggaagttcttgagtgaggagtaagatttgaaagccatgaggagtaagatttggttggtatgcttcatatttgcaaatttgcattcggtgtttgagcacttctgtgttgtatcctgtagctggcaataacttggtagccaaaccaaacacccctgtcttcagtgcttacactctgagtacaggcccatgatagaagccagtgtggctggaagagttgaggaagtagttggcatttactgagttgggaagtgaacaagtaccaagagattgcattttaacacaagttaccacaagttacctgacaaaagaacaatctggaacaataagcttcacatgtgttcccatgaagcccagactttgtaaacgcctcactcctggactctagcaaaaatattagttatgtagtcgggcactggtttgagtggctagttcaacagaaaaacacatttggctttccaaaatatgtcaataaatcatccctccacttggaaatttaagcgccccaacacacaggaagaatggaatccaaaaatatgtttaagtggcattaaaatgttaaacgcctcttcactaacaaggttctttcacttcaggcatttctcttaaacctgtttcttcaccagaaacctagttccaatatttgaactgtgagaataaaacattcagaacatgtttttcttttttttttttttttgagacggagtctggctctgttgccccgactgtagggcagtggcgcaatctcaactcactacaacctccgccgcccgggttcgggcaattctcctgcctcagccttgtgagttgctgggattacaggcgcgtaccaccacgcccagctaatttctgtatttttaatagagtcagggtttcaccatgttggccaggctggtctccaaatcttgacctcaggtgacccatctgccttggcctccccaagtgctggggttacaggcgtcagccacagcgcccggccgtcagaacacttttttaaatacctaataaatgctcgatagaaagtgctttgttaaatcccacgttttcctagaaaactaaagcttctcaaagcacgtgttttctacagtagacccataggagacaaagacttactcgtcaggagatcgaaggttgtagatgtctgcacgtggcttccttggaggtccagtggtgactccctcttccaaaatccattctgtacccgctggctgctctaacctgtgaaccaacaaataaagggcgttaaccgccatcttcccacggtcagaaacgaacaaggccgggccttttgaggccgatgtatcagaactaactggcaaaatataagacgtcagcattgtcgatctgatggggaaaaaagtgaagtcatcatttacaccagccaagggcttctcaggcccgtgcagaaggcagtggcttttccagctccagaaactcatttctcccacgcccttaaggcctatttggggtcagagacggagaagccacgagaaggagattagggctggccgcagagacgacggcacaaagaagggaagggaggaccagaggtctccaacgaagaacatggagtttccactcaccacacacaaaacgggaacttacgggcaggacaatagcgtatgaagcctgactgcaactaggagaagtaccacactccgggcaccgcagacgcgaaagaacgaatggcttcctgaacctcccttatataaccaaagatggctttcgcacctgcgcactggacccgaaacgctctctttcccgcccgctccgcgcgcgtcgctctgggaaatgtagtctcgagcagcacagcccgaggcgctctagtagttgtccaggccgcgtctagccccgcccccttccctctacacgccgggccacccgggcttgtccgcttcctcgccatgtcgcgcttcacacgcaccaaaccgctcgacgggttccccttcctctggggccggctgaggcccgcaaaggccttgggcgcagtcatctcccgccccccgcggtccgctcccctcagccgcgcccgcctgagcccgccggctccgccgccggggggagctgaggtgacgccctcctcgagggcggaggcgccggccgtgcctgggccaggccctcgtgctctccaccctgggcccccgcctcctccttctcctcctctgggccgcccgcccggctccgcccagggtctgcggggaacggaaaccgaaagtgcgcggcgccgggcggggccaccgacctgcctgggccgaagccccagcactcgccggcggcagtgaaaggacgcgccggagccgggtgagtggccccgcaactgcccctgcccctgattcttccttgcctcgccgcgaaccccggcgcccgcgccgacccgccactgcctctgcccgtaagacctgtcaccctctcaagcccccaacgcacccgtcacccgctcagagcccctggcccctcagcgccccgtcgccccctcaatccccagacccccatcacccactcagagccttgtcacctctttggcccccagcggcatcagcacccactcagagcgcctctcagcgccccgtctccccctcagaccccagacctccatcgcctactcagcgccccgtcacccactcagcccctggcccatctcagcgccccgtcgccccttcggctcccctgtactctctttagtgtccccatcccctcagctggcccgtcgctctccccagcacccccgacaccgtcaccgcttctgccctcagcacttcgatctcctctgcccctacccctgtctgtgccctcccttctgccactcgcacccccctcattcctccggcctcacctcctgtcaccttatcaatccccctcttctacagagcacctcggcacccccttcagcctgctccctgcccccaccccgccgcctccgtcctcagcaagcaccccctggtgctcgctaccaccctctccccaaggcccccataaccccgccacctcacagccttggcgctccctgaccccataacatttccattagggaccgtgggctccctgggtcagggattccccaggaccctggagacttcccccaaacccagctctgcctccgacctcagcctcctgcgtcccactctggtgatgactagcccctctcattctgactccaggccagcttgatcatcactgattttcttcttcgtgccctttaggccttgattccccccaccaaaaaaaaacacttcagtctgttttcgatcccagcatttcctgttcatgtctactcctcccttccttcccttgccttttttttaacatctttttttcttttcttccgtttcttttaaattttctggagtttctattttagcatttttcaacaaggggaagaaggaattttcccctcggagaattgaaaataaacaaacaaactctaaatactgagcctgcgccaggagggctgggtttgataagatgagggaggggactcaccagagatattcccagggggaagaaaagagactcctttttcagatgaggaaaaaagctgcccctcatataatgccaaatgtagtcacagtttccaattatgaatattttagaactcagtgaagacagtctcaaaaatccctttgctgaggactctgagtcacccactctttccttagccccagcccacaccatgtgtatga

SEQ ID NO: 1888297 - DNA, 4001 bp, Homo sapiens; identical to SEQ ID NO: 1562255

SEQ ID NO: 1888298 - DNA, 4001 bp, Homo sapiens
gaatgccattagacgacttgtcacaaaaggaaatctatcaaacaacgcatccccttaaaaggattatacagactgctatgcctcatctaaccttagatttttgcctaaatcagcaaacaacaaactctgcatgcaagtcagaaaaaaaaaaaaaaagctgctccaatcctataagcttcctgtgcctatagttttatgctaaattgattctgacatttcaggcaattaaaagtaactccaattaattcaccataattttggctgattgctaatctaaatgtccacaattgataggctagccctatacgtcaatgaggtaagcacagaaaggagtcatggttttgaggaatgcctatgggtttattctccaccatagcaatgagatgtcaactgtgattgtgctccataaaatatagaaactgtaggtagtctaacgctgcagaagaaactcctattaatataaagataaaccaattaatctaacctactgaacatcagtggtctgttaaggagttccaccagcgaggtgagagactggcaatttttttctctaaagagctaaataatgaatattttaggatttccagccacgtggtctcgcttacaattactcaactctgtctgcttctgtatggcaacagcagccacagacgatacagaaatgaatgtgtgcgctgtgttctaatgcaactatgggcactaaaatttcttgattttcatgtgtaacaaaacactgttattttgattttttaaatccatttacaaatgtaaaaatcacccttagccaggcgcggtggctcacgcctgtaatcccagctctttgggaggccaagacgggtggatcacgaagtcaggagttcgagaaccagcctggccaacatggtgaaactccgtctctactaaaaatacaaaaattagccggggggtggtggcatgcgcctgtaatcccagctactcaggaggctgaagccggagaattgcttgaacccgggaggcggaggttgcagtgagccaagatcgtgccactacacgccagactgggtgacagagcaagactccatctcgaaaataaaaataaaaataaattaaaaaataaaaaaaaccacttagctcactggctaaacaaaatcaggtaattggcctgtacctgacagtcaatttctggtcactaatgatgaccacatatccaaattacagtaaaggtacccaagagagacaaagattagagattagtgttacgatccccgttctgccagcactaggagacaagagttgctacagcccttccgcgggtttaaaaggcggtcgacgtccctcaacctcttgctatgcctgaaaacaaccgagtaaaaggcatccaaagacctgagaacgcaaggtttcaggaaaacaatcaggaagggcaaaacatggggcagccactacacagcccctccgtcttagggcacaggtactaaacgggttgtaagagacccaagtcacatccttcagaaacgtgctggcgcgggcccaggcagacagggattccaccccggcgaaggccgcaaatggcgcgaggcgggaaggcgcaggctccaccttcccccgtccccagatcacctacagtgacctgcgcgtacaggcaggctaggaccgcgggcgctcaaggcagacatcaggcccgccgacgtctccgcgccgcccgcccggccacccggagagcctgctgcccagcgcctggcagcgcggacaacctctctcggggaggtgatgacggtccctcgcgccggagggcccagggaggaaagagataagcagaaagacaccagggaagaacaccacgcttcggaccaacgccagccacagccactgagaagtcgccgcatccggcggcgccgacacacgtttccagggctcttgagagaccataccctgggagtctcgcgggatctcacttttctcggcggcgcagggaatgagacagatcgcgggaattccacccgcgccgggagatggtctggtgacttcgcggctcctcccacgtctctctgggcagtccgccttgcgcatgcgcaggcggcggtggcaaggctacggttcgcgccagcggccggcgctatggggctgagccgcgtgcgggcggttttctttgacttggacaacactctcatcgacacggccggggcgagcaggagaggcatgttggaggtaacgtccccacccatggcgctcctctgggcggggtcagtgcgccccgccccgtcctgcacgctcacctccccttgaccccacttccaccccggcgccgcgggccgctcttgctggttgaaacctgtggagcgtgcgggtgcggaggtggctggaggcgcgcgggccctgcgggtctgctttccctggcctggcggccgcttgtcacccaatctcgagccctggagcggctgctcgcaggtgccttggcgctcgggacgcggaagggctccgtgacggctgccacggtggcggaggtgcccgtgggcgcgggaggcgacagcaaagccgcgagaccaggcgctggtcccgcccccggtcagactgtcggtgtggagctcgacagagggtcgtgtcccccatgcgactttcggggttgctgggaggagacatggtagagttagccccagtgttgacccaagaagggacacggctgtcagtaccgagcctggacttaagccctgctttagagaattgtcgccgcagaacttcttctggcctccctggcggggtggtggtcaccgtggctttctgacacgtgacacagcaaaagcccgtgctgcgagggcatgcccttcctgaggcgctcctccgcggcactgcccctctacacgcgcggaggcgctttcagaccttcccgtgttccagccccagtccaccccggcttccctttctctaccttcagcttcaaggggaaagggaaggatttatcagatgtggaaaactcactttcaaaagctaattcatccaaacctgagcgccccgtcctcttcatgcttcatcagttagtttttgtgtccctggatcttccactacctcatccgttttctttttagctgcattccactcctgccgcatattcatgtttgccctatagttttaaaaaagctgtaaaaaggatgcctccctttgggctattcttcctgctgtagatgttgcctgtctctcttgacagccatgttttcccggagaaatctatacccgttatctccttgtctctacctcctatttattactaaatccatcgtaatgtcgctttatcttcaccgctagactgaaatagacttgctggatcactaggcattcccaaaatgccggaatcagtagacatttttaaagtctgtcttcatgactttactgaggcattccacacttttaacttgttggcctccacctcaggggtgccaccctgtgccatattgcctccagtatctctcgctgcagatgttacatatttacctgtgtgttattagtaagctgagtcctgtgcatttcaattaaattattgctttaggccaattcttgctgtaggcccagagtttgggctttaaaatcagacatttgaatatgaatcacagctctcccaaaacctagctgaaagtgcctcaaggaattaaccactcggagccttatatcttcataaaatgtgaattatattagtcctcaataaccctgtaatacttgggaagcccatggttgcagtgtccactcagcgaactatagcaccttccaccctcgtacgctgtctgtccaccactgcacatgccccgtgcatgtctcagttacagctgaactcatctctcacctagactgttgctgtgggcttgtctccaggtttaccacatccagtgtgtcctccacattcttgccacagcaatatttttaaaacaaagactaaatcgtatgcctccctggtctttacaccctcacttatagtagtgctgtattttgttcagatatttcttaatgcatctgtcaaaggatatttcaattaa
